United States Patent Application Publication US 2003/0073623 A1 - sequence listing, part 4

SEQ ID NO: 17040 - DNA, 435 bp, Homo sapiens
  misc_feature (1)...(435): n = A,T,C or G
tctgtgcagcggtgcattgccttggcccagctactagtggagcagaacttcccagccattgccatccaccgtgggatgccccaggaggagaggctttctcggtatcagcagtttaaagattttcaacgacgaattcttgtggctaccaacctatttggccgaggcatggacatcgagcgggtgaacattgcttttaattatgacatgcctgaggattctgacacctacctgcatcgggtggccagagcaggccggtttggcaccaagggcttggctatcacatttgtgtccgatgagaatgatgccaagatcctcaatgatgtgcaggatcgctttgaggtcaatattagtgagctgcctgatgagatagacatctcctcctacattgaacagacacggtagaagactcgcccattntggaatgtgaccgtctgg

SEQ ID NO: 17041 - DNA, 441 bp, Homo sapiens
  misc_feature (1)...(441): n = A,T,C or G
aattggaggaggtactgggtgtccagttcacaaagacagatcttgttacatttgccacaggcagctgctcttttgccgggtaaccttgggaaagtctttcctgcagttcagtgcaatgaaaatggcacattctcctccaggtcatcactcagtcactggtaggcccagtgtaaatggcctagcattagctgaatatgttatttacagaggagaacaggcttatcctgagtatttaattacttaccagattatgaggcctgaaggtatggtcgatggataaatagttattttaagaaactaattccactgaacctaaaatcatcaaagcagcagtggcctctacgttttactcctttgctgaaaaaaaatcatcttgcccacaggcctgtggcanaaggataaaaatgtgaacgaagttaacattctgacttgataagcttn

SEQ ID NO: 17042 - DNA, 441 bp, Homo sapiens
  misc_feature (1)...(441): n = A,T,C or G
tttccattttggcaaaaacgaattgagaaaagaaattttaccaattttccttttcttgaagaaataattgtttcagataatgaaggcatattcattgcagctgaaataacactgcatctgcaacaattgagcaacttcttccatggatatttttccattggagatcttaatgaggcaagtaaatggatattggatccatttctttttaatatcgattttgttgatgatagttatttaatgaaaaatgatcttgctgaattacgagctagtggccaaatcctaatggaatttgagacaatgaagcttgaggatttctggtgtgcccaattcacagcatttccaaacctggcaaagacagctctagaaatccttatgccatttgcaactacatacctttgtgagttgggattttcatcactcttacatttcaaaacanagccc

SEQ ID NO: 17043 - DNA, 436 bp, Homo sapiens
cccacgcgtccgcccacgcgtccgcccacgcgtccgggaaagggaagaaacttgggaaaagtaaaggagaggtgctagagaaaagggatgcaatgtgagaagaatataaaatttgcatgaatttttaagatgaaatacggaaacttcaaagacattttcagcctgactgctttcagctatgcccccagattcccccagagggacgctgtcgcttgcctttgctgacaggcgacttgctagaaaagtctgggaagctctggtctacagaaggtaatgatttatttatatttctgtctcctgcaccaaggcgggagctcccaaggggagggactagatctgattcatctgtgaatcttcagtgccccagcagagaactgagcacacagcagatgccttttggatagtaataatgataataatagtaacagtaatagcg

SEQ ID NO: 17044 - DNA, 440 bp, Homo sapiens
tgacatggacttgtttatagaagacgggtcagctgtctggctcggtggtctacattctgaagttgtctgaaaatgtcttcatgattaaattcagcctagacgttttgccaggaacactgcagagacaatgctgtgagtttccaacctcagcccatctgcgggcagagaaggtctagtttgtccatcaccgttatgatatcaggactggttacttggttaaggaggggtctaggagatctgtcccttttagagacaccttacttacaatgaagtacttgggaaagtggttttcaagagtataaatatcctgtattctaatgatcatcctctaaacattttatcatttattaatcctccctgcctgtgtctattattatattcatatctctacactgcaaatttggggtctcaattttactgtgcctttgtttttacaagtg

SEQ ID NO: 17045 - DNA, 433 bp, Homo sapiens
  misc_feature (1)...(433): n = A,T,C or G
ttgtcagatctgtcaaacatttatagcttttggattttgaggtatgcttgcaacgtgtttccatgttttaatattctaagcgtaactatcttaattcagtgattcctaatcatgactgcatcagaataatttaggggaatccttttcagcatatatgctgtgatttccaactaaaatattctttcttcgtagataaaatgtggggtccaaatctgtggagtttggcttgttttgttttggagagaggaagaagcttcctggccaggcacggtggctcatacctgtaatcccaacactttgggaggccgaggcaggcgaatcacgaggtcaggagatcaagaccatcctggctaacatggcgaaaccctgtctctactataaatacaaaacaattaaacgggcgtggtggcgggcgcctgnagtcccagttacn

SEQ ID NO: 17046 - DNA, 433 bp, Homo sapiens
cccacgcgttcgggcaggagatagactgggaagcactgctgggtggtggaggtggtcagtggcaccatgacgggcccctagccacacagctgtgctcactacggggcagggagcagcctcggcaacaggcaaaggccagagtcagagcggtggggaggacaggggctgctgccccgctcctggaaagccactgcagaggggcagtggctggcagtgccaggcctgggggaagtggaagcgtcctgtctgggggcagattcccaagctagggtgacccatgggtaagggccactggaaagctggagagagcttgggatcccttccacctggggccaatggtgttgattgcagactggaggggtaacctccgctgagggtcattatgtgccaggcatggcattgagtactttctgcattgcgaccacgcagccgg

SEQ ID NO: 17047 - DNA, 434 bp, Homo sapiens
  misc_feature (1)...(434): n = A,T,C or G
tttctctttagttctttgcaagaaggtagagataaagacactttttcaaaaatggcaatggtatcagaattcctcaagcaggcctggtttattgaaaatgaagagcaggaatatgttcaaactgtgaagtcatccaaaggtggtcccggatcagcggtgagcccctatcctaccttcaatccatcctcggatgtcgctgccttgcataaggccataatggttaaaggtgtggatgaagcaaccatcattgacattctaactaagcgaaacaatgcacagcgtcaacagatcaaagcagcatatctccaggaaacaggaaagcccctggatgaaacactgaagaaagcccttacaggtcaccttgaggaggttgttttagctctgctaaaaactccagcgcaatttgatgctgatgaacttcgtgctgccatgan

SEQ ID NO: 17048 - DNA, 440 bp, Homo sapiens
  misc_feature (1)...(440): n = A,T,C or G
tttatgagaaaatagttactattttgataaagggcaaggataatcaaatagttcattttcagagaaaaatattttaaattgctaatgtacatgattgttttggttataatttatttatagaatgtatcttttctatattacattcttaatattcgccagatattatattgaccattctctttaacttcttaatgtggcatatttctactctcctttcccacaaacagcttcatctgtctccaaggttaacattctgaagctggagagtccttggagaaactctgctcagcttttttgtgacatttagaaaaatgcatttggtattctccaaaccagaatgatacattgtctcaaaatctgttagacagctgatgggtgtttttgagcaacgtcttaataattcaggtgcttctgttttaattataccattaaaaatcaan

SEQ ID NO: 17049 - DNA, 396 bp, Homo sapiens
aagaagtagatgtgtttcagggtagctctcctgtcgatgatattccacaggaagaaacagaggaggaggaagtttctacagtaaatgtacggcggcgaagtgctaaaagggaacggcgatgaacaaatgtaattaataactttctctgtgaaagctttggaaaaatctttttttttttttttttgggcaaccttgggggtgaaaaaacccttttgtgccaaaaaagggacttgttaaaaagggaacaggggacctttttttgggggcccccatccttggggggcccctttttttacccatcccctgggaaccttttcttttggttttttgaaaaagggaaagggccaaggttttttaaaacaaaaaaaaaaacctggaaaattttttttttttttt

SEQ ID NO: 17050 - DNA, 432 bp, Homo sapiens
gagcgacaatggaaaaatcacctgaaaactgggacagatgaaggaagctacagttacgaaggagagctgcaaaagttgcagcagaaaggttgggagtcccgacaggttccgtagcccacagaaaagaagcaagggacggcaggactgtttcacacttttctgcttctggaaggtgctggacaaaaacatggaactaatttccccaacagtgattataatcctgggttgccttgctctgttcttactccttcagcggaagaatttgcgtagacccccgtgcatcaagggctggattccttggattggagttggatttgagtttgggaaagcccctctagaatttatagagaaagcaagaatcaaggtatgtggtcgtggcagacggggtctccagaggagacaatgctttcttttttaaactttctttcattg

SEQ ID NO: 17051 - DNA, 456 bp, Homo sapiens
  misc_feature (1)...(456): n = A,T,C or G
gaactggccggggnttttaaaggaacccatttgacagcatcgaaacccggncgacacgcgtccggatttgtgaatatatcttctttttttccacaaacataaaagctgtctctatcatctgggcctatgtgtgctgaggttgtgcagggctgtttattcttgcagttctattgcccgggattttaggaagaaatttatatttataaacattgccttatgtgcatccctttggttgtctctctctatagttattatatatgcatattttccctaataaattataacagatatccaaaggcttttcatgtgactaggttgccaggactttccaaatttatgtactggctttattgaaacttaggttttatgtattgcatgtaaagtcatatgttcctatgtagatcattctaacttgatattttaaaatgcctcttgataataatagtcatatgttgg

SEQ ID NO: 17052 - DNA, 396 bp, Homo sapiens
  misc_feature (1)...(396): n = A,T,C or G
cggacgcgtgggctgaaacctaaattgcagatttaaaaggtactgtacaaccattatatctggaaataactgagcacctttttgtcacttagaataatatgtactactacttgagtgagcgcttttggaagttatatcaagttctagtgtttgcttcttagtaactgaactgaatttacagttctgtcctagacattttgcactaaagtagccgaatccactctcatgtcttttcgttaatgtgctctgtaccactggtgagtgctccatagtttccttacctgctgctacagaatgttattttacatccctatggctattgccaaggctacaaaaaaggaaagctatatttgtatgcaacactaaccttttgactgctaatgtatgtttctgctn

SEQ ID NO: 17053 - DNA, 397 bp, Homo sapiens
cggacgcgtgggctgcacagccctacctaatgaacaaaacagataaaactctgtcctcttggagcttatattagaatggggaaacaaataatacagaaagaaaattaaggtaaggaggataagggagtgctgggtaggggagtggtagtactggtatttttaacagaatagtcagagaaggtgttactgataaggtaacttttcagccaagacttgaaattgacttgggattatggcggtagagggaaccagctgaagcttacagggtgcttggcctctttgaataacagaaaaaaagtaatcaagtggctggaaccatgtgggcatagggagaatatccacattgtgtatggccttgtaggccattgtgagggctttggtatttaatctgagtgaa

SEQ ID NO: 17054 - DNA, 479 bp, Homo sapiens
  misc_feature (1)...(479): n = A,T,C or G
cgaaaggagcccgggggatttatccgaacgctganttagaaccatcggaaaaccccggncgacccacgcgtccggtcgcgaccctggtccggacctgacctgaattgcgaccccaacctggactgctcccctgaccgcaacccctacccccgcccaccagcatggcccggcacgtgttcctaacggggcccccaggagttggaaaaacaacattgatccataaagccagtgaggttttaaaatcctctggtgtgcctgttgatggattttataccgaagaagtcagacagggagggagaagaataggattcgatgtcgtcacgttgtccggcacccgggggcctttatcgagagttgggttagagcctccacctggaaaacgtgaatgccgagttgggcagtatgtggtcgacctgacttcttttgagcagttggcactacccgtcttgaggaatgccgactgcagcagtggcccaggg

SEQ ID NO: 17055 - DNA, 403 bp, Homo sapiens
agaggtggcactcctggctcttggtcagtaggttgtccactctgggactgtatttctaggaacgatgatgcgaatggatgcatgtatcctttctcacccaaactcccttgtgccaagtggcagaaacctgtatccaggtgaacatacattaaagtataacctacagataggaaatgagcacagtactcccgtgagaaaattcagcaccttcaccttcatcatgtggattctaggttctttaaaccagctcacctaatcatgcttgagcgttagggccgaaagatgaactgaagatgagctgttccgttttcacaagtaagaatgggtgtccccgtgcagactcgttctgcatgttgacatactttttttcccagctctaaatatctgctggctagtgggtcat

SEQ ID NO: 17056 - DNA, 480 bp, Homo sapiens
  misc_feature (1)...(480): n = A,T,C or G
ganncggaccccggcncgaccgggatgagtccccctgagagtcatgcgaaccgcnccggaatcccggtcgacccacgcgtccgctcagttttgctggaggccgcaaccaggcccgcgccgccaccatgtttcgaaatcagtatgacaatgatgtcactgtttggagcccccagggcaggattcatcaaattgaatatgcaatggaagctgttaaacaaggttcagccacagttggtctgaaatcaaaaactcatgcagttttggttgcattgaaaagggcgcaatcagagcttgcagctcatcagaaaaaaattctccatgttgacaaccatattggtatctcaattgcggggcttactgctgatgctagactgttatgtaattttatgcgtcaggagtgtttggattccagatttgtattcgatagaccactgcctgtgtctcgtcttgtatctctaattggaagcagtatccttttta

SEQ ID NO: 17057 - DNA, 426 bp, Homo sapiens
  misc_feature (1)...(426): n = A,T,C or G
cccnnnnntcggggcagagcgtttgaagatcttggtttgttctcctcccacaaccacctctggtccaagcagagagaccagcactgctaggctatgcagagtaattgccacaatggaatcgctagtatcacgcaggcccagcaaaacctgtggcaagatgactttcttcagctgctcctgagtgaagtgctccacgtaggcctcgatgtgagacagcagcaccatccgcacatgctcttcatgaacttcaaacaactggagaagcacggggatcacccgtgactggaacagggctggtgagagcaagcaaggagtttctccctgcgcatgatcttttttggggccaagcagataaggaagaaaactcttaacagccactggctctgcanacaccaactgattaagcagaagaggcaccaaccttgt

SEQ ID NO: 17058 - DNA, 474 bp, Homo sapiens
agtggccgggaaggttaaacctgatcgcctgctgtaccgttgatgactttccgggtcgacccacgcgtccggtaaaatattttaaatttgggatcatcgcctgttctgaaaactagatgcaccaaccgtatcattatttgtttgaggaaaaaaagaaatctgcattttaattcatgttggtcaaagtcgaattactatctatttatcttatatcgtagatctgataaccctatctaaaagaaagtcacacgctaaatgtattcttacatagtgcttgtatcgttgcatttgttttaatttgtggaaaagtattgtatctaacttgtattactttggtagcttcatctttatgtattattgatatttgtaattttctcaactataacaatgtagttacgctacaacttgcctaaaacattcaaacttgctttcttttttctggttttttctttggtaattcatttaaactcattg

SEQ ID NO: 17059 - DNA, 428 bp, Homo sapiens
  misc_feature (1)...(428): n = A,T,C or G
accnnnncaaggtctgtttatgagggcttttctgtttcttacaattaaaacaatcttgaatagagtcaacaaaaagaggactcttattccaagaactagaaaagattgaacaatctagaatttaacaatgaaaaagagaaatcataaaataaatatgattaaaacattaaaaagattaagaaaagaatcataaaagacaaacgtgaacaataatcagatttcaagaaacaaacaaaaaaaataacattaacaactcaatagatcagttaaagagatggtttagtatagccgaagacagaagtggggagttggttggtagatttgaaaaaaaactgcaaaacacaaagttaaggaaaatgtggcagtgatgtgaagagactggtggacagagtgagatggttcagatgcatattctcttcagaatgagg

SEQ ID NO: 17060 - DNA, 424 bp, Homo sapiens
  misc_feature (1)...(424): n = A,T,C or G
ctnannnnntgaaactaagctttaaaatattttataactggttatttgagctgcataatctaaacatgtcaaacgttcagtgggactatttttatatatgtatatgtgggtgtaggtcataacatttcagtttataatataaattgttatttcagtttataagctatctctcagaggagactagctcttttgagaattcataatttaaagttttagactggaggtaaatgcaacatagataatagtgtaaatcagatataattgagggctatatggcagtaaaactgctagtgccagttttcttgtttgcctgttatacatttttgattnttgtttttgtattctgaacattntgagagatcatatgtttgttcaattacatttagaagtggtttgggaatanatatcttctanaaagagattt

SEQ ID NO: 17061 - DNA, 480 bp, Homo sapiens
  misc_feature (1)...(480): n = A,T,C or G
aggttgatttcataggcatcggcaccggnccggaannnccgggncgacccacgccccnnnnttcctctggctgtcctgcgatttatcagggtcccattttgcgagcaggccgaccactcaagaggcgtctacatcaatgcagtcaaaggctatgctgacttggaccagatggatggcggaagagccatgacagtggtccggggagagaccacaagtttgcaggcagggtgctagtgaaaaagaggcgtctactgaaagctgtccaggagaaatcagactaggttagccatgaatattttctctaattctgtcttctatttttctcctccagttatatgtaagggtcttactgcaaattgtcagtctatcgttctctgagccaaagtggaaaccaataaaagtgttgggagctggctacattctanaactgaccgtaccgggaaagaaggcacactttttcacgcatatttcctgaagtcn

SEQ ID NO: 17062 - DNA, 401 bp, Homo sapiens
atggagatacagatttggtttgacctctctagaaacccacctgcagaaaatttacaacaaaatcccagggaccagcaacaatggattagaggaggagtttaagaagttaacatcaatcaaaatcccagaatgacaagatgcggactggaaaccttccagccaacatgaagaagaaccgtgttttacagatcattccatatgaattcaacagagtgatcattccagttaagcggggcgaagagaatacagactatgtgaacgcatcctttattgatggctaccggcagaaggactcctatatcgccagccagggccctcttctccacacaattgaagacttctggcgaatgatctgggagtggaaatcctgctctatcgtgatgctaacagaactggaagag

SEQ ID NO: 17063 - DNA, 473 bp, Homo sapiens
  misc_feature (1)...(473): n = A,T,C or G
aattggaatgatgcctacgatanaaactgacaccctcggaaccccctccgaatnccggtcgaccccgcgtccgcccacgcgtccggggagttggtgtgctatttttgaagcagatgtggtgatactgagattgtctgttcaggggccccatttgtttgtgcttcaaatgatccttcctactttgcttctctccacccatgacctttttcactgtggccatcaggactttccctgacagctgtgtactcttaggctaagagatgtgactacagcctgcccctgactgtgttgtcccagggctgatgctgtacaggtacaggctggagattttcacataggttagattctcattcacgggactagttagctttaagcaccctagaggactagggtaatctgacttctcacttcctaagttcccttctatatcctcaagggagaaatgtctatgttttctactccaattcataaan

SEQ ID NO: 17064 - DNA, 281 bp, Homo sapiens
gtttcccatttggttttatatgtgttaaataaatgtgtaaagtaaccaccaaatgttattagaatttttcttctagcatttataattttttcaactcctattgtgtttctttgtgtgtgatattttaatcaaaagtggttgagttgttaacagtgttctttgaaagaatctctaaaaggcttataaatgtttgaaatatcacacaaaggctgatttctaaaatatatatatattaaaacaataaagtatttattttgcctaaaaaaaaaaaaaaaaaaagg

SEQ ID NO: 17065 - DNA, 491 bp, Homo sapiens
ggcgtgtttttttgacgccttcggtaccggcttgaattccgtttcgacccacgcgtgcggcaactgagactgtcagagcatggctagctcaggggtctttctctgcagggtgggggctagagaggaagcagggagtatctgcacacaggatgcccgcgctcatgtggttgcagaagtcagtgcccaggcccccccacacagtctccaaaggtccggcctccccagcgcggggctcctcgtttgaggggaggtgactttcctcccagcaggctcttggacacagtaagctttcccagccctgcctgagcagcctcttctcctttgcctgttccccacctcccggctccagtccagggagcttccagggaagtggtcgacccctccggtggctgggccactctgctaaatccatccgccaagctgggggcatcggcaaggccaagctgggcatcatgaatgagcgaaagctggaaagaatcagcagaaggagc

SEQ ID NO: 17066 - DNA, 417 bp, Homo sapiens
cccacgcgtccgagaaagtatattaaaatttaataacatattatgacattaaataactgcttgtgagatgatatttggaattcttaacattttactttttttttttttttttttttttttaaaaggggggggggttttttttccccccggttgaaaaggctggggaaaaatttcttttttttggaccctcccccccccgggtaaagggatttttccccctccccctttaaagagggggggttttaaaaacccccccccccccgcttgttttttttttttttttttaaaaaaaaaagggtttccctttgggggcgggggggttttgaacctccggccctggggaaaccccccccctttattctccagaggtgtggtttttttatggggggacgcctggccccacaccttttttttttt

SEQ ID NO: 17067 - DNA, 482 bp, Homo sapiens
  misc_feature (1)...(482): n = A,T,C or G
ggacatagacacgcgcggcggatttctcttggtacctgctacatgcgannacnnnnggnngnacacgcgtgcggagactcccgtgccccaccacccccggnggagctgttgttgttccactcaatctgagccctggctactggtacggtttgagagggaagatctgatctcctanaattagagttggtacagaaaccatttcagctccaaaaatgttggaggaagatatggaagtcgccataaagatggtggttgtagggaatggagcacttggaaaatcaagtatgattcagcgatattgcaaaggcctttttacaaaagactacaagaaaaccattggagttgattttttggagcgacaaattcaagttaatgatgaagatgtcagactaatgttatgggacactgcaggtcaggaggaatttgatgcacttacaaaggcctactatcgaggagcccaggcttgtgtgctcgcgttctct

SEQ ID NO: 17068 - DNA, 404 bp, Homo sapiens
  misc_feature (1)...(404): n = A,T,C or G
aacatattacattttttaagttagataatcagtttcaaaaggagtattcaggttatttaactttgtttttaaatggctgcatcagaaaaaaatgtctatttttttttattaaaatatttcatcacttgttaaaacatatttttgatctgagtttggtaaagtattattttacctgctgttgtactaccacagactgttgacttttagtttcttaaagagaaaaattgcctttttactagaaagcctttgtatattgcaatttttctgtttgggaaaatctaaggatttactgtggttagtcttacagaagaaatgtggatttgataaactagtgcctatgattttaacttatgtttgatatatagtagtaagggttttatgaatgttgattattttgtgccacn

SEQ ID NO: 17069 - DNA, 411 bp, Homo sapiens
cccacgcgtgcgttcccttttgcctttcggcttaaagctggggatgatccacgtttttgtttttttaatggtaaatgtgtaactcagtattactgaaaaggtacccacattttgaatagtaattatcactcttaggtcagacagccatcaaaattctcccacaccaagtgcatgtcagttgtggagaaaacatagcacaaagagccgtacgctctttacagatactaatgtcaagagttaaacctcctcaggttcaacctgtgataaaagactagcgcttcccaggacttgcatggggatcactatttatagttttcttgggagtatcacaggaaaatcacaattacaccactttagaccctatgtgtagcaggtcacaacttacccttgtgtgtttagatgtgtatgaca

SEQ ID NO: 17070 - DNA, 493 bp, Homo sapiens
  misc_feature (1)...(493): n = A,T,C or G
gaacatccgaacacgagcggggcggatttaaattgaaaactgnggatatcgcaacggacnnnccgggncgacccacgcgtccgcccacgcgtccgaaagatgtccaaggctcttgggaatgtcattcatcctgatgttggcgttaatggaggacaagagcaaagcaaagagcctccgtatggtgctgatgtccttcgctggtgggtagctgattccaatgtcttcaccgaagttgcaattggcccatccgtgctcaatgctgtcagagatgatattagcacgcttaggaatacacttcgctttcttttgggaaatgtggctgatttcaacccagaaacagattccatccctgtaaacgatatgtatgtcatacaccactacatgctacacttactgcaggatttggccgacaagattaccgaattatacaaacaatatgattttggaaaagttgttcggctgttacggacgttntataccagagagctctcta

SEQ ID NO: 17071 - DNA, 489 bp, Homo sapiens
  misc_feature (1)...(489): n = A,T,C or G
cgtctaagaaaacgtggcggccgtgnnncctgagaactgnagtcctccaacccnccggaannccgggncgacccacgcgtccgcctggagacctgatcccagnccagctttttgaccataggtcatctttgtccccttgctcctttgcatcatgtcataaaatttgaggatatcagctgattattttttcttccaagaatgaaaatcaagcagaattgattcctacacgaaaaaaaagcacacgaatgccaaacctttcctttggtggactggacactaaccagatgagagtaaatttcttatccgtggacgtatgtaagctactgctgctgtgtgctctccacagccatatttattgtattaaacaatcagcactaaaccttcaaaaattgcccagtgttcctagttaaatgttcagaggggagaaatagatatattttaaataatgttttgctaatgaaaagagtaaatatttttgtttaaatcacn

SEQ ID NO: 17072 - DNA, 496 bp, Homo sapiens
  misc_feature (1)...(496): n = A,T,C or G
cgacaaanaggcnnacggcgnggcgcgttttaattgagaaactgcagccctcgcnacggacnncccgggncgacccacgcgtccggttattaagaaagtcatatttttgcatttcagccaaaataaagaccgcctgtaataatctgttagaaacagataatacatgtctgaaatccatatgtttcatatgatctaaactgtattttccaatttaaattaaaaatgtaatatagattcagaaaggttcatatttttctaatgacttcattctatattattttgttaggttgcataaagaagcaaggaattgtacttgtattaaaagatgaagaaagctattaggtatatttgtacatgactgcaaatgagtctatgcccgtttaaaagaaaagatggacactattttaaagtgagctttaatatgcttttatataaacaaatttgaagtacagtttagtttggttgtgtttacctaacaagtaccataagccttgtg

SEQ ID NO: 17073 - DNA, 404 bp, Homo sapiens
  misc_feature (1)...(404): n = A,T,C or G
tatgtgcttttctgtgggggtgggatttggaaggggggttgggttgggctggatatctttgtagatgtggaccaccaaggggttgttgaaaactaattgtattaaatgtcttttgataagccttctgctcacatttttgtgaatgtctgaagtatatagtttgtgtatattgacagagctcttttataactaaagcaaatttaatttttttgtactagaaaaaaatttgaacattttagttcttggttataaaaatgttaattcagaattagtttaatgccttaattaaactaattaatagctttggacacttaaaagagctctaaatttgcttgtaaaaaaaaaaaaaaaaaaaaaaaaaaaaaaaaaaaaaaanaaacaattccannncatgccgcgttgcg

SEQ ID NO: 17074 - DNA, 491 bp, Homo sapiens
  misc_feature (1)...(491): n = A,T,C or G
cgtaaaacgganaagtgcggggcggttttnccttgggacctagaatcatncnananacnnnngnnnnnanccacgcgnncggctgtgaggagtgtgnggaacaggacccgggacagtttaaccatggctccgcagaacctgagcaccttgggcctgtggctgctatacctcatcggggcggagattgccggacgagatttctataagatcttgggggtgcctcgaagtgcctctataaaggatattaaaaaggcctataggaaactagccctgcagcttcatcccgaccggaaccctgatgatccacaagcccaggagaacatccaggatctgggtgctgcttatgaggttctgtcagatagtgagaaacggaaacagtacgatacttatggtgaagaaggattaaaagatggtcatcagagctcccatggagacactctttcacacttctttggggattttgcgttcatgtttggaggaacccctcgaca

SEQ ID NO: 17075 - DNA, 468 bp, Homo sapiens
ggttgaccccttcggaccgccatgatatcgtgtcgacccacgcgtacggcgaagatccacgagtcattctggttgtcaccctgtaagtcaagacacactggagtcaggagcaagtttcatcatcgcagcacttttcagagtaacagtagtaaaactatgttcatatgttagagggtttttttttcttttctttttttttttttttttaacccctacggcccttttaggggaaaacaaatccaaaattttttctcagggggagggggttttggggaagtttttcaacaagggttttggggtacccaggatcttaactaggctttttaaggaccatcaccagatattgtgaaaattaaaatccagggggggggggctttttagggccggagcccaagtgaatttaaaaatttttttttttttttttcaaaccaaaatcccataaaaaatgggcctattagggcttttttg

SEQ ID NO: 17076 - DNA, 401 bp, Homo sapiens
ccagattgtatagctacatgttttagcccccttttcaaagtatatgttctccgtggtacttattttgacgtgtctgacttttctacatatgctgtatcaacctcttaattaaaccatcattgtctattttgagagataactgcgctgcttcccattgtgtgttttaaatgttattgttcagtttgagtcaaataaaaggatatttaatctgtggtgccttgaaaaaaaaaaagaaaaaaaaaaaaggggggcctctttttaaaaaactcttagggggcccaaattttccccgggaagcaaagttaatattttttcctttagggggggcatttaaaaccccccctggggatttttggaaaaaaacctttttttgggggggggactaaactggcccatccatc

SEQ ID NO: 17077 - DNA, 397 bp, Homo sapiens
aggagaatgtgcgggaaggtgagtgagcagggagttgcagggcgtcccatgcttcccaaaccccgatggcccccaagccaccccctactcccaggctactcatgatcattcctaatcctcctttctacaagtcaggttcctgcccagctgggtctagtacctgggatgccagtgctgtattgtcaggccccagtttccctccctgctctcacctaacttcaaccccccacaagccgagctttgccctcctgtgggcccctctctctcttcagtgtttgccagggccagggctgcagctccatgcattatcttctttgatgaactggactctttggccccaagccgggggcgaagtggagattctggaggagtgatggacagggtggtgtctcagctc

SEQ ID NO: 17078 - DNA, 404 bp, Homo sapiens
  misc_feature (1)...(404): n = A,T,C or G
aaccaacctagacgtaacttaaaatgtgttatgaactactgtggaacatttatttgatggctcaaacattaagttagtaacctcaatatggttctacacctcaatttaaagcgttctcatttatgtgcatgtgtgtttcaaatccctaattggaattctgaaaggaatgcttcagaaatgacttcctttgaatgcaaatagctatcctgacgaagaacacatttaaattgcatatgaatttctctggggccttgccctttgactggaagaagaggaagttttctgtgctgcatgcaggacaaccacaaatgcttgaagatgctcagggcacccacttgcatactgggaacttggctatgcaatacatattcctcttaatatgcaacctgtgttttgccaggcan

SEQ ID NO: 17079 - DNA, 437 bp, Homo sapiens
  misc_feature (1)...(437): n = A,T,C or G
cccacgcgtccgcgccaagatgatgtgcggtgcgccctccgccacgcagccggccaccgccgagacccagcacatcgccgaccaggtgaggtcccagcttgaagagaaagaaaacaagaagttccctgtgtttaaggccgtgttccaatctctccctcatgaaaacaagcccttgaccttatctaactaccagaccaacaaagccaagcatgatgagctgacctatttctgatcctgactttggacaaggcccttcagccagaagactgacaaagtcatcctccgtctaccagagcgtgcacttgtgatcctaaaataagcttcatctccgggctgtgccccttggggtggaaggggcaggattctgcagctgcttttgcatttctcttcctaaattcattgtgttgatttctttccttcccaataggtgatcttan

SEQ ID NO: 17080 - DNA, 410 bp, Homo sapiens
cccacgcgtccgcccacgcgtccgtaccttaacatcattcaggtgacaattccagatgatgataatgaaagactctcgaaagttgaaaaagctagacagctaagagaacaagtgaatgacctctttagtcggaaatttggtgaagctattggtatgggttttcctgtgaaagttccctacaggaaaatcacaattaaccctggctgtgtggtggttgatggcatgcccccgggggtgtccttcaaagcccccagctacctggaaatcagctccatgagaaggatcttagactctgccgagtttatcaaattcacggtcattagaccatttccaggacttgtgattaataaccagctggttgatcagagtgagtcagaaggccccgtgatacaagaatcagctgaaccaag

SEQ ID NO: 17081 - DNA, 412 bp, Homo sapiens
  misc_feature (1)...(412): n = A,T,C or G
ataaatattcaaatgcaaagagacataagataagacatactggaaaaaatcctttcaaatgtaaagaatgtggcaaatcattttgcatgctttcacaactaactcaacatgagataattcatactggagaaaaaccctacaaatgtgaagaatgtggcaaagcttttaaaaagtcctcaaaccttacgaatcataagataattcatactggagagaaaccctacaaatgtgaagaatgtggaaaagcttttaaccagtcctcaactcttactagacataagataattcatactggagagaaactctacaaatgtgaagaatgtggcaaagcttttaaccggtcctcaaaccttactaaacataagatagttcatactggagagaaaccctacaaatgtgaagaatgtggcan

SEQ ID NO: 17082 - DNA, 479 bp, Homo sapiens
  misc_feature (1)...(479): n = A,T,C or G
aggcgggggttaaaatgagaaccttcgctgagcccctaaaaccgcncgacccacgcgtncgagccgcttggggaggaaattgctgttcagttcgtggacatggtgaaggggaaatctctcacgggggttgtgaatgcccaggcccttaccagtgccttctctccacacaccaagccttggattggtctggcagaagctctggggacactgatgcgagcctgggctgggtcccccaaagggaccatccaggtgataacacagggaacatccctgaagaatgctgggaactgcctaagccccgcagtcattgtcggcctcctgaaagaggcttccaagcaggcggatgtgaacttggtgaacgctaaactgctggtgaaagaggctggcctcaatgtcaccacctcccacagccctgctgcaccatgggagcaaggcttcggggaatgcctcctggccgtggccctggcaggcgccccttn

SEQ ID NO: 17083 - DNA, 485 bp, Homo sapiens
  misc_feature (1)...(485): n = A,T,C or G
atgcggggagtaaagctgagaccnttgctgatcgcctgcgaaccgcgccggattcccggtcgacnacgcgtccgggacaatcacctactgaggagccccacccccgcctctggatggaccgaatcagggactagagtttaactgcagcggaacatgtcatttctctatttctgtgacgcgcccccatgcccccaccccaccacaagaggcaggagggcccagtcatgaccctcgtctctgcagggtgtctgtacacgttcttctgaaagctttagacagtaacagtttgcacatgaaaaataaagcgagcacctaaacaatgtgtggagcataactaaaacccacagcccaaccaaaccttgagaatgcgaaacattccagaggcagtagcctccaaagcacacagagcccctggccccgccgcggctctcactatctgtcaggggaggttgtacaggtgaatgagccggngggctcatgttcct

SEQ ID NO: 17084 - DNA, 410 bp, Homo sapiens
cgcaggatggggtttgttaaagttgttaagaataaggcctactttaagagataccaagggaaatttataagacgacgagagggtaaaactgattattatgctcggaaacgcttggtgatacaagataaaaataaatacaacacacccaaatacaggatgatagttcgtgtgacaaacagagatatcatttgtcagattgcttatgcccgtatagagggggatatgatagtctgcgcagcgtatgcacacgaactgccaaaatatggtgtgaaggttggcctgacaaattatgctgcagcatattgtactggcctgctgctggcccgcaggcttctcaataggtttggcatggacaagatctatgaaggccaagtggaggtgactggtgatgaatacaatgtggaaagcat

SEQ ID NO: 17085 - DNA, 408 bp, Homo sapiens
gaagtctagtgaaggtgacccggatctggttctgaggtgcattgtctccggcttcttcgccaatgcagcgaggtttcattctactggagcttataggaccatccgtgatgaccatgagctgcacatacaccctgcgtcagtcctctatgcagagaagccgcctcgctgggtcatctataacgaagttatacagacctccaagtactacatgagagatgtgactgccattgaatcggcctggctgttggagctggctccacacttttatcaacaaggaacgcacctgtctctgaaagccaaaagggccaaggtccaggacccgtgagaggagcccacagctacagctgcagggactgctggcgtcctctcctccatgctgctgcccctggtcccaggtggggtgagctg

SEQ ID NO: 17086 - DNA, 478 bp, Homo sapiens
  misc_feature (1)...(478): n = A,T,C or G
ggcggggtaaactaagcctggctgagcccgtgaaaaccggcncgacccacgcgtccgaaaaattaatacagagctgatcttcttgggggtgggaaaatcgaagggagaggagaaaggcgctgcactttaaatccagtatttgtttactcatgttaaaaaaaaaaaaaacagacaaaaccccctgaaatttcctaactacatctatttttataatttttaaggactcttcataaggactcttaaaaaaatcctgaacattaaaaccctaatgttcaggaaaattttaatctaagcctttttatggaaatatttttaatgcagcagctattgcacttcacccaaatgtttatttcacacaaaacggatgtaacatttcatgtgatcgggcaccactggaacaaaaccaaaatgggaccataactgttaaggcttctgtgtgtttgaaatatgctctaataatctgagaaaaaaggcgtac

SEQ ID NO: 17087 - DNA, 528 bp, Homo sapiens
  misc_feature (1)...(528): n = A,T,C or G
aggcgggtggttaaaaaatgaaaccttgaatagatgccccctgaaaanccggcgtcgaccacacgcccgtccgtggtgtctgagaaagcaaaaagaagtgtgacnnctctattggataacctttcgttcatacattcaataattcagaagatgcgtgacataccttcgtgcaanngcttcctgatnntatgttcactgtannatattaatgaaaccctaagtttgaatggtactttccttatcacgtccattacactttgacatccattccttttacctgtgggattattacaacttgcaatacagtcattatatgttttcttcacaccagcttcttaaaccaagtttctctgcagctctttcggttctgcttacagtgtgtgggaaatctgatttttttcccctagtaatagtttgataagaaatttagtgtattgactgcctcagtgacacaatttatctttaaaggtgtggaagctggtggggaccaaatgttacctgtgtttttgctggtgattgctattatcn

SEQ ID NO: 17088 - DNA, 411 bp, Homo sapiens
cggacgcgtgggcggacgcgtggggagaatactttattattatcatctaatttgacattaagttaaccatgtgggcaaattatcgcccttggtgaactgccacttgcaacctctggtctactcatttcttcctttatatgcatataaacctgtgtggctttaataggacattagtaacaggtcacctaagcctttcttcggtgcttctagaattaaggaacagaatctttacatatcacaatctccttagccactattctgtccagatccttaaatgccatccttgccaggcattgggtgtataagcaaacaaaaaattgaggtgactaggtggtggcaatcccgttctaagtaacctagaaatattcattctcagcagccttgaagcaaagctttctcagctataggacc

SEQ ID NO: 17089 - DNA, 407 bp, Homo sapiens
  misc_feature (1)...(407): n = A,T,C or G
taagaaatagcgtattatttgtgaatgcttggtttgaaatttctgtacagtttggagatattttcaaacgaaacgtaagagaagtcaacaataaaaccaagaaaagtgagtatttttataccaaacattttaagtatgctgggatggacgatcttacactggtttggatcacagtttttgttcttgacttttgaatgcttgtaattaaaaatatctatttttttcctctgaagtaagttgcatgtttgaggcatgtttccaaatattatcaaaatatcctgaattgtattgtgaatatatagaaatctgtgcctggccggagtccagggtaaattagtagcatggtgttagatgttagaaacagaactgttatttgcagtgttaggtctaggatcccagttctagan

SEQ ID NO: 17090 - DNA, 414 bp, Homo sapiens
  misc_feature (1)...(414): n = A,T,C or G
ctggactcagcggtagcaacctcgccccttgcaattaaggcagactgagcgccagagaggacgtttccaactcaaaaatgcaggctcaacagtaccagcagcagcgtcgaaaatttgcagctgccttcttggcattcattttcatactggcagctgtggatactgctgaagcagggaagaaagagaaaccagaaaaaaaaagtgaagaagtctgactgtggagaatggcagtggagtgtgtgtgtgcccaccagtggagactgtgggctgggcacacgggagggcactcggactggagctgagtgcaagcaaaccatgaagacccagagatgtaagatcccctgcaactggaagaagcaatttggcgcggagtgcaaataccagttccaggcctggggagaatgtgacctgaan

SEQ ID NO: 17091 - DNA, 409 bp, Homo sapiens
cccacgcgtccgcccacgcgtccgagaaattcatttacttatcttgggaatgttagatacctttaactatgaacaaaccctgctggaaacaacaaccagccttctaaaccaagatctccattggtcattgtgtaacctgagagcttcggtcaccagaggactgaatcccaaacaagattactgctctatatgtttgcagcagtacaagagacgccaagaaatggctgatgaaataattgtctttagctgtggccatttgtatcactcattctgcctacaaaacaaagaatgcactgtggaatttgagggccaaacaagatggacatgctacaaatgcagttcaagtaacaaagtaggaaaactcagtgaaaattcatctgaaattaaaaagggaaggataaccccatca

SEQ ID NO: 17092 - DNA, 409 bp, Homo sapiens
ccccgcgtccgaaaacagcttcattagttattgttttaactgtgttcaagctttacctcttgatgagaaatttcttatgtcaaggcagcattataaaccttcccccacagatttttccatcctgtctctcttactgttttattctcaaatcttgtgctttgaactctgaaaactggtggcttaaaaactaaaaaaagaaaaaaagcatatttagcaaggaaaaaaataccaaaaatttcaggcatagctgctggaaaaattatctatttctccattacccactgtaggatttcttttttaattatactttgactataaagggtcaaagtataatttggtcttttcttttactttgttaccccatttgtaagctatagcatatgaagctatatatatagcttgtgaaggt

SEQ ID NO: 17093 - DNA, 398 bp, Homo sapiens
ctttgggaggccaaggcaggaggattgcttgagctcataagtttgagaccagcctgggcaacatagcaaaaccttgtcactataaaaaatacaaaaattagccaggcgtggtggtgcacgcctgtggtctcagctactcggtcggctgaggtgggaagatggcttcaagccgggagatggaggcttcagtgacctgtgacctgtgatcacaccacttaattcctcgaggcatttgtgtcccagttccctccatttcagagccatgggcaacagagcgagaccctgtctcaaaaaaaaaattacatataagcccggtttaaagagaggataatatgcaaccaccctagttgaaacagagtgtatcacttctttctcaccctaaatttaatgcctagttg

SEQ ID NO: 17094 - DNA, 412 bp, Homo sapiens
  misc_feature (1)...(412): n = A,T,C or G
caaataaataataaaatgtaagtgttatttctttgtcaggggctttttgcccccagcttcagaaaaacacggcagctggggaagtggtttggacatgcacaccaaaccctggattanagcaagggctcgaagggagtattgggagaatctgctgccagcttcaggcagacctttctgtgcttcgctgtcaaagccagacttctaaggagtagtgaaagaaaaccctgaaataatcgaacaggaaaaagttgccctcaagcctgacctggaaccgttcctcaccttcatcctcaccatgccctgctatctccagctgctgagcagctgaggtgctgcagcccctttccttccagaccacaagtgtgtgcatattgagctcctgctgtggctaagcactgcaacagactctacc

SEQ ID NO: 17095 - DNA, 410 bp, Homo sapiens
  misc_feature (1)...(410): n = A,T,C or G
caaataaataataaaatgtaagtgttatttctttgtacaggggctttttgcccccagcttcagaaaaacacggcagctggggaagtggtttggacatgcacaccaaaccctggattagagcaagggctcgaagggagtattgggagaatctgctgccagcttcaggcagacctttctgtccttcgctgtcaaagccagacttctaaggagtagtgaaagaaaaccctgaaataatcgaacaggaaaaagttgccctcaagcctgacctggaaccgttcctcaccttcatcctcaccatgccctgctatctccagctgctgagcagctgaggtgctgcagccccttcccttccagcccacaagtgtgtgcatattgagctcctgctgtggttaagcactgcaacagactcn

SEQ ID NO: 17096 - DNA, 407 bp, Homo sapiens
cttcgaaaggcgatgttggaaaaagacggataatttgcctagtgggattgggcctggtggtcttcttcttcagttttctactttcaatatttcgttccaagtaccacggctatccttatagtgatctggactttgagtgagaagatgtgatttggaccatggcacttaaaaactctataacctcagctttttaattaaatgaagccaagtgggatttgcataaagtgaatgtttaccatgaagataaactgttcctgactttatactattttgaattcattcatttcattgtgatcagctagcttattcttgtgtactttttttaaactgtgggttttcctagtaaatttaatttacagaaatcaatggtagcatttagtaatctacaaaggaaatatcaaagtgtt

SEQ ID NO: 17097 - DNA, 410 bp, Homo sapiens
ctcccagccaaaatgctccagggtaggcagctttgaataaagagtgcgatatgagggtacagtgagtttggcagtccaaattctgttctctgcagcctgtttttgagtagtttgtgaataaagtcacccgcctacttgtctaagcacatgtgggtgtgtaactcagttcctggttctcggttctaaaaacagacttccaactgggaaactttttgggggaaattaactggacacctatctcggaggtttattttcttgcaaccagtgaagtcgtcctcctcccttccctggataactcttcagtttgactgtcactgttctggtgtcaactccagcgtcggcacaggcagaaggacttcagctgctggtctcattggttccactgccattgatatgggggggtgcagagg

SEQ ID NO: 17098 - DNA, 389 bp, Homo sapiens
  misc_feature (1)...(389): n = A,T,C or G
ccgggtgagagagcgagcgcccgtcggcgggtgtcgagggcgggttgcctcgcgctgacccttcccgccctccttctcgtcacacaccaggtccccgcggaagccgcggtgtcggcgccatggcggagctgacggctcttgagagtctcatcgagatgggcttccccaggggacgcgcggagaaggctctggccctcacagggaaccagggcatcgaggctgcgatggactggctgatggagcacgaagacgaccccgatgtggacgagcctttagagactccccttggacatatcctgggacgggagcccacttcctcagagcaaggcggccttgaaggatctggttctgctgccggagaaggcaaacccgctttgagtgaagaggan

SEQ ID NO: 17099 - DNA, 414 bp, Homo sapiens
ttcacaaaggtgaagccgcttctacaagtgactcgccaggaggaagaacttcaggccaaagatgaagagctgttgaaggtgaaggagaagcagacaaaggtggaaggagagctggaggagatggagcggaagcaccagcagcttttagaagagaagaatatccttgcagaacaactacaagcagagactgagctctttgctgaagcagaagagatgagggcaagacttgctgctaaaaagcaggaattagaagagattctacatgacttggagtctagggttgaagaagaagaagaaagaaaccaaatcctccaaaatgaaaaaaaaaaaaaagggggggccgttttaaaggatccttggaggggcccaagtttacgcgggcttgcaaggtaatagttctctccttataggggg

SEQ ID NO: 17100 - DNA, 390 bp, Homo sapiens
ggcacggtggctcacgcctgtggtcccggcactttggggggctgaggcaggtggattatctgaggtcaggagttcaagaccagcctggccaacatagtgaaaacccgtctctactaaaaatacaaaattagctgggcacggtggtgcgcacctgtagtctcagctactcggaaggctgaggcaggagaatcacttgaacccaggaggcggaggttgcagtgagctgagatcgcgccactgcactccagtctgggtgacaagagcgagactccgtctcataacaaaacaaataaaaaaaacaaacagtcttttttaggaattcattttattttaaattttggaaggaggagttacaaaaagacaaatactacatatgattccacttgtcat

SEQ ID NO: 17101 - DNA, 444 bp, Homo sapiens
cactaccacccagctaatttttatatttttaatagagatgggatttcaccatatgggccaggctagtctcgaactcctgacctcaaatgatccacctgcctcggcgtcctaaagtgctgggattacatacaggcgtgagccactgaacctggccagctcatgttttatttgactcgaaggctacatgtcttggcattgctgatcacattgtgggaaacgctgcctttgcctttaaaaagttagaataacattgtctgttttgagatattaatcatatttgagccaaattccaatattcactattttgccctttctttttcttttatagtgtaggcaatgcatttttttactctattaatttctaattttgatgcccaagttggcttttttctctctattattacagcatcaagttagcatatttatagcaatacatttggaaaa

SEQ ID NO: 17102 - DNA, 415 bp, Homo sapiens
  misc_feature (1)...(415): n = A,T,C or G
acaaatagcttctatccctgagtgaaactcctaaacttttaagagcagcgacgtggttcatagacatgcggtcactcattattacctaagcaaaacattcgttccctgtacattatatttgacgagccagagataacactgcactgcctttcaccggatagactactactgattgatcaaactgccttcttaactagacctatactttctactcccctcaggctaatctacttactgaatgtgacatatttattcctagttccatacctttgcacatgccctactctccactaattatacttaaaagtccaaaaattttttctttagtaacagacttaggtactgctaagcaggtattaacacaatattccttagttttcatatgttgggcattcatatgtctatgtatatngag

SEQ ID NO: 17103 - DNA, 410 bp, Homo sapiens
cccacgcgtccgcagaatgctggaacaataatgtaaatcaacgcccctcctttagggatctagctcttcgagtggatcaaataagggataacatggctggatgaaagaaatgaccttcattctgagaccaaagtagattaacagaacaaagttttatatttcacattgctgtggactattattacatatatcattattatataaatcatgatgctagccagcaaagatgtgaaaatatctgctcaaaactttcaaagtttagtaagtttttcttcatgaggccaccagtaaaagacattaatgagaattccttagcaaggattttgtaagaagtttcttaaacattgtcagttaacatcactcttgtctggcaaaagaaaaaaaatagactttttcaactcagctttttg

SEQ ID NO: 17104 - DNA, 399 bp, Homo sapiens
ttcatagtggaccagcatgccacgtacgagaagtttaacttcgagatgctgcagcagcgcaccgtgctgcaggggcagaggctcatagcacctcagactctcaacttaactgctgttaaagaaactgttctgacagaaaatctggaaatatttagaaggaaaggctttgattttcttatcgaagaaaatgctccagtcactgaaagggctaaactgattttcttgccaactagaaaaaactggaccttcggaccccaggacgttcatgaactgatcttcatgctgatcgacagccctggggtcatgtgccggccttcccgagtcaagcagaagtttgccttcagagcctgccgcaagtcggtgatgattgggactgctcttaacacaagcgagaagaag

SEQ ID NO: 17105 - DNA, 391 bp, Homo sapiens
  misc_feature (1)...(391): n = A,T,C or G
ccatctccaggagtccatgagaggctttcttctcctatgtcccaattctcagaactcagatgtggctagaccaaccagtgggaaactgccccagcttctcccaccatagggggccggacccccatcaccagcctaggatccaggggctgcctctggcctcttagggagcagagagcagaactccgcagcccagcccagaggagtgtcacctcccacctttggagaggaatccttccctcccctggacaaagttgctgacaagctgctgaagtggcctctccatattccagctgagcctgaatctgactcttgagggttggggctgcacttatttattgcggngagacagctctctctcccacctcctccncagatgggaggagagcctgan

SEQ ID NO: 17106 - DNA, 402 bp, Homo sapiens
agggtacccgcctccttttcgtaacactgttccccccggtcagcccatctagccctgtcctccattcctcacgccatctccatccccatcttgagtcctggaacggccctgggtgcctgcccctcactgtgcaactctgggagcagcccggcaggttggggcgtcttccagaacctctcccttctggagccactctgcactgcgggctaaacatgtttccagtgtgattccttccagtgagccaaacccggtggctgcttcatgagcctgactgcctctcgcctgctctcagcaggaagggacccctggagcaggctggcccggggtggtgaagtagctggagcccgatcacagtcccgcggtttgtcagggggcccaccttctagatgaccccttaataag

SEQ ID NO: 17107 - DNA, 409 bp, Homo sapiens
cggacgcgtgggcggacgcgtgggctgcctgcctcaacctcccaaagtgctaggattacaagcatgagccaactcacacagccctgatctttgttatttcttttgttctgctaactttgggtttgatttcttcttgattttctagttccaggtgcaatgttaggttgttaatttgtaatctttctgcttttttcatataggcatttaatgctataaacttccctgtgtatgctgtggtttcaagaatctttattcttaggctaattaaaaaaatgtagagcacttgaaatttaaaataactttttttctgtttttttttttttttttttttggaaggaatgttttgtcccaaaggttgttataatttctgggttgaagaaaattttcttgcctaacccccccagggggt

SEQ ID NO: 17108 - DNA, 403 bp, Homo sapiens
cggacgcgtgggcggacgcgtggggtcagttgctgcattcctaaactgtttatttgcactatgagcctatagactatcagttccctttgggcggattgttgtttaacttgtaaatgaaaaaattctcttaaaccacagcactattgagtgaaacattgaactcatatctgtaagaaataaagagaagatatattagttttttaattggcattttaatttttatatatgcaggaaagaatagaagtgattgaatattgttaattataccaccgtgtgttagaaaagtaagaagcagtcaattttcacatcaaagacagcatctaagaagttttgttctgtcctggaattattttagtagtgtttcagtaatgttgactgtattttccaacttgttcaaattatt

SEQ ID NO: 17109 - DNA, 477 bp, Homo sapiens
  misc_feature (1)...(477): n = A,T,C or G
tgcccccgncgggttttttactgaatacggtagacatgcnannnacttnnngnnangannacgcgtccgggctggtgcttcccggatcattggtgtggacatcaataaagataaatttgcaagggccaaagagtttggagccactgaatgtattaaccctcaggattttagtaaacccatccaggaagtgctcattgagatgaccgatggaggagtggactattcctttgaatgtattggtaatgtgaaggtcatgagagcagcacttgaggcatgtcacaagggctggggcgtcagcgtcgtggttggagtagctgcttcaggtgaagaaattgccactcgtccattccagctggtaacaggtcgcacatggaaaggcactgcctttggaggatggaagagtgtagaaagtgtcccaaagttggtgtctgaatatatgtccaaaaagataaaagttgatgaatttgtgactcacan

SEQ ID NO: 17110 - DNA, 485 bp, Homo sapiens
  misc_feature (1)...(485): n = A,T,C or G
tgggggttcctttgatccgtgggcctccgcancnccntcggaatttnagggacgacccacgcgtacggtcactatgtggctgncacgtgaaacgcttttgttgatttccattccagccagcagggtatctgggaaggcggtgccagcatccagcatgagcagatgtcggggagactgggaagtctccaccgttactgctctccttcccttcatgataagccagtgccagcatccaacgtgagcagacgtcggtgagactgggaagtctccgatgttactgcctgccttcctttcatgtgaggggctgcacttgcttttcttgagatctgtgagcggacgaggtcttccaaggaagtgctttgcacactttctttgctcctttttacagactttgtctttgcagcaagcagatgacattaacccactttgggataatgaaccttcagcataattgtactttgtctcatttcggatctcactgttgt

SEQ ID NO: 17111 - DNA, 459 bp, Homo sapiens
cccacgcgtccggctgctacacaagaccctgagactgacctgcaggacgataccatgaagagcctgatccttcttgccatcctggccgccttagcggtagtaactttgtgttatgaatcacatgaaagcatggaatcttatgaacttaatcccttcattaacaggagaaatgcaaataccttcatatcccctcagcagagatggagagctaaagtccaagagaggatccgagaacgctctaagcctgtccacgagctcaatagggaagcctgtgatgactacagactttgcgaacgctacgccatggtttatggatacaatgctgcctataatcgctacttcaggaagcgccgagggaccacatgagactgagggaagaaaaaaaatctctttttttcttggaggctggcacctgaattttgtatcccctgtagcaacattactgaaatacataggctt

SEQ ID NO: 17112 - DNA, 427 bp, Homo sapiens
ttattttcttctctacgtttgggaatagatttttcaaatctagatgagtatttttaatgtataaagttcagagtgaaactttaaacataaaataccaaataaacagatgcattttttggttctaaatttttaataagtgctaacacaaattttcattgtctttattgaatatgttgatttcttaccttaaattataagtccagagtagtaaatactaaagttgacttcaacttaattttaagcaacatgagtattagtgtactactcttttatcgtataggctagtattgtcttctgtttaatgattgcttggcatttgttgagtgagtgaatgactatttctgtgtttgtatatgtagttgtaaagacataaacattgaggctagcaatctgaaatttctctcttctatatatggcttttaaaaat

SEQ ID NO: 17113 - DNA, 438 bp, Homo sapiens
  misc_feature (1)...(438): n = A,T,C or G
cagctaacatctcttttctcttaggtggaaacttcattgttgaatagaaatgtttttaagtgaagaagttgacagaatagggtctgctgaatttaaacagccatcaaaagttaaactggaatcttgaaatgccatttgctcggcatagaatcagagccttttagaaacatccatttaagttttgttagaagatagtcaccagttgcctgaatcgaatgaggaaaagcctgcttccagagatggacagtatattatagagtgagatatagagtttaaagcaagtgtgtgagtatatgtatattccatattattggtatatgtgtgtttatatatgaatctgtatatatgtgtgtctttgaatagacacaacatatatgcccctcatgcataattgtgcttattttgccctaattgaggaatttgagacgtattattggn

SEQ ID NO: 17114 - DNA, 439 bp, Homo sapiens
  misc_feature (1)...(439): n = A,T,C or G
tgaagagcagggaaagagacctttaaatattttgctataaaaaaatttgtgataagtttctatcaaaatggggagattgcagaaaaggcttcccttggctcccaaggaggtgtagcaggtgtgagcaatattagtgccatgtgcctttcacacagggtttgcatttatcagtctgttttccgatgatgtgtacatgaaagagtacaccatgtgaagagaagagagaatgattgaaaatgttttagtatagaactcttcttgcagtgggttgctattttctagattttactttttagggaacaaaataaaatcctttgttaaaactggnaaaaaaaaaaaaaaaaaaaaaaaaaaaattaaaaaaaatttaaaaaaaaaataaaaaaaaattaaaataaattattgggggggggcgctttaaaaaatttccccggggggg

SEQ ID NO: 17115 - DNA, 427 bp, Homo sapiens
attcctggtagaggaatttctgtatttgaaaattctcctgaaggaataatataaactgtggactttgggtgataatgatatgtaggttcgtcagttgttaacaaatgtatccctctgttgggggctattgataatggggaaggctgtgcatgtgtgggagtaggaggtgtatgggacatctctgtaccttctaatcaattttgctatgaacttaaaactgctctaaaaataaagtttattaaaaaaaaaaaaaaaaaaaaggggcggccgttttaaaggatccttgggggggccaaactttacccgggcttgcaaggaattagttttttccttatagggagccgaattataacctacttgggaatttttggaaagaacccttatttttggggggggacatattgggccaacctccctccagaattta

SEQ ID NO: 17116 - DNA, 437 bp, Homo sapiens
  misc_feature (1)...(437): n = A,T,C or G
ctttctgatatagtacttgaaattcttaccagaaaattactttggagttttgaagcctttattaatactacttttaaagaagcagttgttttattgtcaatgttttttttcccccaagcatattttcttgtatttctgtttccatatatatatatatatataatttccaattcaggatattgccctgccatccatgaaaactgttctggcaccaaaagtaatgacaaatgttaagtgtaataatagaaaagtagagcaaagagccattcagcttcagtctttacataccatgaataaaacattaaaacatcatatggagaagtttacatggtgattgttcacctgcagtactgtggagttttaacattttgtcctcttttcagngaaacagagtaaaaatattcatctaccattactggtatttgctgattttgttn

SEQ ID NO: 17117 - DNA, 426 bp, Homo sapiens
  misc_feature (1)...(426): n = A,T,C or G
cggacgcgtgggatttaatttgatttacagagcggagtgtgttcttataaaaatatttaatgacattggttcttgtcttttgatcttttatttctgaaacactcaaacaccttacaaagtgctgagtaggtaatagtgacccaacttgtttgctaaatgattatttgtttaaatctgtacagttttaagtgttcacttatacaaagagtgtatatactttcaaataatttaaaatgctttatattatttggctagaaattgctgtttttaataaatgtgaattttttaaaaataaagatttttgcttcctannnaaaaaaaaaaaaaaaaaaaaaaaaaaaaaaaaaaaaaaaaaaaaaaaaaaaaaanaannnnnnnnnnaaanannnnannnnnnannnnnnannnnaaannnaaacccccctt

SEQ ID NO: 17118 - DNA, 403 bp, Homo sapiens
cctcagcctcccaaagtgttgggattacaggcatgatccaccatgcccagctgctcctttattttaatgcctaaatataatccctaaatatagttatatttcatacttaccttgtttttaaaaagttttctctgtagaaaattttaatcattcataccctttacctttaggcttttctttctatacattcagtcaggcactgggatcatctgtttacaggcattatatttatttggcactcctggaacaagtatatctaacccattcttgatttttggactattcaggtgaactatttgaggggtatggggtctagaagttaaaagatacgcatgtcttctgttcttttcccgtatcaattcattccttcatctctttgccaagatgctttcctttcagggcg

SEQ ID NO: 17119 - DNA, 490 bp, Homo sapiens
  misc_feature (1)...(490): n = A,T,C or G
cgtattgacgcctagtangaggncgtgaagaaccggcncgacccacgcgtgcggaggaagtgaagagaaaggaagtacagaaaacatgcatttgcacagaatggaaaaccaaggctctcatgaatctccaaccttagatcctgaaacagaggcaataaatttatctgatgttgacttgagtaaatatatcaccactattgctggagtcatgacactaagtcaagttaaaggctttgttcgaaagaatggtgtcaatgaagccaaaatagatgagatcaagaatgacaatgtccaagacacagcagaacagaaagtgcaactgcttcgtaattggcatcaacttcatggaaagaaagaagcgtatgacacattgattaaagatctcaaaaaagccaatctttgtactcttgcagagaaaattcagactatcatcctcaaggacattactagtgactcagaaaattcaaacttcagaaatgaaatccaaagc

SEQ ID NO: 17120 - DNA, 411 bp, Homo sapiens
cccacgcgtacggggacaagtgagcattcagcctggaaggagttgagggatgcacacagcatgagctggaccccctgccctgcataccacgtccttacaggtgggccctctttccctactttcccggccctcccaccttacaggagaaggagtcctgggctaggggcaggaactcagctggtgggacagggagcttgggaagcaaaaggctacttgacccttgaggccgcaaacatccctgggcctggcctcatgtctgtggctggcgatgacattgctttgccgcacgacttcctgtcttcctgagagacctcaggcaagctacacctactccccagaggggactgacctctcttatttgaagcgaaccggatgcactgattgctgacctggaggataaatgcgaccctg

SEQ ID NO: 17121 - DNA, 426 bp, Homo sapiens
cttcttttgggaggatttgatgtaagttactgacaagcctcagcaaacccaaagatgttaacagtattttaagaagttgctgcagattcctttggccactgtatttgttaatttcttgcaatttgaaggtacgagtagaggtttaaagaaaaatcagtttttgttcttaaaaatgcatttaagttgtaaacgtctttttaagcctttgaagtgcctctgattctatgtaacttgttgcagactggtgttaatgagtatatgtaacagtttaaaaaaaaagttggtattttataagcacagacaattctaatggtaacttttgtagtcttatgaatagacataaattgtaatttgggaacataaaaactactgaataaatcatgtggcctaatattgaaaaaaaaaaaaaaaggggcggccgttttg

SEQ ID NO: 17122 - DNA, 411 bp, Homo sapiens
  misc_feature (1)...(411): n = A,T,C or G
ttttcaaagactggctctgctgttaagaagttgtacttaaagcggaggagctaagccacctgccaaaatgtgcaaaggacttgcagctttgccccactcatgcctggaaagggccaaggagattaagatcaagttgggaattctcctccagaagccagactcaggtggtgaccttgtcattccgtacaatgagaagccagagaaaccagccaagacccagaaaacctcgctggacgaggccctgcagtggcgtgattccctggacaaactcctgcagaacaactatggacttgccagcttcaaaagtttcctgaagtctgaattcagtgaggaaaaccttgagttctggattgcctgtgaggattacaagaagatcaagtcccctgccaagatggctgagaaggcaaagcn

SEQ ID NO: 17123 - DNA, 403 bp, Homo sapiens
cccacgcgtccggtcagggacaaaagcctccgcctgctcccgcagccggggctcatctgccgccgccgccgcgctgaggagagttcgccgccgtcgccgcccgtgaggatctgagagccatgtcggccagcagcctcttggagcagagaccaaaaggtcaaggaaacaaagtacaacatggatctgtacatcaaaaggatggattaaacgatgatgatcttgaaccttacttgagtccacaggcaaggcccaataatgcatatactgccatgtcagattcctacttacccagttactacagtccctccattggcttctcctattctttgggtgaagctgcttggtctacggggggtgacacagccatgccctacttaacttcttatggacagctgagcaacgg

SEQ ID NO: 17124 - DNA, 402 bp, Homo sapiens
ctaactttctcagcggcatagattctaagccactttcatgtgctttcagatggcatcttagtagattggtggtgaggttattttaatgtccataaacaagaaaggtctgggaacaatctgtatgatttttctttcacattttcttatctttgccactggaggttaactgtcgtccacatatgcatatgaattgtgaaatgcacagaagcatacatttgggggtaggggagtaagtgctgtagatctttcgttcacttattttaatactatagaagcgtatttcattttataacaagcaagaatcataaaaaccctctgtcttttgatttatgaagaatatagcttctctctgaagtatctcaagatatatcttgcggaccacaatgggatcacagtgtaatg

SEQ ID NO: 17125 - DNA, 411 bp, Homo sapiens
  misc_feature (1)...(411): n = A,T,C or G
taaaatgtaggggaaaatgcacatatggatgacctaaacaaacaagttaaaggaaacactcagggtagtgatgagatctggaaagggaaatgtgatgagggctttaattctatttataatatttgaagacatataaagagtaaatatgccaatataggatttgggtagctgcttctcctctgtaatttagtctatgtttaaaaaatttcacagtttaaaaggaacatggaccaccttaagaaacaaacaaaaaaagcaaattaagcaaaaataagtaaaaggaagaaaccacaatcagaacgaacaccgctccccacaatgaaataaagttattttctcattcccngnnanaganannaaaaaaaaaaaaaaaaaaaaaaaaaacataatngggggggggggggccttttg

SEQ ID NO: 17126 - DNA, 410 bp, Homo sapiens
ttttaattgtatcctctagtattatagatataggacagtactgtatcatacctctgtgaatgtaaaatatcttgtacctgctttatgatacgtagtagtgaccgtgctttatcagagctgtttttaatgatgttattctagaatgttttctttccagatgatgattcagaagctaattttaaaaaacggtgccaggtaccacaacagtaacagaactttgcacttttctggggttttgttttttacctttttccccccttttttttaaatggagagcgctggatgtctctataattttattcacatgactgcatagcctgaaccagctgttgatgctattgatgcataacatactgctattggtctttttgtatagatcaatatattatatatagagaatggaacaggag

SEQ ID NO: 17127 - DNA, 404 bp, Homo sapiens
cccacgcgtccggaggactcccagcggctggagcagaagtgttagcggccagagctcccagacccctacccacagccaggcgggacgcgcacagtccctccacgcggaaagaagtaccttcgccggtcaccggctcctgcagggtgcaaatatatacagagcttcataatcagcccaagaccacatagagcaaacatgaatgatatttcccaaaaggctgagattctgctttcttcatctaaacctgtcccaaaaacctatgtaccaaaacttggcaagggtgatgtaaaggataagtttgaagccatgcagagagccagggaagaaagaaatcaaaggagatctagagacgaaaaacaaagaagaaaagaacaatatattagagagagagaatggaacaggag

SEQ ID NO: 17128 - DNA, 387 bp, Homo sapiens
aggtcttttttattctggtttttcatacaagtcatctctattttatatatttaatggcatacattatcttcctgaatcttttccttttcagactcatttgttctagattcagatcattcaacaaaacatggcatgatttccacagtctctgacattctgattgcattgcttgagaaaattctcagtctgggaatctccttaaaatgcagcacagatgatggctgaataggaacagctccggtctgcagctcccagcgagatcaacgcagaaggcgggtgatttctgcatttccaactgaggtacacagctcatctcattgggattggttagataatgggtgcagcccacagagggtgagctgaggcaggggtgggcgttgcctcacc

SEQ ID NO: 17129 - DNA, 409 bp, Homo sapiens
tgatccacccatctcggcctcccaaagtgcaaaaaaattacttaactgccacagactcttgtattatgtaatttatatacagaacacaaagcacttgatttgcttaactgatgtacttgatgatactataaaacctatattatgagaaagcattgctccttcaaaggaatcaagtgatagcaaacactcggtcctgtttccaggttttcctcactgttcattttgcctttgttcttgcagggggagaatgaaaggggcgagagctaaagtgtgttgtcaatgcaagtcaatccttaaccaacaataatttacaaaagaactttatatttgctgtaatcattaaatttagttactaatcccaggaaaagggttagtccttcctcctagtttgtagatttgcaaatggaga

SEQ ID NO: 17130 - DNA, 404 bp, Homo sapiens
ctcataatgatagcagaaagtaaatatcaggaatcagtttcaaaggtgtcataagaaaagagagctgtagaccaatacaccttatgaacatggatgcagaactctttaacaaaatggtaacaatcaagaaatagcttttgaaaaatgtataatacatcatgaccaaagtgcagtttatcctggcaatgtaagttcggcttaacttgtgaaaaaaaatcagcgtaattcatcatattaatataaaaaaaagaaaatccatatgatcaggaaagcagaaaaagcattgaacaaaattcagtgttcattcatgagaaacaattcagcaaactaggaatagaagagaacttccttaagctgattgaggtcattttaaaaaaaaacttaaaattaacatcaaactcagg

SEQ ID NO: 17131 - DNA, 410 bp, Homo sapiens
caaatacacacaaccttgttacttttcactccagcaccttcatacgcttttctccaggaggaggttcttgcagctggaaacagcctattttgtggtcactgtcaagtggatggatattctagcgctcccaaaaaagcactatggccttatatgcagggaaggcacataccaccaagttcaatgagaaatattagagctaaccgtactctcttctctgcgtacgttcgagtatacgttgcccatatccctcccatattttctttttgctgcttttgctctggaactttgcttttagcagggaaagcagctgtcccctgagtgctttgaattgggaatatacccagtgtgtgttctcccccctcttacgaggctacataacacatctatgatgctgctttaagcttttagag

SEQ ID NO: 17132 - DNA, 410 bp, Homo sapiens
  misc_feature (1)...(410): n = A,T,C or G
cccacgcgtccgcccacgcgtccgggaccatcttaattaaaaataaatgcccaaaatgtagaactttaaccaaagacttgtcccttttaaagcaaaatggggattgaagggacttataatttctgttgcttctaattaaagtccctgaagatcatataccaaagtgtttgagaacttcatccaaacctactttaaagcattatgtgcaattaagttgttatgacataattatattgcctacttgttgggtcttttttcttgagcttataatgtacctggaaaataaacctcttgagaaaaagaaaagttcatactgattattggaaaaggactatatatgtgagcaagattgtgttttagagaggaaacttgaaactccaagaaagcacttgatgttcttatatgcttgn

SEQ ID NO: 17133 - DNA, 401 bp, Homo sapiens
  misc_feature (1)...(401): n = A,T,C or G
ttttggtttggggtagacctaagggtgtttgttagtctcaaaactgtgaagtgacatgtcagaacagtccagactggtaagaaaattaatggcttcacttgaatttaaaccagctctagataggaaaaaaatcagtctcctcatttgctttttaaatggagtagtacatcccatattttagaacaagtaggggtgccttgcttaaataaaaatagcatttaatgtataattgtgtgaagggtttatggataaagctgtacttctgtcacaatgtggcagtactttctgctttaatattaaacagcttgttatttaaatattggacaaaatggctggcttcaaaatatagtcattaataaactaactttatgtgcacctgtgtaggagaatcaaaatcctgn

SEQ ID NO: 17134 - DNA, 389 bp, Homo sapiens
ttaacttcttcctttttcattctccaactccaatacaaatataaattgggaggatgggtctagggggagacagaagaaatttttgaagtctaagaccgaaaaccactgagcatctggaaatcttctagaattacataaaggttggggaccattgggtgtattcggactactgcctcatttatgactcacagattctggactaacctgtattctccgttagtctttttaacagttaagataggggtgttatagggtgagctacaggatattaatccatgtgttagaaacttttaaatcaggggctgaagtccctctttggcctccaactgaagaggaaactgccctctgcaaggataactagaaggatccttgagctgaattgctatagg

SEQ ID NO: 17135 - DNA, 476 bp, Homo sapiens
  misc_feature (1)...(476): n = A,T,C or G
aggacgcgagaggagtaaaaactgaaagctntgcganattgttgacggaccttccgggncgacccacgcgtccggtgtgcgctcagcaggacgtgggaggctccggcttcaagacactcatccaagaggaaggatggccagtatcttttctaagttgctaactggccgcaatgcttctctgctgtttgctaccatgggcaccagtgtcctgaccaccgggtacctgctgaaccggcagaaagtgtgtgccgaggtccgggagcagcctaggctatttcctccaagcgcagactacccagacctgcgcaagcacaacaactgcatggccgagtgcctcacccccgccatttatgccaagcttcgcaacaaggtgacacccaacggctacacgctggaccagtgcatccagactggagtggacaaccctggccaccccttcataaagactgtgggcatggtggctggtgacgaggagt

SEQ ID NO: 17136 - DNA, 576 bp, Homo sapiens
  misc_feature (1)...(576): n = A,T,C or G
gctctgcgcgttgcgcccgcgtcgcgccgccgcgcggaagtgtatacggcgtgcacttgtcctccccngcccaccctcccgctcacggctccccccccccgggaagtgatagaatcgatcagcatcgcnaccggcccggaanncccgggncgacccacgcgnnngncgggaggctacatatagcctccatcaaaaatcctacgttattgactcagaactgggataggtgtcccttctgtgtgttccagtagtgccctgtcttatacctgtcatgatatctgtgactttgtatggaaattgtatgtttgtctgcttttttcagattatagcatatgtttgttagaggtggatcatatcatcttcatcttgtaattctagtgcttactttgctcatggttgctgaataaatgaatgaagagtgagaaagccagaagctctgatatttaaccacaaggataattaattcagtgtgcaaccatgggcaaattatatttaatagtaatattgtataatagttgtgcatacatatttttctttcttattaatactgacaaaattctcaactcttttactgac

SEQ ID NO: 17137 - DNA, 380 bp, Homo sapiens
ttttactgtttaaatcttagaatcttggctatatcttagaattctggctcttggtaaccatattacagaagtctatattgtaaaagcctaaagatctggacaagtttccaacaaccttgtttccatgagtatataattttggcagacacctgaattctttgggacactgtgtctgtgtatgtgtgtgtgtgtgtgtgtgtgtgtgcgcgcttgtatcttgaagttgttgcacttcaaaaccacaggtgctgtatattcttacacactggagagccatcctttggtttaaatggtagaggggtagtggaagcgcacacgttgtttttagcccaggggtagtaacaaactttcactagccaactagaaaaatatttttgtgg

SEQ ID NO: 17138 - DNA, 389 bp, Homo sapiens
aattaacataagatcacttaaccatttcccaattgttggatatttactgttgttacaagtgtttcacatggatatatcacatgccataaaaaatatctacacctactctttgttggttgtcttctttttgaattatatccctggagtaaattcccagaagtgtcacttatgtagtcaaaggatgtaatcatttttacattttacatatttcaaaaatgaaatactacccaaaaaatgtgtgctttgcaacatcagctgtgtaataagaatgtggtaggtttatcattgaatttctatgccaaatcaagtattccactgggcttccttcgtttaagaaaagggattaaagtaacaatactttccccacatcaaggataacactccaaaac

SEQ ID NO: 17139 - DNA, 476 bp, Homo sapiens
tgaggccgaggcggtttaaaactgaaaccttgcggaaccgctgatgaccttccgggtcgacccacgcgtccgcggacgcgtgggcggacgcgtggggtggctcatgcctgtggtcccggctactcgggaggctgagacaggagaatggtgtgaacccgggaggcgggggttgcagtgggctgagttcgtgccattgcactccagcctgggtgacggagctagactccgtctcaaaaacaaaacaaaacaaaaaaaacttcttagatacatacacatcttcacgttctctcagactcatactttactttctactttctttttttttttttttttttcaaaaatcccttttaaaaaaaaaaaaaaaaaaaaacctggggcccattttggttaaaggggggggttccccaattttaaaaaaggttttaccttaagccggcccctaaaaaacccctttttttggcccttttataaaaaca

SEQ ID NO: 17140 - DNA, 404 bp, Homo sapiens
gactggacccggctttcggcctcccggctatcggtgtcctactacctaataggggaaacgcggagacagtctctatcgttccgccgtacggggtggagtgggctccgagcggctgggtttcgtttggttggagttgtgccaaaatgtgaggtgcccggtgtgggacgcgcagtccagttggggctctgcccgcctcgggcctgacctacttagtggatccaagttaagagttggcaggatccgcacaaaactgattttattacttttgccactgtggtacttcgtgttagtgtgtccagagttttaaaatcaaagatgggaaaatcggagaaaattgcccttccccatggccagcttgttcatggtatacacttgtatgagcaaccaaagataaacagacagaa

SEQ ID NO: 17141 - DNA, 486 bp, Homo sapiens
  misc_feature (1)...(486): n = A,T,C or G
tgatggccnnnnncnnttttaaactggaccctcgaaanactganatccctcgaaaacccacgcgnncgggatttgtgtaacttatgaaggaagagtccatttctaatcaaataattcacctgttttactagcttatagggatctgatttcagaagtttcctgtatcttttttacatacatcagaaaaagaaatgtttactatatttttggttccatttatgattgtattaagcatttgactataaggaaaactaacaattaaatcaattagaaaagcaacataaaattaaatgatatttaggaaatcagttatatgtgagcttgggtattcaaatgtcacaaataaaaagcatataacctttnnnaaaaaaaaaaaaaaaaaaaaaataaaaaaaaaaaaaaannnnnaaaanannnnnnnnntttttnnntttttttaaaggggaaaagatannncgtggttttaaatttttttttttttttatg

SEQ ID NO: 17142 - DNA, 402 bp, Homo sapiens
cccacgcgtccgcccacgcgtccgaattgaaatccaaaatgatttatagaaacgaaaggcattttccatttgttgtcttctgccgaaattctgaattgcatacacgcatgaaggataatgaatggtttcaacggtgctatattaggttctctgattttcatgacctatgtatgtttggaaatacaatattgtataaaatgtggatcgttttgttaccgatttaatattgccattttaatttggtgtaacaattggttacacttgtttttcaaagctatcctttgaggagaaagtcaaaatgtgttgttagcctacctccactcaggcctcttgctgtgtaatcattattccaggttatgatgtgcatagcttttaaaactgcgtgtactattattctgctct

SEQ ID NO: 17143 - DNA, 486 bp, Homo sapiens
  misc_feature (1)...(486): n = A,T,C or G
ggcgggtttttacgacagcctcgatgagcccgtatncccggccgacccacgcgtncggactgagggtgcccgggatccttcacccccacatccattgagtccacggaacccagggtaactgggatggtatctgatagaaaaaatccaaatctgttgttctccttgtcttggagctgaccctttccagcagatgatatcacctctaagagatgggagtctcactgttttgcccaagctggtcttgaattcctggcctcaagtgttcctcccgcctcagactcgcaaagtgctgggattacaggcagaagtcactgctccaggccacattatttttatgattattatgattaatacttttaaatagttgtactttgggttcttgggaacccagagaaataaccttcttcacaaagttagttcaaaggattttttaaagcttagtgctaccgctctaaatgactttttaaagaaaaacatttcatattg

SEQ ID NO: 17144 - DNA, 473 bp, Homo sapiens
  misc_feature (1)...(473): n = A,T,C or G
cgagggcccaatgatcccttgcggtagagcnccgtaattaccggcncgacccacgcgtccgtaataacttagtaaggcatctggatgcttgtgaattcatgggaaatgctacagctatttgttcagataaaacaggaactttgacaatgaacagaatgacagtcgttcaagcttacataaatgaaaaacattataaaaaggttcctgaaccagaagctattccaccaaatattttgtcctatcttgtaacaggaatttctgtgaattgtgcttatacatcaaaaatattgccaccagagaaagagggtggattacctcgtcacgttggtaataaaactgaatgtgccttgttgggacttcttttggatttaaaacgggattatcaggatgttagaaatgaaataccagaagaagcactgtacaaagtctacaccttcaattctgttaggaagtccatgagtactggcctgaaa

SEQ ID NO: 17145 - DNA, 391 bp, Homo sapiens
tcacccaatatctccagccgcgcattcccgaagagtgtaagatgttcgcctgcgccaagctcgcctgcaccccctctgtgatccgagctggatccagagttgcatacagaccaacttctgcatcagtgttatctcgaccagaggctagtaggactggagagggctctacagtatttaatggggcccagaatggcgtgtctcatctaatccaaagggagcttcagaccaccgcaatcagcagagacattgatactgctgccaaatttattggtgcaggtgctgcaacagtaggagtggctgcttctggagctggtattggaacagactttggcagccttatcattggttatgccagaaacccttcgctgaagcagcagctgttctcatatgc

SEQ ID NO: 17146 - DNA, 402 bp, Homo sapiens
ctgaccagtactcctcaaaatgtccaggtcatcacttgcaaggacagtctgagaaacgtcacatccagaggaacctaagaatgaggactcaatgtaaaagggatcctggaacagaaaaaagacattgggaaaaactaatgaaatctgcccaaagtgtagagcttagtttagttaataacaatttttaaagaggtattaaaaaaaaaaaaaaaaggcagggaaaggccgggggggggcctcccccctttaatcccacccctttgggaggccagggggggaggatcttttgacctaaaaagtttgaaaccagcctgggcaacatagggaaaccccatctttacaaaaactaaaaaattacccgggggggcgggcatgaccctgggttcctaattactagagacg

SEQ ID NO: 17147 - DNA, 402 bp, Homo sapiens
aaatgtctagcaatcctttactggctgccctgttttttgggcactgcaaggcatacttggaactctctgtgtacatgggcagagtttgtcagcaagtgggactcatggaagacaatcaggtataggagggaggcaggagcagatgtggctgcagaagagaagaaagcaatgtgaccacagaaacagagattggagtcatacagctaccagccgagaacaccggcaggcagctgccagaagatggaagaggcaaggaacagattctccccaagaccagaaggatccaatcctgatgacaccttgattttattcctatataactcattttgaatttatacttaattgtaattgttctggtttccagaactgtaaaaacaaaacaaacaaaaaaacccaaaaaac

SEQ ID NO: 17148 - DNA, 401 bp, Homo sapiens
gaacttgaaaggagggtaaaaagactaaaatgagggggaacagagttcactgtacaaatttgacaactgtcaccaaaattcataaaaaacaatagtactgtgcctctttcttctcaaacaatggatgacacaaaactatgagagtgacaaaatggtgacaggtagctgggacctaggctatcttaccatgaaggttgttttgcttattgtatattcgtgtatgtagcgtaactattttgtacaatagaggactgtaactactatttaggttgtacagattgaaatttacttgtttcattggctgtctgaggaggtgtggacttttatatatagatctacataaaaactgctacatgacaaaaaccacacctaaagaaactttaagaatttggcacagttcg

SEQ ID NO: 17149 - DNA, 391 bp, Homo sapiens
cccacgcgtacgcggacgcgtgggcgatctcctgactctctgtgatctgcccgccttgggctcccaaaatgctgggattgcaggcgtgagccaccgtgcctggccttgaaattctacatttctaaccagctctccggtgttgctattggcttttggatccgcactttgcagagcaagggtttagagctgatgaagcctctgcccagctgccagctcacacattcctgtgaaagagccagggggtgggtctgaggagccccattttacagatgagatgactgaagtaggggtggggaagctcgcttgctggacattgagcatttggaagctggttgtaaggtggagctcccaccagtcctggttgaaggggtcattttcctggggcaatgga

SEQ ID NO: 17150 - DNA, 462 bp, Homo sapiens
  misc_feature (1)...(462): n = A,T,C or G
taaaactggatatcctgcttgaatacgccttcggaaacccgggncgacccacgcgtccggaagcctttagttattcctcaacttttcgaagacatatgacttcacactctggagagaagccacataaatgtaaagaatgtggggaggccttcagttattcttcggcttttcgaagacacatgataacacacactggagagaaaccctacgaatgcaaacaatgtgggaaaaccttcatttatctccagtcctttcgaagacatgaaaggattcacactggagagaaaccctacgaatgcaaacagcgtgggaagaccttcatttatccccagtcctttcgaagacatgaaaggactcatggtggagagaaaccctatgaatgcaaccagtgcgggaaagcattcaatcacccctcctcctttcgaggacacatgagggtgcacactggagagaaaccctatn

SEQ ID NO: 17151 - DNA, 399 bp, Homo sapiens
cccacgcgtccgaccccagccaaagatgacagcagaacaacataatttacactgtgatttatctttttgctgagggggaaaaaatgtaaatgttctgaaaattcactgctgcctttgtggaaactgtttcagcaaaggttcttgtatagagggaatagggaatttcaaaataaaaaattaagtttgaaaaaaaaaaaaaaaaaaaaaaaaaaaaaaaaaaaaaaaaaaaaaaaaaaaaaaaaaaaaaaaaatatgttaaaaaaaaaaaaataaaaaaaaaaaaaaaaaaaaaaatggggggggggggcgtattttttaaaacctcgggggggaagcataaaaccacccctaaagcataatttttttttttctttgtggggagtgtaaaaaaaccgctag

SEQ ID NO: 17152 - DNA, 477 bp, Homo sapiens
  misc_feature (1)...(477): n = A,T,C or G
agataggggccggggggttttaataccgaaatcccgtatnnacttcaanaanccngggnngannangcgtncggccatggagtgctctggggttaggtaggaagggaggttgaaaatgtgggcatggatcatggggaagtaagagaagcagagctatgaaatagggagtgacatcaggatgacacacgggcagggagaggagggcagcggggagcagggaggaagtgggtgacaggaaggaatcagagctgccagttccagctcacgcttgtagtggctccggaaagcctcatccttgggcttcttgggatagagatttttgagctgagcaagatcccggattcggtcccccagtgagcgaatggacaggtctttggcagagaatggctggatgttctctatctgtggagagccatcctggccccggatgacatgggcaatggtgatgcccccaatctctgagtcgctgaagcggan

SEQ ID NO: 17153 - DNA, 493 bp, Homo sapiens
  misc_feature (1)...(493): n = A,T,C or G
ggcggggtttttatgatngctctgcgatagaggcccgtcanaacngngccgacccacgcgngcgcgggtttgccgccagaacacaggtgtcgtgaaaactatttctaaaagccattatgggaaaggaaaagactcagatcaacattggcgtcattggacacgtacattcgggcaagtccaccactactggccatctgatctataaatgcggtggcatcgacaaaagaaccattgaaaaatttgagaaggaggctgctgagatgggaaagggctccttcaagtatgcctgggtcttggataaactgaaagctgagcgtgaacgtggtatcaccattgatatctccttgtggaaatttgagaccagcaagtactatgtgactatcattgatgccccaggacaccaagactttattaaaaacatgattacagggacatctcaagctgactgtcctgcctgattgttgctggtggtgttggtgaacttgaagctggt

SEQ ID NO: 17154 - DNA, 422 bp, Homo sapiens
tgtgaatttgtcatggaagtcacaaataaaacacgtgcagatgtaaagggcgggacactcactcaatatgaaggcaaactgagactggtggaaattgctcaagtgccaaaagcacatgtagacgagttcaagtctgtatcaaagttcaaaatatttaatacaaacaacctatggatttctcttgcagcagttaaaagactgcaggagcaaaatgccattgacatggaaatcattgtgaatgcaaagactttggatggaggcctgaatgtcattcaattagaaactgcagtaggggctgccatcaaaagttttgagaattctctaggtattaatgtgccaaggagccgttttctgcctgtcaaaaccacatcagatctcttgctggtgatgtcaaacctctatagtcttaatgcaggatctct

SEQ ID NO: 17155 - DNA, 405 bp, Homo sapiens
ctaaggcacatgagatgatatgctttctgtttgagtttctcctttatgttacgcatactgataaaattgttgatgccagttgatctgaaggtcccagcaaggagccgactcacagaagaatgcagttttcacatcatgatgatttaatcttccttgacctgagcaattgacaaccccaattctccagaacctcacccgccacaatccccttaaaaaccctggcccagaacccctcaagcagacagatgtgaagcttgaggattccttcatctctttgcccaatggcattgtgattattaaactctttttctgctgcaaaaaaaaaaaaaaaaaaagggggggccgttttaaagaatccttgggggggccaaagtttacgcgggcttgcaaggttttatttttttc

SEQ ID NO: 17156 - DNA, 409 bp, Homo sapiens
tcacagttggcagcaacgtctccttttgggtgtggatttatttgttccccaatgcaactgtgagcaccatgagtgcaggaaagtgcctgtttctgatcatggtatttcctgggtgtgacttcatgtacagtcaagaggagaaactctgagtgggagcactagggaatagttgaagcttaatcttcattttggagaagagggagtgttattatccacgttcattattcacagtagcaaatttcacagtagcaaaaaggtgacagacactcaattgtccatcgacagataaatggataaacaaaatgtgccatatccatacagtagaatattactcagacataaaaaggaatgaaattccgatgcgtgctacatgtagacaaaccctgaaggcatgatgctatgtgaaatt

SEQ ID NO: 17157 - DNA, 402 bp, Homo sapiens
atctgaaataatgcattatgtacaaatcagatcagtccctttaaaatagaacaaaatggatttaatggctcaccactccttcaggatgtgtggatttatctatggagagtgcagaaaaaggagataacatttacactttgccctctcaacatatggacagagagctgacctggagaaacatgccaaatgagataccaaaatagtgagacaccaacataatttctgaaaatgccaggcagcacacaagcattttgctgagatttgtaaaacatgagaaaaataagtgttaagtctcaaccaacacaggtttaacagaaaactttaaaaaggtatgtattacacatatataagaatctgtttcaacagataatcatgctgactgggcacgaatatttccttgat

SEQ ID NO: 17158 - DNA, 487 bp, Homo sapiens
  misc_feature (1)...(487): n = A,T,C or G
gtagggccggggggnaattaaaaatgatngctgctgaaccgccatgataaccctgggcgacccacgcgnncgncagattggatagctacatgttttagcccccttttcaaagtatatgttctccttggtacttattttgacggtctgacttttctacatatgctttatcaacctcttaattaaaccatcattgtctattttgagagataactgcgctgcttcccattgtgtgttttaaatgttattgttcagtttgagtcaaataaaaggatatttaatctgtggtgccttgaaaaaaaaaaaaaaaaaaannnnggggggggcccgtttaaaagaatccttgggggggccaaatttaaccggggaagggaaggaaaaatttttttccttatggggggccaaataaaaacctacttgggaattttgggaaagaacccttcttttggggggggaacatattgggccaacctccttacggagttttagg

SEQ ID NO: 17159 - DNA, 399 bp, Homo sapiens
cggacgcgtgggcggactcgtgggattaaagtgagttatttcttactatgagtgaatagtttaggtcatatttttttctgggagattatgaaaatcaagttatctatttttttgttttgaacagtaataaataagctagtttcgcaaactgggaatactgtttatattatgcagatgatttcttgtcatttccagcttgccaaagtaaacataagatgattgattaggattaaaatacattttctggccagttctaaaaatatatatattaggaatgctgattgtacattttcaaatcaagcaaatgtattgcctttccaattcaatacataaatgctcctgttaaacactggtgaagcatctgtttttatactttatagggagattagtggcaactct

SEQ ID NO: 17160 - DNA, 486 bp, Homo sapiens
  misc_feature (1)...(486): n = A,T,C or G
gtagggccggggggaatttacctgataccctccgaatngcncttgataccatggcgaccnccgcgnncgnccacgcgnncggcaatatattggaaatatcatgggctttaatgtcacttatcaaatgcatgaatgaatagatgagtaggtgatcatctacaaccattttcacattctgactttgttactttcttaacctctcttcatttgtacactggggagcctaacatctgcctcacagggccactcattcattgacaaagaagtattgagtcactactatgaacaaggaattgcagagatagcaaaaaaaaaaaaaaaaaaaaaacttcccttgtttaatgagggaggggggaaagggaaaaactggaatttggggaaaaaaggggggaaaaaaaaaaaaaaaacatgaagtatgtaaaaggtggaaaatagggcttggaaaaaaaaaaaaaagaaaaaaaaaaaaaaaaaaacggtctgggg

SEQ ID NO: 17161 - DNA, 480 bp, Homo sapiens
  misc_feature (1)...(480): n = A,T,C or G
catcccgaactgatangcttcngatnnncncaagnttggcangaaaccnctccnnaannnngggnngacccacgcgtccgaatttttttttgactcgaattttgtggacactagtcatttgcataatttagggtggaggagctttcattgggaggaagttctcagctactatattctgccattaaaattaaccatgcctgttaattttacattgcttgaagatataagtaagctgccgtcaatattgttttaagattttcttatagtttatgtttaaatggaaaagttacatatataatctatggggcagggtcaggcattggccattaaagataagtttggctaactattttactgaagagactaatggccttccctctgttggactgctatgtttcttgatctgtttttccccaatgtaacagtctacattgaagncctttagctctctccatatactaattgacatttgttaaggag

SEQ ID NO: 17162 - DNA, 421 bp, Homo sapiens
  misc_feature (1)...(421): n = A,T,C or G
atttggggtccttttttatacaggaaaaacaaaacttagaaataatggnctttttttttttttaaagggtccttcctcggttgggcttggccatggggcaattggaaaaaccccctgggaaaaggggactttcttgcaaacccttaaaaacgggttaaattacaggccctaggaagtcaggggacccctttgactgccaaagtttaaaagggaccggaaatggcttttttgaatagggattttagggggggcgggggggctcacccctataaccccaccacgtggggaggccaccgcggggggatcacctgaggtcaggagttcaaaaccaccctgactaacatggggaacccttgtctttactaaaaatacaaaattagccaggcgtgggggggccccctgtatcccactctctggggaa

SEQ ID NO: 17163 - DNA, 428 bp, Homo sapiens
  misc_feature (1)...(428): n = A,T,C or G
gcgctgcgcaggagccgcagggccgtaggcagccatggttcccagccggaatggcatggtcttgaagccccacttccacaaggactggcagcggcgcgtggccacgtggttcaaccagccggcccgtaagatccgcagacgtaaggcccggcaagccaaggcgcgccgcatcgccccgcgccccgcgtcgggtcccatccggcccatcgtgcgctgccccacggttcggtaccacacgaaggtgcgcgccggccgcggcttcagcctggaggagctcagggtggccggcattcacaagaaggtggcccggaccatcggcatttctgtggatccgaggaggcggaacaagtccacggagtccctgcaggccaacgtgcagcggctgaaggagtaccgctccanactcatcctcttcctcaggaagccct

SEQ ID NO: 17164 - DNA, 407 bp, Homo sapiens
  misc_feature (1)...(407): n = A,T,C or G
ctgggggactgtgcagctcgaggctccagaggcacactccagagagagccaaggttctgacgcgatgaggaagcacctgagctggtggtggctggccactgtctgcatgctgctcttcagccacctctctgcggtccagacgaggggcatcaagcacagaatcaagtggaaccggaaggccctgcccagcactgcccagatcactgaggcccaggtggctgagaaccgcccgggagccttcatcaagcaaggccgcaagctcgacattgacttcggagccgagggcaacaggtactacgaggccaactactggcagttccccgatggcatccactacaacggctgctctgaggctaatgtgaccaaggaggcatttgtcaccggctgcatcaatgccacccaggcgn

SEQ ID NO: 17165 - DNA, 474 bp, Homo sapiens
  misc_feature (1)...(474): n = A,T,C or G
gaggccgagagggttaaacctgatagccgtgctgaaccctgatggactttccgggncgacccacgcgtccgcggacgcgtgggttttaaaggttctgaaagagaagtctggttttgatccacgttgccacattgtaatgtggtcatagttggtaagtgcccttccgtggctgagccagatgctgcatatatgggtgaaacccgagcacgctgccctctgcttcctgagagggcatttgtaggagtgggtaagggcttctctggagcacaactgcctggctttggtgctgtctcccccacttactagcagggaggacttatcctctgtgggtgttcccttcctttcctgtttttaagaagaggtgaatgatagtatccttttcatggcattgttgtaagggttgaatgagtggctcacagtagaggctccatccacgcttgctcttatcattcatagaacatgaacgattggatn

SEQ ID NO: 17166 - DNA, 481 bp, Homo sapiens
  misc_feature (1)...(481): n = A,T,C or G
attccgaaattgaaantcatctggatanccncttggggggctgngcaaccncnccgnaannnngggnngacccacgcgtccgcccacgcgtccgcccacgcgtacgcccacgcgtccgcccacgcgtncgcagaaacgtgaagccagcaattgtttcgcaattcggcattttgaaaacaaatttgccgtggaaactttaatttgttcttgaacagtcaagaaaaacattattgaggaaaattaatatcacagcataaccccaccctttacattttgtgcagtgattattttttaaagtcttctttcatgtaagtagcaaacagggctttactatcttttcatctcattaattcaattaaaaccattaccttaaaatttttttctttcgaagtgtggtgtcttttatatttgaattagtaactgtatgaagtcatagataatagtacatgtcaccttaggtagtaggaagaattacaatttc

SEQ ID NO: 17167 - DNA, 419 bp, Homo sapiens
caggaaagaaggtattttgtcaaatgtgaccaggaattttaatgtttgccaccagtgtgacctaaatcttagcattatggacttggattctttgcaggtagagaaatatgtgatttgaaaaaaaaaaaatacagtaaaaactgaggtaataggatttactgatgcatcttgtccaactaaacataaatttaggggttaacttttccctctcattatgggacagactttttctttactcaatcatatttcatttaaaaggtcactattgggagactctctgaatctgctgtgattctgggggctggtggataagaaaaataaaaaagtatcactattaaaatttttaattttaaattaaaactggtattattttcctatatttcaaaaaaattgggggggatttgacttgaaaggacaag

SEQ ID NO: 17168 - DNA, 401 bp, Homo sapiens
  misc_feature (1)...(401): n = A,T,C or G
cccacgcgtccgcttgtaattatttcataattcttactgctggaatatttttgtgagctttctccttttgattaaaccaagttaaaagatagttgaaatttgaaattatactattttcctgttgttgncttctcagaggaacatcttgagggcccagtttatctgtagttcatactagatacttgctgatagtgtcattgtagatgtcttcaccttatctatccagtgttcttgtagaatatatcagctgcagctctttcctccccaaataacaaacataaacccttaaacaccgaaattttgtttcaccaaaacttttcaaaaagattataatactattctagaacttgaaatcatattctctgctcttaaaaatatataaaatacaataataaggaccc

SEQ ID NO: 17169 - DNA, 246 bp, Homo sapiens
actagttctatcttaggaaaatcaaggcccgcaaaggcaaataaatccttgttttgtcttcacccatgtaataaaggtgtttattgttttgttcccacatttatgttgcctgaatatatgactgttttctctgctttaaaaaaaaaaaaaaaaggggcggccgttttaaagaatccttgggggggcccaagtttacccgggcatgcaaggaaatagttttttccttatagggagccgtattataac

SEQ ID NO: 17170 - DNA, 416 bp, Homo sapiens
cccacgcgttcgcttctttagatgatccactactgattaaagaatacctgtgcctgcacattccacatgcaaagaaagtgaattatgatttacacagacaaggaacaggcgatacattttcattggttagaatctgatctttctgtaataaaatagattttcaattcaaaaaaaaaaaaaagggggcgcccttttaaagggccccttgaggggccccatctttccctggggggggacgtaaaaaattcccccctgatggggggcggaagaaacacctcctcggcgccttggcaaaagaaccctactttcggggggggatttaaggggccaaacctcccaaaaaatttttaaggcttaaggggaaaaaaaaacttttaacggcttaggggggcaaaactattgaatatccttggggg

SEQ ID NO: 17171 - DNA, 398 bp, Homo sapiens
  misc_feature (1)...(398): n = A,T,C or G
tccacgcgtncggaaagaatttgaaaaagagaatttttgaccctcaatgtgtaaagggatacaaaaattgctgctaggtgttctgagaaggaccacacagaaataccatgccttgaaggctcaccatggttacaggatattttttgctagagtactagtagtgggaataacaagaaaagtggctgggcacggtggctcatgcctgaaatcccagcactttgggaggccgaggcaggcagatcacctgaagtcagtcgtttgagaccagcctggccaacatgccaaaaccccgtctctactaaaaatgcaaaaattatgtggatgtggtggcacgcttctgtaatcccagctactcgggaggctgaagtgggagaactgcttgaacctgggaggtggag

SEQ ID NO: 17172 - DNA, 417 bp, Homo sapiens
  misc_feature (1)...(417): n = A,T,C or G
cctggaggcacgggtggaagcagcattggactcccggaagaactacaactgggccatcaccagagaggggctggtggtcaggccacaacgcagggactcctaggggcccagtaaggacagtgcccgccagggaccatgtatgtatcatggcggaagagttggccctgacctggaataaagcagttggtgttgcttatgaggaaggttcagccttatccagcacagccttcacgttttgccctctgctgtcaccacttggtcagaaacttccaaacgcagtgccctgttctgccggtgtgtaaagcctcagcgcaccaggagaccctagagtggtttccatctcacagagaatcagacagggccacagccccctcaggcagccaggtcatctgagtatcattaagagtagtgatgggn

SEQ ID NO: 17173 - DNA, 405 bp, Homo sapiens
aatctggtgaagggttctgaatatctccctcttcatccctcccgaaatctggaatacttattctattgagctattacaccagttttaacaccttcctcgtgttatgtttaaaaaaataaataaatttaagaaaaccattttaaataatgcacagttgcagcctggaaaaacttaaggtggcgccttatagtatcaattttaggagctttatttggtgcatttaacgcaactggtaattgcagaatccactttgcctgtgtaagtgaaaaatatagactgttatcttgttggccctatgaaattctgcacttttcattatatactctaccttcattaattacttctggcaagatgttctgccttagcactcagttgcattcttttcctttttcttcctgttcatta

SEQ ID NO: 17174 - DNA, 408 bp, Homo sapiens
  misc_feature (1)...(408): n = A,T,C or G
cagacaagtactttgaaacaagaagatgcttctaaaaggggaggttcattacacctgctcactacagtgatgtcgtggatgaacgttctattgtcaaactctgtggttatcctttatgtcagaagaagctgggaattgtaccaaaacagaaatataaaatttctaccaaaaccaataaagtctatgatattactgaaagaaagtctttttgcagcaatttttgttatcaagcatctaagttttttgaagcacaaattcccaaaactccagtatgggttcgagaagaagagaggcatcctgattttcaactgctaaaggaagaacaaagcatgattccacctttccactgatagactcaagttcccagaaccagattagaaaacgcatcgtacttgagaagttgagtan

SEQ ID NO: 17175 - DNA, 407 bp, Homo sapiens
  misc_feature (1)...(407): n = A,T,C or G
gcaccatgccccgcatagatgcggacctcaagctcgacttcaaggatgtcctgctccgacctaagcggagcagcctcaagagccgagccgaggtggatcttgaacgcaccttcacgtttcgaaattcaaagcagacctactcagggattcccatcatcgtggccaacatggacactgtgggcacgtttgagatggcagccgtgatgtcacagcactccatgtttacagcaattcataagcattactccctggatgactggaagctctttgccacaaatcacccagaatgcctgcagaatgtagccgtgagttcaggcagtgggcagaatgatctggaaaagatgaccagcatcctggaagctgtgccacaggttaagtttatttgcctggatgtggccaatgggtan

SEQ ID NO: 17176 - DNA, 414 bp, Homo sapiens
gaaagataaagaatgtataaatttcacgtaaattagtcacgtatcacttatcaatggggatacgttctaagaaatgcatagttagggaatcttctgtgaaaatcagcttgtatttacacaaacccagatggtagagcctattttgtcccaaacctacacagcatgttactgtgctgaatactgcagacaattgtaacacaatatttgtgtatctaaatatagaaaaggtacagtaaaaatatggtctactaaggaaacactgttctatatgtggtccattactgactgaagtatactgtctagaagtctgaggctcaaagaaaagtaatccctcttctgaatccacaccccatcaattatcttactttcttctggggagatagatagatatactatctcactagcttgactaag

SEQ ID NO: 17177 - DNA, 403 bp, Homo sapiens
aaacacaagcaggagatccggaagaatcctgagttccgtgtgcagttccaggacatgtgtgcaaccattggcgtggatccgctggcctctggaaaaggattttggtctgagatgctgggcgtgggggacttctattacgaactaggtgtccaaattatcgaagtgtgcctggcgctgaagcatcggaatggaggtgagggtggctaggtcctgtgaactggactctggacttctctgagagggagaaaaccgtaaaagattatcgtttccatcctgcagtctacaggcctctaaggacttgagagacatcttagctgtttcatgcagttgaatccatggcaagtctccatggccaagggtaaatagaattacctgaacgattgtctctgttctccaaagatct

SEQ ID NO: 17178 - DNA, 479 bp, Homo sapiens
  misc_feature (1)...(479): n = A,T,C or G
ggaacgagccgggcgcgttttcaattgaaaactgcggcctgcgacgnacnnnngggnngacccacgcgtccgcggacgcgtgggattaagttaaacacttagagttgagtatattcaggggagaaaagtgaatgaaatgactcataataagaaagcttgctcccttgggacagttaccttcctggtgtcattgccatcctgggttgacaagctgagagtagaggatacaagtgatgtgaataaaatggaaattgcattgagttaatgaaacatacacttttagatcaagataacacttcaacagcctttttagaaattggcacactcctatggtcccacctactcgagaggctgaggcaggaggatcactanagtacaggagtttggggctgtagtgtgtaatgatcacacctgtgaaagaataaccactgcactccaacctgggcaacatggcaagaccctgtctctttaaaaaaaan

SEQ ID NO: 17179 - DNA, 401 bp, Homo sapiens
  misc_feature (1)...(401): n = A,T,C or G
cgacagcatctgaaggagaaatttaataaatactgccggttaaatgatcacaagaggcccatttgtagtggctggttgacaacggctggagcaaattaaataaataaaatagctctgtctttcaatgaaacactcacgatgactactgcgccttctctttcgaaaaactcttaatttagtgacttatggcaaaattttatcttaaatcaatgtgattctttcttgttttgggagacggnggaggtatcctcattagttctttcttcaggcttgtgtctttagttgcgtggctgcgcaggcctgccatatgatttaagccatctcttttcattaaatgtttctcttcctgtgagacttactaaagcaacttagtggcaaaaagtaatgttgtacttataatt

SEQ ID NO: 17180 - DNA, 403 bp, Homo sapiens
ctgccactcctcccctagtgtgccagtgtgtttacttgaactcaagaacttgaaagttacttaagaggattaattaaagccttcaacaaggaagcaaatcaccttgaggctgttaagaccttatctgccatccaccctggttggtgccctcaaatctgtctggttcacagaattccttgcagcagtgtcttctcccagtcgaattatgctcactagactttggggttatcgaagttccttgtgaaccaacctcgtgaatctgatcgagtcacttaaaaaccttgagctggctcccgtcgtccttagtagaatccaaaattaatatctcggcctctcaaggtgctgggatcgcaggcgtgaggcaccgcacccacccagcctatatttcgtatatatatgccat

SEQ ID NO: 17181 - DNA, 402 bp, Homo sapiens
atccctctggatgaaggacggcgctgtgaacctgtccttggaccgcggggcatgcatgatctggaaggaaaggaggagaggcttgaagacagtttgagcgcaatgatgaccataaatgtgtcagaatcaaggaaagttacgcttggtgtgtgttcctaccagtttgaacaccatctcccaggaaaaaaaaaagaaaacaggaaaatccacttccagaaaaaaaagggtacttttctgattccttatgacagaccactcaccttgccaaatcccagcgcatccaggagggctgagcaatggagagctgtgggtaatggaaagcttgggctcctgggagtttctgtgcgtgctacgtgtgcattttccccttggaaacagaacacactaggaactccaagagtc

SEQ ID NO: 17182 - DNA, 436 bp, Homo sapiens
cggacgcgtgggtgggaatataggtgctgatttaatatagtctgtactttttgtgtacctaaatatttcgtgataatttttaaaagatgggccttaaaccaatacagtcatatcatttaactcaattccatgaatttacaatgcaatccacagtgcccacaaccccatgtttctggaaaatcaggagtattgggtacaatggaataaaatgcacgaaggcaaataagagatcaggcttttaggacctaggaaacaaataaagaggaatttgttgctgaaagtaatgtgtagctgacactctcattacctgacacaatgggagacattatgtctgggaataagacatctatttccatagcactgtagtcctgcaaaggagttggaagttacgaatttttaaagattttagaacattatatctttagtctctcataag

SEQ ID NO: 17183 - DNA, 425 bp, Homo sapiens
atttgggacaaaaactgctacatcaactttcatctcgtccagagtgctcaaggctggtatgatcagtggatcaggaatgcaattgtgaattcctgcccattgcctctcttggtgaatgtggaaatggccacctgggttttcccatatcaggaagggctttgggatggcacctatattggctgataattgaggatgcaaacattccattcattagtgtgatcgagctgttaatttttagactatagatcaaaatgtgaaacattttatgttcaatccatatttgtcttgcacattataaatatatttttattttttagtaatttaggggagggaggagggagaaagggataatgatgcccttggcataattcacaaaagcagctgtgacaacctccaatcagtttacttcatttcaaaactatttg

SEQ ID NO: 17184 - DNA, 424 bp, Homo sapiens
cggacgcgtgggtatatatatattttttgagacagagtctcagcctgtctttattttactagtttgtttttcattcattagtgtcataacaagttaatacagcaagtagttccagggcactgggcaatgtattcaatttttattaaaattctcacttgtgagtttttcttttaaggtattaggtctattctattgaatttggacagtatccaaaaagcctgtgactgtatgttgtacatttctgtccctctcttaggtggaagagaaacctgatgtcacatacagtgatgttggtggctgtaaggaacagattgagaaactgcgagaagtagttgaaaccccattacttcatccagagaggtttgtgaaccttggcattgagcctcccaagggcgtgctgctctttggtccaccccgtacaagc

SEQ ID NO: 17185 - DNA, 397 bp, Homo sapiens
  misc_feature (1)...(397): n = A,T,C or G
gcaaaccttgggctgcagtcatgggcttcaagtctagcaggtacaggagtctggagttggcacccgtaatctacagagggaggcccatcaggacttcggtcttgatctcagtgggctccatcctcgtctctaaccagcctcatataggcagcagggctgcagtggcagtgatgtttatggaaggacccattattcccaaacacatctttggggaattaccttaccgttagagaaatgggacttctaggtgtctggaatttgaacatggggaatttgagagcatagacgatctctgcctctgacctcccccttttctggggaaatgtgttcttggtcctcagcctgctggtgcagcccctcccaggaatccctgccagtgtgggtcatggagattggn

SEQ ID NO: 17186 - DNA, 411 bp, Homo sapiens
  misc_feature (1)...(411): n = A,T,C or G
cccacgcgtccgatcttttaagtggagcttttaatccttttatgttcaaaattaatatttatatgtgaggtttattcctgtcatgaaattgttacctagttgctttgtagtctcaatggtgtgattgttttatcagacctgtgagttaatactttcatgtgtttttatggtggcaaatatcaacctttggtttccacatttagaattttcttgagcatttcttgtagagtcccgttgttacaaatccccttagcatttgcttgtcttgcaaagactttatttctccctcaattatgaagcttagtttagcagaatacaaaattcatggttaacagttttttccttttagagtcctaaagcanaacccccatctcttctggtttgtaaagttctcctgagaagcctgctgta

SEQ ID NO: 17187 - DNA, 397 bp, Homo sapiens
  misc_feature (1)...(397): n = A,T,C or G
tgattgggtattttaaaaaccagtatcatctgtcatctccaaaagattataggagtcagctggttaatacagtagtgttagtaggttctgtatttttaattcagtacttagaattctaggtcctttattgcccaaagtcagcacagttagtttataccacagactctgtcttggggcacagtagtggggcggggtagtgactttgcctaaacatcacccagctggaacagaggctgagcggggctttaggcacttgccagatgggaactgggttgcaccctccttgctccctgtcattttcttgtcactcttcctgcttcccagtgttttattttatgccttgctcgttgtacatcatgatgactgatggtcttcaaggttgtgaggaaagccgttn

SEQ ID NO: 17188 - DNA, 477 bp, Homo sapiens
  misc_feature (1)...(477): n = A,T,C or G
agaggccggggagnattaaaactgatagcgtgcgtaaccgctgaggaccctccggancgacccacgcgtncgccttatacttggggtggcagatacacatgacaatgttcaaaacaaaataaactattacttgattttttaaaaaatccaaggagacaggatgaataataagtcttcatatctgtacactcacaggaaagataaggcttctgtaccctcaaggctagtttactaaaagcaaacaaactgactatgtcatgtaagcacttacctaccacaacaaaaccactaaattaaaagaaaacatacctaataccgtcttaaaatatttttaaaaacccttgctaacaactttattctttgacactttagaagatatccttctcacatcatcaccttcttattattgaaaaaatactgagctctttcaatctacaggggggcttgctcctttttttttttaaaaaagggcggcaa

SEQ ID NO: 17189 - DNA, 415 bp, Homo sapiens
  misc_feature (1)...(415): n = A,T,C or G
cccacgcgtccggctctttccacgcgtgaggggcgtggggcttgggagactccgggggctcaggccaggaagaggctgagccgagacgcgagcccgaggctggcagccttggagcttcgcgacatgggcttcagggaaggaggagtgaagaactgtacaggtgcgaggcccctgggacacgagggacgccctggccacgtcctggctccggtcggcttagtttttacgtttcttgaatttgcgcccggcctcccagcccgtggcccctcagctgtctgaaaacgtggtgaaccgcatgaaggagcccagctctccaccccctgctcccacatcttctacctttggccttcaagatggcaacttgagagcccctcacaaagaatccacactgcccaggtcggngagcagtggtggn

SEQ ID NO: 17190 - DNA, 388 bp, Homo sapiens
cggacgcgtgggcacctctcttggtccagcgagcgttgccgggccagggtcaagcggagggctccgacggcgcggacggagcgaagcgccgagccatggcgcaccaaacgggcatccacgccacggaagagctgaaggaattctttgccaaggcacgggctggctctgtgcggctcatcaaggttgtgattgaggacgagcagctcgtgctgggtgcctcgcaggagccagtaggccgctgggatcaggactatgacagggccgtgctgccactgctggacgcccagcagccctgctacctgctctaccgcctcgactcacagaatgctcagggcttcgaatggctcttcctcgcctggtcgcctgataactcccccgtgcggctgaa

SEQ ID NO: 17191 - DNA, 476 bp, Homo sapiens
  misc_feature (1)...(476): n = A,T,C or G
attggccgaggaggntttaaaactgataccgtgcgtnaccgttgatgaccttccgggtcgacccacgcgtccgggcggcagcgatggatgtggataccccgagcggcaccaacagcggcgcgggcaagaagcgctttgaagtgaaaaagtggaatgcagtagccctctgggcctgggatattgtggttgataactgtgccatctgcaggaaccacattatggatctttgcatagaatgtcaagctaaccaggcgtccgctacttcagaagagtgtactgtcgcatggggagtctgtaaccatgcttttcacttccactgcatctctcgctggctcaaaacacgacaggtgtgtccattggacaacagagagtgggaattccaaaagtatgggcactaggaaaagacttcttccatcaagcttaattgctttggtattcatttaatgactntccctgctgttacctaattacanatt

SEQ ID NO: 17192 - DNA, 267 bp, Homo sapiens
aggggctggaggggagatgggccagctctggagggtgcctggttctgggtgtgggtcagggaagaagtgaaggttaaatcagcgagtgacaggtgaaattccatttctgacaaagattatgggtttgtctgtgtctcactcgaatctctgggtattgcttttatatttcttgaaactatattaggtacctatgtattttggaacatttaattttctgattgaacttgtcaaaatgaagtatgtttatctttaaaaaaaaaaaaaaag

SEQ ID NO: 17193 - DNA, 390 bp, Homo sapiens
  misc_feature (1)...(390): n = A,T,C or G
cggacgcgtgggcggacgcgtgggtttgaatactgttgatatcaaatgcaagggtaagaaactaccataaattgttagggagaacttaccaaatcttaatttatcctgaggaatatgtgatttttaaaattttctccacgataattttttaaataatattatgagcttctgcccccataataaatataaaaacaactaatttgtgattattaaaaataataatattcgatctttggcttccataactaaaaataaaaataactaaattgacttatatttacaaaatacgtccacatgagttagtttattttaccttcacagtgactaaggagaattttatttcatagatgagctgacttgtccacatgcagcaagtgcataactttcacn

SEQ ID NO: 17194 - DNA, 390 bp, Homo sapiens
  misc_feature (1)...(390): n = A,T,C or G
cccacgcgtccgcccacgcgtccgcactgggcctgcctctccagcctcaggatgctcttgtttattctgggctcagaccctcctcttgtacgtctcatcacagctggtagagacccaggagtgcctgattgtcccacaggggtggcgcacagctctgggaccactcanaagatgggatgtgtgggtggaggatgccttgtctcggtcagctcattcctgcctccttcctgagccagttcagggcctgggggagagccagcttggggtaggaagttaataatactgttaatttgggttgttgttggatttactttgctagattttctctttcaccacgtgtgaactgtgggtgaggtttcaaagtagcttcaccccacgtggcttgggtcc

SEQ ID NO: 17195 - DNA, 471 bp, Homo sapiens
  misc_feature (1)...(471): n = A,T,C or G
ggggccgggggatttattcgttagcgtgcgaaccgctgagtacctccgagacgacccacgcgtncggttttatgaagcctacaacattctcaggccccagtctctccaagaacgacgtcatcgtggccgtcaactggacgggtgtgtactttgtggatgagcaggagcaggtacttctggagctgtccttcccagagatcatggccgcgtccagcagcagggagtgccgcgtctggctctcactgggctgctctgatcttggctgtgctgcgcctcactcatgctgggcaggactgaccccggcggggccctgttctccgtgttggtcctgcaggggagcgaaaacgacggcccccagcttcacgctggccaccatcaagggggacgaatacaccttcacctccagtaatgctgaggacattcgtgacctggtgggcacctttctataggggctccggaagagatctaagt

SEQ ID NO: 17196 - DNA, 390 bp, Homo sapiens
  misc_feature (1)...(390): n = A,T,C or G
cagctccctggggaacgtctactttctgtaagtgcctgggcgatggctgcctttccaatctgcttgggctgtattgctttcgccataaccgttctgaaaagatctaatcaacccctcgtgccaaattttccttagttatttattccttatgtttattatcctctgctaagatctgacatctaggatctcagatctgaggtatatgatttcagaattccctgttgttaagagtcctagaaattatgtaacccattcctgttactttacaaaagaggaaactgaggtgcagagatgttaaatgatttgtccaaggccacacagcagcaactgacctttattgagtgcctacatatgtctcatttaattcttataacgaatccctgataagan

SEQ ID NO: 17197 - DNA, 414 bp, Homo sapiens
  misc_feature (1)...(414): n = A,T,C or G
tgcagagatgcaagcaagtttataagagtatcgccatgaagttcggcccctgcctcctgctggtgaccttgtactgcctggggactttgggtcaggccccgaggcaggagcacggaagcactggggaggaattccatttccagactggagggagagattcctgcactatgcgtaccaccagcttggggcagggagctggataagtatggcttcacgacgactgccgcagcacagaccagacctactggtgtgagtacaggaggcagaccagcatgtgccacgcttttgctgctgaccccacaccttactggaatcaagccctgcaggagctgaggcgccttcaccatgcgtgacagggggccccggcgcttaagccatacgcgtgcagggaggctggaccccaggcccatatan

SEQ ID NO: 17198 - DNA, 404 bp, Homo sapiens
  misc_feature (1)...(404): n = A,T,C or G
cttatcggctgctgttggttgggggccgtcccgctcctaaggcaggaagatggtggccgcaaagaagacgaaaaagtcgctggagtcgatcaactctaggctccaactcgttatgaaaagtgggaagtacgtcctggggtacaagcagactctgaagatgatcagacaaggcaaagcgaaattggtcattctcgctaacaactgcccagctttgaggaaatctgaaatagagtactatgctatgttggctaaaactggtgtccatcactacagtggcaataatattgaactgggcacagcatgcggaaaatactacagagtgtgcacactggctatcattgatccaggtgactctgacatcattagaagcatgccagaacagactgggtgaaagtaaccttttn

SEQ ID NO: 17199 - DNA, 411 bp, Homo sapiens
cccacgcgtccggctgttgtgaacttgtaccaagaggtgaggaagcacgcacgtaagacgctatccaccagccctttccttccttctttcccgggatccctggatctacgggtgtcttctaatggagagtttctatgaaacccttgatcctgtgacctgacctcatgtctgtagacccttcagatgaagacccttcgaaccctgtgactcttcctgattcctttgacccttattcatagatccccggatccagggctaccctctgatggggtcccccttgctaaagacctccattctcctgacctacgtgtacttcgttctctcacttgggcctcgcatcatggctaatcggaagcccttccagctccgtggctgcatgattggctacaacttctcactggtggcactctg

SEQ ID NO: 17200 - DNA, 404 bp, Homo sapiens
gtgctcagtgccatgggcttcactgcggcgggaatcgcctcgtcctccatagcagccaagatgatgtccgcggcggccattgccaatgggggtggagttgcctcgggcagccttgtggctactctgcagtcactgggagcaactggactctccggattgaccaagttcatcctgggctccattgggtctgccattgcggctgtcattgcgaggttctactagctccctgcccctcgccctgcagagaagagaaccatgccaggggagaaggcacccagccatcctgacccagcgaggagccaactatcccaaatatacctggggtgaaatataccaaattctgcatctccagaggaaaataagaaataaagatgaattgttgcaaaaaaaaaaaaaaggggcgg

SEQ ID NO: 17201 - DNA, 418 bp, Homo sapiens
acaagtggggcatctgtaggggccacagtgagctctcaatgatcatctgtagtggcagcaaaagagttcgagccccacttcaaacaacttcataataaaaggccagacaaaagagctgtcagccagttactacagacactcaatgcagacaccttcagagtattgggaaaagacttgccttctgccagaacttaacccaaatacacacagagagcaccatgaagccctggattcttctactcgtcatgttcatctctggagttgtgatgcttctgcctgtgctgggaagcttctggaacaaagatccctttctagatatgataagagaaactgagcagtgctgggtacagcctccatataagtactgtgagaaaaggtgtactaaaataatgacttgtgtacgtccaaatcatacatg

SEQ ID NO: 17202 - DNA, 419 bp, Homo sapiens
aagatagatcgccatcatgaacgacaccgtaactattcgcactagaaagttcatgaccaaccgactacttcagaggaaacaaatggtcattgatgtccttcaccccgggaaggcgacagtgcctaagacagaaattcgggaaaaactagccaaaatgtacaagaccacaccggatgtcatctttgtatttggattcagaactcattttggtggtggcaagacaactggctttggcatgatttatgattccctggattatgcaaagaaaaatgaacccaaacatagacttgcaagacatggcctgtatgagaagaaaaagacctcaagaaagcaacgaaaggaacgcaagaacagaatgaagaaagtcagggggactgcacaggccaatgttggtgctggcaaaaagtgagctggagatt

SEQ ID NO: 17203 - DNA, 419 bp, Homo sapiens
cccacgcgtccggtctgtttctgtgttgagggggctgtcggtggtttgttctttcaactaaatcctgttgttgctagccgtttgggtctatactgcgcttatgaactgcaacactccccgtgaaagtctgcagctttactcatcaagccaatgagactgtgaatctgctagaaggaacggacaactccagctgcactgccttagagagcttgtaacaccgcaaaggtctgcagcttcactgctgagcatctgaaaaacctcttgcacatggacaaacatttattggaggaatgaagacaaagttggagactgcctgtagctccatgacaccttgtctgacaaactagtcagctctccttggacttagccgtgggaaggctctcaaatggtggcaagaaactcaagatgggatttcaccg

SEQ ID NO: 17204 - DNA, 417 bp, Homo sapiens
  misc_feature (1)...(417): n = A,T,C or G
ggggccagcatgaatggggcgagctggtgcagctggatccccagactgtgggtgtcatcgcgcgactagaacgggagaccttccaggtgctgaacatgtacgggaaggtggtgactgtcagacatcaggctgtgacccggaagaaggacaaccgctttgctgtggccttggactcagagcagaacaacatccatgtgaaagacatcgttaaggtcattgatggcccccactcacgccgagaaggggagattcggcatctcttgcgaagcttcgccttcctacattgcaagaaactggtggagaacggtggcatgtttgtctgcaagacccgccacctggtgctggctggnggctcaaagccccgtgatgtgaccaacttcaccgtgggtggctctgcgcctatgagtccccggattt

SEQ ID NO: 17205 - DNA, 418 bp, Homo sapiens
caacataatctctctccaagggaaacgtgtttttattgccttgcggctgaaaatgtattctcgattctcccccttctctcttttgttgtgcattttttggatgtggtaaaactggcagtttatctgattatctggttttcagaactttgggcgatgtctctgagtgtcatcagttgctctctaggtttgacatagataattaagcaactacaaagcgtgataaagcttttgagagggaggaaaatgtattttggaaggagggagagacgcaaagaggcgagcctgtgtgttgagtcccagacttggtgtgtgactacaggcaaagtacttcacctttctagatgtcagccccgcccccctcacctcccaagtttaaataagaacttattttagactacatgatccctgtttcaaattt

SEQ ID NO: 17206 - DNA, 411 bp, Homo sapiens
  misc_feature (1)...(411): n = A,T,C or G
cggacgcgtgggcggacgcgtgggcagacgtgtgccactgcacccagctatttttaccttaaattcttaaatatgtatgtctaaggttcattttgtcacttagtgtaaagtattaatataactttttattttaaacaaaagtgccttatgaaaagtcttgatttttctctgttgttgaaaataccacctttgtcatattttaaaatcttatatctactagaagctttctgtgcttttcttactctgttttgntttctattcttattcaagntccaaacattacataactttatgataatttcagcatctggtagattattcctggttttgcctattcatgttctcttaattttttaatactttctttattccaggaacattttattggacaaccaaatgaccaatctttag

SEQ ID NO: 17207 - DNA, 421 bp, Homo sapiens
  misc_feature (1)...(421): n = A,T,C or G
tcatgatggaattttacaaatactaattttccaaattcaaaaatatgatatttattaattcaataaatgtttattaagcataatttgatctaggctttgtgcaggatacagggatataaaaatgaacaaggtatgtacttctcctcatagacctacagatatagataactaaataaataaccaaaaattatataagtgataaggaaaaaatacagtgttccaactacatatagcaacaacacataacctggcttaggggttatctggaaggaagtgtttcctaagaaggcatgaagaataagaaggataatgtaagttcaatagaaaggacaaggagtaaacatcaaaattatatctggctaaacagtgggatcaattaagaaccgtgataaaaattagagtaacttacagaanacttctg

SEQ ID NO: 17208 - DNA, 403 bp, Homo sapiens
agaggttgtccttttctggcatcagcgttgcggctcgaggcaaagctggtcctgtgcctgctgtccattgccgctaaggcctgctgctgccattcaggcgtgtctctctctctctctctctttcatgccgctctctccaccccatcttgggacggccagctctaagaattcctgctacgacactgaattcaaccaggaggtcagacacattctatgtgaaaaacatggcaaaatcatggaagccatggaaaagttaaagtctgggatgagattcaatgaagtggccgcacagtatagtgaagataaagccaggcaagggggtgacttgggttggatgaccagagggtccatggtgggaccatttcaagaagcagcatttgccttgcctgtaagtgggatggaa

SEQ ID NO: 17209 - DNA, 480 bp, Homo sapiens
  misc_feature (1)...(480): n = A,T,C or G
tggcgcgggaanntttaacctgatcgcctgctgtaccctgattgaccctccgggacgacccacgcgtccgcccacgcgtccgcccacgcgtccgagcccgtcaccatgtcgtgcgagtcgtctatggttctcgggtactgggatattcgtgggctggcgcacgccatccgcctgctcctggagttcacggatacctcttatgaggagaaacggtacacgtgcggggaagctcctgactatgatcgaagccaatggctggatgtgaaattcaagctagacctggactttcctaatctgccctacctcctggatgggaagaacaagatcacccagagcaatgccatcttgcgctacatcgctcgcaagcacaacatgtgtggtgagactgaagaagaaaagattcgagtggacatcatagagaaccaagtaatggatttccgcacacaactgattaggctctgntacagctctgaccacgan

SEQ ID NO: 17210 - DNA, 395 bp, Homo sapiens
caaagctgaggccagcatccgcagaaggagaaagagcagtcggccccaggccgaggcagcgcccagggcctacagggaccatgatgaccgctgggagacaaaagaaggggcagcatccccagcccctgagactccacagcctacttcccccgagacttcccccaaggagacacccatgcagccacccgagatcccagctcctgcccaccggcctcctgaagacgagggggaagagaatgagggggaagaggatgaagaatgggaggacataagtgaggatgaggaagaggaggagatcgaggtggaagaaggtgatgaggaggaaccagcccaagaccaccaagccccagaggctgcccccaccgggatcccctgcagtgagcaggcccacggag

SEQ ID NO: 17211 - DNA, 480 bp, Homo sapiens
  misc_feature (1)...(480): n = A,T,C or G
cgattagtggcccggggggattaaaaaatgaaagccttgagaacntctcaanaanccccgggncgacccacgcgtccgcccacgcgtccggtccccctttgtcctccgcccagggcagggaaagtgcttagtattagcgtgatgcttggggttattggagcctgagcttgacctcaaacgggtggcgatttgatgggtacccccaggctggggaaaatgacagcgcttctcctaatcagctcactggattccatcaccctgagcggtaaaccagatgggcgtcaccccagttctgcagacacatacacaacccgtttgctgcagagccggacccagtggctacacccacagcggtctgtggtagagaactctcttccttctttccaccgacaggggcgagggctgcttcctcgcggcagcccccgcgaagaaatctcgagagaactggcatgaggagttaggttcatcacaaatacacac

SEQ ID NO: 17212 - DNA, 474 bp, Homo sapiens
  misc_feature (1)...(474): n = A,T,C or G
gaagtgggcccgggggttaaaaatgaaagcatganaacatctccanaaccccggncgaccacgcgtccggtagaacaccttactcaacaacacaatacccatccttctcaagcacatctgtatcattctctagcacaaaacatgtacgaggccataaaacaagccaaaatacatttaaaaggcttaacatcctttgaagtatagtctctggccacaattaaaaaattagaaatcagtaacagaaggaaatttggaaaattcacagatatgtggaaattaaacaacatactcctaaatcatgagtgagtcaaataaatctcaaggaaaactagcaaataatttgatatgaatgaacacaaaaatgcaacatactaaaatttatggaatttagcaaagcaatgcttagagggaaatttatagctgtaaagtacctatattaaaaaagaagaatctcaaaagaataacataacctcn

SEQ ID NO: 17213 - DNA, 472 bp, Homo sapiens
  misc_feature (1)...(472): n = A,T,C or G
cgagagagcccgggggttaaaactgangcccctgatnactntcnaaanncccgggngacccacgcgtccggttatttttaaaaagcaacttaccactaaatccttgagtctccatagagtaacagtaaagaaactgatgtagcagactgtcttctcaaaggatctcctctggaagagactatcagcggcagcattctccagggaagacccatcccctagtgccagagcttgcatcctggagactaaagattgcacttttttgtagttttttgtccaaatgcaatcccatttctgtgcctcttagcatgcagttagatttggacaaacaagattcctaaggaatgactttattaactataatatgggtacagctattatataaatatatattctggttatagttctaatatggagatgttgcgtgcaatgctggccctgggtggtctgtgtaatgctttaacttgtatggagg

SEQ ID NO: 17214 - DNA, 410 bp, Homo sapiens
aatgatctttactgaatttgccctttataagaaactccagttaatttctagagcaagtcccaaaaactaagggacagctaagaagttattatggttgacttcaaaggcctaaactgtgttttttatgtccactaaacaacttgattaaaagacggaattttgactcgtgtctgtatcatacaagtacaaatactaattttgccctatgtatccgtaaatgtcatttgtgattttgacttatttatttaatgccctttcttatgccgttggttttcaagtttactcatttctatggttgcaaataactctaaaacttattatataaactttcatattataggcagaacacaatggctaaatatctgttgcatgtactttaaagtttattataaaatataaacagatatata

SEQ ID NO: 17215 - DNA, 476 bp, Homo sapiens
  misc_feature (1)...(476): n = A,T,C or G
gaagaggagccgggggggtttaatactgaagtctcgtagntctngcanaannccngggnaganccacgcgtncgctccctcgctctcccacaccactggtaccaggccccgtacacccgctctgctgcaggagaatggctactcatgacacgctgtggatgggactggccctgctgggggtgctgggcgacctgcaggcagcaccggaggcccaggtctccgtgcagcccaacttccagcaggacaagttcctggggcgctggttcagcgcgggcctcgcctccaactcgagctggctccgggagaagaaggcggcgttgtccatgtgcaagtctgtggtggcccctgccacggatggtggcctcaacctgacctccaccttcctcaggaaaaaccagtgtgagacccgaaccatgctgctgcagcccgcggggtccctcggctcctacagctaccggagtccccactggggcagc

SEQ ID NO: 17216 - DNA, 439 bp, Homo sapiens
  misc_feature (1)...(439): n = A,T,C or G
aatgtatggtatgttattttattttattattttattttattttattttattttatcgagggggggtacgatacctgccatttaagaaaatgaatagaaaattttaaaacccgagaaatgggggaaaaaaaatcagtgcacaagaattgggctggttaggcccagcaccacactgaagtgggctcagtggtttttggagtgaagaagccttactccctgcacattccctcatgctcccacacaagtccagcaatggaaatgcttgggttcctcttgctttgtcaggggactcaggagtcgaccaagggaaaccatttggccccgtgaggaatgggcattgtcagtatccgtcctgaacggngcctagtcaggaagcggtctagaagtgtacggtcacggtcgcctcatgaaagtgtgtagcaggtggctctcaggaaaaa

SEQ ID NO: 17217 - DNA, 439 bp, Homo sapiens
  misc_feature (1)...(439): n = A,T,C or G
tctcttctctgacatactcaatggaagaatatttagatttatttaaagttcttaatgccaacagtttaaaaaaaaattaaaacatttgaatgaactgtaaagtacagccataccttggacatgcaaatataaatctatggagcattctcaagacagtttgtcatggctctgttgattgcaactccttgtatagcttgtattttgatttagtttatattctgcttattatgtatactgtgttcttatatatgagaaagcacaaatgcgaaagaggtcatgtcttctcaaaatctagcaaaggaagtagtctgcattggtgtgcattacagtattttgcttaatgaaagcctcagttctgaatgttgatatgagtagttaaaaggaagtggggccattttatgtgtttatctgtgtcaagtatttctggtaataagaagcn

SEQ ID NO: 17218 - DNA, 447 bp, Homo sapiens
  misc_feature (1)...(447): n = A,T,C or G
acagacaaagcgttaggagaagaagagaggcagggaagacaagccaggcacgatggccaccttcccaccagcaaccagcgccccccagcagcccccaggcccggaggacgaggactccagcctggatgaatctgacctctatagcctggcccattcctacctcggaggtggaggccggaaaggtcgcaccaagagagaagctgctgccaacaccaaccgccccagccctggcgggcacgagaggaaactggtgaccaagctgcagaattcagagaggaagaagcgaggggcacggcgctgagacagagctggagatgaggccagaccatggacactacacccagcaatagagacgggactgcggaggaaggaggacccaggacaggatccaggccggcttgccacaccccccacccctaggacttattcccgctgactgagtctctn

SEQ ID NO: 17219 - DNA, 444 bp, Homo sapiens
taaaattatcaatgttctagttctgtggccatctgcttagtagagctttttgcatgtatcttctaagaattttatctgttttgtactttagaaatgtcagttgctgcattcctaaactgtttatttgcactatgagcctatagactatcagttccctttgggcggattgttgtttaacttgtaaatgaaaaaattctcttaaaccacagcactattgagtgaaacattgaactcatatctgtaagaaataaagagaagatatattagttttttaattggtattttaatttttatatatgcaggaaagaatagaagtgattgaatattgttaattataccaccgtgtgttagaaaagtaagaagcagtcaattttcacatcaaagacagcatctaagaagtttgttctgtcctggaattattttagtagtgtttcagtaatgttg

SEQ ID NO: 17220 - DNA, 442 bp, Homo sapiens
  misc_feature (1)...(442): n = A,T,C or G
cggacgcgtggggttccaattctacctgttttagttgtgaaggtagttttgtgtaatccagttgattgctcctctggcagagagaaggagctcaaaagatacttgatgtctttcatgtaagtttacctggtcttttcctattgaagaatttttcatcagaaacgactgggaaagtttgggaaagtcagcaaaagaaagaatgcatttcgaaagcaaacagaagaaaaaagtatattctcacagtttttccccaggaagtctggagaaaaagtcctcatgtcaccaatttctctgttgcatgaattttagtgttttgctataagacagcatgagggctatcaggccaaaattcattattgtatttccaatacagtttgtcttgaatgtctgtctcttanaccagtttttacttgtcagttttctctcagcaaacagtcttacn

SEQ ID NO: 17221 - DNA, 395 bp, Homo sapiens
ctaagattgttccgtcttgctaggctgctttagtcctttggctagagaaagtgggtgctttttgctgttttgttttgtttgagtctgtgctcaatgacaatttgccagcttcctcagctccaaattcagagtatatgaggcataagaaagcccaaggaactcactgctgtgcatccttgggtcccaaggtctttagtttttctgtcttctctccacctttaaaagtcttcttatgtttggtttacataagatgcccgaagttttcagttgtacttagtgggaggaatagagaaaagtatatattctattccttcctcgaaatcctctgaaaacattttgatcatgcttacacttttctaattataacagtatggtttcattttagaacatttgaa

SEQ ID NO: 17222 - DNA, 448 bp, Homo sapiens
cccacgcgtccgatcctggaatcaaatttgaagaactctttccagattggatattcccatcagaatctgagcgagacaaaataaaaacaagtcaagccagagatctgttatcaaaaatgttagtgattgatcctgacaagcggatctctgtagacgaagctctgcgtcacccatacatcactgtttggtatgaccccgccgaagcagaagccccaccacctcaaatttatgatgcccagttggaagaaagagaacatgcacttgaagaatggaaagagctaatttacaaagaagtcatggattgggaagaagaagcaagaatggtgttgtaaaagatcagccttcagatgcagcagtaagtagcaacgccactccttctcagtcttcatcgatcaatgacatttcatccatgtccactgagcagacgctggcctcagacacagacagc

SEQ ID NO: 17223 - DNA, 440 bp, Homo sapiens
  misc_feature (1)...(440): n = A,T,C or G
cgactgcgatgtgagtgacagcagctgcagcagcctcgccgcaaccctgttggccaaccacagcctgcgtgagctggacctcagcaacaactgcctgggggacgcgggcatcctgcagctggtggagagcgtccggcagccgggctgcctcctggagcagctggtcctgtacgacatttactggtctgaggagatggaggaccggctgcaggccctggagaaggacaagccatccctgagggtcatctcctgaggctcttcctgctgctgctctccctggatgaccggcctcgaggcaaccctggggcccaccagcccctgccatgctctcaccctgcatatcctaggtttgaagagaaacgctcagatccgcttatttctgccagtatattttggacactttataatcattanagcactttcttggcaaaaaaaaaaaa

SEQ ID NO: 17224 - DNA, 503 bp, Homo sapiens
  misc_feature (1)...(503): n = A,T,C or G
cgcctcattgaaactggatgcatgcggcgcagcncccgggncgacccacgcgtccgctgacctccacctccctcgctctcccacaccactggcaccaggccccggacacccgctctgctgcaggagaatggctactcatcacacgctgtggatgggactggccctgctgggggtgctgggcgacctgcaggcagcaccggaggcccaggtctccgtgcagcccaacttccagcaggacaagttcctggggcgctggttcagcgcgggcctcgcctccaactcgagctggctccgggagaagaaggcggcgttgtccatgtgcaagtctgtggtggcccctgccacggatggtggcctcaacctgacctccaccttcctcaggaaaaaccagtgtgagacccgaaccatgctgctgcagcccgcggngtccctcggctcctacagctaccggagtccccactggggcagcacctactccgtgtcagtggtggagaccgactacn

SEQ ID NO: 17225 - DNA, 438 bp, Homo sapiens
  misc_feature (1)...(438): n = A,T,C or G
ggaaattggaaaaaaaattatatatatattctccttttaatggtggggggctactggagaggagagacagcaagtccaccctaacttgttacacagcacataccacaggttctggaattctcatcttcgaacctagagaaataggtgctataaacagggaattaagcaaaatgctggatgctatagatcttttaattgtcttaattttttttctattattaaactacaggctgtagatttcttagttctcacagaacttctatcattttaaactgacttgtatatttaaaaaaaaaatcttcagtaggatgttttgtactattgctagaccctcttctgtaatgggtaatgcgtttgattgtttgagattttctgtttttaaaaatgtagcacttgactttttgccaaggaaaaaaataaaaattattccagtgcana

SEQ ID NO: 17226 - DNA, 399 bp, Homo sapiens
agagaccccgggtgggtgagcgctggcttctcaaacggccgaagttgcctctgttaggaatctctttggaattgggagcacgatgactctgagtttgagctattaaagtacttcttacacattgaaaaaaaaaaaaaaaaaaaagaaaaaaaaaaaaaaaaaaaaaaagggggggccctttaaaaaaaccccttggggggcccaaattttccgggggggggaaaagaaaatttttttccttttgggggggccatttaaaaccccccgggggatttttgggaaaaaacctttttttgggggggggaaatattgggccccccccccccaagaaattttaggtcttgggggaaaaaaaaaatttttaaggggtaaggggggaaaaccccccccccccccccc

SEQ ID NO: 17227 - DNA, 479 bp, Homo sapiens
  misc_feature (1)...(479): n = A,T,C or G
agggcgaggagnnttaaaactgatcgcgttctgtaccctgatggcactgcgggacgacccacgcgtccgcaaatgggtatctgaaaaatggatcagctggccaactcagccaatccgcacatttagctctccaactaccatacaacgtgcttggtttaggtcggagcgcaaattttcttgaccatctctacgttggtattccccgtccatctggagaaaaatctatacgaaaacaagagtggactgcaatcattccaaattcccagctaattgtcattccataccctcacaatgtccctcgaagttggagtgccaaactgtatcttacaccaagtaatattgttctgcttactgctatagctctcatcggtgtctgtgttttcatcttggcaataattggcattttacattggcaggaaaagaaagcagatgatagagaaaaacgacaagaagcccaccggtttcattttgatgctatg

SEQ ID NO: 17228 - DNA, 411 bp, Homo sapiens
attggcttttccttcatctgaacacagaaggagccacggtctggaaagtgtgcctgtccttcccgggagtggggaggccggtgtgagttttgatcttccagctcaggcagacaccttacacagtgcaaacaagagccgtgtcaagatgagagggaagcgtagaccgcagacccgtgcagccagtggagaagacagcactgaggaggccctggcagctgccgctgcaccttgggaaggtggtcctgtgcctggagtggacacaagcccctttgcaaagtctctgggtcattccagaggggaggctgacctttttgattctggggacattttttccacgggcactggatctcagtccgtggagagaacaaaacccaaggcaaagatagcagagaatcctgccaacccaccagg

SEQ ID NO: 17229 - DNA, 413 bp, Homo sapiens
cccatctcctgtacgcttggagcgacctttggctacgtggctggccttgttatctcaccactctggatatactggaatagaaagcaacttacatacaataacaattacctggagcaaagggagatatttctttgtgcaaattctgtaccggctgtgcagaaatgtgtatgggcaaagccaagcagttccatttacagctctggttgttacgtacatacaacatgatgcgatggtagctttttaaactatgaaacccctgagagagtgcaccttctagttgaaataaagtatctataatagattgtgcaacaaaaaaaaaaaaaaaagggtgggcgcctttaaatgatcctttgaggccccacgcttagaggccaaggagagggaatcgctttgtcttaagagagggagactat

SEQ ID NO: 17230 - DNA, 468 bp, Homo sapiens
  misc_feature (1)...(468): n = A,T,C or G
ggccccattatcgcctgcgtttgagcnccgtattaccgggccgacccacgcgtccgcagcaacctatttttccgataagaaatctgaggcttgattgataagctgacttgactaagttcacacagtttgtaaaagctagagtctgtgccttaattcacataatctctattcagagcctgtactgttaaccactcaaggattctggaacagaagctaacagttttctgcaacgagtctttgacttaaacatctgaaataacattggaaatagattataagaggagtcagtgtgtttttctatagtttcaaaatacttttaacatcttattgtcaaaaagattggataactgactttctttgctcataataactctaaattctagttcctgagtacattaacacatcttctttacctaactaccaatgtcccccatcatcgacttatcagcttgtttgagacaatgagaa

SEQ ID NO: 17231 - DNA, 403 bp, Homo sapiens
  misc_feature (1)...(403): n = A,T,C or G
gcgcgcgtagataatactcctgttccactgcgcccttattgtttcgcagttgggcaggccatgaattacttggttaattgccccagatcttcactgaccttgaactaatggggtaggaatgacaggagacccagtctgccagtgaagcatggaaggagatgtccagtgggatgttgcatggagctgggactccatgcccagatgaccctgattttataaaactggtaacagtgtgtacagatatgtttcaggggaaaagtttctttcctccagcgttacggagccctcaccatcatttgtttccacagccgatattatgtacacggtgacagttgactgctggaggaagattgcanaagacgaaggagccatggccttattcacaggtgcctggtccaatagg

SEQ ID NO: 17232 - DNA, 400 bp, Homo sapiens
gagatggagattttcagattacaccattttttgtggggtctcccacagcacctgaacccagcaacagcttttttagttttgtctctccaagtcgagaattacagcagcagcaagtttttagcaggggcttcaaagtaaaaagaatttgagccacgcatagtgtcacgcacctgtgatcccagctacttaagaggttgaggctgggaggatcacttgagcccaggagtctgaggctttagtgatctaagatcatgccactgcactccaggctgggcaacagagtgagaccctgtttctaaaaaaaaataaagataatttagctaactttaacccagaggaagcactgtacaaaggctaccccttcaattctgttaagaagtccctgagaactgccctgttt

SEQ ID NO: 17233 - DNA, 484 bp, Homo sapiens
  misc_feature (1)...(484): n = A,T,C or G
gggggggatttaagactgatagcctcgaanntccanactantgcgtcgtaaangcgnnnggnaaaagantggntaatgataacaatgcatcggaaaaccttcaaaaggaaaggagaatgttttgtggaccactttggttttcttttttgcgtgtggcagttttaagttattagtttttaaaatcagtactttttaatggaaacaacttgaccaaaaatttgtcacagaattttgagacccattaaaaaagttaaatgagaaaaaaaaaaaaaaaaaaaaagggggggccgctttaaagaatccttgggggggccaaagtttaccgggatttggaacctaaaattttttcccttatagggagcgagatcatagcttacctgggaactttgggaaagaacccttacttttggggggggacaaattgggccaacctccctacgaaatttaaaggctttagggaaaatataaaactttaaagggttaa

SEQ ID NO: 17234 - DNA, 487 bp, Homo sapiens
  misc_feature (1)...(487): n = A,T,C or G
nttttaaaactgaaagtcgtcgnannntcnanactganangctttgaaacccncnnaaatangggntgacccacgcgtgcgcacggttcagcagcgaaccaaggcaggctgatgcaaatacagcactgaagaggcattttgactgcaagtgcgaccagagctaggctggggaaggggactagtgaactgtcacttaagtcccagcagacaagggacgatattgcagagtggaacttgtactctgtgacttctgtggcccaggacagtatttgggagggcgccaggaggtggcctagtccctctgaacaccactgacattcaacccccaccttcatcacccttccagggtctcagcccccaggaaacttctcctggaatccagtctagcaggggtacagtaggcttaggatttaataccaagtgaggagttggcaagaaccagatggacccaggttcttggggctaaacttctccatccatccatcct

SEQ ID NO: 17235 - DNA, 464 bp, Homo sapiens
  misc_feature (1)...(464): n = A,T,C or G
gttgatccgaaacctttgaanncaattgcnaacgtcggaanacgcgtnggggnggnntgggaaggggctgtggcagtacgcgtttacccggctgcggtggctgctggactgacgagaggctactaaagttcctggggaggcaaagtataatttcataagaacaaaatggatggagaggagaaaacctatggtggctgtgaaggacctgatgccatgtatgtcaaattgatatcatctgatggccatgaatttattgtaaaaagagaacatgcattaacatcaggcacgataaaagccatgttgagtggcccaggtcagtttgctgagaacgaaaccaatgaggtcaattttagagagataccttcacatgtgctatcgaaagtatgcatgtattttacgtacaaggttcgctacactaacagctccaccgagattcctgaattcccaattgcacctgaacatgg

SEQ ID NO: 17236 - DNA, 404 bp, Homo sapiens
tgataatagcaaaatttaatctattgaaatctgagggaaaaaaggtaaaatattcgtgtggctccccagtactgacaggcagaaacacactcatatgtatatgtacatttttcacatcagaggaaatgacaaagctggttctagtgagggaaattttgtaatagaaaagccccctaattgttttttcttgctttgcctgagatttggtttgtggtctcactatgcctaaaccatatgttcagatgaatactattaaaaatcatgttaagccaaaaacatgtctacttttctgcttcatcaatgacaatcatttagctgttttattcacatagaatttggtttaaagtaaaaatcctttctccttccttccaaccagttttacacactggagagtttaaagccca

SEQ ID NO: 17237 - DNA, 395 bp, Homo sapiens
accacgcgtccgcttgtatttagactataagatgctatggaggactatcccatgccatgccattgtgaattgatttgcttcaatatcaatcagaagaccagtccaacagaaaataacttgtcataattccaccttagattctagacctctcatacctgcagtgtacaaaatatgtacatgttccaatggaattcactatttttggctttagtgtcaaagagattggttctacaaggatcatctgatttcccataacaagtacattttataatcctatgattctaaattcaatccccaatattgattctaagcatctaatctaaatcacagacaaaggggaactggctgagaggggtcttacttatttcaaatccatgaccaaagtgtccaaagat

SEQ ID NO: 17238 - DNA, 484 bp, Homo sapiens
  misc_feature (1)...(484): n = A,T,C or G
ggtagggccgggggggtttagacctgaaacccctcgatnncaatcgatatcgtcgaaannnccgcgnnngaganganngaggccagggagaaggagcaaaagaagaagcaaaaacgccaagaaaacattgcaaaagctaagcgactaaaaaaggaaggagggactgaacaggctttgcaaccagaggaaaatcatttggaaaattacacagctttggaagaatccactaaagtttcttctttggatttcttgacagtatgatttagtaaatgaaatttgaccaaatggaagaatcatgttagttctgacctcaatactatagtaacttttaggcgtgggtgtagaagtttataggtttctattgacagttattgtaaattagcatttactgtggtacaaattctttataactgacttagtcatttgccgcttagcagtttatatactgaaatgaaaacatcttgtggggaaaagtgactttaga

SEQ ID NO: 17239 - DNA, 471 bp, Homo sapiens
  misc_feature (1)...(471): n = A,T,C or G
cgaggtnccttttgatcgcctcggattgacnaccgtatgtaacggcccgacccacgcgtncgnggacgcgtgggtggctgtttaccaataaaaggatttaatncattatttttttgcttccaaaaatagaagttttaagttgcatgaaaccattaatagccttgaaagctctgataagttttcagtaataataacctatttaatcagatgatgatgtgtttgaaaatagtgttcaatatcagcaaatttgtacacagggaatgtaaataaggataactgatcagagttatccactgtatttataaggaagagtcggaaaaaacaatgaccttagttttttttaagcctgatgatactatggtttactctaataagatagctatattgataattatatttttgttactgtgcccttgcacattttgctcttttttgtaatatttttattaataacaccttaatttagcaccc

SEQ ID NO: 17240 - DNA, 460 bp, Homo sapiens
  misc_feature (1)...(460): n = A,T,C or G
aaaatacgagctngtaatncaactgananacttgaaannncnncnnanntcangcgtacggagatggcgtttaaccatattggccaggctggtctcaaactcctgaactcatgtgatccgtctgccttggcccctggaagggctgggattacaggcgtgagccaccacacccggcctattcttggtattctttattcttggctttctagcctttagaaaaaaaaaatctagtcttggtaaagaaaatgttcattttaatcaagctccagtacagcttgtgtcaagacctagtaagaccacctttaatgtgttcctggatatgacattaaaaactaacttgaaaattgttaggatatttccttgttccctacttttatgtgaaaatctactacattcttaagaattaaaaaatgccatttcagaagagatgatagttttatcttgccaaggaattatcttn

SEQ ID NO: 17241 - DNA, 471 bp, Homo sapiens
  misc_feature (1)...(471): n = A,T,C or G
nttgaagactgacaccctntaaanactganaggctttgcaangacccnnaanttngggncgacccacgcgtgcgcacgtccccaccacaaccactgccagttttacacggcttcctaacaagctgctacttctgctgaaaaattgggcatctgtctagaacaaagggaaagaaaatgaataaacgcacaaactcgtaggttcaaactagccttctgaggtccctctgccagaggaagagaagaaacttctacctcctcgtcttcctttttctcctggtctccaggtcattctggcctttacttaaacatccccactttgctctgtgtgacttgaacattgggaatgtaataatgaccacttttgaaaatgtaaaacagaaaacaatattacaaatatttttgtcagattctatacccaggtaagatagataaagacaaataatttcccttctctgtgtaacttttaaagtg

SEQ ID NO: 17242 - DNA, 403 bp, Homo sapiens
  misc_feature (1)...(403): n = A,T,C or G
ttcccatgctgacctgtgtttcctccccagtcatctttcttgttccagagaggtggggctggatgtctccatctctgtctcaactttacgtgcactgagctgcaacttcttacttccctactgaaaataagaatctgaatataaatttgttttctcaaatatttgctatgagaggttgatggattaattaaataagtcaattcctggaatttgagagagcaaataaagacctgagaaccttannaaaaaaaaaaaaaaaaaaaaaaaangggggggggccgttttaaagaatccttgggggggccaaagttaacgggggcgggcgaggttttagttttttccttatggggggcggtataaaaacctgactgggggattttggggaaggaccctctttttgggg

SEQ ID NO: 17243 - DNA, 497 bp, Homo sapiens
  misc_feature (1)...(497): n = A,T,C or G
aagaggngtttcaatgagagctgtcggtaccgatcgagaaccntcgggtcgacccacgcgtccgcccacgcgtccggaagcagttccggaaccctggtccacggccacagtgtcaatggggagtacctaaatgttcacatgaaaaatggacaggtcatagtgaaagtcaataatggcatcagagatttttccacctcagttacacccaagcagagtctctgtgatggcagatggcacagaattacagttattagagattctaatgtggttcagttggatgtggactctgaagtgaaccatgtggttggacccctgaatccaaaaccaattgatcacagggagcctgtgtttgttggaggtgttccagaatctctactgacaccacgcttggcccccagcaaacccttcacaggctgcatacgccactttgtgattgatggacacccatgagcttcagtaaagcagccctggtcagcggcgccgtaagcatcaactcc

SEQ ID NO: 17244 - DNA, 418 bp, Homo sapiens
cccacgcgtccgcccacgcgtccgtgcagatattccaaacctgaaatccaaaacacttctggtccctagcattttggataagggatactcagcttgtacctatatattcatatatattcactgttgttagaaatgtttaagttgctgttctgtgatgaatctaaatcttttctcttgctaccaagctattgtcactgcagtgcattataccaaagagcgaagtcagtgccactgaaaatacagaacccattaatatcgtggctatctgattacatttatattccaagatgaaccttttttatatatgctaaaaattttggggaatatgttttgggatgtattatggagctaaaactctaacctcttaaagttttatagaacttaaaaattttttatacaattacccaattggtgatat

SEQ ID NO: 17245 - DNA, 499 bp, Homo sapiens
  misc_feature (1)...(499): n = A,T,C or G
cgcgggggnnaattagacctagtcgcctccgcatnaaccctagntntcctgcgtanannctccnnaannnnnggganganccacgcggncgnaagcagnagaanncgagctgaccaggaggcacggcttgagaagcagcnggagggcccgccccctggccgggagaggcccgaggaccgcngcgggggcacaaacaacancgncancagcccgggcatnggcagncaactgccagggaacttctttatcactgccaaggagtactggatgttcaaactccgcaactcctccagcccagccaccggggaggaccctgagggctcagacatcctgggttgcagtccacatccgtgtcctggcctcactgacggncatcctggccatcttcatggtgataactgcactggtgaaggtggacactttctcctggacccgtggctttttttgcggncaccattgtctgcatggtgatcctcagcggggcctccactgtcttcag

SEQ ID NO: 17246 - DNA, 391 bp, Homo sapiens
gcatataaaatgcattctgtaccctgatctggcatatagcttcaaaactgcagtggcgagtgtccatctcttagttagctaccttaactgtccacccttactacctgtgggatcgttgcctggtttgtcttctctgtgtcctggagcaaagccagttcctaaaactaaaactccattctagtcttgggaagaaaagtttctactcagaactggggaaggagtggaacttatgacttgggcctctaggctgtctctgtcccctcagctccccgacatgcatttactctctgccgtgggtctgcagtcgctgcaacctaccctctctctgcctcagccttacacccaagcagtaggtctgtgctctccctgtctctaggtcgctgagagaggg

SEQ ID NO: 17247 - DNA, 409 bp, Homo sapiens
cccacgcgtgcggttctggactctcgggcacagctttgtgagagaaacaaggctggctctacgtgatctgcaaccagaggaattgtgatttgacaaggactgtgaaaggctgactctccctgttgtctttcatgctggcaccggacaaaaagcgggaactactgcctcaatacgatcatagaagccattgagatcccgcagtttatcgaccgcagctacctgacgtatgacaacccagatatcttgaagagggtgtcaggatcaagatcaaatgtgttcatgaggtttaaaacaactgccaaggatggccttttgctgtggaggggagacaggcccatgagacccaacagcgacttcatttgcttgagcctctcggatggagccctcgtgtgcactataacctgggcag

SEQ ID NO: 17248 - DNA, 401 bp, Homo sapiens
ggaagatggcggacattcagactgagcgtgcctaccaaaagcagtcgaccatctttcaaaacaagaagagggtcctgctgggagaaactggcaaggagaagctcccgcggtactacaagaacatcggtctgggcttcaagacacccaaggaggctattgagggcacctacattgacaagaaatgccccttcactggtaatgtgtccattcgagggcggatcctctctggcgtggtgaccaagatgaagatgcagaggaccattgtcatccgccgagactatctgcactacatccgcaagtacaaccgcttcgagaagcgccacaagaacatgtctgtacacctgtccccctgcttcagggacgtccagatcggtgacatcgtcacagtgggcgagtgcccg

SEQ ID NO: 17249 - DNA, 405 bp, Homo sapiens
agcgtttaacaaagcttagagaaacctccatgagactgctatcatggcagagaagcccaagctccactacttcaatgcacggggcagaatggagtccacccggtggctcctggctgcagctggagtagagtttgaagagaaatttataaaatctgcagaagatttggacaagttaagaaatgatggatatttgatgttccagcaagtgccaatggttgagattgatgggatgaagctggtgcagaccacagccattctcaactacattgccagcaaatacaacctctatgggaaagacataaaggagagagccctgattgatatgtatatagaaggtatagcagatttgggtgaaatgatcctccttctgcccgtatgtccacctgaggaaaaagatgccaagct

SEQ ID NO: 17250 - DNA, 404 bp, Homo sapiens
cccacgcgaccgttatcttccctaaacatgtatatgattatcgtgctcctctaaagcatcttaaggcttgcccattgtcttcagtacacattccaaactttttttttttttttgggaaaagggagaatgttctttacgcccggggggggacgtaagggggcaaactaactacagggaacccccgccctccggggtaaaggaaattttccggcctaacccgcccaaaaggaggggaataagggggctggccgccagcccgggttaatttttttggttttttaaaaaaagaaagggtttacccatggggccaagaaggggcctgatttctggactcaataaccggcccgcctgggcctcccaaggggggggaattacgggggtgaaacctggcgccgggccacttg

SEQ ID NO: 17251 - DNA, 408 bp, Homo sapiens
tcgggcggagctggagacgtgtggagctgttcgaggactcgcgggtgtgcagtgcacctatgatatgtgttttagaaatagccgttaaactttggtttgaatgaagaatgtctctcaatccacctatatttctcaaacgaagtgaagaaaatagttcaaaatttgtggaaacaaaacagtcacaaactacttccatagcttcagaagatccccttcaaaacttatgtttagcatctcaagaagttcttcaaaaagctcagcaaagtgggagatcaaaatgtctcaaatgtggtggttccagaatgttctactgctatacatgttatgttccagttgaaaatgtacctattgaacagattccacttgtgaagcttccattgaagattgacatcattaaacatccaaatg

SEQ ID NO: 17252 - DNA, 464 bp, Homo sapiens
  misc_feature (1)...(464): n = A,T,C or G
ctttgaacccctgcggaattgaccgccattcccgggncgacccacgcgtncgctcctttacctttcagggcagnttcttttcacattatggctgttggntcaaacttttgggagcacggactgtcagttctctgggaagtggtcagcgcatcctgcagggcttctcctcctctgtcttttggagaaccagggctcttctcaggggctctagggactgccaggctgtttcagccaggaaggccaaaatcaagagtgagatgtagaaagttgtaaaatagaaaaagtggagttggtgaatcggttgttctttcctcacatttggatgattgtcataaggtttttagcatgttcctccttttcttcaccctccccttttttcttctattaatcaagagaaacttcaaagttaatgggatggtcggatctcacaagcttgagaactcggtcaccttcaaaccatttca

SEQ ID NO: 17253 - DNA, 403 bp, Homo sapiens
tgggattgtcccctctgacagcacatatgaaatagttcatctatataatagaaacgcacacacacgaaagagaatcttctgacttaaatacaactttcatggagttcttcaccacttatctgtctctgttaaaatctgaaaatctagcccatggctaaaatctattatatgtgttctccatatttcttgtataagccagtccccagcatctgatgttttgagaagtgcatggagtttcctaaactttgcacagaagaatatcctggggccgggcatggtggctcacgcctgtaatcccagcactttgggaggccgaggcaggtggatcataggtcaaaagatcgagaccatcctggccaatatggtgaaacctcgtctctactaaaaatacaaaaattagctg

SEQ ID NO: 17254 - DNA, 407 bp, Homo sapiens
tgttatgtagctattttaggaaaaacattctttttttcctacatcacctaaactacggtgatgtgagaattactgaggcttactgtgggattaacacaggaactgtctttatttgagctactgcatggatgaagaagtggtaaattgttcagagtagacagtgtaagtcacagtatgttctaggagatggagaaacatgccatggacgctgaatgttaatagatgttatttcatttactttctctgttgtgcaatagcaaagttcctattgttggcctacttttaaatggggcatttctaagtaaatagtgagacaagttattctaattattatgatagtcttttccaagtgtacaggccttttaaaaatatagttgaagtaatggtaattttttaaggaaatgttt

SEQ ID NO: 17255 - DNA, 245 bp, Homo sapiens
aggggtacatttccctgtgctgacggaagccaacttggctttcccggactgcaagcagggctctgccccagaggcctctctctccgtcgtgggagagagacgtgtacatagtgtaggtcagcgtgcttagcctcctgacctgaggctcctgtgctactttgccttttgcaaactttattttcatagattgagaagttttgtacagagaattaaaaatgaaattatttaaaaaaaaaaaaaaaagg

SEQ ID NO: 17256 - DNA, 403 bp, Homo sapiens
  misc_feature (1)...(403): n = A,T,C or G
cggagcgctgaagcccagccggaagcccagcctgcgctggagcccacgctggagccagagcctccgcaggacaccgaggaagatcccgggagacctggggctgccgaagaagctctgctccaaatggagagtgtagcctgagggctggtgttgcctgcctcccctgtgcttgtgccttgtcccaaaataaatcctttcagaatgtagcactcacgccctaataaggagcgaatcctacatccaccaaggcgggcgctctggccctcccttccttaagcccagtcctgtgtcctctgaaagaggtgcagtcactcacacctgcttgcgctcaccatcaataaaagtaatttcacccgcnnaaaannntaaattgaaaaataaaaaaaaaaaaaaattcaggggg

SEQ ID NO: 17257 - DNA, 420 bp, Homo sapiens
  misc_feature (1)...(420): n = A,T,C or G
cccacgcgtccgcccacgcgtccggtaaaaggccaagaatagctaagataattttgaggaacaaggaaagctacttctaccaggtaccaagacttattataaagttctagttgttacagtagtagaattgaagcaggggtgcatgaagatacaagtagaacagattataggccctggaaacatccacaaacatatggaaacttgatataaggcagaggtacattacaaatgaaaaaaatatagttctttcttaggactttatgtagactttctatagactacagacatgtgccactgagtctggttcgctacaacttttaaaagaaaatatatgagaattttttttatcttcagatagaggaaatgttcttanacacacagaanaacccatgaagatagagatgaaccataggtttagag

SEQ ID NO: 17258 - DNA, 433 bp, Homo sapiens
acagttcggtctacactgccaaatttcttagggaaaaagagggcaagtcagaaggaggaagttggcatttggctcaaatgaccaaattatttaaggtctctacacttcactttgcaccaagtagacccaagaatgattataattcagctacgtgtggtggtgcagatcagtagtcctagctattcgggaggctgaggcgggtggattggttgggcccaggagtttgaggctgcaatgagctatgatctcgccactgcgctttagcctgggcaacagaacaagaccctgtctcaaattaaaaaaaaaaaaaaaaaaaaactttatttttttgaggggcggggccctaaaattatcaaaaaggggtttttaaacccatatgcatcccaacgcttgtttatataaaaaaaaatgttttggccacatgggtcctggt

SEQ ID NO: 17259 - DNA, 440 bp, Homo sapiens
aacaattaaagaaacaaatgactttttggaatagccctgtctagggcaaactgtggcccccaggagacactacccttccatgccccagacctctgtcttgcatgtgacaattgacaatctggactaccccaagatggcacccaagtgtttggcttctggctacctaaggttaacatgtcactagagtatttttatgagagacaaacattataaaaatctgatggcaaaagcaaaacaaaatggaaagtaggggaggtggatgtgacaacaacttccaaattggctctttggaggcgagaggaaggggagaacttggagaatagtttttgctttgggggtagaggcttcttatattctcccagcatccgcctttccctttatccagtctgctgtcctgaaacccagaagtgatggagagaaaccaacaagagatctcgact

SEQ ID NO: 17260 - DNA, 432 bp, Homo sapiens
tctccctttgtgtctcccccatctcatccttttcccctgcgcgccgggcccgccgaccccacaggaaggcctggacgacggcccggacttcctctcagaagaggaccgcggacttaaagcaataaatgtgcatcttcaaagtgatgctgctctgcaggtggacatttctgatgctcttagtgagcgggataaagtaaaattcactgttcacacaaagagttcattgccaaattttaaacaaaacgagttttcagttgttcggcaacatgaggaatatatctggcttcatgattcctttgttgaaaatgaagactatgcaggttatatcattccaccagcaccaccaagacctgattttgatgcttcaagggaaaaactacacaagcttggtgaaggagaagggtcaatgacgaatgaacaagtcacactgag

SEQ ID NO: 17261 - DNA, 433 bp, Homo sapiens
  misc_feature (1)...(433): n = A,T,C or G
aaattgtgctcaaggttaactacatcctggaatcgcgagctagcactgcccgggctgactactttgctcaaaaacaaagaaaactgaacagacgtacgagcttcagcttccagaaggagaagaaatccgggcagcagtgacactggcctccagcctcaatctgttccgtagctcagagcctgcctgccagggccaagtgccctagagcccacccggtgtcctgaagtcctcggggggaggccagcccctggctcactggcacagggcaggtgggctctcggggaaggtgtcgggggccccctaggagggagcgctggggacattgccatgggacggaagtctgcttggcagtggctttgataagcgatgcttgggggtcagaccaccccctagaggagccacgtgccgcccagccaccttcaatgcctgccan

SEQ ID NO: 17262 - DNA, 433 bp, Homo sapiens
  misc_feature (1)...(433): n = A,T,C or G
atatttttgacccattggcaataaatagactattgtcattttattagtaccaatgatgaaatttcaccaaactattaatcaaaagtcacttattgaacacattgataaagcatcatgttccctttgattatcccctgtaaccaacactcaactacaaataggctgggattcaatgtggagtggtggatttcctgaaagaaagtagtgcagatatttaaggattgcatattgttcctaatgaggatgtaataaacaggcattagtacccctttcttttagtacctaaatatgttgtttctgagccatattcttcttcaggtttattttataaagtgaggacatatgataatgataccaaaggaaagataattatcatgaaaccaacttttggatcattccctttttatacaattgtgtatttatagggataccn

SEQ ID NO: 17263 - DNA, 406 bp, Homo sapiens
agccacctcacttggcactgtctaatttttcaaaacattttctcgtagagatagggcctcactatgtttcccaggctggtcttaaactcctgacctcaagtggtcctcctatctcagcctcccaaagtgccgggattatacgcatgagccaccatgcccagccaagccctgcattgtctagattgaggtctttgtcattgaggtggcagagtaactgtgggcttcctgtaagaaaaagagtcccagctcctagatgacattctgcatggccttagaatgttacctgacaggcttcagttttctcatttgtaaaagaacacaactgggaaagcaaaggctgcgctaaattggtttctgaattgctcctctctaccacttgagataagcggcccctctttatacaaag

SEQ ID NO: 17264 - DNA, 477 bp, Homo sapiens
  misc_feature (1)...(477): n = A,T,C or G
aacccaactgaaaccctcgnatnncaactgaaggctttgcaaancngcgnncgnccacgcgnncgcaggagtgcatttaatagataaaacgtttaggcaataattgaacaaaagaatcctggcagatttctaacactaatggcaatttacttatggtatttattttcagtagtaaagacccagcttgaatgtaaattttgtatagtgtaagtatgaagaacatagtgcaactgtacaggtagtcaccagttattgtgatatgataaataattgggctattttgatgaagaaaactttgttcatttgtttctactttctaagagaaattgccacgattcctctgcttttcaacatttcgtatgactttttttttcgggtgggaataaaaagctgtgaaattgttcaacctactttgtaaccaaagaagcaaagctgtgtaatggagtttggcttttttttgttgctttttttttttga

SEQ ID NO: 17265 - DNA, 476 bp, Homo sapiens
  misc_feature (1)...(476): n = A,T,C or G
catgcattcctccgatnncaactganaggcttagaaccgcnccnnaatnccggncgacccacgcgtccggccattactattctataaaccttataaacttgctctgggagaatgcattctaaattatatatagtgtttcagctcccattgtggcgttcatagtcttctaggaacagataaacttaagtattcaattcactcttggcattttttctttaatataggctttttagcctatttttggaaaactgcttttcttctgagaaccttattctgaatgtcatcaactttaccaaaccttctaagtccagagctaacttagtactgtttaagttactattgactgaattttcttcattttctggttagaccagtgttaccaaggtaagctggggaatgaagtataccaacttctttcagagcattttaggacattatggcagctttagaaggctgtcttgtttctagccaagggt

SEQ ID NO: 17266 - DNA, 431 bp, Homo sapiens
cgaaaggaaagaaggccaagggaaagaatgtggctccggccccagctgtcgtgaagaagcaggaggctaagaaagtggtgaatcccctgtttgagaaaaggcctaagaattttggcattggacaggacatccagcccaaaagagacctcacccgctttgtgaaatggccccgctatatcaggttgcagcggcagagagccatcctctataagcggctgaaagtgcctcctgcgattaaccagttcacccaggccctggaccgccaaacagctactcagctgcttaagctggcccacaagtacagaccagagacaaagcaagagaagaagcagagactgttggcccgggccgagaagaaggctgctggcaaaggggacgtcccaacgaagagaccacctgtccttcgagcaggagttaacaccgtcaccacc

SEQ ID NO: 17267 - DNA, 432 bp, Homo sapiens
aactcggccgttgtcaccatgccggtcgttcggaagattttccgtcgccgccggggcgactcggagtcagaggaagatgagcaggactcagaggaggttcgattaaaactggaagagaccagagaagtacagaacttgaggaagaggcccaacggggtgagtgctgtggccttgctggtgggagagaaggtacaagaggagaccactctagtggatgatccctttcagatgaagacaggtggtatggtggatatgaagaaactgaaggaaaggggcaaagataagatcagtgaggaggaggacctgcacctggggacatcgttttctgcagaaaccaaccgaagggatgaggatgcagacatgatgaagtacattgagacagagctaaagaagaggaaagggatcgtggaacatgaggaacagaaagtaagt

SEQ ID NO: 17268 - DNA, 433 bp, Homo sapiens
  misc_feature (1)...(433): n = A,T,C or G
cccacgcgtccggtcttggttatcagctctcttctctaattttttcacccacagcagggctgaagaaccaggcactatgatggaagctcttggacatcagctagggccaggcctcttaacatccctttacctctgttagaaacttcaaggtagcattcttctcctccggccccagtaaatgccttcacaaggctatgcacaagctaagccacatggctagaggtaggactcatctccacctaggagcagcatgccattggttgcccaccccctcctcaaagagaaagataggagaaagcccttctatccagagaaaaggagcagactgagcaatttcggtggttctgagaacccagtggttgggaattcccttagagagcattgggccagctgtcgtatgttggtggcaggcttcatttaaggcagatggttn

SEQ ID NO: 17269 - DNA, 440 bp, Homo sapiens
atctctgcactcgtcctaagagcccaggcctccgagatcttacttgaagagttacagcaggggctttcccaggcaaagagggatgttcaggaacagatggcggtgctgatgcagtcacgggaacaggtttcagaagagctggtgaggttacagaaagataatgacagtctccagggaaagcacagcctgcatgtgtcattacagcaagcagaagacttcatcctcccagacactacagaggcactgcgggagttggtattaaaataccgtgaggacatcattaatgtgcggacagcagcagaccacgtagaagaaaagctgaaggctgagatacttttcctaaaagagcagatccaagcagaacagcgtttaaaagaaaatcttgaagaaactctgcaactagaaatagaaaactgccaggaagaaatagcttctatttg

SEQ ID NO: 17270 - DNA, 424 bp, Homo sapiens
ctgacttttcctgtgtaaggaagcttaagtacttgacctgtgatatatatggccatggcaaaagtataaatggatggatgtagaccatattcaacgcagaatacattttagatcggtatctggcattgtaatcattttgtcttttgaattaacatgccctgcttgtcttttctgaatggaagggtaggaaagtggaaggtactaaaaaggaaaatgtagttttagtttcttttctaagctaaagaactggctttactactgctatattttactaccacatagtagtgtagatgtagtataacttgcttaggaatgctttcaaaaaggttacctccatagtcaaaaaaagggggagtatacagctgattgttgcatttatgaaactgcatttcaatatgctatgctgttactgtgcttagacact

SEQ ID NO: 17271 - DNA, 424 bp, Homo sapiens
  misc_feature (1)...(424): n = A,T,C or G
gatacagngctgcctcttaagacttcccaatttattgtatttttagtataccttctgtgtaccagatacattgtctatacacactgctgtggtttgaatgtcaacttcaaaacacatgttgagatttaattgccgttctaacagtattaagaggtgggcatttaagagatgattaggtcatgaaggctctgtcctcaagaagggattgatgccattactgagggaatgagttagttattgagggagcagaaaatggactaagatacatactaaatgaataaagaagattacaatacacagctctgttatgtataggcaaaattgacaagtatatataaccaaaatagtgtgagaccagtgctcacagatccaagtatatgggtcctaaccctctcgttcactttattttctctttcttttctaa

SEQ ID NO: 17272 - DNA, 397 bp, Homo sapiens
cccacgcgttcgggagggttttaggagcagcgttttaatggagctgacgccagccggcagtgagggttggactgacgtcttcagacccaggacctcagactatctggctcacacagacccccacgctctccatccccggaatctagtcacaaccctggatccttcctctgcccttcttctgcctccccacctgctccatgggcataagactgtggggcttcaagcaataacaagcagaggcctggagagaggacacaaggagggtgcgtggtgccctcacccctgcccagagcgagggggcaaggactctgcctccagggcatctggggtttttcccttcctcacacaacacacttccattctcttttagggttgcaccagtggggtgagcaggtgg

SEQ ID NO: 17273 - DNA, 475 bp, Homo sapiens
  misc_feature (1)...(475): n = A,T,C or G
cgcaggcccccnnaattaaatgaaaccatcgctactgngcgagcaacnccncgaaaangcgncgttttgggttattttttcccatttttattcttcagataaaagcaccaccccaaaatagaaaatgaaaattttcatgaaacaaagagaactcccttgttaaaaccagcttattaactctgtattctgtcaaatgcatttttttctaacaactgaccatggatgttgtgaaggtgcattttaatttaaacatggaaaagatttttttcataattacatactacaatgtaaaattataattttgccatgacttaaagagcacagttgatatcccaaaggttttgatgctaagaagctacagttattctaaatgcactaaaatgtttgaggcaaatctaccttagaggcttttttggtatggtattttttaaaatatttagattttatttaaatttcctgtgagttattctgtatt

SEQ ID NO: 17274 - DNA, 419 bp, Homo sapiens
tcgcccacgcgtccggaagaagaaggagaagattagggttagaagaaagaagaaaaggagaaggaagaagaagaactaagaagaaggaggaagaaagaaggagaaggaagaagaaagaaggagaaggaagaaggagaggagatgaaggaagaaggagaaggaagaggaggaagaactaaagaaggagaaggaagaggaagaatgagagaagaaagatgaataggaagaaggaggaggaagaagaatggaggaggaggagaagaaaaggataactaagaagaatggtatagaaggagaagaaagaagaactaagaagaaggagaggaagaataagactgacagaagaaagaatatagtacaagatgatgaacgaaggtagaaggaaagaagaggaagaactaagatgaagaatgaggagg

SEQ ID NO: 17275 - DNA, 286 bp, Homo sapiens
acatgaccaccttcagcaaggaggccggcgacgaggagatctaagcagcgttcccacagtcccctctagattcttggagttccgcagagcttactatacgcggtctgtcctaatctttgtggtgttcgctatctcttgtgtcaaatctggtgaacgctacgcttacatatattgtctttgtgctgctgtgtgacaaacgcaatgcaaaaacaatcctctttctctctcttaatgcatgatacagaataataataagaatttcatctttaaaaaaaaaaaaaaaagg

SEQ ID NO: 17276 - DNA, 436 bp, Homo sapiens
  misc_feature (1)...(436): n = A,T,C or G
cccacgcgtgcggccagtcacacccactggcggggcgtttcctttgtctacaaccactacctgttctctggctgcttcctggaggtgctgctggccatcctgctgtacctgctgcggctgcggcgcatccacaggcgcactccccggagcagctcggccgccgccctctggatggaggagggccttcccgcccagaatgccccggggaccttgtgatccagctcacagctccacgaagactcaaaaggaaaagccatttttgcctcagggtttctcctctttattttcctgtggctttggtttttctttcccttttttgttcctccaaacaaaaacaaaatgcaggccgagcgcggtggctcacgcctgtaatcccagcactttgggaggccgaggcgggcggatcatgaggtcaggagatcgagaccatcctggn

SEQ ID NO: 17277 - DNA, 425 bp, Homo sapiens
aaatgcactgggcatgggtggaaaccagtttggctgtgttggaactgttaaaaacaggaaattttaagcaggactatttcctctgggactagttaacccaaatagggttgtcttgggattacttcagattttgaagtcagcgttaccactgagatcaaagaaattgaagagaaaatatcttctcggttggctagaaaccacagggttggcctctgtgtatctacagaaggtggtcacctatctggtgtgattgaagtggcgctgaaaacctctcctcactcatctccaaaataagtcaccacctgccagcacagggtaattaaggtcactcgtaggatctttgagttgaggccatagctctcagcatgtggtcctatgagtagcagggtcagcatcacctgggaactttttagaaaaacagatcc

SEQ ID NO: 17278 - DNA, 392 bp, Homo sapiens
cccacgcgtccgtgatattagaagagtttcctttgacaaaggacaatgacccaagaagtaggttttttttgttttttaaataaaggaaaaacagtttcattttgttgcccaggctgaaatacaggggggggatcatagctaactgcagcctttttaaactcctgggctaaagcaatccttccaacctaaaaattttgagtagctggaataacaggggctccccatcacaccctgctaattaaattttctttgaaaaaacagggtcttgctatgtggcctaggctggccttgaactccggggctaaagggatcctcccgcctcagcctcccagggttaggattacaggagggagccactgcctttgccttaaggtagaaattttattagcaaa

SEQ ID NO: 17279 - DNA, 463 bp, Homo sapiens
  misc_feature (1)...(463): n = A,T,C or G
tttccactgacagctgcgaacnccttgantatcctcgcagacncacgcgnncgnttgnccaccaaattatccataaaaaccctggcctctgagttctctgggagaccaatttgaataataataagactcctcttctttcacttggccagctttgcactaatgaaacttcttttttaactgcagtaatactctcagataattgggataactgtgcagcaggcaagaagaatccattgcatgaatacatatgtattttgggaagacacaattcaacccatggcattcattctgccaaaagtataacctaaacccaagggctggaataggccattaaattcacatcagttagcccaaacctttcacccaactatgatacaagtctcttgtggaatgagttttttggagctgagatattattccaaccatattttaaccccatagactttaatattgtcaataacat

SEQ ID NO: 17280 - DNA, 474 bp, Homo sapiens
  misc_feature (1)...(474): n = A,T,C or G
gggggccgggcggatgaaaatgacgcctgcgaaccgcctgagaaccctcgaaacccacgcgnncgnccacgcgtncgctctgaacaccgcacatgccactgagaaccacgggacgggcaaccatactgcccagtgacccactacttcccagggactctcacatctcgggccccaaatggacagatcacccgaggagctggaggggtcggccaagctgactgtaaatttcacagtctctctgaagaaaccattgtgcttctgagaccctagcccccttcctggatggaggcttgagggccctgggacatgtgctatctgataagattgggtcatcgctgccaaggtggagagcagtgagcaaggggcttggggcaatttccagtggagggcatccacacctccattttatgcttgtggttcacacatttaagtttacaaatcagatttcttttccccttcagtagaattagattt

SEQ ID NO: 17281 - DNA, 399 bp, Homo sapiens
aaaacaccaaatggcggatgacgccggtgcagcgggggggcccgggggccctggtggccctgggatggggaaccgcggtggcttccgcggaggtttcggcagtggcatccggggccggggtcgcggccgtggacggggccggggccgaggccgcggagctcgcggaggcaaggccgaggataaggagtggatgcccgtcaccaagttgggccgcttggtcaaggacatgaagatcaagtccctggaggagatctatctcttctccctgcccattaaggaatcagagatcattgatttcttcctgggggcctctctcaaggatgaggttttgaagattatgccagtgcagaagcagacccgtgccggccagcgcaccaggttcaaggcatttgttgctat

SEQ ID NO: 17282 - DNA, 480 bp, Homo sapiens
  misc_feature (1)...(480): n = A,T,C or G
ggagggccgggggggtttnacctgaggccctcggaaccgcactgataccctcggaagacccacgcgnncgccgnccccggngcggagcgacggccacggcagtgtccccaaggcaccgaaaccgaggcgggggtctcggtccctccgcgcaaggagggaggcggaccgtacgtggcaggactcaccgccccgcacgtggcaggactcaccgccccgcgccgtgttctccgagccatggcgccagcgctgtggcgggcctgcaacggactcatggccgccttcttcgcgctggcggccttggtgcaggtaaatgacccacatgcagaggtgtgggtggtggtgtacacaatccctgcagtactgaccctgcttgttggacttaaccctgaagtcacaggtaatgttatttggaaaagtatctctgcaatacacatactcttttgtacggtgtgggctgttggcttggcgtcctacctcttn

SEQ ID NO: 17283 - DNA, 398 bp, Homo sapiens
  misc_feature (1)...(398): n = A,T,C or G
ctgatagctgatcacgatcgcggcattaccatcgaaatctccttgcagaaatttgacaccagcaagcactatgtgactatcattgatgccccaggacacagagactttatcagaaacatgattacagggacatctcaagctgactgtgctgtcctgattgttgctgctggagttggtgaactcgaagctggtatctccaagaatgggcacacccgagagcatgcccttctggcttacacactgggtgagaaacaactaatggacggtgtttacaaaatggattccactgagccaccctacagccagaagagatatgacgaaattgttagggaagtcagcacttacattaagagaattggctacagccccgacacagtagcatttgatgcaattttggn

SEQ ID NO: 17284 - DNA, 413 bp, Homo sapiens
gctgcgagcgagccgcgaaccgagcgggcggcggtttcgcgcaccatgggggagatacccgggaccaggtagacgcgctgcccacacctgtcccgagggccgggtggctcctcacccaaacttctaccttcccttgggttgccaggagcaacagcttcatcttgggggagccgagtgcgtggcgaccctccctgaaactagatcggatccctctctctgggggtgggggaggcagtattcaccctgggcgcgcgtccactccccggatgttttctgtgcaatcgaggctctttccttccactgataccccgagttctcttttttggtctctagcaaaatccacttcctgttgtgactcaacacccccaaggggcaaggggtggatgcctgagtcgcaggggagcgggagcaaa

SEQ ID NO: 17285 - DNA, 398 bp, Homo sapiens
  misc_feature (1)...(398): n = A,T,C or G
gctcggccgctagtgcccagctcgcagaaggcgctgctgctggagctcaaggggctgcaggaagagccggtcgagggattccgcgtgacactggtggacgagggcgatctatacaactgggaggtggccattttcgggccccccaacacctactacgagggcggctacttcaaggcgcgcctcaagttccccatcgactacccatactctccaccagcctttcggttcctgaccaagatgtgcaccctaacatctacgagacgggggacgtgtgtatctccatcctccacccgccggtggacgacccccagagcggggagctgccctcagagaggtggaaccccacgcagaacgtcaggaccattctcctgagtgtgatctccctcctgaacgagccn

SEQ ID NO: 17286 - DNA, 417 bp, Homo sapiens
cacgggaggatcctgacccctgcagggctcaggggtttttagggacccactgccctttcttcctcttcccaccaagacaggcccagaaggagcagccagctgggatgggaacccaaggctgtccacatctggctttggtgggactcagaaagggaagcacaactgagggctgggatattcctcatggtggcagcgctcatagcgaaagcctactgttatatgcacccatctcatgcacgtaggagagggaacttaaaaattcaatcaaatgaacaattaaataaacacctgtgtgtttaagaaaaaaaaaaaaaaggggcggccgttttaaaggatcccttgggggcccaaagttaaccctggcttgcaagtgtttggctctttccctatggggacgctaataaaaaggaatgtggg

SEQ ID NO: 17287 - DNA, 400 bp, Homo sapiens
cagggatcaggcagcggttcaggcgaccctgagtgtttccccaccccgccatggcccggctgctgcaggcgggctgcctgctttccctgctcctggccggcttcgtctcgcatagccggggacaagagaagtcaaaaatggactgccatggtggcataagtggcaccatttacgagtgcggagccctcaccattgatggggaggagtacatccccttcaagcagtatgctggcaaatacgtcctctttgtcaacgtggccagctactgaggcctgacgggccaaaacattgaactgaatgcactacaggaagagcttgcaccattcggtctggtcattctgggctttccctgcaaccaatttggaaaacaggaaccaggagagaactcagagatccttct

SEQ ID NO: 17288 - DNA, 487 bp, Homo sapiens
  misc_feature (1)...(487): n = A,T,C or G
aggggggccggggcggtttgaaattgacaccctcgntnnncattgaaagtcttcggaaccccnccggaannnccgggncgacccacgcgnccggaactatngagaggaacaaagagcnnanaaanacattaggaccnggaanncaggggncgagccaggacggggacagcgcnnaacaaagctgagagaaacctccaggagactgctatcatggcagagaagcccaagctccactacttcaatgcacggggcagaatggagtccacccggtggctcctggctgcagctggagtagagtttgaagagaaatttataaaatctgcagaagatttggacaagttaagaaatgatggatatttgatgttccagcaagtgccaatggttgagattgatgggatgaagctggtgcagaccagagccattctcaactacattgccagcaaatacaacctctatgggaaagacataaaggagagagccctgattg

SEQ ID NO: 17289 - DNA, 487 bp, Homo sapiens
  misc_feature (1)...(487): n = A,T,C or G
ccggggggnnaattagacctagggagctacgatnncnctgnnaccctcgtaannctcncgncgntcttntacctcttccatcactatagctaaatatttagaagtatatcttgacacctagcacaaatgttttggttaagtatcttaaaacggatggatggtatggctggggcagcatggctcacgcctgtaatcccagcactttgggaggccaaggcgggtgaatcacctgaggtcaggagtttgagaccggcctgaccaacttggagaaaccccgtctctactaaaaatacaaaaattagtcaggggtggtggcgcatgcctgtaatcctgtctactcaggaggctgaggcaggataattgcctgaacccgggaggcagaggttgcagtgagctgagatcgtgccattgcactccagcctgggcaacaagagcaaaactcagtctcaaaaaactaaacaaaaaaccttgtggtatagtacgaaag

SEQ ID NO: 17290 - DNA, 486 bp, Homo sapiens
  misc_feature (1)...(486): n = A,T,C or G
gttcccaaattgaaacccctcgnatnncnctagnnaggctgnggaaccncnccgaannccgggncgacccacgcgtccgagcgagactccgtgggcgtatgaccctccgagccagtctatttttcaggagcattgaactgaccagttatgtttatatctgggagaactacaggctgttcaatttgccttgggattctccatggacttggtattcagccttcttaggagttgactttggctactactggttccatcgtatggctcatgaagttaatattatgtgggccggacaccaaacacatcatagttctgaagactataacttatccacagcactgagacagtctgtcctccagatatatacttcctggattttctactctcccctggccctcttcatacccccttcagtatatgctggtcatcttcaattcaatcttctttaccaattttggatccatacagaggtcatcaataaccttggtc

SEQ ID NO: 17291 - DNA, 399 bp, Homo sapiens
aagatacagtgtgctgagccgtccccggcccttctggtgccaagtgccaagcgccgcagccggaagaccagcaaagacactggggagggcaaagatggtggcacggctgggtcggaggagccaggagccaaggcccgtgggcgtgggcggaaacccagcgccaaggccaagggtggtaggttggcctggtccccagggcagggcggtgggcggatctccttcgtgcatccaaactcagggcttgggaacctgccgaagtgcctgcctgctgtctgtaagaactctgagccgggtgcagtgcctcacacctgtaatcccagcgctttgggaggccaaggcgagcagatcggctgatgtcaggagttcaagaccagtctggccaatgtggtgaaactccgt

SEQ ID NO: 17292 - DNA, 470 bp, Homo sapiens
  misc_feature (1)...(470): n = A,T,C or G
atcccctccagttggcttgnanancagtcaagnacgtacaggacacccggnngnngnntgaagntgaggacagngcttctgcgtggctttttcgtggcccagcttctttggggcgcttttctgggatggatcatccatatggcgggcaaatgaaaattacattacttatggatgaagagtattgtgttgtgcagatatactgcagtttcttcatcccttcatctatggatggacaggttccacagtgttgccacggatgacctgatttcagtacccatgtctggctgaagagtatctggttgtgactggatactgcagcttctggatctcatcctctgtgggtggacagcaattaaagcctcatcttcaggaccagtagaagatgccaatttaaataaactgctgcattcctgagacacagggcaggaaatgaaagctattgaacttctcaagaccaagagactattgtg

SEQ ID NO: 17293 - DNA, 407 bp, Homo sapiens
catagtagcagtcaacgctctgttagatcaccctgaagagcttcaaccaagtgagagtgaatcagatgatgagggccctgaacttttgcaggtgaccagagttgaccgagaaaatatactagcaagtgttgcgtttccaacagaaattaaggtcgatgtgtgcaaaagagtaaatctggacattactactttaatcacatatgtatctgccctcagctatggaggctgccactttattttcaaagagaaagtgctcacagaacaagcagagcaagagaggaaagagcaggttctacctcagctggaggcctttatgaaggacaaggagttgtttgcttgtgaatctgctgtcaaggactttcagtctattttagataccttaggaggacctggggagagagagaggg

SEQ ID NO: 17294 - DNA, 485 bp, Homo sapiens
  misc_feature (1)...(485): n = A,T,C or G
tgaaaaganagcgggagcgtgnaaatgaagctgaaggcatgcgacggaacncccgggncgacccacgcgtccgacaaatttgtattcatattcttttctgtgatgtgttgtactaaaatccaaaatggcttttgcaccatttttaagccaattttttcctttgatgttggtaccagaattactataagtgactgctgcttttgggggtaaacattttgttagtgaagataaaaccagaacactaaattatggataaaattttcagaataggtggcacaggtaaatttcactaggttatattttgtgtagtaaagaaaaaaattatttggtcaatgttatcttaattcatactacaatttaagattatcttatgtgtattatagtaaatagatgattttcagattcaaggctcctaagagtttgatttgctctgttttttcctaaaataaatattgtctctcccaactgttaagttctaggtattg

SEQ ID NO: 17295 - DNA, 407 bp, Homo sapiens
cacggggtccccgtagccccggcccccgcccagccccaggtctccccaggccctccgcaggctgcccggcctccctccccctgcagccatcccaaggctcctgacctacctggcccctgagctctggagcaagccctgacccaataaaggctttgaacccaaaaaaaaaaaaagggggggccctttaaaaagaacccttggggggcccaagttaaaccggggttggaaaggaaaaattttttcctttaaggggggccaaataaaacccccctggggaatcttggagagaaacctttctttggggggggggaaaaatgggccaaacccccccccaaaattaaaggcctttggggaaaaaaaaaattttaaaggggtaaagggggaaaaaaacccggaaagccctgggg

SEQ ID NO: 17296 - DNA, 494 bp, Homo sapiens
  misc_feature (1)...(494): n = A,T,C or G
cgtaatanannnagggcnngcggcgttgnnaattgaggactgntngtctgcnacggacnnnccgggncgacccacgcgtccgctagtttttgctatgtggaacatgctgctctaattcagatttaaagagtttcttcctgttaattcgaagctcactgtgcctcttgtttccgagggaagaaggactgattaagtcatctaaatggatgcaatactgaattacaggtcagaagatactgaagattactacacattactgggatgtgatgaactatcttcggttgaacaaatcctggcagaatttaaagtcagagctctggaatgtcacccagacaagcatcctgaaaaccccaaagctgtggagacttttcagaaactgcagaaggcaaaggagattctgaccaatgaagagagtcgagcccgctatgaccactggcgaaggagccagatgtcgatgccattccagcagtgggaagctttgaatgactcagtgn

SEQ ID NO: 17297 - DNA, 499 bp, Homo sapiens
  misc_feature (1)...(499): n = A,T,C or G
cgtacagancacngcgccncgcncnnnnnnaattgaaaacctgcaggtcatggcanacngcnccggaannnacgggacgacccacgcgtccgaggagacacacctgaggctggnttctttcatgctccttaccctgccccagctggggaaatcaaaagggccaaagaaccaaagaagaaagtccacccttggttcctaactggaatcagctcaggactgccattggactatggagtgcaccaaagagaatgcccttctccttattgtaaccctgtctggatcctatcctcctacctccaaagcttcccacggcctttctagcctggctatgtcctaataatatcccactgggagaaaggagttttgcaaagtgcaaggacctaaaacatctcatcagtatccagtggtaaaaaggcctcctggctgtctgaggctaggtgggttgaaagccaaggagtcactgagaccaaggctttctctactgattccgcagctcagg

SEQ ID NO: 17298 - DNA, 491 bp, Homo sapiens
  misc_feature (1)...(491): n = A,T,C or G
gataggtacccggggggngttagnaactgaggccgttggaaccctgaagccntcggaanngcncacgcgtncgcttaacataactgaagatatgcttcgtgggatctttgttccttttggaagaattgaaagtatccagctgaggatggacagtgaaactggtcgatccaagggatatggatttattacattttctgactcagaatgtgccaaaaaggctttggaacaacttaatggatttgaactagcaggaagaccaatgaaagttggtcatgttactgaacgtactgatgcttcgagtgctagttcatttttggacagtgatgaactggaaaggactggaattgatttgggaacaactggtcgtcttcagttaatggcaagacttgcagagggtacaggtttgcagattccgccagcagcacagcaagctctacagatgagtggctctttggcatttggtgctgtggcagatttgcaaacaagacttt

SEQ ID NO: 17299 - DNA, 419 bp, Homo sapiens
gaattttaaaactacccacagtttaagagaaaacataacttggtaaaaaaggtagccaataaaaccacaatttgaaattgataccattttctactcacaatggatgatgaaaaatttcacctttaaatgggtcagaagttgtctttgacatttaccatgaaaaaactacataaaatggctccctggtgaggttacagacacggccctggtgatgggcgttgcaaagttttcactgagcacacagcaatggtatcacctagagaagttcacgcaactttgttgaatgtagttgacttttccaaatttataaaggaaggaagaaggcaaatgttaatttgccaacaacgaatatcctttttctaaatcagacattccttttttgttagtggcagtttatcctgtaatttcaaatgacgtta

SEQ ID NO: 17300 - DNA, 423 bp, Homo sapiens
cccacgcgtccggacttgtgtgaactatcttaagttgccggactattcaagcattgagataatgcgtgaaaaactgttgatagcagcaagagaagggcagcagtcgttccatctttcctgatcatagcaagaaatgcagtgtctgcctgttacagcaaaagaaacaaatcatgatttcttttctaatgttatcacctgagtcaaggaaacatgttacgccttcttgttgtaggaaaaacggcttgcagattataaagagacatttggttgatattcattaatggccccatggacttaaagtgatcaggccctaaaacgttgttgtgatgaggtttctttagcaagttcttgtttaaattatcatttatttgatgagtgaagtttttaacatgctttgctgtgtgaaatttaaaaaagggatgt

SEQ ID NO: 17301 - DNA, 491 bp, Homo sapiens
  misc_feature (1)...(491): n = A,T,C or G
ggcgggtttctacctgaaacttcncgaatgtgctactatcgaannccncannangcggnngaaattctgtgataccatatctctgtttacggcaagaacacccttttgtgcctctgctgttccggttccttagttgcagtgtgtcagtaaacccaaatggcagactacaggtctgggtagtttttggctgattgggctaggacggatgtaactgattttaaataccatgggccaccttggaagtactcttctttaattatatttttagggggatttaaaaaaaggtaaatatagcctatctaacttttgctttttaggaatacatttctcagctccagttttaaaaaatcagtgttattgaggtataatttatatcccatggagacacccactgtgagtgtacaattcattgatacatagaactttgtaaccatcactataagtcagttctagaatgtctatcacccccggaacgttccttatgtggttag

SEQ ID NO: 17302 - DNA, 492 bp, Homo sapiens
  misc_feature (1)...(492): n = A,T,C or G
aggcgggttttactgagnccctcgctgagggccagtcgnaangccncgacccattcgtncgggcatcacctatgccctgaccgttgtgtggctcctggtgtttgcctgctctgctgtgcctgtgtacatttacttcaacacctggaccacctgccagtctattgccttccccagcaagacctctgccagtataggcagtctctgtgctgatgccagaatgtatggtgttctcccatggaatgctttccctggcaaggtttgtggctccaaccttctgtccatctgcaaaacagctgagttccaaatgaccttccacctgtttattgctgcatttgtgggggctgcagctacactggtttccctgctcaccttcatgattgctgccacttacaactttgccgtccttaaactcatgggccgaggcaccaagttctgatcccccgtagaaatccccctttctctaatagcgaggctctaaccacacagcctacn

SEQ ID NO: 17303 - DNA, 489 bp, Homo sapiens
  misc_feature (1)...(489): n = A,T,C or G
ggcggggtttaaggaggccctntacggnaggcttagaaccgcnccnaanttngggcgacccacgcgtccgggagctaggattgcacctttgcactccagcctgggtgacagagcaagacgcatctcaccctccaaataaggtaggaagggcacacataaattgaagtggtggagatggcagtaaagttccagtgagaaaatttagaaatagttggtgaggctggtcatggtggctctcgcctgtgattccagccagcactttgagaggcccaggcgggagaatcacttgaggccaggagttcgagacccacctaggcaacatagagagatcctgtagatgctatatatatattatatattattatacataattatgtaatatataataattttttgtacttttttttttttgaaaaaaaaaaaattaagctcatgcgcccggtgggggcagcaggcacggtcttgacatgcaaaaagacgccagctggt

SEQ ID NO: 17304 - DNA, 416 bp, Homo sapiens
gttccacctggcggctggctcttattcccctcgctgttgtcgcggagctgtgtctgttgccatgagtcctgcggcggctgctgtgtcagtggcctgatcgcgatggggacaaatgcgcatgtcgagaggaaactgtcgtgcctcttcatattggcgatcctgttgtgctccctggcattgggcagagttacagtgcactcttctgaacctgaagtcataattcctgagaacaatcctgtgaagttgtcctgtgcctactcgggcttttcttctccccgtgtggagtggaagtttgaccaaggagacaccaccagacttcgttgctataataacaagatcacagcttcctatgaggaccgggtgaccttcttgcaactggtatcaccttccagtccgggacacgggaagacactggg

SEQ ID NO: 17305 - DNA, 401 bp, Homo sapiens
cggacgcgtgggttttggcagagggtggagaaagaactattattaaattggccatttaagagtagaagacaagagctgagccaactaaccaaactgaaatattatctcattctctgtgttatcattttcagtagataaactccctctaatagaggaagtccagattgacatgaaggtgaaaatatttgttaaaatccataagctcaatctgattttttttttaaaccaaaggaaaatatacttcattgttaaaagcatttctagggctttaattagcttcttgttaaaatgaactcactttactttactgggtggggagagggctgccttatagtttggccagccccaaccctgtccctccccgccaaggacaaagcagggaccttgtgtctgaggatcag

SEQ ID NO: 17306 - DNA, 406 bp, Homo sapiens
  misc_feature (1)...(406): n = A,T,C or G
cccacgcgtccgagagaggcttatttgactttatgctagaagatgaggcttctgggataggcccagaagttcctgatgaccgcgacttcgagccctccctaggcccagtgtgccccttccgctgtcaatgccatcttcgagtggtccagtgttctgatttgggtctggacaaagtgccaaaggatcttccccctgacacaactctgctagacctgcaaaacaacaaaataaccgaaatcaaagatggagactttaagaacctgaagaaccttcacgcattgattcttgtcaacaataaaattagcaaagttagtcctggagcatttacacctttggtgaagttggaacgactttatctgtccaagaatcagctgaaggaattgccagaaaaaatgcccaaaactcn

SEQ ID NO: 17307 - DNA, 425 bp, Homo sapiens
  misc_feature (1)...(425): n = A,T,C or G
catgacaatgcatctgctgtaggcggtagcagtttttacgatgaacttggtatgcaggccttatgtaatcttgatgatacaaaaactttaatgcagcagatgatgggtaacaattgcagttcttttttgagatagtttcattttggaactatgcataggagcactgtttacataggatttaccctatgtgctaggaaaatgtgactttttgctttttccttttctgtttctctctactcttattctgcattttcttttggncatgtccatttttaataggtaggtaaagagttaatatatgttcacactcaattctgtttttcccaggcatttgtaccatgtaggagaaaacgttgactttttataaaaaaaagtttcttactaaactntaatttctttgaatattttgaatgtgctttaggaan

SEQ ID NO: 17308 - DNA, 411 bp, Homo sapiens
  misc_feature (1)...(411): n = A,T,C or G
agaggctgtccttttctggcatcagcgttgcggctcgaggcaaagctggtcctgtgcctgctgtccattgccgctaaggcctgctgctgccattcaggcgtgactctctctctctctctctttcatgccgctctctccaccccatcttgggacggacagctctaagaattcctgctacgacactgaattcaaccaggaggtcagacacattctatgtgaaaaacatggcaaaatcatggaagccatggaaaagttaaagtctgggatgagattcaatgaagcggccgcacagtatagtgaagataaagccacgcaagggggtgacttgcgttggatgaccagagggtccatggcgggaccatttcaagaagcagcatttgccttgccttgaagtgggatggataagcctgn

SEQ ID NO: 17309 - DNA, 402 bp, Homo sapiens
ataaattgggctgtgccagaaatccagactgagttttatcatcctaaggtaaagttaaattaaaatattgtgagggcaaaccctttcaataaggtattagttatttttattttttttttttgaaacaaaatttggttttgtcgcccaggttggaatgcaggggcaccatttttgtttaccgaaccctccacctcccggattaaaacggtttttgtgtctcaacctcctcaggaactgggattggggacactcgccaccatgcccggataatgtttgtgtttttaggggggatgaggttccatcatgttggccaggctggatttaaactacgggcctaagggatccccgattgcttcagcctcccaaagtgctggaatattaggcgggtgccaccacccccag

SEQ ID NO: 17310 - DNA, 411 bp, Homo sapiens
atccagccagacttgctcatctccctcacagcccccaaaaaatctgcaacccagtttaccggtcgctaccattacctggggggtcgttttgtgccacctgctctggaaaagaagtaccagctgaacctgccaccctaccctgacactgagtgtgtctatcgtctgcagtgagggaaggtgggtgggtattctccccaataaagacttagagcccctctcttccagaactgtggattcctgggagctcctctggcaataaaagtcagtgaatggtggaagtcagagagcaaccctggggattgggtgccatctctctaggggtaacacaaagggcaagaggttgctatggtatttggaaacaatgaaaatggactgttaaaaaaaaaaaaaaaaaaaaaaaaaggggcggcg

SEQ ID NO: 17311 - DNA, 403 bp, Homo sapiens
aaatcatcttatcatcagcatacatttttgagtatgttacgtccttctttaaggataaaattgcacaagcacaggacaccatgacttgcgcgtgtatatatatatatatatatatatatatcctagcgtgtccacctttatgctttgcactcccttaagacactgatgtgggatgaatggattctctaggcccacacagtaactcacctgtagacctgctgaacctcagcatgtatgacacctcacacaggttaatactgtgtgtgaacgaaaaactagaagacacttgttatacccctttttgggtgtaatatatgcacatgctttttgtgatttttagaaaaaggggcacccgtgttattactgtaaaatgtccttaaccaaactttggtgaatctctctt

SEQ ID NO: 17312 - DNA, 405 bp, Homo sapiens
aatacactaggatttctactggaggtggagaaacagaagaaactctgaagaaattgttacaagaagaggtcaccaaggtcaccaaattcattgaaggtggtgatggtcatttatttgaagatgaagaaattaaaagactgcttcagggagacacacccgtgaggaagttgcaagccaacaaaaaagttcaaggatctagaagacgattaagggaaggtcgttctcagtgaaaatccaaaaaccagaaaaaaatgtttatacaaccctaagtcaataacctgaccttagaaaattgtgagagccaagttgacttcaggaactgaaacatcagcacaaagaagcaatcatcaaataattctgaacacaaatttaatatttttttttctgaatgagaaacatgaggga

SEQ ID NO: 17313 - DNA, 407 bp, Homo sapiens
gcgaacaattctttttaatttacagcaatatattgaatatccattgacaaaaacactattattttttgtaccagaaatacttaaagacctcagaagcactcttttacttttaagaaattgcttttttgaactttattcagaagcagttatcaataaattccataaaataatgtcattggtatttaaaaatgaatattaatataatgaaatggcttgcctttttgtaggcataataagccaaatacttttttacccaaaataatttttagagaaaatgatgtaatgaaaaattgtaccatgaattaggagcatagctttttccatttaaacgtcaccattacttaaaagatgattgattattgctataccaaatcagatgaactctgttcatcactcttcttctctgg

SEQ ID NO: 17314 - DNA, 401 bp, Homo sapiens
cccacgcgtccgatcatttatctgttggaataatagagaatgtgaatatcgatttagttacaaagaagttcactagtgtgcgatggggaatagcatactgtgggaagctatctgactgttgactaattaaggcgatgagattgcagggtttttttttttactgcttttatgggagctatttcatttcaggataagtggaatagaaaataaaaaaaaccctcagttgagctcatagaaaatactactaaatatttactctctgctccagttttctgattgataaattggggataataatagtacttactcatagggatgttgggacaactgagttagtatatgaaaagcacttaaaaggccaggctctgtggctcgtgcctgtaatcctagcactttgggag

SEQ ID NO: 17315 - DNA, 494 bp, Homo sapiens
  misc_feature (1)...(494): n = A,T,C or G
acgctgaggaacgctctagatagacgcccgtaaggcaccggcccggacacgcgtgcgaattgacattatcgtgttctcgggtgtgagagcttcatatcacggagacattactgggaggcggaggtaggggacaggaaagagaggcatataggggtgtgcagtaagaatgtgcagagaaaaggctgggtcaaaatgacacctgagaatggattctggactatggggctgactgatgggaataagtatcggactctaactgagcccagaaccaacctgaaacttcctaagccccctaagaaagtgggggtcttcctggactatgagactggagatatctcattctacaatgctgtggatggatcgcatattcatactttcctggacgtctccttctctgaggctctatatcctgttttcagaattttgaccttggagcccacggccctgactatttgtccagcgtgaaaagaagaagagagttcctccaattctgn

SEQ ID NO: 17316 - DNA, 417 bp, Homo sapiens
  misc_feature (1)...(417): n = A,T,C or G
agaacatgatgcgtcgaaaggaacaagaacacatgataaattgggtggagaagcacgtggtgcaaagcatctccacacagcaggaaaaggagacaattgccaagtgcattgcggacctaaagctgctggcaaagaaggctcaagcacagccagttatgtaaatgtatctatcccaattgagacagctagaaacagttgactgactaaatggaaactagtctatttgacaaagtctttctgtgttggtgtctactgaagttatagtttacccttcctaaaaatgaaaagtttgtttcatatagtgagagaacgaaatctctatcggccagncagatgtttctcatccttcttgctctgcctttgagttgtccgtgatcacttctgaataagcagtttgcctttataaaaacttgctgg

SEQ ID NO: 17317 - DNA, 441 bp, Homo sapiens
actttgttgttagtaaatatatgacgcttgcctgggaaatgctcccttgccttaaatagcaatcaattataattagctatcaggtgttccaataaaaagaatttacatgatagggtaacatggaccatgaaagtgagtttcttgaaggagtcctttgttcctgatcagagaaattgatacctgttagcattcactgcctccatatttgaaggagaaagaactctattggtgtcgcccgaacagccatttaaaaatcgaaatctaaaggatggttgctgatgctctgtgtggtctggtataagtggggaaatatgagagatggaagaaaaactttgttatgtcttccatggcatatttactcttactttacttcgcgccacatcaaatgaaacaagccgtcttacaagtcggtattgccttttaaaatctgtttccgttttg

SEQ ID NO: 17318 - DNA, 432 bp, Homo sapiens
aaattgtgctcaaggttaactacatcctggaatcgcgtgctagcactgcccgggctgactactttgctcaaaaacaaagaaaactgaacagacgtacgagcttcagcttccagaaggagaagaaatccgggcagcagtgacactggcctccagcctcaatctgttccgtagctcagagcctgcctgccagggccaagtgccctagagcccacccggtgtcctgaagtcctcggggggaggccagcccctggctcactggcacagggcaggtgggctctcggggaaggtgtcgggggccccctatgagggagcgctggggacattgccatgggacggaagtctgcttgggagtggctttgataagcgatgcttgggggtcagaccaccccctataggagccacgtgccgcccagccacctttaatgcctgccg

SEQ ID NO: 17319 - DNA, 441 bp, Homo sapiens
  misc_feature (1)...(441): n = A,T,C or G
tttctttaatataatttaaataatatttcaactacctaggtagttgatattttcccaactaaatgttgaaatactgtaccccagatcaaattatctaatgttttgttagtgaaacctaaactgatgattaaatcgttcatcaaacctagagataataaaaactattggtcttttgttaaaagcccataatgtagcatcatcagtagctcatttgtgctgaaatttatgacgacttactacaaaagagtacattccaaaaatgtcacatttgtctttctcaagtactatattatgccttaccaaattataacaaatgtccatgcttccctccataattcccacaggtctttaccatgtaaaaatccatgctaaagagtgctaaagagagaaagaagtggagaattaatcagtgatttttcaagttgtatgaaagcatcgacn

SEQ ID NO: 17320 - DNA, 435 bp, Homo sapiens
  misc_feature (1)...(435): n = A,T,C or G
cccacgcgtccggtttttacaactagcattgaatgcagtccaatttgcagtagtaatcttcaatagacaagcagctttgttgctgcctttatggacatgggtaccaattgcttttgtaatatggtaaaaatgtgagctagcacttctgcgttccttttgatttttttttttaacatgtattcagattgagaaatatgattttaatgctttaatctcatgtagtttgtttttaatttcaagcaaaatcttactgtacttgaatgtgccctgttttgttagcacacctagacttgctgtaactgtactcatgtcccagtatgtacgttctttctatgaaagagaaaacactaatcttaaattatatccagcaatgtttctggtatcctttaagaaaagntaagactattatttccttcccttccctgtgcagcattg

SEQ ID NO: 17321 - DNA, 421 bp, Homo sapiens
aagctgaggcaggagattcgcttgtatccaggaggcagaggttgtagtgagcagagattgcgccactgcactccagcctgggtgacagagcgctgagtcaccacacctggtataagccactgtgcctgacccacaatgacttttatacatattgttaaatcatcttacagattttataatttgggggaagaaaaattttactaaatgatcttttaatggaaactctacaagaaccagaatctttgctttgctcacttatgtatccattcctaggcctagaaaaatgtctgacgcatagcagcaattattcattgaatatatggacccagcaatagtacattagctatgccatatgcatacattaaaaatgtagattattgactttcaaaagataattaatgcaacttcttactgcttctga

SEQ ID NO: 17322 - DNA, 437 bp, Homo sapiens
ccgagcgatgggcatctctcggcctcccattaagctgggattacaggcgtgagccatcacacccggctgcttctgtatttttagtagagacggggtttcaccatgttggccaggctggtctcgaattcttggctttaggtggtccgcccgccttgacctcccaaagtgctggggttacgggcgtgagtcaccgtgcccgacctgctctgatctttctgaactctgcagcctgagagattggggctggtaaagactgcgggttgccaaacataactagaaacgtgggttagggggttgtggaagacgaactgatgccccatggcttggaaaggctgagagttcccttatttctccttaaggcctcatggggctgaagaacctggaggagtgtgccagggccatttgtcctccagtttacttgatgccaaatttctccg

SEQ ID NO: 17323 - DNA, 433 bp, Homo sapiens
gggagcttccgggagggcggctcgtaggcaccatgactcctgtgaggatgcagcactccctggcaggtcagacctatgccgtgcccctcatccagccagacctgcggcgagaggaggccgtccagcagatggcggatgccctgcagtacctgcagaaggtctctggagacatcttcagcaggagccctgagtccctttgaatgtggatgtgtgtcgtctgattcgtctttgactcccacggccccagcatgtgctctacaaatgggatgcactctggttattgaacagtgaggggtggaggggggagaaggaaagcaagggatgcttggagatggtcctctccggggcagatagaggaagatggacccttattgagaccacgcgcagaacaggctgggtgagccactctcgtccctgatgtccacagaggcag

SEQ ID NO: 17324 - DNA, 436 bp, Homo sapiens
  misc_feature (1)...(436): n = A,T,C or G
tgctacacaagaccctgagactgacctgcaggacgaaaccatgaagagcctgatccttcttgccatcctggccgccttagcggtagtaactttgtgttatgaatcacatgaaagcatggaatcttatgaacttaatcccttcattaacaggagaaatgcaaataccttcatatcccctcagcagagatggagagctaaagtccaagagaggatccgagaacgctctaagcctgtccacgagctcaatagggaagcctgtgatgactacagactttgcgaacgctacgccatggtttatggatacaatgctgcctataatcgctacttcaggaagcgccgagggaccaaatgagactgagggaagaaaaaaaatctctttttttctggaggctggcacctgattntgtatccccctgtagcagcattactgaaatac

SEQ ID NO: 17325 - DNA, 437 bp, Homo sapiens
  misc_feature (1)...(437): n = A,T,C or G
cggacgcgtggggttcagggctttagagggaacccaggtggtctcttcaccctgtgtcctanaatgggagagtaagtagacagtggtgataaccccacactgcttataagtgcatctttatagtatttggggctttcctacccctttagccttctgtacctagtaccatattccagttttaaagaactggcagaatgtgatggataacagaggaagagctcaatttatgtttattggaagaacattttacttaaatgatttgaggggtgggagggagtgaactactgagtttgccagagtgaaaatccatctgaaaaactcagctacctttagtttttaagtctcatttttgggcttgtctctgcggactgtgaagaatcacaatgctctatatgccctggactgtgtggcaaatgcatgttgcagcgtgtgtgttn

SEQ ID NO: 17326 - DNA, 448 bp, Homo sapiens
cccacgcgtccgaagtaactgagaaatggaaaatcaaacatcgtatgttctcggtcacgagtgggagctaagccatgaggatgcaaaggcgtaagaataatacaggggattttggggactcagggaaagggtgagaggagggtgagggataaaagactacacattggcaactgctgctaatcaaagtgtagattccaggcaacttgagtctttgctcccaggttataatccttaaacttgacccaaataaactgtctacttattaaaaaaaaaaaaaaaaaactacatattgggtccagggtaccctgctggggggaggggggccccaaattttcacacttcccccttaaagaactttattttggtaccaattgttacctgttccccagcattcccccttaatccttttaaaaaaaaataaaaaatttttctaaaaaagaatataatg

SEQ ID NO: 17327 - DNA, 490 bp, Homo sapiens
  misc_feature (1)...(490): n = A,T,C or G
agtggcgagggngnnntttaaaattgataccccntcntaaannactgataaccctgcggaaccgcnccggaattcccggcacgacccacgcgcccgatcgtgtcctgttgtagatcgggtgccttctgtgtctgatgtctcagaggagaccttgactagtgaggcagccatggagactgacatcacagaacagcagcaagcagctatgcagcaggaggagagagtactgactgagcagattgagaacctacagaaggagaaggaggagctaacatttgagatgcttgtactggaaccccgtgcctctgatgatgaaacccttgagtctgaggcctccattgggactgctgatagctcagagaatttgaatatggagtctgaatatgctatctctgagaaatcaggtaagtgaacatggtagaccaaagactccagatttgttttgcaaaggaggaataaagattccaaaactaagacaaagtcttttaaa

SEQ ID NO: 17328 - DNA, 474 bp, Homo sapiens
  misc_feature (1)...(474): n = A,T,C or G
aggggagtaaaaatgataaccntgctgtacactgactgacctgccgggacgacccacgcgtccgccggctcgagggcggctgcctgggtcttcgtggtctacgccggagtgttgaagggagggcggctgtgggaggcgctggccgggcgcaacgccctggttccgctgccgagcgtggagttgcctctcgactcctcccttttggcggatgaataatacggcagctagtccaatgtctactgcaacttcaagtagtggaaggagtacagggaagtctataagctttgcaacagaattacagagtatgatgtattctttaggtgatgctagaaggcctcttcatgaaacagcagttttggtagaagatgtggtacacactcagttaattaatctgttacagcaagctgctgaagtttctcagctgcggggagcaagggtaatcactcctgaagatcttctgtttttgatgcgcaa

SEQ ID NO: 17329 - DNA, 395 bp, Homo sapiens
aatctgtttgcaaattgtccaacccaccccctcaacatgaggggcttccattttctgtgttttgtaagggaactgtttccttcatgccgccatgttcctgatattagttctgatttctttttaacaaatgttatcatgattaagaaaatttccagcactttaatggccacttaactgagaatgtaagaaaattgatgctgtacaaggcaaataaagctgtttattaaccttgaaaaaaaaaaaaaaaggggggccccttttaaagaatccttggggggcccaaacttaacccggccttgcaacgaaaaatttttttccttatagggaggcgtattataacctccctgggaatcttgggaaagaacccttccttttggggggaacttaatggcaat

SEQ ID NO: 17330 - DNA, 490 bp, Homo sapiens
  misc_feature (1)...(490): n = A,T,C or G
agggccgnnnnnnattaaatgaaacctcagaacctagtacctgcgnanncacncacacgtncggcccgactataccgaacgatccaaaattagccaggtatggcggtgcgcatctgcagtcccagacattcaggagattgaggcaggaggatctcttgggcccgagaggtcaaggctgcagtgagccatgactgtgtcactgcactccagcctgggtgatggagcaagaccttgtctctaanaaaaaaaaaaaaaaagaaaaaaaaaaaaaaaaaaaaaaagaaaaaaaatgggggggggggccttttaaaaaataccctgggggggaccaaattaacccggggtggcaaaaaaaaattttcttcttttaagggggccatcttaaaaaccacttggggattcttggaaagaaacctttttttggggggggagaattggtggaccaccccatcaccagcagttcagcctgcatgtggctaggcaatctttt

SEQ ID NO: 17331 - DNA, 477 bp, Homo sapiens
  misc_feature (1)...(477): n = A,T,C or G
attgancgccctnggnaccgttgaggaacttccgggtcgacccacgcgttcgcggtgaacgcactcggtcaggcaatctgcttacttgtcattccgcggatcctggttccatgaaccggaccggagccgtggacgccctacagctgagaccgggacccaaggggtcggccgcggccaaggaccctaggaccgccgccccagctcacgctgccgacggcagctatagacattctgcgtgaggtacgggctcctggacttcgcctttcccgagccctggaggtggggagaaaaggctcaccaatttttaaaatccaaatatatctcatggtacagtggaagaactggccagagagtctggaagattgggttctggtcctggctgtgccactgactcactgtgaccttgggatcttgtgctgtgaagacatttcccaagtgcttcatgttagccagcaaatctgacccacaaggcctggn

SEQ ID NO: 17332 - DNA, 486 bp, Homo sapiens
  misc_feature (1)...(486): n = A,T,C or G
tgggccgnnnnnnttttgaactggtgcgtgagaaaaatgcgacctccggancgaccacgcgtncgggtgaaggtcctgggtgaggtagggttggatggtgcttgccgcgtatcatggctgcctccggaaaactcagcacttgccgtctccctccgttgcccacgattcgagaaatcattaagttgttaagactgcaagcagcgaagcagctatcacagaatttcctcctggacttgaggctgacagataagattgtaaggaaagctggcaatctgacaaatgcttatgtttacgaagtgggccctgggccagggggaatcacaagatctattcttaatgccgacgtcgctgaacttctggtggttgaaaaggacactcgatttattcctggattacagatgctttctgatgcagcacctgggaaactgagaattgttcatggagatgtcttgacatttaaggtagaaaaggctttttcagagagtn

SEQ ID NO: 17333 - DNA, 410 bp, Homo sapiens
  misc_feature (1)...(410): n = A,T,C or G
gcgggggttttaccatgttggtcaggctggtctcgaactcccgacctcaggtgatccgcctgccttggcctgccaaagtgctgggattataggcgtgagccaccgagcccggcccaaattagaaatatttctaatcagatatttccatggttatagatatttggttgcttggttcatatgcatagaaacagttgtcataactgtaaaaagcagtacttagcaagtatttctaagtgattggaatagctttcctttaatgttacaatactgcctattgatttggaaattagatcacgctctatgatgtttcgattttactcaaaggcatcatgagtactctgctcattctttcattctttatagatgtctagttgagttaggaactattttatcagaaatcattttagcan

SEQ ID NO: 17334 - DNA, 472 bp, Homo sapiens
  misc_feature (1)...(472): n = A,T,C or G
ggggnattgaccccctnggtaccgtcgagccctgcggtacagccacgcttcgcgttccagcaagccgtgcgcgcggtatcatggcggtgtccaggtggaggtcttgaggctatcagatcggtatggcattggcgtccgggcccgcaaggcgggcgctagctggctccgggcagctcggccttgggggcttcggggccccgagacgcggggcgtatgagtggggcgtgcgctccacgcggaagtcggagcctcctcccctggatagggtgtacgagatccctggactggagcccatcacctttgcggggaagatgcacttcgtgccctggctggcgcggccgatctttccgccctgggaccgcggctacaaggacccaaggttctaccgctcgccccctcttcacgagcatccgctgtacaaagaccaggcctgctatatctttcaccaccggtgccgccttctcgagggtgg

SEQ ID NO: 17335 - DNA, 401 bp, Homo sapiens
cggacgcgtgggcggacgcgtggggcaatgcatacatgttccttagcatagtggttggcgtattgtgaccatctcaataaactttactttttttttttttttaaaataaaggcaaatcatgggttaatttattttcatcaaattatgaaacatgtaaaaaatcggtaaactatatagctgtttttcactgaaggtaaggccttaatttataacctctaaaaaggctaaaggatatatatcatctatgtatggcaatctaattaactggagggctcttttaaaaaggaatttactttgatttgctgggcactagcacacattcctaggcttaataaagagtaaaaagacttgcaaatgtgaaaaaaaaagatttacaaaatcttttttctattcctaccctg

SEQ ID NO: 17336 - DNA, 491 bp, Homo sapiens
  misc_feature (1)...(491): n = A,T,C or G
agacggggnaccgagaaaagttaaacctgatgagcctcagaanctgatgatcctcgnaannncacccacgcgtncggtctcattnactccttaaacaaaagacttaaattagttttggtcattattacttttattttgcagcatttgggttgttattagcggaggagcaagtataggatatggagaggcccctggcttcatgagaacaaaggcaggcccaggttataattacagctttctcctgccccttctttactttctctaccacagttttctccactgtttggtttcctcttgccacaatttgctaacatttaaaaaattttcctgcacccagtagtttcatatcctgtagacatcctcttaggacattctcaaatttcaaaataaaaaatattcatctatgtagctaattaaagataaagtttttgcagatcaactactcaaactactaaatacatttacctgagaaaaagtctctgagagcactt

SEQ ID NO: 17337 - DNA, 401 bp, Homo sapiens
gcatcggggagatggccgagattgaccccaagaccgtgcaggacctcacctcgggggtgcagacactcctgcagcagatgcaagataaatttcagaccatgtctgaccagatcattgggagaattgatgatatgagtagtcgcattgatgatctggaaaagaatatcgcggacctcatgacacaggctggggtggaagaactggaaagtgaaaacaagatacctgccacgcaaaagagttgaaggttgctaataatttatactggaatctggcatttttccaagccaagagaagatcgaatggctttttgcagctaactactatgtgtagacaggttttatattataaagtatgcattcttatcacctagtatatagttagcttggagagtgatttccccc

SEQ ID NO: 17338 - DNA, 416 bp, Homo sapiens
tagttgtcaaagttatatgtgatatcaatgaagaaatatttgtagcatgtaaacggttatttctgtttcttaaaaagtattgttagtgggctattaaacttggatttttctttttattaatgcagtatgttctttttattcaagtatgaacttgttgagaaactatagtaatatgatttttaagagatttatgttctacttaaaatgtgaattgtacttctgagctgccttaatgcaaggtcatttatatttgttaagaggaaataatcaagatcactcatatcccaactgaatctgaggttttataaatccctcaaacgattgctgagagcctgattgtggaaagaagtgagatgcaccttattttcaagaagtcctgggaagcgctctcctagcacgtccatttccaggaggag

SEQ ID NO: 17339 - DNA, 490 bp, Homo sapiens
  misc_feature (1)...(490): n = A,T,C or G
aggggggtnacccggggnnagtttanaactgagaccntcgaanactganaccntctgnagnnncacccacgcgtncgcggacgcgtgggcggacgcgtgggcgaggactgggatgaggaggtggggaagatgtgaggccggggcacagaggagaaattgagagaccttctctccacttttgccagggacagggagagggcggcttcttgggtggcctgcagcagtgcctcggcccagtccaggatgggctggggcatctgcttgtcttggtctggggtgttgagggctcttctgcttatgtgaatatcctcagggtgggccagaatgaatgagactccctgtccagggaaaaggtgactggccatgcccactctttccatcactgtgggctttacggccgtgatcacagcaagcgggttcctgtgggaagggccaggaggcagctccagcatggaaggagggtatgaagactgacctccaaagagtggag

SEQ ID NO: 17340 - DNA, 489 bp, Homo sapiens
  misc_feature (1)...(489): n = A,T,C or G
gggaggggcccgggcaaggtgaacctgagagccctcgaaccctgagaacntccgaagnnncacccacgcgtncgnccacgcgaccgagaatacacaggagcccctgccctctttgctgacccagggtgttatcgcgtgctctaagccacagtggtcggggctggacatgggcctctggagaagagaagatttgaggagaactgtcctagaggcaggaggagcagatgtgcttcagaatgggcagaattaggaaattgagaaagactttggctcaacagaatccagcaactgctccagatgttggagatgtttaagcagaagctggttgagcacttaatgaggaatgttgttgaaaatggtcattggaagaagattaaggtcccttttagcctggagattgtacaaatctgcattccacatctggagttagctacccgcattaagcctgaacagacatcttggtctgaaaggaagtgccttggattcatg

SEQ ID NO: 17341 - DNA, 494 bp, Homo sapiens
  misc_feature (1)...(494): n = A,T,C or G
tgggaggtaccccgaggggaggtgaaaactgagaccctcagaanctganggccatctgagggnccacccacgcgtccgatcaccgaagcgggagcggccaaaatgaagnttaatccctttgtgacttccgaccgaagcaagaatcgcagaaggcatttcaatgcaccttcccacattcgaaggaagattatgtcttcccctctttccaaagagctgagacagaagtacaacgtgcgatccatgcccatccgaaaggatgatgaagttcaggttgtacgtggacactataaaggtcagcaaattggcaaagtagtccaggtttacaggaagaaatatgttatctacattgaacgggtgcagcgggaaaaggctaatggcacaactgtccacgtaggcattcaccccagcaaggtggttatcactaggctaaaactggacaaagaccgcaaaaagatcctcgaacggaaagccaaatctcgccaagtaggaaagga

SEQ ID NO: 17342 - DNA, 402 bp, Homo sapiens
aacccccaactgtatttccttcctgcatattttacctttatattaaaaaacaatgtggcttttaaaaggcatcattcctgaggtttgtcttaatttctgattaagtaatcagaatattttctgctgcttttgccaggaatcacaaagatgattaaagggttggaaaaaaagatctatgatggaaaattaaaggaactgggattattgagcctggagaagagaagactgaggggcaaaccattgatggttttcaagtatatgaagggttggcacagagagggtggcgaccagctgttctccatatgcactaagaatagaacaagaggaaactggcttatactagagtataagggagcatttcttggcaggggccattgttagaatacttcataaaaaaagaag

SEQ ID NO: 17343 - DNA, 460 bp, Homo sapiens
  misc_feature (1)...(460): n = A,T,C or G
gtgggccggggttatatgaagctcgannncctgatatctcgcaanncagcgnnngnanaannnannnnncgaaagaaacngaggccgattgaaagcngacngactaagncacacagggggaaaagcaagagncggggccgnaanncacanaancgctatncagagccngnactgnnaaccacncaaggagncnggaacagaagcnaacacgcnncggcaacgagnctttgacttaaacatctgaaataacattggaaatagattataagaggagtcagtgtgtttttctatagtttcaaaatacttttaacatcttattgtcaaaaagattggataactgactttctttgctcataataactctaaattctagttcctgagtacattaacacatcttctttacctaactaccaatgtcccccatcatcgacttatcagcttgtttgagacaatgagaaag

SEQ ID NO: 17344 - DNA, 406 bp, Homo sapiens
actgccattgctgtatgctttactgtctttgtaaaaatccccctctccccttttctgggaactggaaaagcatgctaaaaatagtcttatattttcaccccataagtgcagaatcagtaattccttggcttaaagctcttatataatcaatattattggtggtaaataccaagtttggtatctcatagctatctttttttaaagaaattaagttcttgaaaatttagccaaatcccgctttatgggaatgctctttagaattcattttgttcagcccctttgttctatggttgagaaatctgaggccttacgaaggttaagagaactttccccgtgtctcacaggtaggtagaggcagagctggaactagatatctggtctgttgactctagctcagtgtcttctg

SEQ ID NO: 17345 - DNA, 475 bp, Homo sapiens
  misc_feature (1)...(475): n = A,T,C or G
cccggggaaattggncctgagaccttcganactganagcatngnagnncaccacgcgtccgcccacgcgtccgcccacgcgtccggagtttaacacatggtagctgcctgcctgctgctgctgctgcttcctgcagatcatggaggggctggcctttgttttctggcatctcgtaccacgaacactcatgaagaccctgcagtcattggagcacccgggtcagcaaagcacacaagctcactcaagaccagatggagaacttatttcctgcagctgacagatagactcagattttgtgagactgaaatgttcactgaagacacttgagaaagaatcctctaaaaatcccggctctgcacattattcatctcctggaatttccatgtgaatcacagctctgcacctggatggagttttcttttgtgtgtgtgtgttttttttaatttggntgaacatttgctgctaatgggacttg

SEQ ID NO: 17346 - DNA, 408 bp, Homo sapiens
ttttaccttatctcctgtatgtatgatagaacttataagaaatgtgcatttgttttcatagccccagcagagaaaatcctcttcatagattaaatgtgctgctgtggacaggagggaaaaaaaaaccctctacatattgaaaggcaccaaatgtaatatctgacactgttaagatgcccaaaagagcaaagttgtagtggagatgcagggtcatttccccatgccatccacagtgtttgttagtgagtccacggctgacttgcagtgataaagaaaagcatggagctgtgtctgcagacaatggtggctgcatctgtaagtggcttcagaggcagcagccctggggaaattgatgggtgtggcagtggacctgtgaagagggagaatctagccttcagcctgtccagg

SEQ ID NO: 17347 - DNA, 490 bp, Homo sapiens
  misc_feature (1)...(490): n = A,T,C or G
aggcggggggtaaaaatgatagctntcgactgacgcacagtgaataccgggtcgacccacgcgtccggtcttgctgtgttgcccaggctggactgcagttgtgcaatcttggctcactgtaacctctgcctcctggagtcaagcaattctcatgcttcagcctcccgagtagctgggactacaggtgcatgcagccatgcctgggctggttttgaatgaaacgacctgaactgtctnaaaaaaaaaaaaaaaaaaaaaaaaaaaaaaaaaaaaaaaanggggggggggcctttaaaaaaaatccctggggggcccaaaatttccgggggggggaaaaaattttttttttttttttgggggggggaaaaaaaacccccggggggttttttgagaaaaacccctttttttgggggggggaattttggcccacacccccccccaaaaattaaagctgtggggaaaaaaaaaactttttggggggagagggggt

SEQ ID NO: 17348 - DNA, 467 bp, Homo sapiens
  misc_feature (1)...(467): n = A,T,C or G
aaaaccttaggaccccctnaatgagagcgtgcgaaccccnccgattcccggtcgacnacgcgtccgtgcttataaagtgttatgaagccaagataataaagtattaaaaggttaacactgaggataatacataaatgtatccacctaatctatcactcaacccacatttttcagtttcttccaaaaagatataagctttgtcaaatgcatttagttaataatatgatgaagaccgggcacggtggctcacgcctgtaaacccagcactttgagaggccgaggcgggcggatcacaatgtcaggagttcaagaccagcctggccaacgtggtgaaaacctgtttctactaaaaatacaaaaattagtcgggcatggtggtgtgcacctgaaatcccagctactcggggggctgaggtgggagaatggcttgaaccagggaggctgaggttgcagtgacccgagatcgc

SEQ ID NO: 17349 - DNA, 409 bp, Homo sapiens
  misc_feature (1)...(409): n = A,T,C or G
attgcagaggaaagttttatgaatatggtgatgagttagtaaaagtggccactattgggcttattctctgctctatagttgngaaatgaagagtgaaaacaaatttgtttgactattttaaaattatattagaccttaagctgttttagcaagcattaaagcaaatgtatggctgccttttgaaatatttgatgtgttgcctggcaggatactgcaaagaacatggcttattttaaaatttataaacaagtcacttaaatgccagctgtctgaaaaatcttataaggccttacccttgatacggactttacacaggtagggagcgtttactgcacaatagtgtaggttatggatggaggtgtcggtactaaattgaatatcgagtaaataatcttacttgggtagagag

SEQ ID NO: 17350 - DNA, 478 bp, Homo sapiens
  misc_feature (1)...(478): n = A,T,C or G
ggcgtggtaaatgaagcctcgctgagcacgctagaaccggcncgacccacgcgtgcgggcagcatttacaatgagtgacagagagtggatgaattccttgacactgggggtattaaacatcgaaatggagtaccataggtagaggtgcttctttctaaagacaggtgattgacctgttaaatcttacgtatttttttcctaggttttacgcagttaattatgattaaagaaatcctaacttaaagatactaacttgggtcgggcgcggtggctcacgcctgtaatcccaggactttgggaggctgaggcgggcggatcccctgaggtcaggagtttgagaccggcctggccaacatgatgaggccttgtctctactaggagtgcaagaattggccggacgtggggtgcgtgcctgtagtcccactttctcgggaggctgaggcatgagaatttcttgaacctgngagacaggaggttg

SEQ ID NO: 17351 - DNA, 389 bp, Homo sapiens
ctgtcaacaatgttcccaatgtctttactttttaaattaggcttttcatattgaagcacatacctatttggtggacttacattgtttaatatttattttaatcttaatatttttacattattatattgcattatttattttttctaagttccagaataatagtgtcattattatagactatatgttttgaagtttgatattataatgggatattcattttttgttcttttcttgactcctttctcaagtgtgtgataaggtctgctgataaaatatttaaccccaagaaagtgaaaactaatataaaattagaaagacctatccaaattagacagtcaattccattaaaataagaagtgagaaaaacaatgttgggcattgaggtgtaa

SEQ ID NO: 17352 - DNA, 399 bp, Homo sapiens
tttcaacaaagaaacctaacatcctactctggaaactgatctcggagttaaggcgaattgttcaagaacacgaactacatcgcactcgtcagttgtcagttctggggcatgactttagcgttttgtttctgcgagaacataacgatcactcatttttatgtcccacgtgtgtgtgtccgcatctttctggtcaacattgttttaactagtcactcattagcgttttcaagagggctcttaagcacaagaaaggacggttagtcagttgacgaagatctggattacaagaactaattaaatgtttcattgcatttttgtaagaacagaatacttttataaaatgtttgtagtttataattgccgaaaataatttaaagacactttttttttctctgggtg

SEQ ID NO: 17353 - DNA, 408 bp, Homo sapiens
tgaccagcaccatggcggttggcaagaacaagcgccttacgaaaggcggcaaaaagggagccaagaagaaagtggttgatccattttctaagaaagattgggatgatgtgaaagcacctgctatgttcaatataagaaatattggaaagacgctcgtcaccaggacccaaggaaccaaaattgcatctgatggtctcaagggtcgcgtgtttgaagtgagtcttgctgatttgcagaatgatgaagttgcatttagaaaattcaagctgattactgaagatgttcagggtaaaaactgcctgactaacttgcatggcatggatcttacccgtgacaaaatgtgttccatggtcaaaaaatggcagacaatgattgaagctcacgttgatgtcaagactaccgatggtt

SEQ ID NO: 17354 - DNA, 398 bp, Homo sapiens
gcttaccccagctaatgggcatggcattaggggagacaaagttactctattccctactacacttgggtattacttgtttctcttcttgtggctaaaggctcaccaacaaagacttaatttcacctgaataaatgaaatttaccatgtaggtagattttacttgaaaaataatttaaaattgtacaatgtctggtttgaaaattatttattgtggtttttgggaaaaagtgttttctgcttttattatggccttcacatcctaggattcaaatttgaatgtgatagctggcacacggagggatttattcaaaaatggcctgaatcacgttgagcagccagcagaacagagcttaaaaaaaaaaaaaaagggtctgagccaaatatattattggggataa

SEQ ID NO: 17355 - DNA, 409 bp, Homo sapiens
agatggtgttatttaagggtggtgatgggtgagcgctctggcccaggctgggccagactcccgcccaagcatgaacaggacttgaccatctttccaacccctggggaagacatttgcaactgacttggggaggacacagcttcagcacagcctctcctgcgggccagcccgctgcgaaccctccaccagctaccggagggaggagggaggatgcgctgtggggttgtttttgccataagcgaactttgtgcctgtcctagaagtgaaaattgttcagtccaagaaactgatgttatttgatttatttaaaggctaaaatttgtttttttattctttgcacaattgtttcattgtttgacacttaatgcactcgtcatttgcatacgacagtagcattctgaccacactt

SEQ ID NO: 17356 - DNA, 410 bp, Homo sapiens
  misc_feature (1)...(410): n = A,T,C or G
cggacgcgtggggtaacatcaaagatcactgattgagatcgctataacacaaataacagttaagaaaaagttcagaatattgggagaattaccagaatgcgacagaatacatgaagtgagcatatgctgttgggaaaatggagttgatacacttgctaggtgtgggattgctacaaaccttcgatttgtaaaaaatgcaatatatatgaagtatagtacaatgaagtacaataaaacagtgtatgcctgtagtattatctgactggatgtttactatctacagaaacatctgaattataccatttgatctttgctttaaattaagttggtgtcttaaccacttaggtctggttgccttcctctctatacaaatcggccctctatgtctgtgggttctgcatctgtgggtn

SEQ ID NO: 17357 - DNA, 401 bp, Homo sapiens
aggggagagagggtgcgcagacggtttgccgggcctttccagggacatactggagacaggatgtggctgagagggggagagagttggagagagacggccgcggaggacacggggacgggaaagtctgatagacggggagagcctgacccggcgggacacaggcaaaaagaaacacgcgagccagacagacgcataagaaacgtgcctggtactggataggaacttcatggaatggagctaatgggccgtagggcaggtttgagtcgtgccaccctggagcagaaggtggagggtagggataagggggtggagcacctgattccaatcttgccacagggaagaagagtctgtgaagaacattccttatggtctttggctgggctctgggatggatgccatgg

SEQ ID NO: 17358 - DNA, 402 bp, Homo sapiens
ctgctggaaaaatgttgggcagcatctaccaaaattttaaatatctatggctcagcaatgtgactctcaagtatattactcactgaaatacctacatagatagaagcaaaacacatatacaagaatgtttacagaagcattattctcaataaccaaaagctgggaatagttcacacgttcttcaataatgaaatgaataataaatttaagtatatcccttatgatgaaatgtcatataacaatgaatctgagtgaactattaatacagagatcagcatggctgaactttaaaaacataatattaagtgaaataagttggacctaaaataatacatactccatgattccatttatgtaaagttaaaataggcaaaaccaatgtatggacttagagtacttgtt

SEQ ID NO: 17359 - DNA, 413 bp, Homo sapiens
cctttttctgtgatattcatttcctagtctttatttctatacttatttctacttatttcgcttgtctctgtttttctttctttcttttttcttttcttttctttcttttctttctttctttcttttctttctttctttctttctttctttctttctttctttctttctttctttctttctttctttttttttttttgggaaaaggggttcaatttggcccccaaggggggggggcgggggctgaaaaaaacccaatggaaatttgaaatccggggataaagggaaccccccaccccaacccccgggggaggggggaacaacgggcccaggccagggggcggagaaaattttttttaattttcggaaaaaagggtttaaaacaaggccaaagcaccaaagttaattaattaatg

SEQ ID NO: 17360 - DNA, 411 bp, Homo sapiens
  misc_feature (1)...(411): n = A,T,C or G
aagaaaaaattcttcgatggtatgcagcgtatctattctgtttgtaaaagatcatgtcaaaatgttctgcctctataatgataatagatggttttgtctttcaggatatttatccacctactgtcttctttgccttaaagggacacttggccatcatttttaggctcgaacttaacactgttaagaaataactgaaatatgatggtatttacattaatttttgaaattcaatggtgggatagaattaggtcaggaaatggaagtcgttccaatggtgtgagaactaggagacaagatgattcactttattatttaaaccaagcttcattcttagttcttgatgattaaatggactggaaagttaagtttttgcagggattgttttgaaataaagagatatgctaactcacn

SEQ ID NO: 17361 - DNA, 401 bp, Homo sapiens
  misc_feature (1)...(401): n = A,T,C or G
accaaacagatctaccctcctggggctgggacctggctcaggctcacattgggttaaggaggtggggctgtctggaaaaagctgggtctcaggacggtgaaaggctgctagtgactcttggttacgtgagtccactacgtaggtctatgacagctgtccattgggagcctttgggagatgggaaaaccaaactttgactccacatcaactttgtttttacacaacatatctgctcttcaggattaaccaaggtgctttgctttgacagtcatggtagatgatttctcctagaatctataaacaacacagaatagtcaccctcctgactagaatagccagggagctatgattaaagaagacaaagagcttacattagcataggcgagagaaaaagtccctgn

SEQ ID NO: 17362 - DNA, 471 bp, Homo sapiens
  misc_feature (1)...(471): n = A,T,C or G
ggatgaagcatgggaccgcnatgattccgtgtcgacccacgcgtccgctcggctaatggcgtcggcgagtcttaggggcctgttgagctggcgctgaagcttcttgccaggttggctggtgacacccggtgtggctgggccccgcggcagcggagggacctgcccgccttgtgggtttctcggccagagtcggcggagcctagcgggacggtgcgactgcggggggcgcctccgagaaaagccagaggtgttgcggggaagctgctgggggacgctcgagcaggctccgggttcgcagcccagggcccaagaagcgggctgctgaaggaccagagacaccgggagggagctgcctgtggccctaaggagctgaccgtgccagagcttgtttgtacctctcggaaattggctgggaccttggaggatcatgtccggcaccagcagccccgaggcggtgaagaagcttgctga

SEQ ID NO: 17363 - DNA, 508 bp, Homo sapiens
  misc_feature (1)...(508): n = A,T,C or G
cgtggtgggcccggggggnnnnattttnnaaattgaaacccatcngnatnnncaactgantattaatcgcanacnncnccnnaannnnnggnnngacccacgcgnncgctcagaacngcagggccgncagcctngccggagccagacgnccgctgngccggcctcacagcaaggccggcgccgaggccccgggctaagaggccggcgncaccatacagcgggnacaaggggcagcngcngaccagngngnaccagcccactgagatggccctgatgcacaaagttccgtccgaaggagcttacgacatcatcctcccacgggccaccgccaacagccaggtgatgggcagtgccaactcgaccctgcgggctgaagacatgtactcggcccagagccaccaggcggccacaccgccgaaagacggcaagaactctcaggtctttagaaacccctacgtgtgggactgagtcagcggtggcgaggagaggcggtcggacttggggaggg

SEQ ID NO: 17364 - DNA, 412 bp, Homo sapiens
cgactgttgactccatctcacttcctccatgtctaccccgtcttcttgacaggcttaaggggctcaagccgactgttatccttctctcccgaggaatttccgacgctgaaagcagctggagggcaagacaaggctggcaaagaaaagggcgtcttacatccgtcgtatgggccaggaccaagcctccgccctcagaatgtgacaagctggagggagggcggtgggcgacacataatttctgccacgtctctgagcacctacccaactgagctgggcaggaggaactcgagtacgggagatggagccccctcctcggcatgtaccagcgattctaaggacccctctctccgaccggctcagcctgttcgaataggggcttcacagttcatgggagatgtataccacccaccta

SEQ ID NO: 17365 - DNA, 402 bp, Homo sapiens
  misc_feature (1)...(402): n = A,T,C or G
cccacgcgtccgcccacgcgtccgcccacgcgtccgctcacgcgtccgcttccctgtaacacctgttttataaatcctatagtcattgacttttataactttaagggatctaagatattatctagccccgtgcttcttcatctttaacatgcataaaaatgacctagggatcttatgaaaatgcagattcttattcagtaggtctagggtaaggcttgagattctgcatttttaaaaaacttcccagagatgccaaagcagctgatctgtggactaaattaaatagcaaagatccatcctaggaaatgtaaatgagttatacctgaagtaccaactcagaatatctcttggttgctgccttgagaactacactgaggattctgtagttgagtctgagaccan

SEQ ID NO: 17366 - DNA, 411 bp, Homo sapiens
tggttattcatccgattcagaattattttggttaaatcaaaaataaaagtacaaaactacaggaacgcgcgtcttaactcatttgatcgctttgccttgcttgggaaatgcagtttcgtgtcacctgttgcagaagatatgtagttgatcatctagacataattgccgaagatgaacttctggaacaacttctaagtcacacggcatcagtatcagatttattacacaacgactttttcttttcactctatttctgaggaaaaagccctcccgaaatccgtaatgaatttctccatggtaacccctcttctgttttctcacagaaagtttctctaggctggtgccgagatgcatttggtgaaacacccccggccccccgcaaaaggctgctttgtacatagtcacaattta

SEQ ID NO: 17367 - DNA, 473 bp, Homo sapiens
  misc_feature (1)...(473): n = A,T,C or G
cccccccctttganatcactgcgctgcccnaccgcgacggaagtnccgggccgacccacgcgtccgggccgggtccagagccctcagttccttctttaaccctggagcggaatcagaagtgcgcgtggccacagcggcgcctcctgccctttagccgccgctggcccaacggtttccccagcagtagcctctgcgaccaggtgcggcttcaggtcattttttccaggacactttctgtcttcatgacaggaacatcgagaagccaaggctagtggctgggttactgatggattactgatggattcttctcaggcaagtggaaagcagacctaacttcaaaatgttatgcttgtagccatcatcggtagccttaccttgttatcgtgtattcaagcatcttaaagaaatgatggtcctgctcaggaaataactccccaggagtggactgtgttggatcaagcccacagagatct

SEQ ID NO: 17368 - DNA, 429 bp, Homo sapiens
  misc_feature (1)...(429): n = A,T,C or G
aaacatttgtacaacatttgatgtttttacttatgaaatattctcctcccccaagaaaatttaaactttttctctctatttaaaagctaagaaatgttttaaaggaaaaatgaaattatcttcctttagcttatttttaaggtaaaacagctttttactctgttattgtggtaatggacagaatattacatacaaaaatattctgggagagctttttcctagttggttttaaatcattgtgccacctgaaaggtttttagattttataggagctaatttgtccaccagcattaatgtaacacagtgtagttatgaaaatatattgaaggacaggaagtggacacgaagtgatttttgtaacctgagcagttaatgaatgtgccaacattttctaggaagggacagcaagaatattctgctctgtagttn

SEQ ID NO: 17369 - DNA, 411 bp, Homo sapiens
ttcacaaaggtgaagccgcttctacaagtgtattcttcaggaggaagaacttcaggccaaagatgaagagctgttgaaggtgaaggagaagcaaacaaaggtggaaggagagctggaggagatggagcggaagcaccagcagcttttagaagagaagaatatccttgcagaacaactacaagcagagactgagctctttgctgaagcagaagagatgagggcaagacttgctgctaaaaagcaggaattagaagagattctacatgacttggagtctagggttgaagaagaagaagaaagaaaccacatcctccaaaatgaaaaaaaaaaaaaagggggggccgttttaaaggatccttgggggggccaaagtttacgggggcttggaaattataatttctttcctttaag

SEQ ID NO: 17370 - DNA, 417 bp, Homo sapiens
tgaaatttacctttgagatataacaataagtgattatttgttcactttcagatgtaagggcaaacaattgtgaaaagttattaactgatcacagatttgcctggacttcccttcccagggagggaacagaagttaggaggcaactttgggatggtgctagagcatggaaagcacagagaattggacaaacagggctttttctcttttctctgatggtttacctttaaaagatccaacatccttaccgttggtatttttagtaaggctatagtaaatagctttacaccaggatggattctgaaatataaattctaaattatatttgttataactatattttatgttgaattgtatcaggagccatcagagaatgacctttttgtgtttggaacacttggtttcatgaaaagatgctcg

SEQ ID NO: 17371 - DNA, 431 bp, Homo sapiens
aattagttttattctcattttttggaagaatatgttcctggtttctctaactaaaaggaaaaaattcaaaggaaagttgtaaatattaggaagtaactgaaaaataagaagcaagataaagtggggaggctatgagatcatataatgagctaataaacttttcaacaggggacacctgttctcccttctaactgaagacactaaagagaagctaagatcctatctttcaatcatttagtaattcataaaatcccattatttcataactcaaagtttacctttgaggttgtatgtttacctcatttgaactcgaaatagaagaggtttaagtatttgaataagttgggaaaaaaaggaaaaatagtcttccctgcccttgtcactgatggtgacactactttgtattactgtattttttggcagaacactcg

SEQ ID NO: 17372 - DNA, 416 bp, Homo sapiens
  misc_feature (1)...(416): n = A,T,C or G
atgccagcctcttactgattttttcatagggaggattcgtgacatatcttattagaaggtagaactctattttttcttccttctgttactggccccaacatgggtacatttggctctgttctcccgtgctgttattttatagaagcacacttccgtgtggggaggtctgtggtgtctgatgttctctgtgtctcagtggacaaatctgcggaattctcacattaattattaggaagcttacttgccggtggataaaaaccctgccatcttcgatcagctttattgggagatatgagacatcaatcaacatatgtaagatgtacatttggtccgtccagaaaggtgggacaactcaagcagggaggggactttcaggtcacaggatgttgatataaggtctcactgccttcctcacn

SEQ ID NO: 17373 - DNA, 402 bp, Homo sapiens
ttttgaggactgccgggactagagacagtacacactttccttaagggaaaggtgaagaatgcataatgttgaagtatatttaaagaaggtgggcacattcatgtaggtgtggaatcaaagcttaatctggaagcaaaaaaaaaaaacttagcaggggaaaaaccccaaattcagggttaaaaattttgacagggactgggaaagtttcattgacttgtgaggcaggaaaataaaaaaagctgaaagaggcaccagtgtgtattaaaaacaaccccaggggtgaaaaaaacagttttcatgaaaagaggaccatggaaagtaaggggaaggtttacacaggagggggtcaggattaaagtaggaggcaaaaaaaagggcttggtacccactgatttgagggag

SEQ ID NO: 17374 - DNA, 419 bp, Homo sapiens
aaatgagcaggggctggccgggccggagccgctacagtgggggcctgaggcactgcagagagtgggcctgagcctcgaggatgacggtgctgcaggaacccgtccaggctgctatatggcaagcactaaaccactatgcttaccgagatgcggttttcctcgcagaacgcctttatgcagaagtacactcagaagaagccttgcttttactggcaacctgttattaccgctcaggagaggcatataaagcatatagactcttgaaaggacacagtctgactacaccgcaatgcaaatacctgcttgcaaaatgttgtgttgatctcagcaagcttgcagaaggggaacaaatcttatctggtggagtgtttaataagcagaatagccatgatgatattgttactgagtttggtgattcg

SEQ ID NO: 17375 - DNA, 469 bp, Homo sapiens
  misc_feature (1)...(469): n = A,T,C or G
ntgaaaaagacaccatcgatnnanccagntaccctacgaaccccnccgaatnccggtcgacccacgcgtccgcggacgcgtggtgacaattgtgtataactggattgcagactgttcttactgtaactacttcctgattaggaatatgaccatttgactgttcaatgattatttgtatttacagtttccagagtttgtcattataataggaacaatctttgctgtatacttttaaaaaatactctgctatttctcttgctggaactgttgaaagaaaatatatagaatgatctattgctcatcagctttattttttaaacatacgacttattttgttgaaattgtcaaagactgtatttagatctcataatgctttgttaaatgtttacaagtaaatagtttgaattcagtaaatattattgcgtgttgtattgatcaatgcatgttacccattcaaccattttataga

SEQ ID NO: 17376 - DNA, 485 bp, Homo sapiens
ggcgggtttttcgaacgcctcgttgagcccgtattaccggccgacccacgcgtgcgcgaattgtaaagcagctattaaagtaggtgaaataaagtatatatttgccggttatccatatcttttagaaggcctgacagaacaaccagtttatttgcacataggtagcttctgtttgaaggaaggtaaagttataaggaaactcaaatactataagatgtgtcaaggtatttctccagaattaattgcaaagctagtgctgaaggattttaatcagcttctaaaattttcttctcaataaggcatatgttttgattacttagggaagattcctcatttttatttgccctttatgcatttaatccacatgataggacattaaaaattaatataaagaaaaatcgtgctcatactgtacatctggttctgtgcttggaactacttgttaatagtttttatcgaagcctgcagcaataagggacataaat

SEQ ID NO: 17377 - DNA, 492 bp, Homo sapiens
  misc_feature (1)...(492): n = A,T,C or G
ggcggggttttaaatgagagccctcgtagagcccgttataaccggcncgacccacgcgtccgcccacgcgtncgactgttcccataaactgggtgacagagtcagaaaactccccagctaaacacccgtaagacttcatacaacacaatactctatactgtgatgatcacagctgccaaggctacctaaaagaagacaggtatctcatatttggctgccagctttttatctttctctcgaccacttaaaacttcagacttcctgtcctgctggtatcatggagaaaggccaatacctcactcgctcagctataagaagagcctcaaccattgaaatgcctcaacaagcacgtcaaaagctacagaatctatttatcaacttctgtctcaacttaaaatgtcccttgctgatctgtatcatcgtgaagcttctttgaagttctggtacaacctctagaactgcagcttgccacatcagcttaaaaactgtcat

SEQ ID NO: 17378 - DNA, 424 bp, Homo sapiens
cggacgcgtgggcggacgcgtggggtgaaacattgtgtacacgacacataaatacatagacatattaggcatggcaatagaagtacatctcataggtttataaaaatttttttttcctgtcttagactttcagattcttgataacctgtttcacaaccctaggcaattgtcagctaaatagccttaaatttgcatattaagggaaacaactcaggtgaaaatcaaatagcaaaatttgcataaggtacagagagaaaaagtctggtggtgctagagggagactaaagatggatgccaaatcaaacaaaattatagaaatctatcataggattgcataaggagaccaattttatgtagtagggactacctatcatttaactggatctctgagctctgggaagagcccacactgaatcctaggtct

SEQ ID NO: 17379 - DNA, 401 bp, Homo sapiens
aagcaagctgtcatgttataagcagccctttgaggggtccatgtgatgtcaaggaatgaagtctctagccaacatttaatgaggaactgaggcccaccaacaaccttgagtgagcttggaagtagctccttcagcatcagttgggtgtcgagatgactactgacagcttgactgcaacttcatgagagtcttctggaccagaaccactcagttaagtggctcccagattcctgatcctcagaaactctgagaaataatgaatgttggttgttttaaaatggtaaattttgaggtattatgttatgtggcaatagatagctaatatataaattatttgaatcaaacaatacgttaaattaaagctcagaagaataaacatctgtaattccttaatttgtttt

SEQ ID NO: 17380 - DNA, 462 bp, Homo sapiens
  misc_feature (1)...(462): n = A,T,C or G
atgnacactaacgngcangagantcatncgaannccggnncgaccacgcgtccgcggacgcgtgggctgaaattcccatttaagttctcaaatcagtgatctgtcaaaataggccttgtaactgagataccttacaaagcagttctaactaatgcaatgtgttttttaaaaatttttaatgaaccttacattgtgaacataattgcaacatgttttaagacaaacagtatttaatccttgaagacctgtcttgtatgtctctcaattttgtcagaatttttattattgtttttcacatatgtgaaataagcagttttttcagggtacatagggtatctttgttttacagatttttaaagatgaggttttgaaaagccctcagaggtttttgttaaaagactatcttgcttaataaatgacaacttgttaacagattcacacattacaagtaggacagtatag

SEQ ID NO: 17381 - DNA, 408 bp, Homo sapiens
aatttgctcactttgatgccagaagtacttaagaagttacacggcactaattttatgagtcgtatgcctaatttcaatttctaacctatttgacagtttcttttacgtcagcctttgttgggcttccatgtaaatacaaggtggtacaaatcaatagaaaccattttacctacataggcaaagtaaatgtgtgacttagagactgccagatttatggtgcatctacctttttatccattcgagcttgcttttttatgtttgggtattggttgctcctgacactatacatttcaaaattttttataacttgaaaaacacttctgtgctaccactcagttctgatcaaatccttacattttgcaacactcatttctgaattttcagtaaagaaatacacattacaaaata

SEQ ID NO: 17382 - DNA, 407 bp, Homo sapiens
  misc_feature (1)...(407): n = A,T,C or G
cagcatcaatcttaaaaagatatacattaaaactaaggagtttttttaaagaaagcctgaataagttcctttccctggtaactttgaaaagcagtcagagttgctatatagatatatgtggctcctttaaaatgctttgtgtatgtgtggtgtttaaaaaaaaaaaatcttaccagttaactttgcagtgtctaggtttgagtgtcataaatccacgtgttcctgttgcaacaaatacccaaaaattgtgtgtgcacttcctaataccagtcttcacccatggaggaacagggctttttagagatgctttctatttcaatgttggcatactgcctgagggtattgcacttgtgggtgcattccctaatttgtatgatcaagatgaactggcccttttctactttcan

SEQ ID NO: 17383 - DNA, 416 bp, Homo sapiens
  misc_feature (1)...(416): n = A,T,C or G
cccacgcgtccggggtttattagccaggcctggtggcatatgcctgtaatcccagctactcgggaggctgaggcacaagaattgcttgaacccaggaggcagaggtggcagtgagctgagatcattgccactgcacttcagcctgggtgacacagcaagatagcaagatgccatctcanaaaaaaaaaaaagaaaggaaggaaaaaaagggggggggtggccctttaattaaagggggggaggggcccaaaaccctcggttgggcaaaggggccccccccatttgggggtggcccctgggacccaaaaaaaaaattttttagggccaaaaaaaggggttggtttttttctaaggggaccctcccgggggttgtgcctaatttcgggagctcccctcccaatattgcgaaaaaaagg

SEQ ID NO: 17384 - DNA, 413 bp, Homo sapiens
ctagcagatcgcgagcgcacacacgtgcacacatgtacacacggatacacacacacacacacacacacacactgcatatgtgagcgcgcccctcgcactgggtctcaccttgcaccttgttcaggattttatatgcgaagagactgttatatagattgttttcctttttttccaaaacactttattctttaaaaaaaaaaaaaaagagaaatgcgggggggcggggaggcacaaacccgggaccccttttttgtcggcccaccttttggtgggatttatgagcggggggccctgccccaaaggtctggggggggcccagtccatgaccgtgggggggtgtatataagggggagagggggaagcctgcgacattttttctgccctacctcataaaaacatttcgtgccccattg

SEQ ID NO: 17385 - DNA, 477 bp, Homo sapiens
  misc_feature (1)...(477): n = A,T,C or G
agcggtaaattatacttcggctgacnacatcgtaannccaccacgcgtccgccacgcgtcctagtatttaagtttacagactacaacattgtccacagaatccatatttatccccttggagggaagggaaaggtgtgctaacttacatcataaaaacaactgaattttaaaacaaggcacatgccacacttcaacttctccataaaaaagttaagttcatctcttacttcttttgcatgcctacaatatttccatataacaactgtaaaatactcttgcctgctgcaatccaaatgttatccggatcacagttcttgctgtcattttacaggcatgcaatgtatgtatagatacgtcatatcatacctgacgaagatcagagacagcatggtaacattttacccacacttgagatggaaataataacaggacagtggctaataaaaagaaacatgtatgactctgtaataccctaag

SEQ ID NO: 17386 - DNA, 415 bp, Homo sapiens
ccgaggatggccgtcatggcgccccgaaccctcgtcctgctactctcgggggccctggccctgacccagagctgggcaggctcccactccatgaggtatttctccacatccgcgtcccggcccggccgcggggagccccgcttcatcgccgtgggctacgtggacgacacgcagttcgtgcggttcgacagcgacgccgcgagccagaggatggagccgcgggcgccgtggatagagcaggaggggccggagtattgggacgaggagacagggaaagtgaaggcccactcacagactgaccgagagaacctgcggatcgcgctccgctactacaaccagagcgaggccggttctcacaccctccagatgatgtttggctgcgacgtggggtcggacgggcgcttcctccgcggga

SEQ ID NO: 17387 - DNA, 415 bp, Homo sapiens
cgcggggaccatggagccggtgccgctgcaggacttcgcctccctcccgcgcgtgctgcgggtctgctcgggggtctacttcgaggtcttctcaagtcttaggattgcagcaacacgctcggctgcccaaacccaaggcgaagaccttgccagagttcatcaaggatggctccagtacgtacagcaagattcctgcccacaggaagggccacaggcccgctaagccccaaaggcaggatctagatgatgatgaacatgattatgaagaaatacttgagcaatttcagaaaaccatctaagtgctggaggaaccacgcttcctaactgctgcttctcagggaatccgacaccagccaaccattttaagcctctaaaagacctcgggcaagtctcacagaaactgagctgcagacgg

SEQ ID NO: 17388 - DNA, 420 bp, Homo sapiens
cggacgcgtgggttttatagccagagaatctctgtctgctgtatcttaaagaacagttctgatttccctaatggaggaagaattagcttggatactctcacagtcactatcccttacagacaactgctgagttctagaaggatttctattctaccaacacagtgtcttagggagacggactagaggacaggatgattagtttagaaattatgcttctggctaggttttaagtttcttgatagcaggtattacgccgtgctgcaaggttatggttctccagatggacaccattacattttttttttttcatatttttctggggccctctggagttatgcaatgtatataacctgtgtagctgcgttttacatttcattatcccttatgatatctagcatagggagaaggacctagtaggtg

SEQ ID NO: 17389 - DNA, 416 bp, Homo sapiens
  misc_feature (1)...(416): n = A,T,C or G
tgggtgtattgcttctattaatgcaaatgatctttgtgcctaatcctcctccacataccatttattgtcttatttctaagggtatcaaagaatatagttacagaatatgaattctaagtcctgaggaagaaagtatatggggtttgttaagtttcacattcgtgaaagaggaaattagtagagtattcagactttgatatttggttgttaatgggatgcatatcaaatttttaaaagaaggcttggcctaaagagtttattggtacaggtgcagatgattctaaggcattaaaggattatagagttatgtcatttagactgggtctaataactgagaccatctaacatttttcttttggagtctcatttttatttgngcaatattttcaggcatataggctactgttcattgtatt

SEQ ID NO: 17390 - DNA, 484 bp, Homo sapiens
  misc_feature (1)...(484): n = A,T,C or G
ggaanatgacccggggggcgatcnacctgagtgcanactgagangtatccgaaancccgnnnganccacgcgtccggctagcgggcgagacactccttgagtggctcggctggattaatggattgcagcactgaccgttcggagctgtagatggagatgcagcggccttggtcccagccgcagtaggggtctcgggacatgaggcaaccgtggcagcccccgccatagacctcacacaggtccaggggcacctggctcacctcccactgggagctcacatacagcttcctccgctcagcatccagcgacatggtctggatggcagccgcgcggcggaagggctggatctccatgatgttgaaggcgaagctgtgctcctgctcccccggttccaccaccttgtggatagtgcccctgtctgtagttaggtaaagcacatgaaaggtctccccgtggctggcttgcatgcggnggacggccactt

SEQ ID NO: 17391 - DNA, 483 bp, Homo sapiens
  misc_feature (1)...(483): n = A,T,C or G
agaaggggcccggggggnatttacctgagtgcttgctgagagcgctcgaaancccggnncganccacgcgtccgagcacatgaaaaatatttcagtcattatcagtctcattaactgaaatgccaaatgctaaatgcagtgttctttcacactgttttaattttcttgggaaattgagtccagtggatgttaatggagtgggttgcccatccctgaaatgtcttattttcaagtgcctggcctgggaaagaaggggaagaaacaattgcattatatccaaagatacactataaaaatagagtttttaccaaaaaaagatgtttgttctcatctcagtaggcctcatttgggcaagtgacccacaggtcttttggcgagtttgctatttgcctgttgaaatacttgtttcaacttagagaacagttatgatgtgaccatagcatggcacaactaaaaatctaagcctgaaacctgaaaaaagag

SEQ ID NO: 17392 - DNA, 487 bp, Homo sapiens
  misc_feature (1)...(487): n = A,T,C or G
gaaaagaggccggggcnnnatttcaactgagcgcccgctgagagtcatcgaaannncgnnnaaccacgcgtcggagcacatgtgcgatatgctgcctgttagctgagccatacaactgactggacaggtggtcatggcggattacgtggagagatgcttacaatcacggaggggaatgatggcggggcccaaatgaggagccacatcgaactacattagagaatataaggtgaagtaagggctggcgttgggtagggggagacgccagcagtgatgctgatgcccaggctgtaggtgtataggtgccatccacctggtaaagagagagctgtancgcaggaatgaggttgcacatgtagaagaagggaaggatacaggggagagaagtgtcttctagtcctaaaaaacagcctgtgggctggcatggtggaacaaacctgtaagtcccagcacttcgggaggtcaaggtaagaggatcatctgcttg

SEQ ID NO: 17393 - DNA, 422 bp, Homo sapiens
  misc_feature (1)...(422): n = A,T,C or G
cagacgcgtgggctgtgacactatcaatccttgctgatgactgagaaaaaacttgctgcatgatagatgtggacaatggaatggactctgatatggaagaggaagcagatgatggttctaagatgggatctgatttagtcagtcagcaagacatctgtatagattctgcttcatccgtgagagagaataagcaacctgaaggtttggaattaaaacaaggaaaaggggaagatagtgatgtactcagtataaatgcagatgcttatgacagcgacatagaaggcccatgcaacgaagaagcagctgctcccgaggcaccagaaaatacagtccaaagtgaagctggtcagatagatgacctggagaaagacattgagaaaagtgtgaatgagattctaggactggcagagtctagcccaaan

SEQ ID NO: 17394 - DNA, 393 bp, Homo sapiens
ctaaagtgtataaaatcattttcagtatagcttaggtaaggtaatcagctagtgagagatctgtgctgtgtcaacaaaccttgtctaaatttctttgcatttctcttttcttttgcttcagaggagtcccaggaaggtgagaaacctacagtctcaaattcttgtagtcttaaactctttagcttcgaggcactctgattcattctcctaacaaatcacttcatgttttaggtgttttccaaactgcttgaagttactagacgtcgaatggttcaccgtgctctttcatcagcacagcgacagagactgtcatccaacaataacaagaagaaaaattagacagtatttttaacctttttctctatctgaagtgttcacacttacacatgtagg

SEQ ID NO: 17395 - DNA, 395 bp, Homo sapiens
  misc_feature (1)...(395): n = A,T,C or G
cggacgcgtgggcggacgcgtgggcgtgaagccagcaattgtttcgcaattcggcattttgaaaacaaatttgccgtggaaactttaatttgttcttgaacagtcaagaaaaacattattgaggaaaattaatatcacagcataaccccaccctttacattttgtgcagtgattattttttaaagtcttctttcatgtaagtagcaaacagggctttactatcttttcatctcattaattcaattaaaaccattaccttanaaaaaaaaaaaaaaaaaaaaaaaaaaaaaaaaaaaaaaaaaaaaaaaaaanngggggggcccctttttaaaaaatccttgggggggcccaaatttcccggggggggaaaaattttttttttttcttttaggggg

SEQ ID NO: 17396 - DNA, 391 bp, Homo sapiens
aaatcttactactcttcatttgtgcattctatctttttaaaaaataaatatcagtaaatatatggcaatgatattagtcttagctaagaaccattttttttgcattacgccctccatggtacctttgtgttccttttcactaatgtctgctagtatcttaattatctccttcctttttttttttaaaaaaaagagttggttatcttcccctaactttttaagggggtattcagcttattttcaatcctttatttttaaatacaaggtatatttaaggctaatatatagccttacatttaaggctttatatttccctcatatataaatattaaggctatatattttctacttttgcaatatcctaccagttatgatacgtacaagatttatt

SEQ ID NO: 17397 - DNA, 472 bp, Homo sapiens
  misc_feature (1)...(472): n = A,T,C or G
gagcgggngnngtaaaatgacactgtcgtaaccctgatgactnctcgaancgacccacgcgtccgcccacgcgtccgctcagtgtcaaatacttgcctcagagttatgttacccacggagtcggggagctagggcatttatacacaaacttttgtcagtcattgattgagatctgctagaccgtcattaatttctctaaatttctggctttcagatgcaagaggtgaggcaaagacagcccccaggcaggtacaatttggcctcactcactacaatagtggcctgaaaaaatgtaggtagagagtaatgccagtctctgccatacttctgccatgcatgctaacatagatgaatctcacaaatattatgttgaaaaaaaaaaccaaaaagaaaagagtacataaggtatgtttccatttatataaaattcaaaactagggctgggtgtggtggctcacacttgtaatcccan

SEQ ID NO: 17398 - DNA, 408 bp, Homo sapiens
aggaagtaacaagtggcaaaataacggtatcaacgagtcacagccttattaacattggagtttgttattgtatccctgatttcggtgttatcaccttttttttaggaattcattatttgcaagccacaacttaaatacaactttctgaataagttagcgttgcggattaatagactggttagagctgatacattttttagatctcgctatgttgcccaggcttgtctcccactcctgggctcaaacgatcctcccacctcagcctctcaattctaggcatgagccaccacacccggccagagctgataattaaaaaaataaacctttttctaatattttactaaaacaggcagaattatttcaaaaccatttctagaataaatgtttctttttcagtcagaaaaagtg

SEQ ID NO: 17399 - DNA, 411 bp, Homo sapiens
  misc_feature (1)...(411): n = A,T,C or G
cggacgcgtgggcggacgcgtgggctgcctgcctcaacgcggcgggggtggtaggattacaagcatgagccaactcacacagccctgatctttgttatttcttttgttctgctaactttgggtttgatttcttcttgattttctagttccaggtgcaatgttaggttgttaatttgtaatctttctgcttttttcatataggcatttaatgctataaacttccctgtgtatgctgnggtttcaagaatctttattcttaggctaattaaaaaaatgtagagcacttgaaatttaaaataactttttttctgtttttttttttttttttttttggaaggaatcttttttgccaagggtggttcaaatttctgggttgaaagaattttttttccctaaccccccaaggggctt

SEQ ID NO: 17400 - DNA, 487 bp, Homo sapiens
  misc_feature (1)...(487): n = A,T,C or G
tgaagagcccgggaaagttgaccactgggccntcaganactgaccgccattgggagggnccacccacgcgtccggngcaagattaccaaatgtgtagttcccagaagcctgcctcccagagggaagacagcttaacctgtgtgggagccaccaccttccagaaggtgctggacgaatgccagaaccagcgggcctgccacctcctggtcaatagccgtgtttttggacctgacctttgtccaggaagcagtaaatacctcctggtctcctttaaatgccaacctaatgaattaaaaaacaaaaccgtgtgtgaagaccaggagctgaaactgcactgccatgaatccaagttcctcaacatctactctgcgacctacggcaggaggacccaggaaagggacatctgctcctccaaggcagagcggctcccccctttcgattgcttgtcttactcagctttgcaagtcctatcccgaaggtgctatgg

SEQ ID NO: 17401 - DNA, 399 bp, Homo sapiens
ctttactcaaattggtgaacagtgtataggaagaagccagcaggagctctgactaagggtgacataatagtgcacctcccattactttgatatctgatcaaatgtatagacttggctttgttttttgtgctattaggaaattctgatgagcattactattcactgatgcagaaagacgttcttttgcataaaagactttttttaacactttggacttctctgaaatatttagaagtgctaatttctggcccacccccaacaggaattctatagtaaggaggaggagaaggggggctccttccctctcctcgaatgacgttatgggcacatgccttttaaaagttctttaagcaacacagagctgagtcctctttgtcatacctttggatttagtgtttc

SEQ ID NO: 17402 - DNA, 494 bp, Homo sapiens
  misc_feature (1)...(494): n = A,T,C or G
agtaggatgcccgaggaaaaatttaaanccttggaagcgntcgganctgcaccgccattgcagggtcgacccacgcgtccgattccatccagttcccacatcaacgtagccacacatttggcactgttatcttggtatccctcatcccagaagaggcatctccatatcccagaaaagaagatcctatcatgaataaaagctgtatggcccagagaggagctcatgtgtctaaagtgaagggtatattttcttctgttgtgttgatgcttccttcttaatttataggatttttttaatgtaaaaaattgcactgaactctataaacgtaaatgctgctttttgtagctcatataaaaaaggttccatatttgtagtatactgcaataatattttttacatccagctctttaagtgatcctcgttctggtggctttgtgtaaatatgtttgccctagttgaattaagaaactctaaaggttataaaatgaaaacaa

SEQ ID NO: 17403 - DNA, 493 bp, Homo sapiens
  misc_feature (1)...(493): n = A,T,C or G
aggggagtaaccccccgaaaagggtgaacctgatgacgctcgatctgatnacntcgnagangccccacgcgnncggccagcgnccgggggagaanncanaaaaaaanccattctctgnggcanccaataatcagtgaagatgccagggaaacttcaagcggggctacttcaacacttcatgtattgtgtgggtctgtcgtagggttgccagatgcaatacaagattcctggttaaatttgaatttcagtaaacaatgaatacgctttcattgtaccatgaaatatccagaacatacttatatgtaaagtattatttatttgaatctacaaaaaacaacaaataatttttaaatataaggatcttcctagatattgcacgggagaatatacaaatagcaaaattgaggccaagggccaagagaatatccgaactttaatttcaggaattgaatgggtttgctagaatgtgatatttgaagcatcacataaaaan

SEQ ID NO: 17404 - DNA, 399 bp, Homo sapiens
cccacgcgtccggtgagtacactctaattaacttgcttctgttgcactttagttttctacctgcatatggactgcatttttttttttaacacagtcagtatgtaaaatgggatgtattcttctgctgctgcttattaaataaagaaagcctgagtgttcttaaatggggttattctgagatgagggtcttagcctacagttctttttgaaatgaaaggggctttgttttttaattatattcatcttttcagggtaaatttgtttttctgagtttctcgtaatgctcatttttacatgctgctactagcttttttttttaaaaaaagaaaaaggggctgctttctaaaatattaattgccttatatttgaaagtgccattgcaatcgtaagtaaactatg

SEQ ID NO: 17405 - DNA, 488 bp, Homo sapiens
  misc_feature (1)...(488): n = A,T,C or G
gggggttcccaaagnaaagttaagccctttgatcttcgaanactganacccntcgnananncacccaagcgtncggtgggntcaagcaattctccttcctcagcctcccaagtatctgggattacaggtatgcaccaccatgcccaggtaatttttgtatggttagtagagatggaattttgccatgttggccaggctggtcttgaactcctgacctcaggggtgatccacccgcctcgggctcccaaagtgctgtgattacaggcatgagccaccatgcctggcctttggggggattttaattacagtattaattatagttctaggatttcccacattttatagtagtagtttgcaggatattatgtgccctaattagcagatatagacattatcaaattataatgatagtataattatccctttttaatattggggaaagaaaaatgaaaattcattagttaattactgctttgtgttgagtgaat

SEQ ID NO: 17406 - DNA, 471 bp, Homo sapiens
  misc_feature (1)...(471): n = A,T,C or G
tggcggggangtaccctgaagcattcgtaaccactgaggatcctccgaaacgacccacgcgtncggtctctgcatatttttagaaagtgcttggggacattatatatatgccattacataagcattatgaggccgatgtattctactgtggttaatactgcattaacctgcacaaagtttatgcattttttcatgcatttttttccttctttctaagtaaggtattcctgacaactaacattccctaaatcatttcccctccctccctccctcccttccttcctttcttccttccttctgtcctccctcccttgctacctcttgccctccttccttcaccctgtcctccttttcccttttattttttccccttctctttcattttcttttcttttagagaaaccaccttatctatttttagacatttcgaattcctaaaatgtgaaccgttgggtgatctgtcctttggcc

SEQ ID NO: 17407 - DNA, 402 bp, Homo sapiens
tgaagatccacatcttccggataaaatccaggtcttttctccaatatatgtcttcctgaagatccacgtcggccagaaaatccatgtcttccagaaaatccatgtcttccagtaacctcccagtcttccagaaaatccacgtcttcccaacaatccaagtcttccggataatttgggtcttcctgaaaatctacgtcttccaaaaaagccatgtcttccagaaaatccacatcttccaatggcctccaggtcttccagactatccatgtcttccagaaaatccttgtcttcccttaaatctatagcttccaaaaaatccgggtcttccaggaaatccgtgtcttccagcaagtccacgtcttccaacaaagccatgtcttccagactatccatgtcttccag

SEQ ID NO: 17408 - DNA, 483 bp, Homo sapiens
  misc_feature (1)...(483): n = A,T,C or G
aggaggagcccggggaagttaagtcattgaccttcgatactaaaccctctgaanncaccnaaacgtncgagagagcaacgcggcacataggcaaaggggcgcacgcttgaatgtaaaggtgattttgatgcttgggtcaggtggcttantgaccaggcggcctttgtacagagttactacttatacagagaagctgggcgtgcacctggagatgctgttcataagatctacccaagtgcatatataaagggctttgacttgcgtcagtgtcatcgacagatgcagcagcaggcggctactgcacaagctgcagcagctgcccaggcagcagccgtggcaggaaacatccctggcccaggatcagtaggtggaatagctccagctatcagcctgtcagctgctgctggaattggggttgatgaccttcgtcgcttatgcatactcaggatgagttntgggaaagggctgggaccggattaccca

SEQ ID NO: 17409 - DNA, 476 bp, Homo sapiens
  misc_feature (1)...(476): n = A,T,C or G
ggaaggaacccgggggtttcggctgaatgcagactgncagcatccgaaancncgnncgacccacgcgtncggataattttctgttttttagaaatcttttgtctctttggttatagaaaaagagaacctctttttaattttattttttaaatgactagtcaggttgaatgtttcttgttcctaggtcattaacagtttttattttggcaattgtctacagcccatttttctgctgtgttcattttctaatcgaattatgggatttatcttgtaaaaagcctattaagcctttttcatactttacacaagagatcacatctacttactttaccttaaaataacatttacttattttcttataaaagtaatatattatgtttgaaaagaaaaataatatgcaataatatgcaataatatgtataatcataatagacaataataaaaatgaaaaaacaccaaccagaggtaattaacan

SEQ ID NO: 17410 - DNA, 395 bp, Homo sapiens
actccaggtaccgcgcttggcggcagctggccccagacttctgtcttttcagctgcagtgaaggctcggggctgcagaattgcaaccttgccaatggacctgatcggttttggttatgcagccctcgtgacatttggaagcatttttggatataagcggagaggtggtgttccgtctttgattgctggtctttttgttggatgtttggccggctatggagcttaccgtgtctccaatgacaaacgagatgtaaaagtgtcactgtttacagctttcttcctggctaccataatgggtgtgagatttaagaggtccaagaaaataatgcctgctggtttggttgcaggtttaagcctcatgatgatcctgagacttgtcttgttgctgctctgagc

SEQ ID NO: 17411 - DNA, 407 bp, Homo sapiens
cacaggacgagagcagcatattgtcatgcaaccttctggtggatctagcccagaagatcttgagaatatggttagcaatgctgagaaatatgctgtacatgaccggcgagagattgaacgagctgaagcacttaatatggctgaaggaatcattcacgacacagaaaccaatatggaagaattcaaggaccaattacctgctgatgagtgcaacaagctgaaagaagacatttccaaaatgagggagctcctgtctagaaaagactgcgaaacatgagaaaatattaaacaggcaggatgctctcttcagcatgcatcactgaagctgttcgaaatggcatacaaaaagatggcatctgagcgagaaggctctggaagttctggcactggggaacaaaaggaagatc

SEQ ID NO: 17412 - DNA, 392 bp, Homo sapiens
cccacgcgtccgctatcggggactacaatggccacgtcggtctgggtgttaagtgctccaaggaggtggccaccgccatccgtggggccatcatcctggccaagctctccatcgtccccgtgcgcagaggctactgggggaacaagatcggcaagccccacactgtcccttgcaaggtgacaggccgctgcggctctgtgctggtacgcctcatccctgcacccaggggcactggcatcgtctccgcacctgtgcctaagaagctgctcatgatggctggtatcgatgactgctacacctcagcccggggctgcactgccaccctgggcaacttcgccaaggccacctttgatgccatttctaagacctacagctacctgacccccgacctc

SEQ ID NO: 17413 - DNA, 411 bp, Homo sapiens
  misc_feature (1)...(411): n = A,T,C or G
atttaaagttctttgatgtatttgattttctaaatctttatggttatgatttggaataaaatgtgcctaatcctgtgttacattctgttcttaaatctgaatgccttctcatttaattctgaggaaatatcacacaagtgtcttcattgaccttgaagaaatgtatatacagttgccttataaaacaacataaatttagaccataacttttatagagaaagggttttgtcaaatgttttctgaaaatctgagtaattcaaagcatgcctctgcccctttaatatttttaataacctgcattgttgctgtctgccaaatattaaattgaaatcttcatttcaattttattatctggaaagggcactggattgctctgcaaccaaagaaagcaatatggaatgaaaaaactcn

SEQ ID NO: 17414 - DNA, 404 bp, Homo sapiens
cggacgcgtgggtcccctttccttctgggctgtgaattcctgtacatatttctctactttttgtatcaggcttcaattccattatgttttaatgttgtctctgaagatgacttgtgatttttttttcttttttttaaaccatgaagagccgtttgacagagcatgctctgcgttgttggtttcaccagcttctgccctcacatgcacagggatttaacaacaaaaatataactacaacttcccttgtagtctcttatataagtagagtccttggtactctgccctcctgtcagtagtggcaggatctattggcatattcgggagcttcttagagggatgaggttctttgaacacagtgaaaatttaaattagtaacttttttgcaagcagtttattgactgtta

SEQ ID NO: 17415 - DNA, 411 bp, Homo sapiens
  misc_feature (1)...(411): n = A,T,C or G
aggagctggaagtggactgtggcctggacaagtccaactgtggcaaacagcaaaaccacacattggactataatctggccccagggcccctggggcgggggaccatgccaggaaagtttccccacagtgacaagagcttaggagagaaggcgccactgcggttacacagtgaaaagccagagtgtcggatatcagcgatatgctcccccagggactccatgtaccagtctgtgtgtttgatatcagaggagaggaatgaatgtgtcattgccacggaggtataaggcaggagcctacctggacatccctgctcagccccgcggctggaccttccttctgcattgtttacattgcatcctggatgggacgtttttcatatgcaacgtgctgctctcaggaggaggagggaan

SEQ ID NO: 17416 - DNA, 460 bp, Homo sapiens
  misc_feature (1)...(460): n = A,T,C or G
gggggtttaaactgaaccntgaatgatgccatagnannngcnngancangcgtcggatggctgtgcaaccatgtgaccctgcacacgtggctctccctgttactttctgaagcattttcatggacctctcctcctctgctacccacctccctcgtggggccttggcagctcaaggactcttcagtgagcaaacctttcttgagtgcttactttgtagtagggcgccccttctctgttatgctataccttgtcaccgctggtacctggcacgtggtaaacactcgttaaatactgggcaagcgaacatgggagacagtgagctcattgcactaagtgagggctgcattctgtggggcccacttcatcagcatcaggtgaaggaacaggcaatggtcagtgcagacacacgacccagaggaggcagggcggngctggaaggcagagtggcacccagcatggn

SEQ ID NO: 17417 - DNA, 468 bp, Homo sapiens
  misc_feature (1)...(468): n = A,T,C or G
tggcggngntttaaaatgagacctgcgtaacaccgagacccttcgancnacccacgcgtccgggaagtgacatcgtctttaaaccctgcgtggcaatccctgacgcaccgccgtgatgcccagggaagacagggcgacctggaagtccaactacttccttaagatcatccaactattggatgattatccgaaatgtttcattgtgggagcagacaatgtgggctccaagcagatgcagcagatccgcatgtcccttcgcgggaaggctgtggtgctgatgggcaagaacaccatgatgcgcaaggccatccgagggcacctggaaaacaacccagctctggagaaactgctgcctcatatccgggggaatgtgggctttgtgttcaccaaggaggacctcactgagatcagggacatgttgctggccaataaggtgccagctgctgcccgtgctggtgccattgcccc

SEQ ID NO: 17418 - DNA, 391 bp, Homo sapiens
gagagcaccaatctgaaccagcaatgcctgcagcccagcccctcctctgggcactcagctattactgcggtttgcctccccacggccccaactccagggcaggagcaactggacagtgggcctggcccgtggagctgccacgcaggtgcctgagggccaggtgccacgcaggtgtctgaggaccaggtgccacgcaggtggtgggggtacagacaagatgctgggatgtcccctgccccatggtcaagggtgtcctgcctgcctgggtccagggcctgagggagccacatggatcccgagacttgtgttctcttggctgaaaacactgaggtgctcccatctgtgcgtggcccatgagctgggatggtcctccagctgcccacaaggtccg

SEQ ID NO: 17419 - DNA, 392 bp, Homo sapiens
ttgttttgccccacagagagactaatcccaatacaagaatattgacaacagaaggacaaagtagttattggacaggacggaaaggtgtctttatttcatcccctccccacttccaaagatgcaaaaggcctaattgaatcaagtctcctttccatctggcaggagacattttaataaggactttttaatttcctacatttcttggccaagtgtcataggaatgtggcctcttttgaaatttaaaaatgaagaagaaaaaaagagcaacactaagttaatataatggagcagatacttttaatgttcttaccattgaatatgccatttaagtttgttatacttgaaattatatgatttttgtccagctctctaaattgtcatctccaatagag

SEQ ID NO: 17420 - DNA, 395 bp, Homo sapiens
  misc_feature (1)...(395): n = A,T,C or G
cccacgcgtccggaaagaaatgttaaaagagaaatattgaccctcagtgtgtaaatggatacaaaatttgctgctaggtgttctgagaaggaccaaacagaaataccatgccttgaaggctcaccatggttacaggatattttttgctagagtactagtagtgggaataacaagaaaagtggctgggcacggtggctcatgcctgaaatcccagcactttgggaggccgaggcaggcagatcacctgaagtcagtcgtttgagaccagcctggccaacatgccaaaaccccgtctctactaaaaatgcaaaaattaggtggatgtggtggcacgctcctgtaatcccagctactncggaagctgaagtgggagaactgcttgaacctgggagggg

SEQ ID NO: 17421 - DNA, 411 bp, Homo sapiens
  misc_feature (1)...(411): n = A,T,C or G
atgtaattttcctcataacccacaacacacactctttcatatacaagcatagcagaagtatgcttcacaagcgttagcagtgcctggtgttcctgcttctcaccattctccccaacgctggcatggattgggtggtgggatttttgcccgtctggtgagtgtcacgtgatatctcccccgttaggctgagcccctcttcatgttttcattagccgttcctccacatttcctcttctgtggagggccggttcagctcttttgcccagtttctgttaagttgtttgaatttttgcacttttcctttattattcctattattatgnttttgagacagagtctcactctgtcacccaggctggagtgcagtggcgtgatctcagctcactgcaacctccaccttctgggtcaagg

SEQ ID NO: 17422 - DNA, 394 bp, Homo sapiens
aagctgtgtcctcagttctccgtgatgacgagtgagtctctgtgaaatgggggggtgggaaaacagctgggtgctggcctgcccaggcacccgccacgggcccacgctgctcagcttctcaatgtgagactgtccacacctgcgaggtgtgctaaaggtgcaggttaggtggactgaccccaggacctccctgacccccaaccaggccagcggaagcctgccacctcctatgtgcggaccaccatcaacaagaatgctcgcgccacgctcagcagcatcagacacatgatccgcaagaacaagtaccgccccgacctgcgcatggcagccatccgcagggccagcgccatcctgcgcagccagaagcctgtgatggtgaataggaagcggacct

SEQ ID NO: 17423 - DNA, 404 bp, Homo sapiens
  misc_feature (1)...(404): n = A,T,C or G
cccacgcgtncggttatgcagaatccaaagtaaatgtcctgctagctagttaaggattgttttaaatctgttattttgctatttgcctgttagacatgactgatgacatatctgaaagacaagtatgttgagagttgctggtgtaaaatacgtttgaaatagttgatctacaaaggccatgggaaaaattcagagagttaggaaggaaaaaccaatagctttaaaacctgtgtgccattttaagagttacttaatgtttggtaacttttatgccttcactttacaaattcaagccttagataaaagaaccgagcaattttctgctaaaaagtccttgatttagcactatttacatacaggccatactttacanagtatttgcttgatgggacctttttgagtgg

SEQ ID NO: 17424 - DNA, 485 bp, Homo sapiens
  misc_feature (1)...(485): n = A,T,C or G
cgtaagtggcccagnggagggnttttaaaccttganacccttcgaatgccctganaccgtcgtgaannacgcgnnngggagaaaaggaggccactgggggcttnctggcacctgccacaggcagcccctctccaccctgtatgtccccagtccctgccggcttaaagggaagagctgttgctgttctctgacatgtctgcctggctctctctgtctctcttttgtacacatcaaggcttactcaccctttttcctgccagcctctcagcacgctcagatctcttccaccctaaaaaaaacaaaatgcaggccgggcacggtggctcacacctgtaatcctaacacgttgggaggctgaggcaggtggatcacctgaagtcaggagttcaagaccagcctgaccaacatggagaaaccctgtctctactaaaaacacaaaattatccgggcgtggtggcgcatgcctgtaatcccagctactcggt

SEQ ID NO: 17425 - DNA, 392 bp, Homo sapiens
caattagaagaaagggtataagaggacgtgaagtttttaaagaaagagtattcaaacgaaaatgcagttgtgaagagaatgcagtctcttcaacttgattgtggggcagtaccttcaagccggtcaaattcagccacagaacagcctggttcactgcacagttcccagggacttgggatgggtcctgtggaggagtcctggtttgctccttccctggagcacccacaagaagagaatgagcccagcctgcagagtaaactccaagacgaagccaactaccatctttatggcagccgcatggacaggcagacgaaacagcagcccagacagaatgtggcttacaacagaaaggaggaaaggagacgcagggtctcccatgacccttttgcaca

SEQ ID NO: 17426 - DNA, 451 bp, Homo sapiens
  misc_feature (1)...(451): n = A,T,C or G
ttgaccccttcaggaatgattggcatccgaaggnccacccacgcttccgagcagcccagccaagcactgtcaggaatcctgtgaagcagctccagctatttgtgaagaagaggacagcactgccttggtgggtgacaatggctctgggctctgtaaggccggctttgctggggacgatgctcccagggctgttttcccatccattgtgggacgcacaactggcatcgtgctggactctggagatggtgtcacccacaatgtccccatctatgagggctatgccttgccccatgccatcatgcgtctggatctggctggccgagatctcactgactacctcatgaagatcctgactgagcgtggctattccttcggtactatgtaccctggcattgccgaccgaatgcagaaaggaatcacgggcctacacccagcccctggatatcaaaat

SEQ ID NO: 17427 - DNA, 432 bp, Homo sapiens
aattcttattgtctcaccagcccccttatgtatttccattatctatccagcccttgttttgctgccctgacccattcatgtcccttgaaggctggaaaacagaggcctatagacaagtgtggcagctgcagacctcctcagctattgcttgggctaagcagacttctttctttcccagccggagaacatattgtgcgtctatcacacaggacatcaaattaagatcattgactttgggctggccagaaggtacaagcctcgagaaaagctgaaggtgaactttggcactcctggggtcctgagcccaaaaggcgcaattatgagtctgtcccattccccacagacatgagggacgtgggtatcatcatctacatgacacatcaatgctttgctccccttctaggggaaacagatgcagagaccatgaattcg

SEQ ID NO: 17428 - DNA, 417 bp, Homo sapiens
caaagctagtgtgaaggcttatagtatgctcgggctgttttactcaaccaaggagcccaaggagttagaaaaggcattttactggcattccgaagcatgtggcaatgggaatctggagtcccagggtgcacttgggctcatgtacttgtatggacaaggcatccggcaggatacggaagctgccctgcagtgcttaagagaagcagcagaacgcggaaacgtctatgctcaagggaatctcgtggagtattactataagatgaaattttttacaaagtgtgttgcattttacaaaaggtgaatgtctttgtctgttctgtgctgctgtaacagaatatcacacactatgtaatttatgagaaacagaaatttatttctcacagttccagacgccaagagagggctgaaacctccaaa

SEQ ID NO: 17429 - DNA, 415 bp, Homo sapiens
tgagagccccacagagcttgtgttgccaatgctgcggttcgtgcagaagcggggaaactcaacggtgtacgagtggaggacagggacagagccctctgtggtggaacgaccccacctcgaggagcttcctgagcaggtggcagaagatgcgattgactggggcgactttggggtataggcagtgtctgaggggactgactctggcatctctgccgaggctgctggaatcgactggggcatcttcccggaatcagattcaaaggatcctggaggtgatgggatagactggggagacgatgctgttgctttgcagatcacagtgctggaagcaggaacccaggctccagaaagtgttgtcaggggcccagatgccctgacactgcttgaatacactgagaacccggatcagttcctt

SEQ ID NO: 17430 - DNA, 431 bp, Homo sapiens
acccaccagcatttcgtgggatggtcttgattcaagtatgctctacaccttggtcctgacagacccggatgctcccagcaggaaggatcccaaatacagagaatggcatcatttcctggtggtcaacatgaagggcaatgacatcagcagtggcacagtcctctccgattatgtgggctcggggcctcccaagggcacgtgttaccaggccgagtgggatgactatgtgcccaaactgtacgagcagctgtctgtgaagtaaggggttagcttggggacctgaactgtcctggaggccccaagccatgttccccaggtcagtgttgcatgtataatagatttctcctcttcctgccccccttggcatgggtgagacctgaccaatcagatgtaagttgagggtgacttttcctgctgcctggccttataat

SEQ ID NO: 17431 - DNA, 410 bp, Homo sapiens
aggaagcctgtcttttggcttcagaaggtctgtttcactggggcttataagacttgaggcgggaagggggtgatcaaacctgagcttgctttgggaacaagtactgaggcaaggggaaggtttggaccttgctagtgatcatataggatcacttttgtttaatatatgtgagagctttcagcttccgtgtttttctaaaggctttaacagcttggcctgtggacaagcaattatttaattaaaattggcacagatgtccaaaattttccattgttctttagactacttgttttttgttaggcagacacattgttatgaactggacaggaagcataattggaagggccggtaggagcatctcgttaggccacggacatgtaagtttctgcattatatatggcgggcgtctg

SEQ ID NO: 17432 - DNA, 433 bp, Homo sapiens
gaaacgtcagcgccaaaagaaggctcgggaggaacgcctccgagagcgcaggattgatatagaggagaacaagaaacagggcaagtacccagaagtccacattcccctcgagaatctacagcagtttcctgccttcaattcttatacctgctcctctgattctgctttgggtcccaccagcaccgagggccatggggccctctccatttctcctctcagcagaagtccaggttcccatgcagactttctgctgacccctctgtcacccactgccagtcagggcagtccctcattctgcgttgggagtctggaagaagactctccctttccttcctttgcccagatgctgagggttggaaaagcaaaagcagatgtgtggcccaaaactgcttcaaagaaagatgagaacagcttagttcctcctgcccctgtg

SEQ ID NO: 17433 - DNA, 409 bp, Homo sapiens
cccacgcgtccgggttcgggccctttggccttgcctaccctggccttggttgttttgctaaccagagccagctgtgttgtgggtgtcttttcctctctcctggtgtccccgcctggacccttcactctttgcctcccactgcactccagcctgggcaacaaaacgagacttcgtctcaaaaaaaaaaaaaaaacccataaatttgggatccttgggcggggttctcccaaattttttgggggggcccagggcaaactgcttcacctttgtttgggaacccccctgcccaaagccaaatataggctgtttttccccttgttcccagggtggagaaaaaaaaagaaccctctgtttgggggggggggaaggaaaataaactttttttttttactgggacttggcaaggacc

SEQ ID NO: 17434 - DNA, 418 bp, Homo sapiens
  misc_feature (1)...(418): n = A,T,C or G
ctcctccagctgccgtgcttcctttctgttcctagatctcctgagcgtgccccagggcctcggcacaagctgctgcttctgcagagcctcatggctgtctcatttatttctcaattcaaatgccacctgcctggggaggtccttccagaccgtgcagccccaggaggcagctggcccggagacagcagggccttgacaaagagtcccccctgtacacagcaggtgctctgtaaatgtggctgggtgccagaatacgtcctcagacctccctggtggcaccagcggcagctttgcaccctctttcggatggcaggctcgggaccaggacggtccccaaagatgcatggacaattggctgagtagactcaaggacactgccctcccctcctccgacacagacagacaaacccagagagtn

SEQ ID NO: 17435 - DNA, 468 bp, Homo sapiens
  misc_feature (1)...(468): n = A,T,C or G
gggcggatcnaattgaatgcagactgtantcaatcgaaancccggnncgacccacgcgtccggntcctcctttttttctttgtttcttcagcacttatatattcagcttgcactgtattaatttgcacttgtttgcatgttgctttgtaagtattttaagggcatttttttcctctcacatatatattgctttgcgtccctggctaaagtacaagctttttgaaggcagaaaccatgtctttggtttcttttgtatttcccatagcaccttttactgtgagagtgggcacacagtatatgttgtggaatgacatcctgagtgatccctccctggctgggcctcagattaaattccctgaaatggaacagtcctaaccaacacaggacaggtattctccatctggcatgttggttgctcctttcaacctgctatttgaaatggctcccttcaacatctttctgttcccg

SEQ ID NO: 17436 - DNA, 399 bp, Homo sapiens
atagggttataacattatcaggcttgtaaaatactttatcaaatcaatgcatcagttaaagcaggggtccccaaccctgggctgtgtgtggcctgttaggaatcgggccacacaataggtgagctgagaggcaggtgagtgagcattctgcctgagctccgcctcttgtcagatcagtagtagcattagattctcataggagtgcaaaccccattgggaactgcacatgcaagggatcaggctcactgcggtcttgacctccccgagttcaggccaggtgatcctcccgcatcagccttctgagtagctgagacgagatgatgggcgtgtgccaccacgcgcagctaatttttgtattttttgtagaggcgggtctcgccatgttgtccaggctggtct

SEQ ID NO: 17437 - DNA, 471 bp, Homo sapiens
  misc_feature (1)...(471): n = A,T,C or G
aagcggagatttaagctgaggccgtcgtaannctgatagcntgcggaaccctccggattcccggtcgacccacgcgtccggaccacgtgttctgccactctctctgagtatcccaacctcttggatgtatacagagattttatagaatagaacctatagcttctaccatgagttatatgagtcaagatcctgcctaacctgaaattattagggatttactcagccctgctgccgctaacagtggagttatgtcactgatctgaaggtcactgttaagggcttctgctgccatccttgtgggttgctacctttaagtcgcataactctagctgtatcatcctctcacctgtcattcttctgagggtctcagtacaagggccctgggatggagccaacctgggtattcacaacaggcctgacttgatactaagtgattagttttccaagttgtcccactgccattcaaagtcn

SEQ ID NO: 17438 - DNA, 405 bp, Homo sapiens
attgcatagctgtaattgattccaatcctgggcaggaagaaagtgaccctcgttataagagaaacatatgcagtgtaaaatacagtgtgaaaaaaataaatcatactgcgagtgaaaatgaagaattcaataaaggagaatctacatcccagaaagttgctgataggactaaaagtgagaatggcctacagaatgaaagtttaagttccacacatcatacagatggcttaagcaaaatcagactaaactatagcgatgaatcacctgaagctggtaaaatgcttgaagatgaactcgtcgacttctcagaagatcaggataaccaggatgatagcagtgacgatggattcctcgctgatgacaactgcagttcagaaataggacagtggcatttaaagcctactt

SEQ ID NO: 17439 - DNA, 409 bp, Homo sapiens
acttgatgttaaattgggtataggggtaaggaggaggaaaggagagggaaatgtcaagatgactcctagctcctagatgtttgagaagagggacatcaaaattgggttttggcagtggagatgggctatgatggggcaaaaggttaagttttgtaaatattgagatttacaggacatgttaaatacctgtctgggactcagaagagagatgtggcctggagatacaactttgggaatcatttgcatgaaggtgatattgatgcctgtggtgtggctgagattatccatggagagtgtgtagggtgagaaaagaatagggtataggctagtcttgaacatgtttcctttcaatagaaccatgtaatatttcataactgtgctgtttaccactaaaagtcttagaaggggg

SEQ ID NO: 17440 - DNA, 405 bp, Homo sapiens
ggaaggggaccctccgctctgtagtgctacagggtccaacatagagccgggtgtccccaacagcgcccaaaggacgcactgagcaacgctattccagctgtccccccactccctcacaagtgggtacccccaggaccagaagctcccccagcaaagcccccagagcccaggctcggcctgcccccaccccattcccgcagtgggagcaaactgcatgcccagagacccagcggacacacgcggtttggtttgcagcgactggcatactatgtggatgtgacagtggcgtttgtaatgagagcactttcttttttttctatttcactggagcacaataaatggctgtaaaatctcaaaaaaaaaaaaaaaaggggggccctctaaaaagaacccctgagggcgccg

SEQ ID NO: 17441 - DNA, 409 bp, Homo sapiens
tgaattccttacgcagggcattggaatcttatccacatatgtgggttggtatttcatcattaacagggatcaggaaaaccactgtgtgcctgccactgagagtctctgcagagagtcctttgctccttcttgagacattgatgagagtagagaatgtgacttgttgaatagatggaattactttcaattgtatgagtttatataaaagaattcctgtggttgataagaaccttttgagggtagacacagtcataccagaatatttgctgttattgactgaaaattagtcagattaagcatagggagaggaagagtgtgacacacaagagggaagggaaggaaagtgtgagaaattttctctgaatcttaagagatgaccataaatccttactgtcccttaagcagcatg

SEQ ID NO: 17442 - DNA, 399 bp, Homo sapiens
cagatttactgtcacattatcatacttgtgtccagtatccctttagaaatatccccacaacgcaagagtagtgatgctgacaattcagagatgccataaagtgcttcctttaagtgaaaggagaaagttctctataaagagaaaaaaatcctatgctgaggttgctaaggtctatggtaagactgtatcttctgtgaaagaggaaaaagaaatttgtgcgttttgctgttggacctcgaactgtaaaagttatggccagagtgtggcaagtgcttccttaagatggaaaaggcatcacatttgtgggtgaaatacatgaacagaaacgtgttctgactgacaatctaagttgagtactacctgaggtttcaggcgtctactcgggatcttggaacttgt

SEQ ID NO: 17443 - DNA, 416 bp, Homo sapiens
aatccagcccaccactggtttttgctaataaagttttactggaacacagccacagccattcacttatgtattttccgtggcttcattcactctgcagtggcagagttgactagttgcaacagtattgcccaaagtctaaaatatttactaccttgctctttacagaaagtttcccgatcactactttaccctacttgatagccattattttattttatctctttccagaatttgatgccattaacctcctccagcttggaaatctctattatttttacttccatgacagcactctttactgggtttcctcttaccctgctactgataacttttcttctgcttcctgggctcctcttctatctcttaatgtcaatgttcttccaagttctaccacatttccccctttctttacactc

SEQ ID NO: 17444 - DNA, 408 bp, Homo sapiens
aatccagcccaccactggtttttgttaataaagttttactggaacacagccacagccgttcacttatgtattttccgtggcttcattcactctgcagtggcagagttgactagttgcaacagtattgcccaaagtctaaaatatttactaacttgctctttacagaaagcttcccgatcactactttaccctacttgatagccattattttattttatctctttccagaatttgatgccattaacctcctccagtttggaaatctctattatttttacttccatgacagcactctatactgggtttcctcttaccctgctactgataatttttcttctgcttcctggtctcctcttctatctcttaatgtcaatgttctcccaagttctaccacatttctccctttcg

SEQ ID NO: 17445 - DNA, 415 bp, Homo sapiens
ataaaaataatataaatttactgtttctgatcatgactgagtctattacttgtcatggcttttgtacgcaactgtgttttaaaaataccggttttgcctctttggttacatgtggtgagcatggatgtcaagattatttttcaactagattattcaatttgttttatatttcttatacttaatacttatgactacagtccaaatcagtcttttagaaggtgctcttgctaactgtggaatatttgacgacatgaaagtcctttttctttgctttcagtggttggctttcactgaaagaaagtgtaaaaaaagtcagaatttatagctttcactatgtccaagactaggactgggttataaagattttcttttgtgaaggaaaataaaagaaaatttgccactactgcatttactt

SEQ ID NO: 17446 - DNA, 406 bp, Homo sapiens
acaggcgtgagccactgcacctggcctcatgttttttaaataattgccttttatatttaccctttttgtcatcactttagaatgaaaattcccatttaaatctgaaagttaccttaatagtcctcttgtgttattaggacagtattattatagtacttatttattttattttagatttaaagttcttctctttttcttttttcttctgctgcttttagggacaattaaaactgggaaactatgaaacatggaacattttatcctacctgaaagtaaacgagtaattgtgaagcataagacactgaggctaatacaactctgtcttcatgtgttgactgcctggcacatagtattcattctcttccctttaacatagaagtgtccagctgcgtacagtctattaacc

SEQ ID NO: 17447 - DNA, 416 bp, Homo sapiens
  misc_feature (1)...(416): n = A,T,C or G
atatggaccggcagctgggatgcctatggcagaattaccacctgctcagtgtatccatgtccgggtacatcatctatctggacagaaacaaccccaccaagcccctgcacggcataaagggtcacagtaaatctatccagtgtctgaccgtgcataaaaacggcggcaagtcctacatttactctgggagccacgagggacacattaattactgggattcagagacgggggagaacgaatccttcgctgggaaaggccacacgaaccaggcgttcatgatgaccgtggatgagtcggggcaactcatcagatgcagcatggacgacaccgtgcgttacaccaacctcatgctgcgggactacagcggacaaggaggagtgtaactggacgtatagacaaagggcgtaccctgcttn

SEQ ID NO: 17448 - DNA, 407 bp, Homo sapiens
cagggagatctttgactctcgcgttaatcccactgttgaggttgatctcttcacctcagaaggtctcttcagagctgctgtgcccagtggtgcttcaactggtatctatgaggccctagagctccgggacaatgataagactcgctatatggggaagggtgtctcaaaggctgttgagcacatcaataaaactattgctcctgccctggttagcaagaaactgaacgtcacagaacaagagaagattgacaaactgatgatcgagatggatggaacagaaaataaatctaagtttggtgcgaacgccattctgggggtgtcccttgccgtctgcaaagctggtgccgttgagaagggggtccccctgtaccgccacatcgctgacttggctggcaactctgaagtcg

SEQ ID NO: 17449 - DNA, 497 bp, Homo sapiens
  misc_feature (1)...(497): n = A,T,C or G
naggggttttatgaaaccntagattgggatcctcgcaaccggcncgacccacgcgtncgaatgtaacttccgagtaaatgctttggtttgttcagaatacactatgaacttctttccaaagacgggttgtggtaaatagtggatattttgattataagaaatagagtttccttgaagctttagctggagatacagcaatagtgtggtgttcctacaaatatcacagtgtattcaaacatatttttctatcaaaaatcatttttgtaaaagctgtgtgtttttatccaacttgtgataataaatgttctttattttagaatannnnanaaaaaaaaaaaaacaaaaaaaaaaaaaaaaaaaaaaaaaaaagggggggcccttttaaaaaatctttgggggggcccaatattaaggggggggggaaaaataaattttctttctttaggggggagttattaaaaccatcctgggggtttctgggaaagaactcttttttn

SEQ ID NO: 17450 - DNA, 436 bp, Homo sapiens
ccgcgccatggccggggccatcgcttcccgcatgagctttagctctctcaagaggaagcaacccaagacgttcaccgtgaggatcgtcaccatggacgccgagatggagttcaattgcgagatgaagtggaaagggaaggacctctttgatttggtgtgccggactctggggctccgagaaacctggttctttggactgcagtacacaatcaatgacacagtggcctggctcaaaatggacaagatggtactggatcatgatgtttcaaaggaagaaccagtcacctttcacttcttggccaaattttatcctgagaatgctgaagaggagctggttcaggagatcacacaacatttattcttcttacaggtaaagaagcagattttagatgaaaagatctactgccctcttgaggcttctgtgctcctggcttct

SEQ ID NO: 17451 - DNA, 497 bp, Homo sapiens
  misc_feature (1)...(497): n = A,T,C or G
acgcctttgacccntctattgagcnctnttcggaaccgccccggaaancccggggggacccacgcgtgcgcccacgcgtccggcctanaagaggttttgggtagaaatttttagcatttgatcactacagggacttgtagtaggtagagaaggaacccatcctggggttggtggagttggaattgctactcgttttgatagttctcatttacagagaaagaaaaataagccaaagccagaaagcaatccaagccttacagttgtccaatacctcagggccagttggctagaattttcttttccctcagcccataatcacttatagttagccatacaacatacagcctgacaatctgaccagcatttccattgatataaaatgtaagcattccttcattctgtagttaggaactccaacttcagccttatctccaacataatttcccaatttaacctatgtactgatatggacatttctttgtgaatatgccacattg

SEQ ID NO: 17452 - DNA, 426 bp, Homo sapiens
cttcttttgggaggatttgatgtatgttactgacaagtctcagcaaacccaaagatgttaacagtattttaagaagttgctgcagattcctttggccactgtatttgttaatttcttgcaatttgaaggtacgagtagaggtttaaagaaaaatcagtttttgttcttaaaaatgcatttaagttgtaaacgtctttttaagcctttgaagtgcctctgattctatgtaacttgttgcagactggcgttaatgagtatatgtaacagtttaaaaaaaaagttggtattttataagcacagacaattctaatggtaacttttgtagtcttatgaatagacataaattgtgatttgggaacataaaaactactgaataaatcatgtggcctaatattgaaaaaaaaaaaaaaaggggcgcccttttta

SEQ ID NO: 17453 - DNA, 427 bp, Homo sapiens
tcgcttcaagtttatcggtaagaggagcgttttccacgcccttgggtctttctgacttgtcccgggcgtcggtcaccaaggtcacaggacccaggaattgcgccctccggcattatattggtatcaacttgactgaccctatgttcagaggaatttataggggggttcaaaagcatcaagatgacttacaggatgtaatagggagagctgtcgagattggtgttaaaaagtttatgattacaggtggaaatctacaagacagtaaagatgcactgcatttggcacaaacaaatggtatgtttttcagtacagttggatgtcatcctacaagatgtggtgaatttgaaaagaataaccctgatctttacttaaaggagttgctaaatcttgctgaaaacaataaagggaaagttgtggcaataggaga

SEQ ID NO: 17454 - DNA, 492 bp, Homo sapiens
  misc_feature (1)...(492): n = A,T,C or G
aggggtttgaggcctangaccgttgagaaccctcgggtcgacccacgcgtccgcctgaccccgggaaccccgtctgcagcaccaggccccctccgtggagaaaagatgttgccggattaagcacccagtgctaaggcgactaagacgccactgcccgcaggccctgccggaaaatactcagagagtgcagcaggcgccgcgattccttagaaagagctggcgtggcctctcctgacacagaaagccggctcctggatgcttacaaaggactggcccgcgcaacaccgttgctcctcaacccgggccacactccaaggacctctactgagcttcagcttgctcaccgaaaacggcgcggccccctctacccgggatgtcggagcccaggagaccctgagagcccccagctctttccgtaattgcaggagaaggggcaagcgggtccgtagccggnggccctccagtggcattatcctgaaccgccacgcccgg

SEQ ID NO: 17455 - DNA, 491 bp, Homo sapiens
  misc_feature (1)...(491): n = A,T,C or G
cgggttgacgccgtgtagaggccgtgtagaccggncgacccacgcgtncgggaggagcgcgcggtcacatggtgccgctgaccgaggtttgcaaagactccttaattggaggcatgatgaagactctgctgctgattgcggggctgctgctgacctgggagagtgggcacgttctgggggaccagacggtcttagacaatgagctccaggaaaggtccaatcatggaagtatgtacttcaataaggaaatttaaaatgctgtcaacggggtgaaacagatatagactctcatagaaaaaacaaacgaagagcgcacgacactgctcagcaacctataagatgccacgaagaagaaagaggagtgccctaaatgagaccagggaatcagagacaaagctgaaggagctcccaggagtgtgcaatgagaccatgatggccctctgggaagagtgtaagccctgcctgaaacagacctgcatgaagttctacgc

SEQ ID NO: 17456 - DNA, 430 bp, Homo sapiens
  misc_feature (1)...(430): n = A,T,C or G
ctgcactggctgagcagattcccatttatcattccagcattgttacccagcaaaatcagatatatgtggtaggaggactatatgtggatgaagaaaataaggatcaacctctacagtcatacttcttccagctcgatagcatagcatctgaatgggttggacttccacctctgccttcagccaggtgtctcttcggtctgggagaggtggatgataaaatctatgtagttgcaggcaaagaccttcaaacagaggcttcgctggattcagtattatgctatgatcctgtggctgcaaaatggaacgaagtaaaaaaactccctatcaaagtctatggccataatgtgatttcacataaagggatgatatattgtctaggaggaaagacagatgacaaaaaatgtacaaacagggtgtttatcttcaaccn

SEQ ID NO: 17457 - DNA, 424 bp, Homo sapiens
  misc_feature (1)...(424): n = A,T,C or G
aagtaacttgtgtctcatgataatcagtacaatcacacatggaggatgaaacgccggaacaaaaatgaggtgtgtagaacagggtcccacaggtttggggacattgagatcacttgtcttgtggtggggaggctgctgaggggtagcaggtccatctccagcagctggtccaacagtcgtatcctggtgaatgtctgttcagctcttctgtgagaatatgattttttccatatgtatatagtaaaatatgttactataaattacatgtactttataagtattggtttgggtgttccttccaagaaggactatagttagtaataaatgcctataataacananaaaaaaaaaaaaaaaaaaaaaaagggggggcccttttaaaagattctttggggggccaaaatttaacgggggttggaaaaac

SEQ ID NO: 17458 - DNA, 423 bp, Homo sapiens
  misc_feature (1)...(423): n = A,T,C or G
catgaattgggtcataatcttggaatgaatcacgatgatgggagagattgttcctgtggagcaaagagctgcatcatgaattcaggagcatcgggttccagaaactttagcagttgcagtgcagaggactttgagaagttaactttaaataaaggaggaaactgccttcttaatattccaaagcctgatgaagcctatagtgctccctcctgtggtaataagttggtggacgctggggaagagtgtgactgtggtactccaaaggaatgtgaattggacccttgctgcttgagaaagtggggnnnnnncnncncnnncnnannnnncaannnaactgnnataacaccgcccaccctttcatgaanacnnactgccgagattaccaggagtgtgatgtctggaaaacgcacagtgattctagtt

SEQ ID NO: 17459 - DNA, 494 bp, Homo sapiens
  misc_feature (1)...(494): n = A,T,C or G
aggtttgacgcctcggnaccggtcgatgatccctcgggtcgacccacgcgtncgcaagaaattatcactaggatgaaatcctaaagattttaatctagagagggagaaatgtaaggagaaaggaatggatgggaaaggttaagaaagaagaactagggtcgtgggtttgagtgacaggggaaaaagtgattttatcactaagtgaggtccagaagaaaaactgactgggggagggagctaatttttctttttgacttcttgggtttgagatccagtgtgatgtctgggtacagacattcactaggaagtgggaaggccagtatctacaaaagaaaaacctccagaataacctcattcattgactccttctgtctttcagagtggacttttgctctgtcctccaagaataaatctcaagagagagttaaatagcaagtgaatttctactaccctctcagtcaccatgttgcagactttccctgtctggaggctca

SEQ ID NO: 17460 - DNA, 424 bp, Homo sapiens
  misc_feature (1)...(424): n = A,T,C or G
ctccgatgccatcatgcagcctggttaggagcaaaggataggggaaaaagaaaaacgactaattcatcttttcctgatcgtcaggaccctaaagaatggccgagccttgggggaacgagttggcgtccgcagctgccaggggggacctagagcaacttactagtttgttgcaaaataatgtaaacgtcaatgcacaaaatggatttggaaggactgcgctgcaggttatgaaacttggaaatcccgagattgccaggagactgctacttagaggtgctaatcccgatttgaaagaccgaactggtttcgctgtcattcatgatccggccagagcaggtttcctggacactttacagactttgctggagtttcaagctgatgttaacatcgaggataatgaagggaacctgcccttgcacttggn

SEQ ID NO: 17461 - DNA, 494 bp, Homo sapiens
  misc_feature (1)...(494): n = A,T,C or G
agggttgacgcctangaccgttgataacccctcgggtcgacccacgcgtccgcggacgcgtggggataaaatgaggaaaacaacaattcatgaaatccaatccacaatttataaaatcttaataaagagagcaaagaaagtaaaagctaataaaagaaaacttctcagaaagttgtgtctaagctgcttagccttggccaatgcccaaaagaataagtgataaaaattctgaaagataaagagtggatcctaaatttttccctagagaaagagtttacaaacaaattaattagttggatttgagtcacaattatcatgagcaatgatatagattgagatcacatgtgtaaggaaaatgatctcagaaggaaggacagaggtaaaaaaatgtaagcggaaaattatatgcatataggtaaatcaaagaaacaagaggaggtcaaacagcaagcttactacacttattaaaatcttgttaatttgatcttattaan

SEQ ID NO: 17462 - DNA, 423 bp, Homo sapiens
ccctcttgagattcgttttatgtgtaattccataatgagcagaggtgtacgcgaaattgtgttatgactgatagccttcagctacaaaaagataggactgacctggtttaaagtgttctattttgtaaatcattccatttgagtctttctgatgaacttggctatactgaaatctgttattttagtgaggctccaaaatgagcaaagctaggcctgattagagtagagtgactattaaaaaacataactttctaggagctataaatcaaagttttaaaaagatgtttggatatatttgagtattccgatcatgaaaacagaaattgccctgcctactacaaggacagactgatgggaaattatgcacctggtcaacttagcttttaagcagacgatgctgtaaaaactaacggcttctctgat

SEQ ID NO: 17463 - DNA, 424 bp, Homo sapiens
ctggggagatcttcctctctctatttaactgtaactgagggggatcccaggtctggggatgggggacaccttgggccacaggatactggttgcttcaggggtacccatgccccctgccctcgcctggaatcagtgttactgcatctgattaaatgtctccagaaataaagaataattctgccaaaaaaaaaaaaaaaaaaaggggggccctttttaaagaatccttggggggcccaaacttacccggggatggcaaggtaaaagttttttccttttggggggcctatttaaaccctccttgggatttttgggaaagaaccttttttttgggggggggacttatgggcccaacctccttccaaaatttaaaggctttagggaaaaaaaaaatttttaaggggaaaagggggaaaaccacccgcgt

SEQ ID NO: 17464 - DNA, 439 bp, Homo sapiens
ctggggagatcttcctctctctatttaactgtaactgagggggatcccaggtctggggatgggggacaccttgggccacaggatactggttgcttcaggggtacccatgccccctgccctcgcctggaatcagtgttactgcatctgattaaatgtctccagaaataaagaataattctgccaaaaaaaaaaaaaaaaaaagggggggccgttttaaagaacccttgggggggccaaattttacccgggctggcaaggaaatatttttttccttatagggggccgaattaaaacctacctgggaatttttggaaagaacctttcttttgggggggggacttattgggccaacctccttacaaaaattaaaggctttagggaaaaaaaaaaattttaaagggaaaaaggggtaaaacaacctcgatatgctggtggctgg

SEQ ID NO: 17465 - DNA, 424 bp, Homo sapiens
  misc_feature (1)...(424): n = A,T,C or G
cccacgcgtccgcggacgcgtgggggcggcggcagggctgagccagcgacgccctccattcactctccgcgcccgttctccggctgtcctcccgttccgctgcccgccctgccaccatgacggaacaggccatctccttcgccaaagacttcttggccggaggcatcgccgccgccatctccaagacggccgtggctccgatcgagcgggtcaagctgctgctgcaggtccagcacgccagcaagcagatcgccgccgacaagcagtacaagggcatcgtggactgcattgtccgcatccccaaggagcagggcgtgctgtccttctggaggggcaaccttgccaacgtcattcgctacttccccactcaagccctcaacttcgccttcaaggataagtacaagcagatcttcctggngggcgg

SEQ ID NO: 17466 - DNA, 415 bp, Homo sapiens
cccacgcgtccgcccacgcgtccggttggtgcacagcacaaattagttatatatggggatggtagttttttcatcttcagttgtctctgatgcagcttatacgaaataattgttgttctgttaactgaataccactctgtaattgcaaaaaaaaaaaaaagtggcaccggtttggtgaactttttaaaggctttaaaaaaaaaccaattttttttataaaaatgggggccttttcaaaaggccgaaattttttttttttgggggaaacctatttttttgttttggcccttttggaaccacataatttataacggggtttatcctttcttatagtaaccaaaaaaaagccttttgtttaccccccttgcttataatatgggggtgaaagttaagtggaaatatttttcttccttac

SEQ ID NO: 17467 - DNA, 421 bp, Homo sapiens
actggaacgagcagctgcttccttctctatggctggcatgtatgaagcagttaatgaagtttacaaagtacttattcctattcatgaagctaatcgggatgcaaagaaactatccacaattcatggtaaacttcaagaagcattcagcaaaattgttcatcagcggatgtttggcacctattttcgtgttggtttttatggaaccaagttcggggatttggatgaacaagaatttgtttacaaggagcctgcaataaccaaacttgcagagatatctcacagattggagggattttacggagaaagatttggagaggatgtggttgaagtaatcaaagactctaatcctgtagacaagtgtaaattagatcctaacaaggcatatattcagattacctatgtggagccatactttgacaca

SEQ ID NO: 17468 - DNA, 414 bp, Homo sapiens
ttgaaaagttacaactcttgactattaacagttcttaacatgattttttttttaattaccctatcttcactcacaacaattttgttaaagactatcctgtgctgataaactgctctctgaaatgcaaagaggaaattaacaatgtatttgtgaattggaaggaagtggaagcagagagatgaggagtagttgactttattttgagggtagactgtgtcaggagggagattgttgagtgggggagctttgtggcacatagtacatttttaagtacataccaggtacgttcttttattgttaaagccataagaaatggagttatgagcttctccacctccttttacttgcctcatttaaaatttatggaatttttgaacctaaaagattcaagctgagtggttccctatacactga

SEQ ID NO: 17469 - DNA, 421 bp, Homo sapiens
cggacgcgtgggttcgaaactactgggagcgactgctacggaagcttccgcagagccggccgggctttcccagtcctccgtggggaccagcattagcagtacagggcccagccatgtttacagagccagcaaatgataccagtggaagtaaagagaattccagccttttggacagtatcttttggatggcagctcccaaaaatagacgcaccattgaagttaaccggtgtaggagaagaaatccgcagaagcttattaaagttaagaacaacatagacgtttgtcctgaatgtggtcacctgaaacagaaacatgtcctttgtgcctactgctatgaaaaggtgtgcaaggagactgcagaaatcaaacgacagatagggaagcaagaagggggcccttttaaggctcccaccatagagac

SEQ ID NO: 17470 - DNA, 421 bp, Homo sapiens
ttcttttagattaacatccagttcattttctggaaatatacctggaatttagtccatttcctaatgaaaaacagctcaaattttagggtaactaatttgtaaagagttaacattatatttggatccaattttcctgagatattgaaatagtgaaatcaccaaataaatgatatgaatcatttaactatacaaatgtatagttaatgctaacatgtatttattttcatatatgttgatcctgagtgaaatttaatttgcagaatgctttatgagttatgattactggcaaaaccttcagagcacttgtgacacatcattataatatccagtagctaacattagatctagcttattatttcagaaattaatttaggaaataattattaaaacatgttggctacagtagcactttactgaagtg

SEQ ID NO: 17471 - DNA, 416 bp, Homo sapiens
gttgaaaagtctcgttccaagtttggagagagagataagagcgcctcagacctcggtacccgcgagcggggaggaggcaggaaagaaggacgcggcgtctggggagcacccaggcagcaagacggggcccgggctttcgacagtggggagtgtgacgcgcttgggaaaggcaggagcgccagcggtcgggctgctcttggctaacgagaggagtccgaggcggcggcgaggggcgaacgacccgacgcaagatggcgagtaaagagatgtttgaagatactgtggaggagcgtgtcatcaatgaagaatataaaatctggaagaagaatacaccgcttctatatgacctggttatgacccatgctcttcagtggcccagtcttaccgttcagtggcttcctgaagtgactaaacct

SEQ ID NO: 17472 - DNA, 423 bp, Homo sapiens
  misc_feature (1)...(423): n = A,T,C or G
tcccacaccactggcaccaggccccggacacccgctctgctgcaggagaatggctactcatcacacgctgtggatgggactggccctgctgggggtgctgggcgacctgcaggcagcaccggaggcccaggtctccgtgcagcccaacttccagcaggacaagttcctggggcgctggttcagcgcgggcctcgcctccaactcgagctggctccgggagaagaaggcggcgttgtccatgtgcaagtctgtggtggcccctgccacggatggtggcctcaacctgacctccaccttcctcaggaaaaaccagtgtgagacccgaaccatgctgctgcagcccgcggngtccctcggctcctacagctaccggagtccccactggggcagcacctactccgtgtcagtggtggagaccgactn

SEQ ID NO: 17473 - DNA, 415 bp, Homo sapiens
  misc_feature (1)...(415): n = A,T,C or G
gactgcagtggcgtgatctcggctcattgcaacctttgcctcccgggttcgggcgattctggtgcctcagcctcccaagaggctgggattataggcgcccgccaccacgcctagctaatttttgtatttttagtagagacggggtttcaccgtgttggccaggctggtctcgaacgcctgacctgaagtgatctgcttgcctccacctcccaaagtgttgggattgcagtcgtgagccactgcacccagccgttcttaccttcttaattgaaccagcttatactcatatcagcatgtatggaaatgtccacatttactttggaaattcctggtaacatgagaaacttccctttctccaacattattgaggtataatttatatactataaaattcatccattttaattgtacaatn

SEQ ID NO: 17474 - DNA, 417 bp, Homo sapiens
  misc_feature (1)...(417): n = A,T,C or G
tgggaaagcattcagttgtttcacatacctttctcaacatagaaggactcacatggctgaaaaaccttatgaatgtaaaacatgtaagaaagccttcagtcattttggtaacttaaaagtccatgaaaggattcacactggagagaagccatatgaatgtaaggaatgcaggaaagcattctcttggctcacttgccttctgcgacatgaaagaattcacactggaaagaaatcttatgaatgtcaacaatgtggtaaagccttcactcgttctcgtttccttcgaggacatgaaaaaactcacactggagagaagatgcatgaatgtaaggaatgtgggaaggcactgagttctctcagttccttgcatagacataaaaggactcactggagagatactctataaatgtggaaaan

SEQ ID NO: 17475 - DNA, 422 bp, Homo sapiens
aagaagtacatccaactgccattagaataaggataaggacaaagaacgatctgaactgcttcctgccgacagagggcactgttttaggaagacggcaatcatatctccctcggaggcctatctaagtaagggtcctcggtaaaagggggctaccatttaaggttccgattacatgatcgtttggagttcagtggcctaaggtaagaagaaacaaactggcttattagaaaacatgtagcaaaaaaaaaaaaaagggggggccgtttaaaagaacccttggggggcccaaatttaacgggggatggaaaggaaaaatttttttccttatggggggccaaataaaaaccaacctgggaattttggaaaagaacccttccttggggggggggacatatgggcccaccctccctccggagttttaa

SEQ ID NO: 17476 - DNA, 419 bp, Homo sapiens
caataacaggaacagacttgggaacaaacacaagccctcagcaccactttgaacagaattccatcatccctggccctcccttcctatttggagcctgttcagtactgctggctctgcttgttgccttgtttattccggaacataccaatttaagcttaaggtccagcagttggagaaagcactgtggcagtcacagccatcctcataatacacaagcgccaggagaggccaaagaacctttactccaggacacaaatgtgtgacgactgaaatcaggaagatttttctatcagcacccaggtcttagttttcacctctagttctggatgtacattccatttccatccacagtgtactttaagattgccttaagaaatgtatctgcatgaactccgtgggaactaaaggaagtgggaact

SEQ ID NO: 17477 - DNA, 415 bp, Homo sapiens
atttactgtacaggtagaaagcaaagagttaaatggagaagatacttgtttttattaaacatttcgagacgtacataaactacattttaactgaatgtctaaagcgattattttttttgcccccaagttagccttaaatcttttgggtttgaatgaaggctttacatacgaaattattaattacaaggggggtgggtaataaatgcatataacattaaataatgtaacgcaagcgtagattcccaaatgcatttggatgtacagatcgactacagagtacttttttcttatgatgactggcgaagaaatgcgagattgagcgggactattacatcttgcctaccattgcatgaaacattgtggcttcttcacaaggtgagaggcatacttcttttgggatggaggatgttctctt

SEQ ID NO: 17478 - DNA, 421 bp, Homo sapiens
cccacgcgtccggttttgtttgtttttctttagagacatgctctttctcatgggacttgaagtggactcatctttgtgcagtgctggttttgccatactcatttcaagtattatagacatatgtaatggtgaaaatatatgaactgtggcctttttcattcttgttacttgtgatgcaattaagtgaagataagaaaaaaaaaaaaagcggagatttcccttgtttcagggcctggctttttgttataaagctttgttggcctagggctcttttgctataaaaaaaactgtagtaccccctagtgggaaaaaaaaaaacctaattttaaaaataaaaatttttttgggtttatttttcgaagaaccaaccttttaatcccttgaattttacaaaaaattggccaaattttgaatttttctt

SEQ ID NO: 17479 - DNA, 399 bp, Homo sapiens
aggaatctgagaatcatctgtgctcaatagccaacctccctgtccagatgcagctattttggtatctcctatcacatgcactctgaatcagggtttttctataagaaatctttcagaatcagcaaaagtggggatgacccaggcatcttgatttgcaaaatcacaaaactaagttgtcagttatcactgtagatgagcaactcatctttttaaagtatagttactgaactgattctgagaaatctttagagagaaaaaactcaacagtacaaattaactaattgggaaagttagaatgtcctttctgaatttttcattaaaaaaattacattatctgaaataacataaagctactaaactgctttgtattctattaagaaatagctcctaaggatgtag

SEQ ID NO: 17480 - DNA, 430 bp, Homo sapiens
aagtcattaaagctttccttttgtttacacttgcctacaattgttttttctcagagcaaacttggctcagcacagcccaaggtaaattatcacagattctgcaactaataaagttcaatgaggactttacatggctcacatgctgttggtgactggctctttcttcttttttagttagtaacaggagtatgggaaggcaaatacaacttcttctgtcagggcacacgcaccgcaggagaatcagatatgaagattatccgtgtcctctggtggtactacttctccaaactcatagaatttatggacactttcttcttcatcctgcgcaagaacaaccaccagatcacggtcctgcacgtctaccaccatgcctcgatgctgaacatctggtggtttgtgatgaactgggtcccctgcggccactcttatt

SEQ ID NO: 17481 - DNA, 435 bp, Homo sapiens
  misc_feature (1)...(435): n = A,T,C or G
agcatcaaacctagaaacccgtataggagatagagcattagcgtggcagactggtgaggcaagataatatggtggccatgtggtcaaatggtggctccctctctgacttgaacaaatgatttaatcttccatttctggccaggtgctgtggctcacgcctgtaatcccagcattttgggaggctgaggtgggtagatcccttgagtccaggagttcaagaccagcctgagcaacatggcaaaaccctgtctctacataaaatacaatattagccaggcgtggtggcatgtgcctgtggtcccagtgactcaggaggctgaggtgggagaatcacttgagcctgggaagcgaaaacgttgaagtgagctgagatggtgccactatactgcagcctggatgacagagcaagaccctgtctcanaaacaaattatatg

SEQ ID NO: 17482 - DNA, 433 bp, Homo sapiens
  misc_feature (1)...(433): n = A,T,C or G
gtttctcacagaatggattcccagcgggaacttgcagaggaactgcggctttaccaatccacccttcttcaggatggtctaaaagatctcctggatgagaaaaaattcatcgattgcaccctaaaagcaggtgacaaaagtcttccttgccacagattgattttgtcagcttgtagtccttacttccgtgagtactttttatctgaaattgatgaggcgaaaaaaaaggaggtagtgctagacaatgtggatcctgctatacttgatttaatcatcaaatacctgtactctgccagtattgatctcaatgacggaaatgtgcaagatatttttgcattggccagccgctttcagatcccctcagtgtttactgtctgcgtttcttatcttcagaaaagactntgctctggtaactgtctagccatcctaagat

SEQ ID NO: 17483 - DNA, 429 bp, Homo sapiens
atgttttaaaaggcaattctcttgactttggaaatatggaagtctctcctttaacctattcttgttcccattcccagtctcatttgaaatcattccttttattgttagtgtgtgtatttttgttggtgtgcttttaatgcatccaagtatgcatcattttggataaaaaatacatccaaattaagatgttttaacacataggacaaacttgtgcactttttatgccaaaaaaaaaaaaaatggggttttctttcatgggatttttaaaaacactgcctaccctttatgaaaactacatagtattcccctgggacgggaagagtttatcactattaattttatgaggcttttaattactttccaaggcttccacttaaaacaagctaaaagtagggcggcaaactttaattccttgcctgattttatggg

SEQ ID NO: 17484 - DNA, 431 bp, Homo sapiens
cccacgcgtccggtttatttcgcgtccgcttctgttcctccgcgcccctgtgctgccccgactcacatactcgtccagaaccggcctcagcctctccgcgcagaagttgcccggagccatggccgagtactcctatgtgaagtctaccaagctcgtgctcaagggaaccaagacgaagagtaagaagaaaaagagcaaagataagaaaagaaaaagagaagaagatgaagaaacccagcttgatattgttggaatctggtggacagtaacaaactttggtgaaatttcaggaaccatagccattgaaatggataagggaacctatatacatgcactcgacaatggtctttttaccctgggagctccacacaaagaagttgatgagggccctagtcctccagagcagtttacggctgtcaaattatctgatt

SEQ ID NO: 17485 - DNA, 436 bp, Homo sapiens
cggtaaaatcctccacatttaccatccttcaattcgttcatgcaagctcttttctcgtggatcccggacaagagcttagatgccatgagtgcacatacaaaaggctgtcacacttgccctttgccctcactggcagaagtcagttgcctcacgcaaataggcagagggctcactgagctgttaacacttaagccgtctgcagatggcagagctaaaaagtcactgtaatactccctctggggcttcagcggtcatgggtatcccccatagatgttgccacagggcctgcccagagtttgctcctgccggtggccaaatgcgctcaccctggctcctgcacctgcacacctgcatgctgcccctgcaaggggttgaaaagatgcaggctgggtaagtaaggcacacctgtcatgagttccacgaaggggtcagggaa

SEQ ID NO: 17486 - DNA, 390 bp, Homo sapiens
  misc_feature (1)...(390): n = A,T,C or G
atttccatcctgtccctagagcctgccctcggggtccactgtagactggccttctagaagaaaccgccttataaggctctcttggatagttcagtgacagaacacccttggatggagtccaaggccagctagccttcactgattcaaaattcctccctacagtggatgagattatgatgcttcctttacctcaagccacccctaccccacaaacaatctgacctcatctgtgtttttcattgttagacaaataacatcttgtttttagcagctggggaaccctgaattatcgtcaaaagaatttttaagccagggaatatgagtgtaacctttatttgaaatttaggagtggcacaattagaaagctttgatatggaacgagacttatgn

SEQ ID NO: 17487 - DNA, 436 bp, Homo sapiens
aaaggaaagacggtggaggaagccttgactatcaaaaacacagatatcgccaaggagctctgccttcctcccgtgaaactgcactgctccatgctggctgaagatgcaatcaaggccgccctggctgattacaaattgaaacaagaacccaaaaaaggagaggcagagaagaaatgagccctccctcggcgaagcctccagcaggccacaccagctgtttcccacctgctgtgcagtcaccttagatgttcagaagccgcttcctctccactgaagagctatgagatacgcacaatacttgctgttcacgttatgactctcatgcaagcaaaatacacagcttcattgttctgaatcctgtggtttctttcagcccacttttatcgccttaacctagttaatgtatattttgaattgtgggatgacctcagaactg

SEQ ID NO: 17488 - DNA, 431 bp, Homo sapiens
  misc_feature (1)...(431): n = A,T,C or G
tgcatttctttgtactaagagcttaaaaagaaaaaaggaaacaaaaggtcgcaatccagctgccatgaatcccacttccagcatcacacctgttagtgcatatctttcttagcatattcccttgtggtcctagaacaaaatgacaaaactactactaggtattacaaataaactctggtgagcaaagccaccaagttcctggcactaacagttttcaggtattccttttgaccaatataaatgtggttttaaaaattatatatatatatatatatatatatatatatatatatatatatatatatatagaaaatatacgcgcgcatatacaaagagatatatgtgtgttttctctcgtgccacacacaacattgtgtatctgtgtgcatatatatntatgggcgcatactttatactcacagcgctgttct

SEQ ID NO: 17489 - DNA, 492 bp, Homo sapiens
  misc_feature (1)...(492): n = A,T,C or G
agagcaatgagaactgcggtcntgcncncggaaccccgggtcgacccacgcgtccgcaggtataaaaatgaaagacattgtccttaggaacttagaatataacttggggagaaaggacttacacacattaaggaactataagaaaagaaaaaaaaatgacaacttaatcaaactctgagtagtgtagtgtagtattaacaacaatgaaatgtatgaagtgactagccccagattcacagatggcttcctacaggagacgaaatagagtgtggcttgaagttgaagaaggtagaaaggaagttctgattcagcagtttaatatgaaaattacataagtgaaggaccgtgaaaatagaataaattataagaattaagattggatagtcaggttgaaataatgtgtcaggatttatacttgagataaatatatagttataaaagtatttggcttgtaatttttaagagcatgctaactttgtatgtgtatgttgc

SEQ ID NO: 17490 - DNA, 496 bp, Homo sapiens
  misc_feature (1)...(496): n = A,T,C or G
cgcttcagcaaaaagccggggggcgttgnnaacttgaaacccctgcggtcctgcgacggaacnnccgggnngacccacgcgtccggcctaccaggaagaaatggggaaaaagggagccaagggtttgggtatcctggagaacaaggtcctcctggtcccccaggtccagagggccctcctggaataagcaaagaaggtcctccaggagacccaggtctccctggcaaagatggagaccatggaaaacctggaatccaagggcaaccaggccccccaggcatctgcgacccatcactatgttttagtgtaattgccagaagagatccgttcagaaaaggaccaaactattagtgtctgatgcctcattcagcagcctaggcatggggctttttctgtggtcttttgcatctcaggaagataaccaacagtaatcccttgaaaagaaacttaagtacctcggcgtttttattttttttttcttatggaaaaaaatata

SEQ ID NO: 17491 - DNA, 413 bp, Homo sapiens
  misc_feature (1)...(413): n = A,T,C or G
atttctttgtgtttagaaacattcacagtctgcttttctagctatttgaaaattacagcaagtaagattccattcccntccnnnnnnnncgganggcgccggcggccatcactttagaccctccacctacttgcagtgctggtcccaaaggcgataacatctatgaatggagatcatccattctagggcctccaggatccgtgtatgagggtggagtattctttctcgatatcacttttacaccagaatatcccttcaagcctccaaaggttacatttcggacaagaatctattattgtactattaacagccacggtgttatttgcttggacatattgaaagataattgggagccagcactaaccatttctaaaggcctcctttctatctgcacacttcttacagactgtacg

SEQ ID NO: 17492 - DNA, 468 bp, Homo sapiens
  misc_feature (1)...(468): n = A,T,C or G
ggcgaggcgcgttttaaggaaaactgctgtctncnccnnncnnngnnngancacgcgtccggagcacataacgaagtgctttaagcgaaaccttttaactatctttctttgctccaagtgaagtttggacccagcagaaagcattattttgaaaggtgatatacagtggggcacagaaaacaaatgaaaaccctcagtttctcacagattttcaccatgtggcttcatcaatttatgtgctaatacaataaaataaaatgcacttaatgctttaaaattcatctttttatgataaacaatattctctgtatttctctatagcattaataatcaatattaatgccattcattcagtctgttaataagaaataatatcttcaattttcaaaaacataatttgcctatctttttctgatagaagtagacattgtttatatcttcaaaaaagcaaaaggatgtcctagcagg

SEQ ID NO: 17493 - DNA, 406 bp, Homo sapiens
acagaattgagagcccagaaattaatctatgcagagtctgctgatctttaacaaaggaacaaaggcaagtcaatgaaaaaaaaaagtcttttcaaaaatggggctggaataattggacatacatataccaaaaaaaaaaaccaaaaaaaaaaaccccaaccccaacctttatccttttattaaaattaactgaaaatggttccgggcccttatttttaaaacccaaagggaaaacctttttaaaataaacctaaaaaaaaaatttgggttttggaaaaaaattttttgaaaaaccaccaaatttttgtcccttaaaaaaaaaaaaaagggggggccctttaaaaaaaaccttgggggggcccaattttaccgggggtgggaaagaaaaaatttttccctttaaggg

SEQ ID NO: 17494 - DNA, 408 bp, Homo sapiens
ctagtctagatcgcgagcggccaatttatgtccttcttatttatttctaggatgaggggaggataacatttttgctttcttatgtgactctctttgaaaatgtgcagtaagaaattcctcaaaaataaaatttttacccttcagaggaaaaaaaaaaaaaaaaaagggggggccgttttaaaggatccttgggggggcccaagttaacccgggcatgcaaggaaatatttttttccttatagggggccgaataataacctacctgggaatttttgggaaggacccttatttttggggggggacatattgggacaacctccctacagaaatttaaggctttagggaaaaaaaaaaattttaaagggaaaaaggggtaaaacaacctgcatatccttgttgtttgagaaa

SEQ ID NO: 17495 - DNA, 495 bp, Homo sapiens
  misc_feature (1)...(495): n = A,T,C or G
ggtataaggaancancgcnncggccgtgnnaaattgaganactcganagtcatncganaccgcnccggaannnacgggncgagccacgcgtccgcaaaacacatgttcattttaccacaaagtgtccatttttatatacatttaaggattattttttgaatgtcgagttcatgttagtgatttcagaaatatagtcaaaatatatagtcaaatatatcttgacaggcatcttgagatttggcttttcattttactatatttatgactgaaaatggttttgtgttttctttatgttgcttatatattttttaccttagtgtttacactggtaaggcttgttagtccatttttgtagtttttttaaagtaagcttttagatctatttgtgttttaatgtttcccagtttgggttttgttttgttttggaagaatctgctttcattattaaattataaaatgtaaatgctctaaagtaggaatttttaaagagtaaat

SEQ ID NO: 17496 - DNA, 490 bp, Homo sapiens
  misc_feature (1)...(490): n = A,T,C or G
ggttacgccaacggcggnggggttttntaccgaaaaccctgantcatgcnacggaacnnccgggncgacccacgcgtccgcccacgcgtncgnggacgcgtgggcggacgcgtggttttaaacacgagagtttaccacttgcctaatagtgcaatagaaaaatgctttgagatagctaactgcccataaaacaaactcaaattgcttataaagtttcttcccatgttcccatttgatgaaaagtcttacatcacatataactgggaagcagggggccctcctcaattttcagacattttgaaaggatgacagttctgtttgttagatgagtaaacctctatattcataagttctaaaatccttcattatgagggattcaaagtatttataaaaacactgccctctaaaaatttcctcagatctgaagtatggtcttggtcctgaatatacagtgctatcctatgtttaaaagggtgatccagacatgaag

SEQ ID NO: 17497 - DNA, 499 bp, Homo sapiens
  misc_feature (1)...(499): n = A,T,C or G
gagggccgngnnnnnatttagcctagntagcgtcccgaannctanngngctgcgngaanngcnccngaagtncngggacgacccacgcgtgcggnttctaggaatctgnaatattcttaatttcttttgcccattgntcatgggcatggtgtctaatttccatgtttttgtatagcttttaatgtgcctgtcattattattactttttaaaaaaaatatagaccaggtctccctattttgcccaggctggtctcaaactcctgggctcaagggatcctcccaccttggcgtctcaaagtgttggggttacaggtgtgagctaccacacctagccagttgtttttattatcgatatctagttttattccattgtggccagatcagatacttgataggattttgctttttttaaaaaaatgttttaagacttctgttgtgtcctaacatgaggtcagtcttggagaatcttctgtgtgctgatgagaagaatgtacattct

SEQ ID NO: 17498 - DNA, 397 bp, Homo sapiens
agatatatctaatgctaaatgacgagttagtgggtgcagcgcaccagcatggcacatgtatacatatgtaactaaccttcacattgtgcacatgtaccctaaaacttaaagtataataataataaataaaaaaagaatatatcatagagatatattctatctctatgaatttgattgttctaggtgcctcatataaggtaaatcattctatttttttgtgactactttattttattatgttttcaaggttcatccatgttgtagtatgcatcagaatttcgttccttcctaaggcagaataatattctattgtatgtataaactacatttgatttgatttttattttaagaatctcatgggtggataaaaataaagagatctatctggtcaaatgta

SEQ ID NO: 17499 - DNA, 416 bp, Homo sapiens
ttcctgcctccttgatatttgtatttattctttttttctctagagtagaggtataattgtgtgatatttcagaaatacagataaatgattcaaaaagtcacagttaaggagaatcatgtttctttgatcatgaataactgattagtaagtcttgcctatattttcctgatagcatatgacaaatgtttctaaggtaacaagatgagaacagataaagattgtgtggtgttttggatttggagagaaatattttaatttttaaatgcagttacaaattataatgtattcatatttgtactttctgttaaaatgcatgattgcagaattgtttagattttgtgtttattcttgatgaaaagctttgttgttcttgtttttaagtttgcactcaaatcttaagaaataaatccacccat

SEQ ID NO: 17500 - DNA, 407 bp, Homo sapiens
aaatctttctttgctttgcccatcttttcctcgcattttttcaccatctttccctcaatctccaggagccagtgcgagactttggctccgattaagcgacggtccgagactcggggtgcgcgaggaggatcgacagagtggtgatggagagcaccccttcatggggactgaaccgagtacacctacaatgcaggaatctgcaggaattcttatggggcctgagccctggggtattggaccgattgtatgggcaccctgccacatgtctggctgtcttcagggagctcccattcttggctaagaactgggtgatgcggatgctctttctggagcagcctttgccacaggctgctgtagctctgtgggtaaagaaggaattcagcaaggctcacgaggaaagtacaggg

SEQ ID NO: 17501 - DNA, 404 bp, Homo sapiens
actggttctaaaggcccaggcgggcgatctagacgatgcctggccgggcccactcttaagcctgcatgcgacgggatgcctctctccctacagagggtgagactgtctgctggcttggggccctcgacaatgaaccgtactgtggcggcgcgccttccgtggactagcctcttactgagatagaaagctctcccgtcttgccaagagtgttctatgtactttgtgatggactagctgcatatgcttggtggttggaaaatagcatttcctagtggttaaaattactttttaagcgcttaactgtgtattttttagattgaagatttcaaatgaaattttgatttgactgaaatatttaatatgtgatgagttgatattaaaatacagaagattactatttttat

SEQ ID NO: 17502 - DNA, 402 bp, Homo sapiens
gcccgggtggttgctgccgaaatgggcaagttcatgaaacctgggaaggtggagcgtggcctggctggacgctactccgtacgcttagctgtcatagtgaagaacattgatgatggcacctcatagcgcccctacagtcatgctctggtggctggaattgaccgctacccccgcaaagagacagctgccatgggcaagaataagatcgccaagagatcaaagataagatcttttgtgaaagtgtataactacaatcacctaatgcccacaaggtactgtgtggatatccccttggacaaaactgtcgacaatagggatgtcttcagagatcctgctcttaaacgcaaggcccgacgggaggccatggtcatggttgaagagagatacaagacaggcgagaac

SEQ ID NO: 17503 - DNA, 408 bp, Homo sapiens
cccacgcgtccggccaaagatgtctgcgcccaggtaatttgagcaaaggccacagtgaactccggcgtggctgaggaaggaggaggcacccacaggctgctgggaggagagcataaggctcaaaatggaaaatcataaatccaataataaggaaaacataacaattgttgatatatccagaaaaattaaccagcttccagaagcagaaaggaatctacttgaaaatggatcggtttatgttggattaaatgctgctctttgtggcctcatagcaaacagtctttttcgacgcatcttgaatgtgacaaaggctcgcatagctgctggcttaccaatggcagggataccttttcttacaacagacttaacttacagatgttttgtaagttttcctttgaatacaggtga

SEQ ID NO: 17504 - DNA, 412 bp, Homo sapiens
cggacgcgtgggttcaaatttgccaatgtaaccatacttcaccattacagtgagaaaccagatgatgattttggagcacagcctaataagaacctggggtttgcctcttctttcggcattgttgatgctcttgagagcatcaggcaggacattcatgtgcaccattgtggcggcacgaaaagatggcggaaagagccaaacgacaaccctttcattgctcttgacaccgtgggtcaggaatttgggtaaagctcatttggatggctcatttttgttcctcgtggtgttgggaaggcttgacgagagctagagatccaggaaggcctcactcatgtgttggacacctcagttctctttggacttttttctatccaagtggtttctggagagggctatatttgggagtgatctg

SEQ ID NO: 17505 - DNA, 413 bp, Homo sapiens
  misc_feature (1)...(413): n = A,T,C or G
attttgatgaaaaagcttaactgaagtactataaagaaatagaagacaggcaaaagctaaagagaaagaaagaagaaaatagcactgaagaacaggctcttgaagatcaaaatgcaaagagagctattacctatcaaattgctaaaaataggggacttactcctaggagaaagaagattgatcgcaatcccagagtgaaacacagagagaagttcagaagagccaaaattagaagaagaggccaggttcgtgaagttcgtaaagaagagcaacgttatagtggtgaattatctggcattcgtgcaggagttaaaaagagcattaagcttaaatgaagtttttgcttagcataaggtttttggcagttttggatcaataaatttttacttttaactaaagtcattgtattaatn

SEQ ID NO: 17506 - DNA, 423 bp, Homo sapiens
caagcaacaaaggcccatctggtaaaaagaaagggaggtcaaagaaagcccatgtactagctgcctctgtagagcaagccactcagaatttcctggaaaagggtgaacagatcgctaaggagagtcaagatctcaaagaagagttggtggctgctgtagaggatgtgcgcaaacaaggtaggcagaatgatattattgttcaaggcggatctatactgatgtgcaaacaatggctttttctttagaatcaatggatatttactcaaagaagaagtcttacgtttttttcctttctatctacacttgtcatttttaatgtttgctggatgtggtacatagagatattttcattgttgcagtatggtacagctacaaacactccatgtctgctgttacgtcaaatcttcaagatgtttcttcttg

SEQ ID NO: 17507 - DNA, 501 bp, Homo sapiens
  misc_feature (1)...(501): n = A,T,C or G
aggggagttttattgagncccctcgactgatacgcactcggaaccgccccggaatttctcgggtagacccacgcgtccgcccacgcgtncgcatcttcacacatcaagagcttgactaaaacgttatttcagggttttagcctgattcttgcttgaaggtttctcacttagagtgcggnggaaagtaccttcttctccccttatcccagtgacacagaaaatgttccccaaagaaatgtctttctggaaggctttcaaccctggccttttatagacgcctgtgaatgagtgataactagtacaggcaggtctaatttaggatcaccccctttgcaagtctagctccatgatttagaatgttttgttctccaactttgggcctccggagacaacagaaaataattttagtgaacatcctttggcttacctaaaaatgtttcaataattcagaggttcagaaaatttaactatcagccttatcagccttgtgaacccctagag

SEQ ID NO: 17508 - DNA, 490 bp, Homo sapiens
tgggggtttttttgagcccctctaataacgcctgcgaaccgcccggaattcggtcgacccacgcgtccgcgccgcgcgccgtcatcatggactccagccgtgtgctttctatcaagctggccagggggaccaaggtcctgggcaggaccggttctcatggacagtgcacgcaggtgcgcgtggaattcatggacgacacgagccgatccatcatccgcaatgtaaaaggccccgtgcgcgagggcgacgagctcacccttttggagtcagagcgagaagcccggaggttgcgctgagcttggctgctcgctgggtcttggatgtcggcttcgaccacttggccgatgggaatggtctgtcacaatctgctccttttttttgtccgccacacgtaactgagatgctcctttaaataaagccgttgtgtttcaagttaaaaaaaaaaaaaaatggccggccctttaagagtatccccttagggccccacctt

SEQ ID NO: 17509 - DNA, 475 bp, Homo sapiens
  misc_feature (1)...(475): n = A,T,C or G
nggggnattgatcgccctgtcggaccgtcgaggaccttccgggtcgacccacgcgtccgcccacgcgtccgatcttttaagtggagcttttaatccttttatgttcaaaattaatatttatatgtgaggtttattcctgtcatgaaattgttacctagttgctttgtagtctcaatggtgtgattgttttatcagacctgtgagttaatactttcatgtgtttttatggtggcaaatatcaacctttggtttccacatttagaattttcttgagcatttcttgtagagtcccgttgttacaaatccccttagcatttgcttgtcttgcaaagactttatttctccctcaattatgaagcttagtttagcagaatacaaaattcatggttaacagttttttcctttagaagtctaaaagcaaaaccccaatctcttctggtttgaaagtttctcctgagaagcctgctgttagtcc

SEQ ID NO: 17510 - DNA, 423 bp, Homo sapiens
cggacgcgtggtccgaggtctgttccacgcccgcccgctctggccaccacagagaagaagagggagcaccaggggcggcgggagaaggctgtgcacaggctgggggtacagcaggccgcgttgcgggccgcccggctccggcaccaggagctgttccggctgcgcgggatcaaggcccacgtggccctgaagctggcggagctggcgcgtgggcggaggcggtggcaggcgcggcgggaggctgaggctgacaagccccgaaggctgggacggttcatgtaccatgcacctgacatcgacgtgcagctgagctcggagctgacagactcgctcaggaccctgaagcccgagggcaacatccttcgagaccggttcatgagctttcagaggaggaatatgatcgagcctcgagagagagccaag

SEQ ID NO: 17511 - DNA, 473 bp, Homo sapiens
  misc_feature (1)...(473): n = A,T,C or G
gggagtaccccgccggtttacaatgaagcctgcgnctgacaccatcngannncnacccagcgnncgccacgcgtgcggaggggtttttttatgttttgactttcagtctcttcagatgatcaaaaacagncttgggatttagtaatggatcatattcataagaagtaactaacatctaagcattttactatttcattatagggataatctaatattaagttgatttattttgctttaatagaatgtttggaatggttttggaaaaaattattattcctgaaattcagaaggtatctggaaatgtagagaaaaagatctgtgcggttggcataaccaaattactaacagaatgtcccccaatgatggacactgagtataccaaactgtggtaagtacttcattttaatatttttggaagttacagcttccttcccatatgactgcaaaattaacaaagcttattctcttggggg

SEQ ID NO: 17512 - DNA, 471 bp, Homo sapiens
  misc_feature (1)...(471): n = A,T,C or G
cggttgctaccgaaccctcgnacttacntgctngnananncnccgnaanttcngggncgacccacgcgtgcggctggataatttatgaagaaaagttgtttaattggctcatggttctgcaggctataggggcatatctccgggatctgcttctggtgaacacctcaggaagcttacaatcatagtgaaaggcaaagaggagtaggtgttttacatggcaagagcaaagagagagcgggagatgccacacacttttaaacaaccagatctcacgagaactcataattgtgaggatagcaccaagctattcatgagggatccacctccatgacccaaatacctcccacaggcctcacctccaacactggggattacatttcagcataaggtttggaggtgacaaacatccaaacaatatccctatctctcatttcttttctgaacttcgagctcttatatctaactgcctct

SEQ ID NO: 17513 - DNA, 414 bp, Homo sapiens
tttgggaccatgctggaagagcgcgtgcagagcctcgaggagcgcctagcaacattggctggggagctaagccatgacagcgcctctccgggcaggtcagctcggccccttgtacagacagagctggctgtgctagagcaacggttggtctcactggagacttcgtgcaccccgagcaccacctcagccatcctggacagcctcgtggcagaggtgaaggcctggcagagccggagcgaggccctcctacgccaggtggccagccacgcagcactgctccagcagctcaatggcactgtggccgaggtccagggacagctggcagaagggacgggcagctcacttcaaggcgagatcactctgctcaaggtcaatctgaactcagtgagcaagtcgctcacaggcctcagtgac

SEQ ID NO: 17514 - DNA, 414 bp, Homo sapiens
  misc_feature (1)...(414): n = A,T,C or G
agaagcgagatgacgaagggaacgtcatcgtttggaaagcgtcgcaataagacgcacacgttgtgccgccgctgtggctctaaggcctaccaccttcagaagtcgacctgtggcaaatgtggctaccctgccaagcgcaagagaaagtataactggagtgccaaggctaaaagacgaaataccaccggaactggtcgaatgaggcacctaaaaattgtataccgcagattcaggcatggattccgtgaaggaacaacacctaaacccaagagggcagctgttgcagcatccagttcatcttaagaatgtcaacgattagtcatgcaataaatgttctggttttaaaaannnnnnncnnnnncaaaaaataaaaaaaaaaaanacaccaattcccacctcttcccttcttgcccg

SEQ ID NO: 17515 - DNA, 498 bp, Homo sapiens
  misc_feature (1)...(498): n = A,T,C or G
aggcgggttttnctgagagccttgattttgagcnccgttagtaccggccccacccactcgtgcggaagtaccagcaggaggttttcaacctagtcacagagcagcacctaccccttcctcctttccacacctgcaaactcttttacttgggctgaatatttagtgtaattacatctcagctttgagggctcctgtggcaaattcccggattaaaaggttccctggttgtgaaaatacatgagataaatcatgaaggccactatcatcctccttctgcttgcacaagtttcctgggctggaccgtttcaacagagaggcttatttgactttatgctagaagatgaagcttctgggataggcccagaagttcctgatgaacgcgacttcgagccctccctatgcccagtgtgccccttccgctgtcaatgccatcttcgagtgggccaagggtctgatttgtgtctggaacaaatgccaaaaggatcttcccccctgact

SEQ ID NO: 17516 - DNA, 483 bp, Homo sapiens
  misc_feature (1)...(483): n = A,T,C or G
agggtttgctgaagcctggctgatgcccgtgcagaacggcccgacccattcgtgcgagcaaagctcacctgcgcgggctggggggcctggcctcctgaccttcgccgccctgccctccgccgctccgcctgagctccccggtttgcagaatggaggagggaagttgaaggagccacctcctctgtctacccacccgtccccttcacgcccttgacactaaggagtggggggccctggactgccccttcctcccccatcgcccgcccccagaacccctgatgctggttaggaaccgctcaccccaacatgtgtcttaaggcaggacgacttggaaaaaaaggcggcggacagttggccagagggatggagactggtggggacgccccccgcttccttgtcccccgtttacacactggacaccatcacctctttggactgncaaaccctgtgggtcccgggagcgaaggaagacacgatgcttca

SEQ ID NO: 17517 - DNA, 415 bp, Homo sapiens
cacttctatgaatactagtatattgctcacacctcatattctccctactatgcctagaaggaataatactatgggtgttcattatagccactctcataaccctcaacacccactccctcttaatcaacatagtacctattgccatactagacttagccgccggccaagcagcggtgggcctagccctactagtctcaaaaaaaaaaaaaaaagggcccccccttaaaaagccccctttgggggcccaaatttccccggccaaccaaagaaaaaagtttccccctaaaagaaagccaattaaaactcggcggggaactttttgaaagaaacctttccttggggggggggaataatgggaaaacccccccccaaaattaaaacttccttgggaaaattaaaacttttaacgggggag

SEQ ID NO: 17518 - DNA, 411 bp, Homo sapiens
  misc_feature (1)...(411): n = A,T,C or G
tttcaatgtgatggtgacgaggactgcaaggatgggagtgatgaggagaactgcagcgtcattcagacttcatgtcaagaaggagaccaaagatgcctctacaatccctgccttgattcatgtggtggtagctctctctgtgacccgaacaacagtctgaataactgtagtcaatgtgaaccaattacattggaactctgcatgaatttgccctacaacagtacaagttatccaaattattttggccacaggactcaaaaggaagcatccatcagctgggagtcttctcttttccctgcacttgttcaaaccaactgttataaatacctcatgttcttttcttgcaccattttggtaccaaaatgtgatgtgaatacaggcgagcatatccctccttgcagggcattgtgn

SEQ ID NO: 17519 - DNA, 390 bp, Homo sapiens
cccacgcgtccgcggacgcgtggggatccagcatatgggagtattactatatagaactatatgaaaactaactctttaaacagtaaagggttatggctttttcattttccaggtcaggaagtcaagaatttttcttctttaaaaagggaggtactaagaaggttccctttcctcataaacccctaggggttaatatgtttttatttaacatgcttttattttatattttattttattttattttattttagcttgttatgttatgttatgttatgttatgtcttatgttatgttatgttatgttatgttatggtatgttatgttatgttatgttatgttatttgagacagggtctcattctgccatccagactggagtgcagcgtgatct

SEQ ID NO: 17520 - DNA, 395 bp, Homo sapiens
  misc_feature (1)...(395): n = A,T,C or G
aaggacggggagcctcttgtccaggtggtggaagatgcccggtgctgccagtcagggtcacagaaccagaaccatcaatgccacttctggatgtacaccctaaagaaaccctcgtgcagacccatcaggggacatgtttggatgtcaccattcacacgtgtgttggttaggggtagtgtgagtgtctgtccccagaaggatggatgagtaaaagtgttagatctcttcccagaaccaaggtgacaattagaagaaaagatgaaaggtacacagctagcaatacagatgtgtctggaaactacagccctgagtgaaaaaggaagaatgggatgcggaacacagtacccctaggtacactttacaagagtcctacagataagaagtacagattaaan

SEQ ID NO: 17521 - DNA, 399 bp, Homo sapiens
acaagggcagcgacccaggctgacccacctcctccgtctcccggctctgcggaacctcactcagtgcggatcccgggcgcgctcgcacacctcacccgcgtcggcttgaagaaatccggaaagtgggtttgccattcttttttttcatcttcagataaaccagatccagtcggttagcctaaatccgcactgcgcgcaaggaagaaaccctgacgcccatcggggtgtgcacttcggcgtcctcttttgtaaaggggaatgatcacacctgccttttcggatgtcatgagaatttaatgggctctcccagaaaggtgcctggtagcggcaggcatgtcggtacatggtagttattaattatcattactgtacaaattcccagactggaaaaaagacatg

SEQ ID NO: 17522 - DNA, 392 bp, Homo sapiens
cagccctaaccgctactggctgtgtgctgccacaggccccagcatcaagatctgggatttagagggaaagatcattgtagatgaactgaagcaagaagttatcagtaccagcagcaaggcagaaccaccccagtgcacctccctggcctggtctgctgatggccagactctgtttgctggctacacggacaacctggtgcgagtgtggcaggtgaccattggcacacgctagaagtttatggcagagctttacaaataaaaaaaaaactggcttttctgacaaaaaaaaaaaaaagggggggcctttttaaagttcccttggggggcccaatttttccggggggtggaaaggtaaaatttttttctttttggggggggtttttaaagcctgg

SEQ ID NO: 17523 - DNA, 397 bp, Homo sapiens
ctcccaaatagttgggactagaggtgtgggccaccatacctaatttttttgtattttttgtagagagagggtttcgtcatgttgcccaggctggtctcaactcctgggctcaagtgatcccaaagtgctggggttataggcgagagccaccacaccctgcctcattagatttttaaagggatccatgacaccaaaattattaagatcagtgaattagatacttttgttcgggatgactcctcttggctttaagcagctttttatcaaagttttgctatcatcctatataaattacctttaggctaaaactagttacctaatcattttagctatgatttgttgactagccattaaacagtataaggtatttcatatggatttgcatatatgttaaagt

SEQ ID NO: 17524 - DNA, 404 bp, Homo sapiens
cagtggtgcaatcatggctcactgcagccttgaattcctgggctcaactgatcctcccacccaagtcttctgagttgctaggatgacaagtgtgtgccaccacacccagtcaggctgaagatgtaatgcttcttatgaagcaaaaatgctaaattctgataatcttatatctcatatttatgtaattctttaattgcataaattacatactttacatatattacataaattacataaaatacatactttactggattaccaccttcgatcttcatatccactgtatgaaataaatagtgatattactctagtccttattttttagatagaaaaactgagaatcagggaagttaaattacttgtccaataacaaggataagtagaagatttcaaagattttactt

SEQ ID NO: 17525 - DNA, 475 bp, Homo sapiens
  misc_feature (1)...(475): n = A,T,C or G
ggggccgggggnnttaaaactgatcgcgtgctgtaccctgatggcctttccgggtcgacccacgcgtccgcggacgcgtggggtgggggagtaatgtgagatgagggtgggaaagtagccttcaataccactttgagtttagatttcatatttttagacttggagataggtgaggctggagaccctagtctgagcttgccaggagagaggtgggtcagtaaacagcacctgaagaccaggcacacctaacactataggaagtgcctgttctgtgggaggtgactttgaagtgtggctgatctcccatcggctcccatggcctccatgactttttcaaaannnnnnannnnnnnnnnaaaaaaaaaaanggggggggggcctttttaaaatttccttggggggccccaattttcgggggggtgggaaagtatatttttttttcttttgggggggttattaaagggccgggggggtc

SEQ ID NO: 17526 - DNA, 387 bp, Homo sapiens
tgaatgttatctagtgagcttcatgaaattctccttggtccctaaacccttaaaattcataaggagagctgattctacttagcctttgccctgcttgctactatgtgttatgagctgactgtgtttacttttcatctgaagagcagtgggactttggccacacagactctgggtgcttcttctctaacttgagccatcactctgtgacccactgtcacactccagtgagctgatatctgcatttcgggcaaatcttgctcccataactgacattctccttgacctcccattactgcccctgcccatctgtttgcctttccaccctccctgggtctcgagctccattctaccctctctcatgctagtccctaaagggccctcactcta

SEQ ID NO: 17527 - DNA, 390 bp, Homo sapiens
ctaatcccttaaaaacaagaggtctggcactagtagcacaacctaaggtggcattacagatctttgagcgagccacagcaacttttctgccaagtcagcttagtttagacttcagtgaatcaggctattgctatcctaatgtatgtctctatgagtgtatttagccacacatctgcccttggttgactttctgactcattgcttgcttgcttgtttccttgctttggaaaactattgaagattgctaaaaaataccactgcaaagtgatggaaaagggtggagaacaggggagtagccaggctggatggctcaaatataaatgaatgaggaattctttatgaagtatcagtcagattttatgattaagtgatgtaatataggaattatgt

SEQ ID NO: 17528 - DNA, 402 bp, Homo sapiens
gcaaagtctgagttgaggcagttatgactatattggatgttcgatgctgtgaaacagatcaccacaaaattcatgggcttaacacagcaaatatggatgatctcacatgtttctgagggttgggaactcaggagcagctttgctgggtggtcctggctcagggtgtcagccagagccgtgtcacctgaaggcttgactgggcttggaggatctgcctccaaggtggtgctgtcacctgactgtgggcatggacgtctccatggggctgcttgtgtgtcctcgtgacattcaagagcgagtggtccaagagagctggtgaggcaagtgacactggcttttatccctagactcaggagctttgtgctgttcctccacattctgtttggtacgaaagccacctgg

SEQ ID NO: 17529 - DNA, 405 bp, Homo sapiens
gcgcccacgcgtccgggcatctgagtttctcctacaaactttttccaggttaccccaaccgaagggtctatcagagtttctaaacatgtcagacttctagaggtagacttcttttacattcaagctgggaatccagctgccggttggctacattttcatcctaggtaacttttgtaaacacaaaattgtataataagaaaatgtataccttttgtgaggggatgcatatagatgttagtggtttgtctataacagcatgcaggacagtgatgggtagtgaaaaggaggccaaagattcatcaccttaatcttagaacaactgcagggatgtcacaatacccaagtaaatcttatgactggagaaaataagggatgggattaaaagagacattacccaagagttgg

SEQ ID NO: 17530 - DNA, 412 bp, Homo sapiens
aactccaaaaggaagctattaacatttactgaaatagtctgtggttctctatacgacatggacaaaacatacaagctgttgtctaagaaatgcaggtcatggtgcacattaatcaacaggttcttctccccccgcccccacccccgcgcctttttttatgccctcttattaagcacaggtcaaaaaatcttaaggaacaaatactaggaaaactggctaaacatccttccctgaaagcactggaccatcttttaaagggcacatctagcaatgggattggaagttctagagccacactctttctttagtgccaaagttactgagcggctactctccttacctactttactaaaatggcatacagattggcattgacctgttgaagaaattttaccactaagaaatcttttgg

SEQ ID NO: 17531 - DNA, 405 bp, Homo sapiens
  misc_feature (1)...(405): n = A,T,C or G
aacccctcttgccactgccttctaccttgtttgaaacctgaatcctaataaagaattaataactcccagagaaaaaaaagaaaaaaaaaaaaaaaaaaaaaaaaaaaaaaaaaaaaaaaaaaaaaaagggggggggggttttaaagggaattggggggggggaaaaaataaggggggggggggaaattatttttttttttttagggggggggttaaaaaaaagcggggggggggtttggggggggggaattttttggggggggggggaaaatggggggaaaaccccaaaagaaaaaaaaggcgggggggggaaaaaaaaatttttggggggaagggggggaaaaatatgggtgatgtgggggggggggagaaattnnnnnnngncnnctctntccggttattaag

SEQ ID NO: 17532 - DNA, 411 bp, Homo sapiens
  misc_feature (1)...(411): n = A,T,C or G
ataattaggaaagaaaaaatggcgtcagtgtaagtacatcacatttctcatcgcgttatttttctcatacactaaattaccttacataggtctggttctgatttactgtctgttaaatgcactcactgctaggataaaaatacccaaaaacatttgaatttctcataagaaatattggaattagaagaaaactattttaaaataacagttgttttaatattgttgggtacaccaactctttaaagttaatgttaatttttcccacaattttgtagagatagctttttcagcttttgttagtattttaaagtgtagcatacatgtcttaaggaaagaacaaggtgacatttcagtagcattttacttaattttgtgcttgtgtagattttgttacaaatccttcttcttcan

SEQ ID NO: 17533 - DNA, 504 bp, Homo sapiens
  misc_feature (1)...(504): n = A,T,C or G
agaggcgcgaggncgggttttctttgatcgctctcggtaccgttcgagaaccctcgggtcgacccacgcgtccgcacttctaggaatactagtatatcgctcacacctcatatcctccctactatgcctagaaggaataatactatcgctgttcattatagccactctcataaccctcaacacccactccctcttagccaatattgtgcctattgccatactagtctttgccgcctgcgaagcagcggtgggcctagccctactagtctcaaaaaaaaaaaaaaaaggggcgcccgttttaaagaacccttggggggcccaaagtttacgcgggcaggcaaggaaatatttttttccttatagggagccgaataaaaacctacctgggaatcttggaaaagaacccttccttggggggggggacatattgggccaacctccctacaaaaattaaggctttagggaaaaaaaaaacttttaaagggaatagggggtaaacctacc

SEQ ID NO: 17534 - DNA, 476 bp, Homo sapiens
  misc_feature (1)...(476): n = A,T,C or G
gcaagcgaccaggcccgaccgggatgagtcccnactgaagcatcggaaccgccccgaaaccggggcgacccagcgtccgcagatggcagngatactgaggattttggctctgatcactgtgaagactgcctttcanaagcgagctgggagcctgttgataagaaagagactgaggtgactcgctgggttccagaccatatggcatcacactgctataactgtgactgtgaattctggttggccaaacgaagacaccattgcagaaattgtgggaatgtattttgtgctggatgctgccacctgaagctgcccattcctgatcagcaactctatgacccagttctcgtctgtaactcatgttacgaacacattcaagtctctcgtgccagggaactcatgagccaacagctgaagaaacccattgctacagcttccagttgaatgccggggagaaacctgtccacttttagcaggtt

SEQ ID NO: 17535 - DNA, 485 bp, Homo sapiens
  misc_feature (1)...(485): n = A,T,C or G
gcangagggcccggggggnattttaccttgagcgcagattgagccccnctcgaaancccgggncgacccacgcgtccgaaaatacatgagataaatcatgaaggccactatcatcctccttctgcttgcacaagtttcctgggctggaccgtttcaacagagaggcttatttgactttatgctagaagatgaggcttctgggataggcccagaagttcctgatgaccgcgacttcgagccctccctaggcccagtgtgccccttccgctgtcaatgccatcttcgagtggtccagtgttctgatttggaaaaatttggtctggaaattccaagagcattacacttagaagataaatctccagaaagattgaagctcagtggatgggccaaaggggaatgaactcagtttacatggcagctcattcacattcctccttttgaaggggtgtattttcttactggagatgaaaagaaaaaaaaatctt

SEQ ID NO: 17536 - DNA, 395 bp, Homo sapiens
agcagctttccactgtgtctccatggcaaaggcgaagatgggcgggggcagagtgtaggattggcaggtttgaatgtcttgggcagtggaagagtcaaatcgaggagatggactctgagttggttagtgtgcaaaggtgcactcccaagggacccctttgctatctctaagaattggcctgccctgggaagggcagtctctccccagtcagtgaggtccccaagatgtgaaaacattatacattataaaaaagcatgattaatataagctcattctagcatttcaggttacagcttctagaagaggtttgtagtctcaaatgagtaggtttttcctctagagaggggcgggcctggaccttcaagcaccccttggtgtgtttaggagctcaggag

SEQ ID NO: 17537 - DNA, 469 bp, Homo sapiens
  misc_feature (1)...(469): n = A,T,C or G
cggcggatcnaattggatgcagattgacagtcatcgaaaaccccggncgacccacgcgtncgatttggagaaataggtggtcacacccaaatcaattatgttcagtggtatgaatgtgggactacaattcctggaaaatggtagatgctgcacaaagttaccttctgtttcatcattgcaaacaaaaatcattgaaaatactatgccgcattcatttaaagctattttgtttactatgtataaaagtctacaatctaattaatagcaatactagatgtttattattagaaaagattgctgagagtatttatcaggttttacaaagtcattttaagaaagcaagatactgatgttaacagaataacatttttggggaagctggctccctattcatggtattttaagagatcatttgtatattatttatcacactgttgtaatgatgttttgagatacttttataacaaan

SEQ ID NO: 17538 - DNA, 400 bp, Homo sapiens
  misc_feature (1)...(400): n = A,T,C or G
aaactatggtgtaatttaaactctgggcagcctctgaatgaaatgctactttctttagaaatataatagctgccttagacattatgaggtatacaactagtatttaagataccatttaatatgccccgtaaatgtcttcagtgttcttcagggtagttgggatctcaaaagatttggttcagatccaaacaaatacacattctgtgttttagctcagtgttttctaaaaaaagaaactgccacacagcaaaaaattgtttactttgttggacaaaccaaatcagttctcaaaaaatgaccggtgcttataaaaagttataaatatcgagtagctctaaaacaaaccacctgaccaagagggaagtgagcttgtgcttagtatttacattggatgccagtn

SEQ ID NO: 17539 - DNA, 407 bp, Homo sapiens
acttcggctggtgtggaggttctgggggagccctcgctaaccagcattgctgtgtccacctggacagcagtggcctcgcatccctttgcgggctggggaggcccaggagcggccgggcaccatcttcctttcatgtgtagagtgcttacaaaccccatcaactgatctagtgagtcagactgtggaatctcccttcccactagctggaggtggaggagggttattacagaagtcatactgggagagggttcagcttggatgaggctagttagatcatttgcatgtctccagcattttcttctgcactgccattttctctgcagcttattcttgccatgcttaggcgacagaagtttgttaagtaccatccttgtgccctgcctcttattctcagatcgatctggaag

SEQ ID NO: 17540 - DNA, 401 bp, Homo sapiens
ctacagctaccggagtccccactggggcagcacctactccgtgtcagtggtggagaccgactacgaccagtgcgcgctgctgtacagccagggcagcaagggccctggcgaggacttccgcatggccaccctctacagccgaacccagacccccagggctgagttaaaggagaaattcaccgccttctgcaaggcccagggcttcacagaggataccattgtcttcctgccccaaaccgataagtgcatgacggaacaataggactccccagggctgaagctgggatcccggccagccaggtgacccccacgctctggatgtctctgctctgttccttccccgagcccctgccccggctccccgccaaagcaaccctgcccactcaggcttcatcctgcac

SEQ ID NO: 17541 - DNA, 490 bp, Homo sapiens
  misc_feature (1)...(490): n = A,T,C or G
gaaaaggaaccccgggggggnaatcnnaccttgaatgctcgattgagantcactcgaaancccgggncgacccacgcgtccgcccgggagccccaggatacctaccactacctgcccttcagcctgccccaccggaggcctcacttcttctttcccaagtcccgcatcgtccgcagcttgatgcccttctctccgtacgagcccctgaacttccacgccatgttccagcccttccttgagatgatacacgaggctcagcaggccatggacatccacttccatagcccggccttccagcacccgccaacagaattcatacgagaaggcgacgatgaccggactgtgtgccgggagatccgccacaactccacgggctgcctgcggatgaaggaccagtgtgacaagtgccgggagatcttgtctgtggactgttccaccaacaacccctcccaggctaagctgcggcgggagctcgacgaatccctccagg

SEQ ID NO: 17542 - DNA, 479 bp, Homo sapiens
  misc_feature (1)...(479): n = A,T,C or G
ggaagcggcccggggggatcgcattgaatcccgttgacagcatcgaanncncgnncgacccacgcgtccggccgcttgagtgcctgctggtactcccagccctgccatgcctgagccccctgcacacaaggagccaggagtagatcagggcagaccctttagggcacggggacttctggattgtgaaattggctctctgggggccaaggccttctaacgttggtggaagtggctttggcttattgggtcggattctaggccattcattccaacctttagagacatcccagctttccctagcccagagtctgcagcccctccaccatcccacatcctccccctccctttcctcatgaaccccagtcgcgcctctgccttctcaaacccctccaccatcccacaccctcctcctgcccttcctcatgaaccccagncgcgcctctgccttctcatccctgcgcaccacacaggctcgctcg

SEQ ID NO: 17543 - DNA, 421 bp, Homo sapiens
  misc_feature (1)...(421): n = A,T,C or G
tcacctggcaccactggggcactctgctggctacaactcatacgtcctgtggtggcattgggagagttcccccatgatgagggccaagatagaatctgtaccactcagtgctaccatccccacccctacaccacttccacacaggggcctcatggcatggtcagggtcccagctgtgggtgagagcagggcactgtccagctgtccactggggaagtcaagatgtcctaaggcccaggccagggcatctggagtctgaaggaccctagttcctagaggcatctggcagcaagaaggtgaggcatcagggaacgggaatcaggctgggactgatcagaggtgaagggacagagagaggagaggaggaagattgagctgggggcaacagccaagctcacctgggcaggtctctgccacctccn

SEQ ID NO: 17544 - DNA, 414 bp, Homo sapiens
cccacgcgtccggaatattgtgccttgtggctgttttgtccacagctaaaccctgtatagcatgtatgagaagatacacccatttccaggctgctgtgattttggaggcagtctttggcaactcccaaaagaacttggggttgatggaaccttcctatattattgaactcctatgctaaattagcatggcaagatactagcaatcctctttgttttcctacactaatgaattaatttttcctatccttttaaaaaatcagtgccctcatttaaaaatttacgttgtatgtaacaatgattggctttatcataaaatgtgtgctccacaagataaaatagccaatttcctattttcacaatccatatgcttttaaataaacctgaaatttaggactcaatttagatacataatcc

SEQ ID NO: 17545 - DNA, 421 bp, Homo sapiens
actgactctgttattgatcccttctcctgccctttttcagggaatttaaattgggcatgggagatttttttcatacattagaaaaacttttagcgttggtaccacgtatgaagtataaatctggggaagaggatttatttacattttagggtggggaagaaagccaccttgatacatattttttaatttgcaaaataatctatattaaatgaggggttctgatctgtgcttggtgcttacctacctttttatatttaaaaaattaaaaatgaaaattacgtgcttacaagcttaaagcttgatttgatctttgattaaacgccaaaatgtacttaaatgagttacttacaatgccataaaattgcagtttcatgtatgtatataatcatgctcatgtatatttagttacgtataatgcttg

SEQ ID NO: 17546 - DNA, 414 bp, Homo sapiens
gagcagaaggcccttcatctagtggacatccaagaggcaatggccacagctcatgtgactgagatactggcagacatccaatcccacatggataggttgatgactcagatggcccaagccaaggaacaacttgatacctctaatgaatcagctgagccaaaggcagagggcgatgaggaaggacccagtggtgccagtgaagaagaggacacatgaaggcttgctacccccagtggaaaatcatcccctccccttgtgtgtatgtgacagcgtgtatgtaacggcttctgatttctgtgaaagctgctcagcaacaaacgtacttccaccagatgtgtccccagatccacagcaggcacatatctctccaagggatgaccagttttatgcttactgtgtgcttctcatcccctg

SEQ ID NO: 17547 - DNA, 413 bp, Homo sapiens
ctggtgcccctcccaggctccttttcaccctgccccctgggcctgaggcccgctgtgtccaagcctccccctggctcttcagttctctagcccttggctttgctgggtttcctgactgtagccacatctctcccgctccctaagggtaacctagccaatggaagctgccctttgggtaggtgctgggctcctgggagggcccagatgatggggtgaggcatgtctttccagaactttccctggcagggaggggatggcagaaactcagggaggggcttggggcccattgtatctggagagcctggattcctcttggcagtcttaggcccggccacttctgctacctttgcgctgctgtgagcctcaccctgggcccctgggccctgcttctctgctcccctgggtgatgggtg

SEQ ID NO: 17548 - DNA, 407 bp, Homo sapiens
cagctgccgaagtcagttccttgcggagcttgagctgggcgcggattcgccgaggcaccgaggcactcataggaggcgccatgtcagaaccggctggggatgtccgtcagaacccatgcggcagcaaggcctgccgccgcctcttcggcccagtggacagcgagcagctgagccgcgactgtgatgcgctaatggcgggctgcatccaggaggcccgtgagcgatggaacttcgactttgtcaccgagacaccactggagggtgacttcgcctgggagcgtgtgcggtgccttggcctgcccaagctctaccttcccacggggccccggcgaggccgggatgagttgggaggaagcaagcggcctggcacctaacctgctctgctgcaggggacagcagatgaagaa

SEQ ID NO: 17549 - DNA, 413 bp, Homo sapiens
cggcttcgtggaagcgggcgaggagtgttactgcgtttcctggccaggagtgccgcgacctctgctgctttgctcacaactgctcgctgcgcccgggggcccagtgcgcccacggggactgctgcgtgcgctgcctgctgaagccggctggagcgctgtgccgccaggccatgggtgactgtgacctccctgagttttgcacgggcacctcctcccactgtcccccagacgtttacctactggacggctcaccctgtgccaggggcagtggctactgctgggatggcgcatgtcccacgctggagcagcagtgccagcagctctgggggcctggctcccacccagctcccgaggcctgtttccaggtggtgaactctgcgggagatgctcatggaaactgcggccaggacagc

SEQ ID NO: 17550 - DNA, 420 bp, Homo sapiens
ctccaccccaggaccacccaggcccctcccccaggctttggctctactccaggaccacccagactcctcccccaggaccacccaggaccctcccccaggctctggctccaccccagggtcacccaggctcctcccccaggctctggctccaccccaggaccacccaggctcctcccccaggctctggctcctccccaggaccacccaggctcctcccccaggctctggttccaccccagaaccaccaaggctcctcccctagagggtcccaggccaggacgtctccaaatgtggtccagatgtgcaggaccttcatcaagatggagccagccctcagcctcccgccccgaaacccaaagagctggctgggtgacgggggcatataggctgactgctgcctggcaggtggggcgctcgaga

SEQ ID NO: 17551 - DNA, 412 bp, Homo sapiens
  misc_feature (1)...(412): n = A,T,C or G
cctgtgcgcctctgctgagtcgtatgtatttcccttctgacattttttttcagatgttccagtcactttatggcctcaccaacagaaatgagattaaaaagaatttgtcaaactatctttaataatgccccttcactctgcctgtgacgtattagtgacctctgagctagagtcttgtagtcacttcctggtgacccctgaccccgttgatttccgtccgctaggttgctctcacccatggcgtttgctggttatgagatttgcggaacgtgtggtggtggtaaagggcaccaactgttgtcaacctgcatgtgggggtctgaggtctggctctacagcttgtaaaatggaaataataatgcccagaggatgaaattaggccacataggccgcttggcatcatagtaagcan

SEQ ID NO: 17552 - DNA, 419 bp, Homo sapiens
  misc_feature (1)...(419): n = A,T,C or G
ccgaaaccaaataattcaagcactgcttattacaattttactgggtctctattttaccctcctacaagcctcagagtacttcgagtctcccttcaccatttccgacggcatctacggctcaacattttttgtagccacaggcttccacggacttcacgtcattattggctcaactttcctcactatctgcttcatccgccaactaatatttcactttacatccaaacatcactttggcttcgaagccgccgcctgatactggcattttgtagatgtggtttgactatttctgtatgtctccatctattgatgagggtcttannnnaaaaaaaaaaaaaaaaaaaaaanngggggggggccctttaaaaaaacccttgggggggccaaatttaacggggggggggaaggaaaaatttttt

SEQ ID NO: 17553 - DNA, 414 bp, Homo sapiens
ctttgaatctcaatttttggctgacacttatagattttataccagagagagtactgaattcttgcagcagaacccagttactgaatatatgaaaaaggcagaggctcgtctgcttgaggaacaacgaagagttcaggtttaccttcatgaaagcacacaagatgaattagcaaggaaatgtgaacaagtcctcattgaaaaacacttggaaattttccacacagaatttcagaatttattggatgctgacaaaaatgaagatttgggacgcatgtataatcttgtatctagaatccaggatggcctaggagaattgaaaaaactgttggagacacacattcataatcagggtcttgcagccattgaaaagtgtggagaagctgctttaaatgaccccaaaatgtatgtacagag

SEQ ID NO: 17554 - DNA, 414 bp, Homo sapiens
aagaaagggtagtggcagtgaacaagattgtgaagatgaggagggtggtgagagaaagaagaaaaagaggagaagacatccaaagggagaagaaggatctgatgatgatgaaacagaaaatggccccaaaccaaaaaaacgacgtccaccaaaagcagagaagaaaaaggctcccaagccagaacgtctgcctccatcaatgaagggaaaaataaaatccaaagccataatttcatcaagtgatgactcttcggatgaggataaacttaaaattgctgatgaaggacatcccaggaacagcaacagcaacagtgactcagacgaggacgaacaacgaaagaaatgtgcctcatcagagagtgattccgatgagaaccagaacaagtctggcagcgaggccggcagtccccggag

SEQ ID NO: 17555 - DNA, 411 bp, Homo sapiens
  misc_feature (1)...(411): n = A,T,C or G
agactcgggtggccgaggggcttcataccagctgtatagcgacaagccgctggcagccgcggatctcaccgccgctcagggtttttagaacttcagccataaaaatgggcagaattttccttgatcatatcggtggtacccgtctgttttcttgtgcaaactgtgatacgatcctgaccaaccgctcagaactcatctccactcgtttcacaggcgccactggcagagcatttctttttaacaaggtagttaacctgcagtacagtgaagttcaagatcgggtcatgctcactggccgccacatggttcgagatgtgagctgcaaaaactgcaatagcaaactgggatggatctatgagtttgccactgaagacagccagcgatataaggaaggccgcgtgatcctggacn

SEQ ID NO: 17556 - DNA, 415 bp, Homo sapiens
ggaggagtcccggctgggctgagcgcagggagctgcttgtcagtgccagagcccaggccccaaagccctgctggagaggaggcagactgaggcagcaggccccgccagcaggcgaagcagggagatgtcagactgctacacggagctggagaaggcagtcattgtcctggaggaaaacttctacaaatatgtgtctaagtacagcctggtcaagaacaagatcagcaagagcagcttccgcgagatgctccagaaagagctgaaccacatgctgtcggacacagggaaccggaaggctgcggataagctcatccagaacctggatgccaatcatgatgggcgcatcagcttcgatgagtactggaccttgataggcggcatcaccggccccatcgccaaactcatccatgagcag

SEQ ID NO: 17557 - DNA, 413 bp, Homo sapiens
cggacgcgtgggcgggaatggctgctgttctgcagttcgtggagcggctgtccaatcgagtcgtgcgtgtgttggtctgtaacccgggtcccatgaccctccaaggcaccaacacctacctagtggggaccggccccaggagaatcctcattgacactggagaaccagcaattccagaatacatcagctgtttaaagcaggctctaactgaatttaacacagcaatccaggaaattgtactgactcactgtgaccgagatcattctggaggcataggagatatttgtaaaagcatcaataatgacactacctattgcattaaaaaactcccacggaatcctcagagagaagaaattataggaaatggagagcaacaatatgtttatctgaaagatggagatgtgattaagact

SEQ ID NO: 17558 - DNA, 401 bp, Homo sapiens
atttttggtatttatttatgaaatatttgaacattttttcaataattcctttttacttctaggaagtctcggaagaccatcttaaattattatatgtttggacaattagcaacaagtcagatagttagaatcgaagtttttcaaatccattgcttagctaactttttcattctgtcacttggcttcgatttttatattttcctattatatgaaatgtatcttttggttgtttgatttttctttctttctttgtaaatagttctgagttctgtcaaatgccgtgaaagtatttgctataataaagaaaattcttgtgactttaaaaaaaaaaaaaaaaaaaaaaaaaaaaaaggggggggggccttttaaaagatccccgggggggcccaatttttcccggg

SEQ ID NO: 17559 - DNA, 392 bp, Homo sapiens
aaattgaggtcaccgtggaatgtcctaataacaacaatcctcaaacctcagctgttcgaaccccgacccagactaacggttctaacgttcccttcaagccacgagggagagagttttcctttgaggcctggaatgccaaaatcacggacctaaaacagaaagttgaaaatctcttcaatgagaaatgtggggaagctcttggccttaaacaagttgtgaaggtgccgttcgcgttatttgagtctttcccggaagacttttatgtggaaggcttacctgagggtgtgccattccgaagaccatcgacttttggcattccgaggctggagaagatactcagaaacaaagccaaaattaagttcatcattaaaaagcccgaaatgtttgagacg

SEQ ID NO: 17560 - DNA, 497 bp, Homo sapiens
  misc_feature (1)...(497): n = A,T,C or G
gagggccgngngagttccgctgagagcatcgtannnctganagcatctgaaccgcccggaatcccggtcgacccacgcgtccggccgcctgttgtgctgctcctgttgggcgcgggggtctttgtgaagggtccgagggtgaggggcgagattcttggaaaaggaaggtcatggcaaaaccccaaaagatgccgcgtcagttcgagccacgcatccaataccagcagcctgtgggatttattattttgaagtaaaaattgtcagtagaggaagagatggttacatgggaattggtctttctgctcaaggtgtgaacatgaatagactaccaggttgggataagcattcatatggttaccatggggatgatggacattcgttttgttcttctggaactggacaaccttatggaccaactttcactactggtgatggcattggctgctggttaatcttatcaacaatacctgcttttacaccaagaatggacatatgtt

SEQ ID NO: 17561 - DNA, 418 bp, Homo sapiens
  misc_feature (1)...(418): n = A,T,C or G
cctccaccccacttcttttagcaaggtctgaaagtttcatagggagacctatagggtaattgtttagttataggcagtgttaaattaggcagattttgacatatttatctttttaccccatccattctaccaaaacctgtgtatttcttgagtttttagtttgagaagctggaaagagagagaagggcctcacagtgatgggttcaggacgggtcaaaggcaaaggcctttgtgatgtgagcaaaggcaaccaaaacttagcctcactccacttttctaaagatggaaattcttttttgggccttggactgcttctagggtagcattttgtaggtcactcttctcctttgtactattttgtttctgcctgatgtcccttgggtctccatcctactgcctggctttcttggccctcatn

SEQ ID NO: 17562 - DNA, 476 bp, Homo sapiens
  misc_feature (1)...(476): n = A,T,C or G
gtagtggcccgggcggtttcccctgaaagctgcgaactgacatcatccgangnncnancacgcgncggctncctcgctctcccacaccactggcaccaggccccttacacccgctctgctgcaggagaatggctactgatcacacactgtggatgggactggccctgctgggggtgctgggcgacctgcaggcagcaccggaggcccaggtctccgtgcagcccaacttccagcaggacaagttcctggggcgctggttcagcgcgggcctcgcctccaactcgagctggctccgggagaagaaggcggcgttgtccatgtgcaagtctgtggtggcccctgccacggatggtggcctcaacctgacctccaccttcctcaggaaaaaccagtgtgagacccgaaccatgctgctgcagcccgcggggtccctcggctcctacagctaccggagtccccactggggcagcacctaa

SEQ ID NO: 17563 - DNA, 413 bp, Homo sapiens
cttaaccaacacaccaagtataagagcactcctatgcttctgcagatggagggaagaacagctcttgttttataggctctggagttaatacctggataatgtgagatctggaaagataactcatgagcttagtccctgtggttcttatcactctctagagaagagttctttaaggaccaaggactatctttgctctaggatatccattttggccctttaatctgcaatgataggctagcattatttctcttagaatttgtcttcagttggtatgcctccctctgcctttctgataggaatgtaatgataaatgatgactgcactcatttttaaaagttaaccagtttttgttcaattgaaaaagtaatgtacatggaaaaaatttcatgtttacaggatgttcagtgaaaagc

SEQ ID NO: 17564 - DNA, 418 bp, Homo sapiens
  misc_feature (1)...(418): n = A,T,C or G
ctaatgtgtgctaatgtttttcttccatgctttcagtcatattcaactattttatcctccacagttgcttaacttggtgttggaggagggtttaagcattaagataggaagcaggaaatttgattgctctaaatttagaaattatatccctaaaaattaaaacatgaatactgggtggtaatgataattgaggcaaatgtatttattttggtgacattttgcatatatgaagattttctgaaataggaccttcaagatcctagggggttttgtttggtttttaattgtgaggaataaaaaatcttctgcccacactggcattttaaggtgactgaggtcaaacgttgtttccttaggttgaaatagcaccaaaacattcttcacgcaggggcttgggatatggctgctggcaacacan

SEQ ID NO: 17565 - DNA, 491 bp, Homo sapiens
  misc_feature (1)...(491): n = A,T,C or G
aggagggattccccaggaccctgctgaccactgagaccntcggacgaccccgcgtncgaaagcagtggacaagaaggctgctggagctggcaaggtcaccaagtctgcccagatagctcagaaggctaaatgaatattatccctaagacctgccaccccactcttaatcagtggtggaagaacggtctcagaactgtttgcttcacttggccatttaagtttagtagtaaaagactggttaatgataacaatgcatcgtaaaaccttcagaaggaaaggagaatgttttgtggaccactttggttttcttttttgcgtgtggcagctttaagttattagtttttaaaatcagtactttttaatggaaacaacttgaccaaaaatttgtcacagaattttgagacccattaaaaaagttaaatgagaaaaaaaaaaaaaaaagggcgcccgttttaaagaatccttgggggggccaaactttacccgggctg

SEQ ID NO: 17566 - DNA, 417 bp, Homo sapiens
cggacgcgtgggcggacgcgtggggatgaaagacaggatttgattttaaatgcagacgttttcaaatcaaacggcactaatagaattaattctggattttttttttttttttttaaaaaaggattttgctctgttgcccaagatgaagggcaggggcttgatcttggctcattgcagcctcaacctggtgggctcaggggatccttccacgccaccaggcccggataattttttgcattttttggaagaaacgaaatttctccatgttgcccgggctgtttctaaactggaatgtatttttgaaagccacagtttaaatttggccaaaagggggcaaagcttaacataatttagggcttattttgtataaaaaccttttatacttgaggagatataagaaaaccacggcttatggag

SEQ ID NO: 17567 - DNA, 482 bp, Homo sapiens
  misc_feature (1)...(482): n = A,T,C or G
nttgaagccctaggaaccggcccggggatttacggtcgacccacccgtccgatattttcaaggatgtttttctttatttttgttaatattataaagtctgtatggcatgactactactttaaggggaagataagatttctgtctactaagtgatgctgtgataccttaagcactaaagcagagctagtaatgctttttgagtttcatgttggtttattttcacagattggggtaacgtgcactgtaagacgtatgtaacatgatgttaactttgtgtggtctaaagtgtttagctgtcaagccggatgcctaagtagaccaaatcttgttattgaagtgttctgagctgtatcttgatgtttagaaaagtattcgctacatcttgtaggatctactttttgaacttttcattccctgtagttgacaattctgcatgtactagtcctctagaaataggttaaactgaagcaacttgatggaag

SEQ ID NO: 17568 - DNA, 482 bp, Homo sapiens
  misc_feature (1)...(482): n = A,T,C or G
tgagagaaggggagattaataccgtaataccgttgatacgcctcgnaaaccccggtcgacccacgcgtncggtttgtattgaataaaaacatcttcatgtgggctggggtagaaactgttgtctgctctggtgtgatctgagagggcgtcttcactgctttatctcatgatgcttgcttgtaaaacttgattttactttttcatttctcaaataggaatactacctttgacttcaataaacttcactgcaggatagaccagttaaaaaaaaaaaaaaggggcgccctttttaaaggacccttggggggccccaagcttccccggccttgcaacgtattaattttctccttatggggggcctaattaaaccctccctgggcaccttgggaaagaacccttccttctggggggtgccatattggaccaacccccctacagacattaaaggctttagggtaaaattaacctttttacgggttttg

SEQ ID NO: 17569 - DNA, 414 bp, Homo sapiens
  misc_feature (1)...(414): n = A,T,C or G
atcatggtgaagtctttacttttagtataaccattacccaaataatgtgcattgtaccctttaggtaatttctcatccctgactcccttcttcccctctcacccttccaagtttccatagtctattattccgcactctgtgtccgtgtgtacacattgtttagctcctacttatacgtgagaacatgcagtatttgactttgctgcttctgagttgtttcacttaagataatagctaccagctccatccatgttgcttcaaaagataagattttattcttttttatggctgcgtagaatggaatacatcgtaatgggctctgagaaacactttgaaatgagctacaaagtaatgaataaattatcatggttaagaaatggccaataaaatgatttaactttgcttcaaaaaaan

SEQ ID NO: 17570 - DNA, 408 bp, Homo sapiens
attttttttcctgtattactgctaaatatattactatattaatgcacttttgtatatataactgtcttctgtacattctgtacttactacagtgtatataaagcctgttttccctgaagctgtgagggaataacaatagttgtatcataagtcgtttctattttgagttccttcttgtacttgaaagtagttcagtagtgaaatctaaatgagtgtgtatggttgtaattaaaactggcaatgtggcagagctgtcttttgaaactgaataccagaatgaaaagtgttgttttggttaagaactcttataatatattatttcttttgatgtaccctgagttgttacacagcccactcactgctgcttactactttatacttctgagtcagctcctttcatgctctatc

SEQ ID NO: 17571 - DNA, 400 bp, Homo sapiens
aaaaagattgagatctgtggttataatagttaacaccattagttacagaaaataatatttctagctgagtagtctaagataattaagtgatattatttgatatattctcatacagatctacaggtcttccccctaccttatttttacttttttttttaactcaccactatactaacaaggattcccttctttttaaaacaatgtatctacatttcttagaaacatttttaaatgcaacaaattttataaatgtatgtgttgactccagtgaaattttatattataaaatttttgttggcaataagttgttgttttgaaattgatagtatttcttcattaaataatgtaattaccaggggctggatctttacaccagctcaaaaagccatgaggtacctga

SEQ ID NO: 17572 - DNA, 409 bp, Homo sapiens
cggacgcgtgggctcgcgggccgccgggtgctggtcaccggggcaggcaaaggtatagggcgcggcacggtccaggcgctgcacgcgacgggcgcgcgggtggtggctgtgagccggactcaggcggatcttgacagccttgtccgcgagtgcccggggatagaacccgtgtgcgtggacctgggtgactgggaggccaccgagcgggcgctgggcagcgtgggccccgtggacctgctggtgaacaacgccgctgtcgccctgctgcagcccttcctggaggtcaccaaggaggcctttgacagatcctttgaggtgaacctgcgtgcggtcatccaggtgtcgcagattgtggccaggggcttaatagcccggggagtcccaggggccatcgtgaatgtctccagcg

SEQ ID NO: 17573 - DNA, 404 bp, Homo sapiens
  misc_feature (1)...(404): n = A,T,C or G
aagaaaggacattcaaactgaaaagggaaaaattaaattgtccctgtttgcagatgatatgattttatatgtagaaaaccttaaagagtccacctaaaatctgttagaaataataaattcagtaaagtttcaagatataaaatcaaaatgtaaaaatcagtagtattcttctacctcaacagcaaactatctgaaaaagaaatcaataaagcaatcccatttatatctattttaaagaccctaaatataaagatagtacagagggtgcaagatttctacaatgaaaactacaaaatactgatgaaagcaattgaagaggatattaataaatgaaaagttatcctatgttcattggttggaataataatttttaaaaatgctcataccacctacagtgatctgcn

SEQ ID NO: 17574 - DNA, 485 bp, Homo sapiens
  misc_feature (1)...(485): n = A,T,C or G
cgattaagacacnagggcggggcgtttaccttgggactggggacctgcnacggacnnccgggncgacccacgcgtccgaaactcagtcttagcagattcagtgtggaagcagctatcaaaaaggccataaggattttgtccccaaatttcacatgagctaccttgcttcaaactactgagatgaagggggcaagattatttgtccttctttctagtttatggagtgggggcattgggcttaacaacagtaagcattcttggactatacctgaggatgggaactctcagaagactatgccttctgcttcagttcctccaaataaaatacaaagtttgcaaatactgccaaccactcgggtcatgtcggcggagatagctacaactccagaggcaagaacttctgaagacagtcttcttaaatcaacactgcctccctcagaaacaagtgcacctgctgagggtgtgagaaatcaaactctcacatc

SEQ ID NO: 17575 - DNA, 401 bp, Homo sapiens
atttaagacatctcatgtctttgaatgtaatcacatgatttgtatttaatatttacatgacctaattattttttcacgtcagtttttctagattggcaatagcctgttgcaaagtgcctaaacctttgagaaaaattactatgagcaaggtccatgatttagttttcaatataaagggaattccattctatactgtaaaatccaaaaatgctagttgccctcagcttttgagttgacttccagaaagttgagatcttttgaccattttttctcatgtcatataaaatgtgccacatggtagttgtcaagctgtggtagtcatgtacacttttttcttttttttaactttctaaaaggaaaagttcaaagtcctttccacagttagtcttcgcttcttttgg

SEQ ID NO: 17576 - DNA, 483 bp, Homo sapiens
  misc_feature (1)...(483): n = A,T,C or G
cgaattaggacagggcgggcggttttccttgaaactgnggtcctgcnangnacnnnnggnnngacccacgcgtccgggaggcggagactgcagtgagccgagattgcgccattgcaccccagcctgggcaacaagaataaaactggctcaggaaaaaaatttttttttaaatcacgatctcaaaggatcaagaatagctaaaacaggccgtgtgctgtggctcacgtctgtaatcccagcacttgaggaggctgaggtgggctgatcacctcaggagtttgagaccagcctggccaacatggcggaatcctgtctctactaaaaatataaaaaattagccaggtgtggtggaggcacctgtagtcccacctactcgggaggctgaggcaggagaattgcttgagccagggaggtggaggctacagtgagccaagatctccagtctgagcaacaagagtgaaactccatctcaaaaagaaaaga

SEQ ID NO: 17577 - DNA, 401 bp, Homo sapiens
  misc_feature (1)...(401): n = A,T,C or G
cggacgcgtgggttgggcagngagccgggaccagattgaccggttcagtaaagagaacggtttcacaggttggacagaaacatcagtcaaggagaacaaaaatattaatgaggctatgagagtcctcattgaaaagatgatgagaaattccacagaagatatcatgtctttgtccacccaaggggactacatcaatctacaaaccaagtcctccagctggtcctgctgctagtagtgtttggcttattttccatcccagttctgggaggtcttttaagtctcttccctttggttgcccacctgaccattttattaagtacatttgaattgtctcctgactactgtccagtaaggaggcccattgtcacttagaaaagacacctggaacccatgtgcatttt

SEQ ID NO: 17578 - DNA, 401 bp, Homo sapiens
attgtcacaacactgaacctctggctagaggacatattcacagtgaacgtaactgtaacatatatgaaaggcttctgggacttgaaatcaaatgtttgggaatggtgcccttggaggcaacctcccattttagatgtttaaaggaccctatatgtggcattcctttctttaaactataggtaattaaggcagctgaaaagtaaattgccttctagacactgaaggcaaatctcctttgtccatttacctggaaaccagaatgattttgacatacaggagagctgcagttgtgaaagcaccatcatcatagaggatgatgtaattaaaaaatggtcagtgtgcaaagaaaagaactgcttgcatttctttatttctgtctcataattgtcaaaaaccagaat

SEQ ID NO: 17579 - DNA, 401 bp, Homo sapiens
ttttttaataaaattttctctacgttctatatgcaattgttatatatctatttgaatagctgaaggactagaaatacttttttaagagataacttcaggaaaccattatattttactatctgcatgctgttaactgtggtacactgtgaaatatgttgattacaaacccattcattacatagtataaggaattcacagtatattgactatatagtgtctaatgatcttgggcagatactgtcaaacttacaatatctatatagatgtaggtctttttaaatttacctagtcattcttctatcatgtatattgatgctgaaagaggaactggtcagctcctctggacaacaaattcttagtctataatattaggagacatcttctgttttgcaaatgtctgt

SEQ ID NO: 17580 - DNA, 478 bp, Homo sapiens
  misc_feature (1)...(478): n = A,T,C or G
gaacatgcgcgcnggtttttaagaaatcctgtgacntgcnannancnnnngggnngacccacgcgtccggcgggagacagaatatggtccctgccgtagagaaatgtaagacacactgaatcacctgaagttcctcagtgtgctgagtcccaggggtgtacacattcccaactgtgacaagaagggattttataagaaaaagcagtgtcgcccttccaaaggcaggaagcggggcttctgctggtgtgtggataagtatgggcagcctctcccaggctacaccaccaaggggaaggaggacgtgcactgctacagcatgcagagcaagtagacgcctgccgcaaggttaatgtggagctcaaatatgccttattttgcacaaaagactgccaaggacatgaccagcagctggctacagcctcgatttatatttctgtttgtggngaactgattttttttaaaccaaagcttagaaagg

SEQ ID NO: 17581 - DNA, 400 bp, Homo sapiens
tgctatgtcgccctggattttgagaatgagatggccacagctgcctcttcctcctccctggagaagagctatgaactgcctgatggccaagtcatcactattggcaatgagcgcttccgctgtcctgagacactcttccagccctccttcattggtatggaatctgctggcatccatgaaacaacttacaatagcatcatgaagtgtgacattgatatccgcaaggacctgtatgccaacaatgtcttatctggaggcaccactatgtaccctggtattgctgatcgtatgcagaaggaaatcactgctctggctcctagcaccatgaagattaagattattgctccccctgagcgtaaatactctgtctggattgggggctccatcctggcctctctgt

SEQ ID NO: 17582 - DNA, 465 bp, Homo sapiens
  misc_feature (1)...(465): n = A,T,C or G
ttgaccactgatcgcgctcggtaccgactgagaatctgcggaaacccacgcgatcgcggacgcgtgggccagctttctatgagaaaggactgaaggattgcgcaccctgcacaagtacagattgaccaggaaaagacaagtgtcttctgtgtgtcacagggaaagccaggagtggccttctctgcaggccagcaagcctgcagcagcaggtgcccccacgtcaggtgctgactgtccgctgtccgctcctgtagaaggtagggagcacaatacctagggactaagggatgttcgccggttgtggtttgttttttttttttttcctgggtaaaaaaaccaaattggcaaaattaaatctacaagtggttttatgcttggaaaaccccttccctcctaaaaatcttaaaaaactggaaaggctcgccaaaggcccccatggaatttttgaccaaaagtaaggggaan

SEQ ID NO: 17583 - DNA, 463 bp, Homo sapiens
  misc_feature (1)...(463): n = A,T,C or G
ctaacactgacaccctcggtaccggactgaaagtcctgggacgacccacgcgtncgtgtgatagtacatgatttttaaacttatagcaaactttctgatatatatgccctaacgcaaattcttgagaactcaaaaaactttctaaattaacctcatatattttttctttttctttcttttttttttttttggaaacaaagtctccttttgccccccaggtgggagggcaggggttgggccccttttgggttaaggggagccttggcctcgggggggcgggaaattttctggcctcaccctcccaaggggtgggaatggagggcttgcccccccaccccggggggattttttgggttttttaaaaaaaaacggggtttctccacgtggggggggggggtctttataaaaaaaaaaaaaaaggggggggcggtttaagggatcccttggggggcccaagtttacc

SEQ ID NO: 17584 - DNA, 409 bp, Homo sapiens
  misc_feature (1)...(409): n = A,T,C or G
ctccagactggcttccagtttcactctcagtattctaagatcttagcccttcccagaacagaacgcttgcatctacctcctcttcctccatctttggctcttttgatgcacaatatccatccgttttgatttcatctttatgtcccctttatctccaacttctagaactcccagtttatacctgtgtcactctcaattttttccagtaaagtacttgatgtagtcctgtgccttgaggctgagtgattgacatctttttggcacattacactttgcagagtaagggatcattgaggcttctggtgacatcattcaagggagtgaagacaatcagaactttgagagttcagagttccaggaatattgttattgttatcttcctctgtttctacaaaagattgtaaaaccn

SEQ ID NO: 17585 - DNA, 408 bp, Homo sapiens
agaaagtgatggaaaaagaaactgaaaagcgcatttctgaaatcgaagatgctgcattcctggcccgagagaaagcgaaagcagatgctgaatattatgctgcacacaaatatgccacctcaaacaagcacaagttgaccccggaatatctggagctcaaaaagtaccaggccgttgcttctaacagtaagatctattttggcagcaacatccctaacatgttcgtggactcctcatgtgctttgaaatattcagatattaggactggaagagaaagctcactcccctctaaggaggctcttgaaccctctggagagaacgtcatccaaaacaaagagagcacaggttgatgcaagaggtggaaatgttctccatatcaagatgtggcccaaggggttaagtgggaaa

SEQ ID NO: 17586 - DNA, 421 bp, Homo sapiens
  misc_feature (1)...(421): n = A,T,C or G
aataaaattcactgcaggatagaccagttaaaaaatatacaaaataaaaaaaaggggggggcccctttaaaggaccccgtggggggcccaaactgacccggggaagaaaaggaaaaactttttcccttatgggggggcgtaaaaaacccccccggggaattttggaaaaaaacctctttttgggggggggcctttcttgggccaaccccccaaccaaatttaaccctttggggggaaaaaaaaatttttaagggtaatagggggaaaaaaacccgcatactccttttgtttggaaaagtggacnncnnccctatacatgaaatataaaccacaaacctttactgattctaaatttcctagattgctattatttggctgtaagctgagcattccacagaaagtggtaattatctcttctctt

SEQ ID NO: 17587 - DNA, 474 bp, Homo sapiens
  misc_feature (1)...(474): n = A,T,C or G
agaaggccnnnnnatttaaatgaagcatggctgntgntctcgnaacngcncgaanangcgncggactgttttgcctaaagtgtctatagatctttaactttaaagtcttatctcactttctttagtattgcagaaaaacttaagagtttttctgtttgcttttgtgtaccaggtggtctagaggaataattaaacattttagaactattaacaggtaaagtactgaaatgggtacaacttaaggaaaacaagaatgttgtcttctaactctgacattataccttgtttgtacccgccagcgggaacttcattgcaggccgtgtgtcaccctgaccacgtctatctctgggggtcgcacgttgcgggcagagcgcaaggcatacaccagaaaacgctgtcctgtggtatggtctcttccaacttcatgtaccagcgtaaagattaaagtggaaaacttcagactttggcttcatt

SEQ ID NO: 17588 - DNA, 490 bp, Homo sapiens
  misc_feature (1)...(490): n = A,T,C or G
cgggatggcccnnagtgggttttcccttgaaattntcgactgatggtctgcggaacngcncngaaaatnngggngganccacgcggncggaaactagtcagataagtggagtttctttggaccgataaccattgacaagtacgattgtggaagttttgggacccaggcctaccgaggagcccagaagccctctccattggaactgatacgtgcccaggccaaccgaatggctgaagatccagcagccttgaagccccccaagatggacatcccagtgatggaaggaaagaaacagccaccacgggcccataacctcaaaccccgtgacctgaatgtgctcacacccactggcttctagagccctctttccagggattctggtaaaggtggtttcttgcatcccactccccttttaccttggctttgacataggaaaggtatatttaaaaacttaatcagctgggcgtggtggctcacgcctgtaatccca

SEQ ID NO: 17589 - DNA, 477 bp, Homo sapiens
  misc_feature (1)...(477): n = A,T,C or G
gtaagtgnnnnnnngattccactgaggccctcccctgatgtctcgcaanngcncgaacatgcgtgcggggttcgaggccagtcagggcaacctggagggaccctgtctccataaaaaaatgcaaattggcctgaaatggtgatgcacgcctgtcgacccagttactcgggaggctgaggtaggatcacttgggccagggaggttgaggctgcagtgagctgtaataataccactgcactccagcctgggcgacagactgacatcccatctccaaaaaaaaagtagtaaagttttcaagtttgatgttataaggcaagaacaacaatttctgtcagatgctcctatggccatttaacagggacatttgtattactaaataagacttccaactgagctccatagaaagcaaggctacctctctgctttaatatggtaatattaccaccaacttattaaatgttccttccttgaataggg

SEQ ID NO: 17590 - DNA, 398 bp, Homo sapiens
  misc_feature (1)...(398): n = A,T,C or G
tttccaggggtcactctggcttcgactccgtcgctctcaattcgtcaccaggaggaagacggagctggctgcccagcccaaaggcccatgaggggatgcagttatgggctctgtcgccgtggattgttattttgtgtcagtaagtaatccataaagtgccaacatgggaaagaaacggacaaagggaaaaactgttccaatcgatgattcctctgaaactttagaacctgtgtgcagacacattagaaaaggattggaacaaggtaatttgaaaaaggctttagtgaatgtggaatggaatatctgccaagactgtaagactgacaataaagtgaaagataaagctgaagaagaaacagaagaaaagccttcagtttggctgtgtcttanatgtggcc

SEQ ID NO: 17591 - DNA, 398 bp, Homo sapiens
ctcattgagacacgcaggcctctgagagggtcttgttctagatttcatattgcacttggagggtaacagctgctttttcacgcatggtactcttgatgtttttcactctgtcaaggattttgttggctatcaatgaatgtgtctaaaacttagtgcttccaggtagttatagtactccaaatcaaggaccaacttaaacgttaatttttgtgcaaaaacaaacctgaaaaatatgcttcggaaactgtgcatagttctaattgtaagtcagattgtatattcaaattgtaattaagagatttaaatattagaacggtatgtaaggtagtataattaccactattttaaataattcagttaaacactgctgcaatatttcagtgttgtgcttgaaaata

SEQ ID NO: 17592 - DNA, 400 bp, Homo sapiens
gcgaaagtgagaacggaagatgagattaaagtgtgtatttttgtatatagatatactttaatttctgtatattgggtatatagaaagggaaatgagttgttatggctagtattgatcatcagtgtgggggttatagatcctaaatctagatttgtagttcctgtctttgaatatctttggttagggagagaagggagaggagaataattagtgcattcatgaagtacagttgggagactttaatatgatactaaaagaattccaactcttctaagaagagagtagggtctgggaaacattggcttaaatggtagagaacctttgtgctctttgagaataaatgaacaaaattgcattatcacagggaaatgaggttggagactgaaaaataacaatattg

SEQ ID NO: 17593 - DNA, 406 bp, Homo sapiens
tcgcggacgcgtgggctggtggggactgttttatggccttatgcttttggaccgaagtgggctgggccaaggctataatttgatcatccggaggcgatttcagcagatggatgtgctatagggactgaatgtccttgtgacactttcaggaaagattaatatgctacgacattactatctttcatggttaagaaacagaatactacatattgacccacaagtagaaaagatacacggctggatcactgttggggacttggaaggctgcatacattataaccttgttagatatgaaacgatcaaacccttggtgattgccataaagaatgctgcggaaatatatgcttgggctcctaaaccgcatcataaattcatggcattaaagcctttgccgatatgcagacag

SEQ ID NO: 17594 - DNA, 492 bp, Homo sapiens
aagcggcttttcaatgacgcatcgtaccgactgatatcctcgggacgacccacgcgtccgggaaattggtaaatggacaaaagctagctagtaaaaaggacgacccagcaacatgctttaaccccattgtatgtgtgtggaaagagcatagtttaacatcttgagaaatttgggacataaagttttcatggtagacagttcatgcagtatatgaattgacataatggaaataatctgattttatttttacaactaacatccattccccttcatttaaacaccttttgtgttttacttcagtgaggagattggagtctgaatggatctgttttccaagagattctgagaaatttttgtattcagcagttggaaagctctctattctagttgataaaacttccctttttttgatgtagatgcagatattctatacagttctgtttcttttactaggactgtaaacttttgtgataaaattcaaataagattttt

SEQ ID NO: 17595 - DNA, 474 bp, Homo sapiens
  misc_feature (1)...(474): n = A,T,C or G
nttgatcccctcggaccgcccgttgatcgcgtcgacccacgcgtgcgctgacagcaacgatctgaaagtcattatcatctcggctgttgggcctgtgttttcttctgtgcatgacttaaaggagctgacagaggagcaaggccgtgattaccatgccgaagtatttcagacctgttccaaggtggccttggagatgctctttactggtgagcccatttctgcccaggaggccctgctccacgggctgcttagcaaggtggtgccagaggcggagctgcaggaggagaccatgcggattgctaggaagatcgcgtcactgagccgtccggtggtgtccctgggcaaagccaccttctacaagcagctgccccaggacctggggacggcttactacctcacctcccaggccatggtggacaacctggccctgcgggacgggcaggagggcatcacaggcttcctccagaagagaag

SEQ ID NO: 17596 - DNA, 400 bp, Homo sapiens
caaggtgctcggtccttccgaggaagctaatgctgcgttggggtgaggccctcacttcatccggcgactagcaccgcgtccggcagcgccagccctacactcgcccgcgccatggcctctgtctccgagctcgcctgcatctactcggccctcattctgcacgacgatgaggtgacagtcacggaggataagatcaatgccctcattaaagcagccggtgtaaatgttgagcctttttggcctggcttgtttgcaaaggccctggccaacgtcaacattgggagcctcatctgcaatgtaggggccggtggacctgctccagcagctggtgctgcaccagcaggaggtcctgccccctccactgctgctgctccagctgaggagaagaaagtggaagcaa

SEQ ID NO: 17597 - DNA, 473 bp, Homo sapiens
ctgaagccgtagaccgcccggtgatcccgttcacccacgcgtccggagaaaataccatgcataaattgtttactgaatttttatatctgagtgttcaaaatattttcaagcctgagtattggctattggtatagatttttagaaatcaataattgattatttatttgcacttattacaatgcctgaaaaagtgcaccacatggatgttaagtagaaattcaagaaagtaagatgtcttcagcaactcagtaaaaccttacgccaccttttggtttgtaaaaggttttttatacatttcaaacaggttgcacaaaagttaaaataatggggtcttttataaatccaaagtactgtgaaaacattttacatattttttaaatcttctgactaatgctaaaacgtaatctaattaaatttcatacagttactgcagtaagcattaggaagtgaatatgatatacaaaatagtttat

SEQ ID NO: 17598 - DNA, 410 bp, Homo sapiens
aaaaatcagagtctatttcagaaagtttgtagaaatattctgattttgaaaagtatcaggaatataaatatttggtaattctgtgtaacaagagagacatggaaaaggaaaaaaatccactatatcatgggctctgcagaacatatcaaaataggatttcttaaatttttcaacccccagaccatactgactcaacatggagtctcactggccaagaaaattgcctttaaaactcgaaaataaggccaggtgtggtgactcacacttgtaatcccagcaatttgggagactgagacaggaggattgcctgaggccaggagtttgacaccagcctgggcaacatagtgagaccttgtctctacaaaaaataaaataaaataaaaaccaaattagccagacatggtggcatg

SEQ ID NO: 17599 - DNA, 483 bp, Homo sapiens
  misc_feature (1)...(483): n = A,T,C or G
aggcgtaaaatgagacctgcgactgacnccgtatgaangggccgacccacgcgtccgctcagcctcccaaagtgctgggattacacgcgtgagccaccacacccagcctccatctttaaacttttaaatgtgaaatttctatcatgtaccgttagcctaacaagattttctttcctatttctgactggtgcctttcccctttttaggagcaacgaaagctactctcttagttatgttcttgtgatgtgacaaaatgtcaagaagataggagaagagaatattttatttcgttgatgcttttgttcccaagtgtgaccctaaacttaagctttgtaggagttgacattctttcatgtcccttccctttactcatgccgaaactatcaactgggacattttgtgcttttggtttaaaagttaattgatattatactttggttttatctaanaagtaaatgtatttgcctttgacaaaagactgac

SEQ ID NO: 17600 - DNA, 475 bp, Homo sapiens
  misc_feature (1)...(475): n = A,T,C or G
nttgaacccttatgaccggccgtttatcgcgtcgacccacgcgtccgcggacgcgtgggcagttatcatgggctgtaaagtggctgttgcttcccggatcattggtgtggacatcaataaagataaatttgcaagggccaaagagtttggagccactgaatgtattaaccctcaggattttagtaaacccatccaggaagtgctcattgagatgaccgatggaggagtggactattcctttgaatgtattggtaatgtgaaggtcatgagagcagcacttgaggcatgtcacaagggctggggcgtcagcgtcgtggttggagtagctgcttcaggtgaagaaattgccactcgtccattccagctggtaacaggtcgcacatggaaaggcactgcctttggaggatggaagagtgtagaaagtgtcccanagttggtgtctgaatatatgtccaaaaagataaaagttgatgaa

SEQ ID NO: 17601 - DNA, 409 bp, Homo sapiens
  misc_feature (1)...(409): n = A,T,C or G
ggaactctggcatagtgcaggaaaggaacaaccatcctttgagcaagccagttatgatgtgtcacgctatgaaaacattttctacctgttctgggttctggagcagcttcttcaaaaggaaaccgaagaaggcaacacttcaagtataggtcatgatgaccaagaaatcaagaaatttcttcagaagcatgatgaaactattttccaactttctgatgcatttcctttgtttactttttatttatggagagtgggcattcttttgagctcagcacagatagaaactcttagaaaataactccattccttagcagtttaccacgtttgaagcataataaagtagaatatatgaaaatctcatactgaaaagattttcaatagtattttaattagcattntagaattgatg

SEQ ID NO: 17602 - DNA, 409 bp, Homo sapiens
  misc_feature (1)...(409): n = A,T,C or G
agcctcatttcaaggtgtagccaggttcccccgactttcctctgggatataaaaaagggggtaagggggcaaagagagccctctgggcctctcctcccatacacactacactgccccttctccccccatcaaaacgctcagagacgttgtgatgatgcgactgaggattatgcaacgtggtccaaccggagcggccagcatgaccagctgtccaggggctgcctcctgccttttcttttgtaaagacaagacccttgggagttttaattctgttttgtacttgccctgtggggcctccactgcttttctatgggagacactcttaatttaacagatgagaatattttgaaactctgaaaaaaaaaaaaaagggggggccgttttaaaggatccctgggggggcccaagn

SEQ ID NO: 17603 - DNA, 414 bp, Homo sapiens
tattttttaaaaaatttgatttagcattcatattttccatcttattcccaattaaaagtatgcagattatttgcccaaatcttcttcagattcagcatttgttctttgccagtctcattttcatcttcttccatggttccacagaagctttgtttcttgggcaagcagaaaaattaaattgtacctattttgtatatgtgagatgtttaaataaattgtgaaaaaaatgaaataaagcatgtttggttttcccaacgaaaaaaaaaaaaaaaaaaaaaaaaaaaaaaaaaaaaaaaaaaaaagggggggccctttaaaagaacctcttggggggccccattttaggggggggggacaaagaaaattcttttccttaggggggggcctttaaaaaacccctgggggacttttgga

SEQ ID NO: 17604 - DNA, 408 bp, Homo sapiens
gagcgcggaaaaggcggagaaaagggactatgtatagcgggcagaaggcaaagacagaagggagcgagggagggagttcctcggacctggcccctttactatggcagtctggcaggtacctcgccggcccaggacggggctggccaaacctcaccgcttgctcccgggctggcttccagaccatgggcacgcagaggtaggagcctgcccagaagccacacctggccaggcggagaaggaagggactcgggacttccatgctagtgggaacatcacagtggggtgggctacgtcagccgccataatcagagaaagccccctgccccaggcctggcccctccccaggtccataataccctctctctcggctgtctgggtctgaaagccaaggttcccccgacctaatca

SEQ ID NO: 17605 - DNA, 413 bp, Homo sapiens
aggagatggcggagtcgttgaggtctccgcgccgttccctgtacaaactggtgggctcgccgccttggaaagaggctttccggcagagatgcctggagagaatgagaaacagccgggacaggctcctaaacaggtaccgccaggctggaagcagtgggccagggaattctcagaacagctttctagttcaagaggtgatggaagaagagtggaatgctttgcagtcagtggagaattgtccagaagacttggctcagctggaggagctgatagacatggctgtgctggaggaaattcaacaggagctgatcaaccaagagcagtccatcatcagcgagtatgagaagagcttgcagtttgatgaaaagtgtctcagcatcatgctggctgagtgggaggcaaacccactcatt

SEQ ID NO: 17606 - DNA, 409 bp, Homo sapiens
cacgtttcttcatatgacttctgagtattgtagctttacttcagctagaggctcctgagggaaatgttcagaggaggttttatcaggattttaatttaaggtttcaaacaggggaagacaggaaattcaaagcgtgacgggataaaactcatgcctccctttgtccaggcttatcagaagtaatacatctgctctgaatagcatgaatgaatcaatgtgcagctttatcagatggcatcatggataaagatgataatgctgccttttctgtctctcaggctgtttccatggaaacctctagagccaaataaaagctaaccaatcatttagccaaagcttgccttggctcatagactggtatttctttaacgaaaattgtctgtatatatttgactataagagcaaaggc

SEQ ID NO: 17607 - DNA, 408 bp, Homo sapiens
tcatgtgtcacaataaagataatagactgctgtgttgaagaacaaatacagagtttcatttttcttctttaggcaaatttagcgatcaacccagcggccttgctgcccacagcggcttcccagatctctgaagtaaagcctgttttgccagaattggcttttccttcatctgaacacagaaggagccacggtctggaaagtgtgcctgtccttcccgggagtggggaggccggtgtgagttttgatcttccagctcaggcagacaccttacacagtgcaaacaagagccgtgtcaagatgagagggaagcgtagaccgcagacccgtgcagctaggcggctggctgctcaggagtccagcgaggctgaggacatgagcgtccccagaggacccattgcacagtgggct

SEQ ID NO: 17608 - DNA, 443 bp, Homo sapiens
cccacgcgtccgcccacgcgtccgtgaccaagggctgacttctccaggacctattcggggggtggctgccagggggcaaggagaaagcaccgacaatctttgattactgaaagtatttaaatgtttgccaaaaacaacagccaaaacaaccaaactattttctaaataaacctttgtaatctaaaaaaaaaaaaaaaaaaaaaaaaaaaaaagggggggggcccttttaaaaaatccttgggggggccaaattttaccgggggtgggaaattaatattttttcccttttagggggcgtttttaaaacccccctgggattttttggaaaaaaccctttttttgggggggggacatattgggccaacccccctacaaaattttaagcctttagggaaaataaaaatttttaagggggaaaaggggtaaaacaacctcgttatctg

SEQ ID NO: 17609 - DNA, 414 bp, Homo sapiens
aacaaaccaatggaagataaagtaaaggaaaaagctaaagctgaacatagagacaagcttggagaaagagatgacactatcccacctgaatacagacatctcctggatgataatggacaggacaaaccagtgaagccacctacaaagaaatcagaggattcaaagaaacctgcagatgaccaagaccccattgatgctctctcaggagatctggacagctgtccctccactacagaaacctcacagaacacagcaaaggataagtgcaagaaggctgcttccagctccaaagcacctaagaatggaggtaaagcgaaggattcagcaaagacaacagaggaaacttccaagccaaaagatgactaaagaaatacaagctaaggtatctggtatctgcatgtaaaatcttcagct

SEQ ID NO: 17610 - DNA, 408 bp, Homo sapiens
cggacgcgtggggccctgtcttccaggccttactcaaatgtcactttcttggtgatcttaaactcaatcccccaatattttgtctccttgctttatttttctccttagtgctctttaccatctatcatattattacttagcgactattttcccccgtctacccataaatgtctaagcttcccagtaatatatatttttgtctgtattgtttaattgctatcttcccagcacctaaagtagagctaaataaatatgtttaataaataattgtagaaacagtgaagggatagatgaataaatgaatgaatgaatgagtcaataaaaccaagaataaagttattgagacattctgcaagtcaagcctctcaggccttttgtggccttcatcttgataaatggtatttgtgt

SEQ ID NO: 17611 - DNA, 411 bp, Homo sapiens
tgggagggaccaaggttgtaaggatggctaagtcccaccataagagctaaagggtcctgggagatgatggctcatttccacccaaccccaggatttccacagcacacacccacaggcctggacctgggatgaagatgaatgaagaacatggactcatgtggatgtggtttggctcaaatgtccctgcaataaacaaggggtcagtacttagtccctgagtgtggttgaggtttgaggtcctggtcgagcagggcagtactggaccaggtctacgtcagcattcaggttcaatggggacaccagtggcttcaaacttcctgatctaattatgtttttagacacttagaagttattgaggactttaaagagcttttgtttatttgggttaatatttatgacatttgacattgg

SEQ ID NO: 17612 - DNA, 408 bp, Homo sapiens
aagaattttagaagatcttggtgctgctattcctgctggaggaatgaatagatggctgtttcagttaagctattagtaataaaagtgaacattgctactatctgagcctacatacataacttgtgtgatttcaaattaaacttgcattatgtgttaattttcttgcatctaaaaaagcatagaattcctactcacacagctcagcaacaaccattttgatggtaacagttaatttctttcattagttttttaaattcagggttctggatattaaattaaaatggcattcttaaagattttcttcaaaaagcaatcctaaatgaaagtgtgtaaattataagaagctggcgatcttttgatatgctgtttcacaggatcctgacactggagggcagctgtcttgtgcat

SEQ ID NO: 17613 - DNA, 409 bp, Homo sapiens
  misc_feature (1)...(409): n = A,T,C or G
tctcgtaagagatggggttgctgcagtgttggattatgggcagagggagggagccaaggtcactccaataaaacaagctcatggcaaanaaaaaaaaaaaaaaaaaaaaaaaaaaaaaaatgggggggggccctttaaaaaaaaccccgggggggcccaaaattaaccgggatagaaaaaaaaaaatttttttttttaaagggggggaaaaaaaaaccccttgggggtttttggaaaaaaaccttttttttgggggggaaaaatgggggcccacccccccccaaaaaattaaccccctggaggaaaaaaaaaaatttaaaggggaaaagggggaaaaaaacctcttattctcttggttataaaaaatcgggnccccggaccccgaccttggaggcagctgacttggaat

SEQ ID NO: 17614 - DNA, 405 bp, Homo sapiens
ctctttattaataccttttttaagtttctcaagatcttcttttgcctccctcttgatcttaaacgagactgaagtttaagagtctttagccactctgtccccatagggatgcaaatttatgatttcagaagttccagcccccaataagaagcactgtccaatcgtttgcagatgtatcttgtaagccagatttcatgacagataagtccattccactgtcatgtgccatgtttaaagtactaaattaggttactctgtaggcaaaacaagtaagccctggtccagactactctagggcaaaatcccgttgcactgtcccttttgttctgcccatgcattcagttgtagctttcccttttgccagttgacagatagtgacttctttgcaaaacataaccagattag

SEQ ID NO: 17615 - DNA, 419 bp, Homo sapiens
aaggtcccggagagctgagcagtcaagatgtgtgacttcaccgaagaccagaccgcagagttcaaggaggccttccagttgtttgaccgaacaggtgatggcaagatcctgtacagccagtgtggggatgtgatgagggccctgggccagaaccctaccaacgccgaggtgctcaaggtcctggggaaccccaagagtgatgagatgaatgtgaaggtgctggactttgagcactttctgcccatgctgcagacagtggccaagaacaaggaccagggcacctatgaggattatgtcgaaggacttcgggtgtttgacaaggaaggaaatggcaccgtcatgggtgctgaaatccggcatgttcttgtcacactgcgtgagaagatgacagaggaagaagtagagatgctggtggcagg

SEQ ID NO: 17616 - DNA, 404 bp, Homo sapiens
gaagagtcagtgacttgtgtcaactcatccgagattctgagcctgaacctgaggttaggaaatcaaaaggatccatgttctcacaagctatgaagaaatgggtgcaaggaaatactgatgaggcccatgaagagctagcttggaagattgctaaaatgatagtcagtgacgttatgcagcaggctcagtatgatcaaccgttagagaaatctacaaagttatgactcaaaacttgagataaaggaaatctgcttgtgaaaaataacagaacttttttcccttggttggattcttcaacacagccaatgaaaacagcactatatttctgatctgtcactgttgtttccaggagagaatgggagacaatcctagacttccaccataatgcagttacctgtaggcat

SEQ ID NO: 17617 - DNA, 407 bp, Homo sapiens
ttaaaaagcacaaagttgaatccggactattgattagtctcctatcatacatgaatattggctgggcagaatgtgactcagaaactctatttgaggctgttgaatattattttgttgaacctatctcatatagctaacatcagctgctcaaaatctgatgccactttgatatctcatactcaggttaaatcttgaatttttgtacttcattttcttaaatcctaatatttcacagaataaattaaggataatattagtactttacaataatgtttttgtaaatagttcgagaacacaagtaaaatgaatgtatttaaaaagcatatctcgagctgggcatggtgactcacacctgtaatcccagaattttgggaggccaaggtgggcagattgctagaacccagaag

SEQ ID NO: 17618 - DNA, 409 bp, Homo sapiens
tgcaggaaggaggagtgcaaaagagtgttcttattcttctgccccccgcaccgtttgcccacccttcggaagacccagtgctgtgatgagtatgagtgtgcctgcaactgtgtcaactccacagtgagctgtccccttgggtacttggcctcaaccgccaccaatgactgtggctgtaccacaaccacctgccttcccgacaaggtgtgtgtccaccgaagcaccatctaccctgtgggccagttctgggaggagggctgcgatgtgtgcacctgcaccgacatggaggatgccgtgatgggcctccgcgtggcccagtgctcccagaagccctgtgaggacagctgtcggtcgggcttcacttacgttctgcatgaatgcgagtgctgtggaaggtgcctgccatctg

SEQ ID NO: 17619 - DNA, 413 bp, Homo sapiens
ctatggggacaggagccttcaggactgctggcctggcctggcccaccctgctcctccaggtgctgggcagtcactctgctaagagtccctccctgccacgccctggcaggacacaggcacttttccaatgggcaagcccagtggaggcaggatgggagagccccctgggtgctgctggggccttggggcaggagtgaagcagaggtgatggggctgggctgagccagggaggaaggacccagctgcacctaggagacacctttgttcttcaggcctgtgggggaagttccaggtgcctttattttttattcttttctaaggaaaaaaatgataaaaatctcaaagctgatttttcttgttatagaaaaactaatataaaagcattatccctaaaaaaaaaaaaaaaaaaaaaa

SEQ ID NO: 17620 - DNA, 408 bp, Homo sapiens
ggacccgaggcggaggagggcgtcgagctgcattaaggcggcgacggcccacgagcggaggagcagacagcggtggccatcaccagcgtccagcaggcggcgttcggcgaccacaacatccagtaccagttccgcacagagacaaatggaggacaggtgacataccgcgtagtccaggtgactgatggtcagctggacggccagggcgacacagctggcgccgtcagcgtcgtgtccaccgctgccttcgagggggggcagcaggctgtgacccaggtgggtgtggacggggcagcccagcgcccgggccccgccgctgcctctgtgcccccaggtcctgcagcgcccttcccgctggctgtgatccaaaatcccttcagcaatggtggcagtccggcggccgaggct

SEQ ID NO: 17621 - DNA, 408 bp, Homo sapiens
cttccacatcgctttcttggatgagagtgtggttctttatgtatgggtggttggtgaattaccagaggcagacatcgccggttcaataagtgatttaggactgatgcctggagggagggtcaagctggtacatagtgctctgatccagttgggtgacagtcttttccataaaggtaatgaattttggggcactacacaaacactgaatgttaaatttctgccttcagatcctaatcactttattattggcacagacatgggtctcataagccatggcacaagacaagatttgagagtggctccctaactattcaaacctcagcaacatgttataagaccacagaaagcttatgtcattgatttttcaccatttggagaaccaatatttctggccggcttgtcagacgg

SEQ ID NO: 17622 - DNA, 416 bp, Homo sapiens
  misc_feature (1)...(416): n = A,T,C or G
taaacattttacattcacatgaaaagttattttcctttatataattggattcagaatcataagggacaggactgaaattattctacagtaaccagtaagaataagattcggccgggcacggtggctcctgcctgtaatcccaacactttgggaggccaaggtgggcggatcacctgaggtcaggagtttgagaccagcctggccaacatggtgaaaccccgtctctacacaaaaattagccaggcgtggtagcgggcatctgtaatcccagctacttggggggctgaggcaggagaatcgcttgaacccaggaggcggaggttgcagtgagccgagatcacgccactgcactcccgcctgggtgacaagagcaaaacttcatcttaaaaaaaaagaaaaaaagagtaagattcttn

SEQ ID NO: 17623 - DNA, 400 bp, Homo sapiens
cttgcccaccagattattcataccaaccctggccttttagttctctgggagaccagattgaataataatagactcctcttctttcacttggccagctttgcactaacgaaacttcttttttaactgcagtaatactctcagataattgagagaactgcgcagcatgcaagaagaatccattgcatgaatacatatgtattctgggaagacacaattcaacccatggcattcattctgccaaaagcataacctaaacccaggggctggaataggccattaaaattacatgaccgagcccaaacctttcacccaactatgatacaagtctcttgaggaatgaggcattagcagctgagatattagtccaaccatattctaaccccatagactttaagattgc

SEQ ID NO: 17624 - DNA, 403 bp, Homo sapiens
  misc_feature (1)...(403): n = A,T,C or G
gcgcccatctcctgtacgcttggagcgacctttggctacttggctggccttgttatttcaccactctggatatactggaatagaaagcaacttacatacaagaacaattaactggagcaaagggagatatttctttgtgcagattctgtaagggctgggcagaaatgtgtatggtcaaagccaagcagttccatttacagctctgttttttacgtagttacaacatgatgtgattgtagctttttaaactatgaaacccctgagagattgtaccttctagttgaaataaagtatttataatagattgtgaaaaaaaaaaaaaaaaaaaaggggggcccgtttaaaagaatccttgggggggccaaagttaacgcgggcatgcaaggtattagttttttcctan

SEQ ID NO: 17625 - DNA, 477 bp, Homo sapiens
  misc_feature (1)...(477): n = A,T,C or G
ggaagggacccccgncggtttgacctgaaagctgcgaactgacatcatncgaannncnancnancgncgnccatctcctgtacgcttggagcgacctttggctacgtggctggccttgttatttcaccactctggatatactggaatagaaggcaacttacatacaagaacaattaactggagcaaagggagatatttctttgtgcagattctgtaagggctgggcagaaatgtgtatggtcaaagccaagcagttccatttacagctctgttttttacgtagttacaacatgatgtgattgtagctttttaaactatgaaacccctgagagattgtaccttctagttgaaataaagtatttataatagattgtgaaaaaaaaaaaaaaaaaaaaagggcggccgttttaaaggatccttgggggggcccaagtttacgcgggcatggcaaggaatagctttttccttatagggagg

SEQ ID NO: 17626 - DNA, 399 bp, Homo sapiens
cggtaactgctttgcttttcggctcccgcaggaggattctggtggtggaggtggcgaacggccgctccctggtgtggggagccgaggcggtgcaggccctccgggagcgcctgggtgtggggggccgcacggtaggcgccctgccccgcgggccccgccagaactcgcgcctgggcctcccgctgctgctgatgcccgaagaggcgcggctcttggccgagatcggcgccgtgactctggtcagcgccccgcgtccagactctcggcaccacagcctggccctgacatccttcaagcgccagcaagaggagagcttccaggagcagagcgccttggcagctgaggcccgggagacccgtcgtcaggagctcctggagaagattacggagggccaggctg

SEQ ID NO: 17627 - DNA, 415 bp, Homo sapiens
tttaatttattttttgctggaaatagtaatttcttataatcagattgacttacctattttcttgaacaattttgaatttgaagataagtacatagcatttgattattgtatatatcacaaatgtgtcttatgttaaaatcaaagcacttacacaaattatcacttgaaccaattgcctagttattagagtgttgaaacaagatgggtaagtgactttatagaaagtgactgggcattccatgaaatgatttctgtacaaaatcttcaggactaagtatgaaccaggaaggagtatttctaaatttattccttaagcttctttacttccttgtttctttagttaaataagagattagtttagcaattataactttttctccttaatcaagtacttataaaatggccaagtatgctc

SEQ ID NO: 17628 - DNA, 493 bp, Homo sapiens
  misc_feature (1)...(493): n = A,T,C or G
agggcattcgttttgatcccctnttgatantccctgcganaccgcnnccggaaatcccgggtcgacgccacgcgtcgcgatttgagcacanttataacaangaacaatagctaattaattgcactctctgagtaaaacattggccaagtttatatcaccattattctaaaattccgctttgactcagctagttcataattatattaagctaaaaacctttgtttttataaaagaagaaacagttttctcatgatacagtagacagctttaaaagctaaatggaagcttaacgtaattcagcaaatatgttttctaatataaattttttttgaggcagggtcttactctgtcacccaagctggaaaatatgcatattattttgacaaccattgcctctaattatagctaatacttaagtgggtagaaaaaaaagtcatagttttatgtagtaacactatgttatataaaaggcatttctgaattaaaagccact

SEQ ID NO: 17629 - DNA, 417 bp, Homo sapiens
  misc_feature (1)...(417): n = A,T,C or G
ccctccntttttaactgtccagtgtttggattttacctcttgatttttccatttgtccctggtgctgcttttaaggatgtagggccatgtgatcaggtatcaagttgagtaggtacgcagttggcctggtgatgtatctgtgcctgttttatcttctcccaggaagagctgctttggtatagttgtttacttggattcatacaaagaacagggcagcaatcttggaaagctttctgaagcttataagaacctgaaggggtttggagggggaacagtaacaaaggctgcctttatgtctttggtcacaaagcacatagatgtatgttctgtaaagactaaagtgattgttataccagggcttcctgaccttcgggagagactcaaaaaagcagagaggagcacaaagtgaagtttatt

SEQ ID NO: 17630 - DNA, 415 bp, Homo sapiens
  misc_feature (1)...(415): n = A,T,C or G
cttnnnaatgaggacacctgtcatcaggtttagggcccaccctaatccaggatgatctcatgcagagatcctcaacaatttcacccacagaggccctttttccaaatgtcatgctcacagattccggtgactagcacttgaacgtatctttttgggagccactatttcacccactacagctattgaaatgcaaaaagagagagagatccttattctcatggaattttattctggctgggaggggaagataagaaataaacaaggtaggctcacacagaagtgctttgaagacagatccaatgagggttgtcatagaaacttagagggggcttctgtaaatggggtcaccagggaggtctctgagacagcaggactcaagttgagacccacaggcagagaaagcagcagccatgag

SEQ ID NO: 17631 - DNA, 478 bp, Homo sapiens
  misc_feature (1)...(478): n = A,T,C or G
cgccatgtgtttgatacgttcgtcatcggcaccggcccggaanncccgggncgacccacgcgnnnnaggacgcgtgggtatcattttagctataacctttaaatttgtttaaataaaacgacagatgttaatttaaaagcagcatatgctaatttactttttcatatgatgatggcctaatggaagttacatatgctttcttttgtcctaactctgaaaagtatatgtcagagttctggaatatgtctttagccaagaattttattcacttaaatttgtttacaacttgtataaagcaaaaaagaatgtgtgtaactatagtgaacgcatagttttgcttatattatgtgatgtttgccaaaaaaagaataaaaaatgaatgaattaaatcaaacaaaaaaaaaaattataaaaaaaggggggggcctttttaaaaattcccttggggggccaaaatttacccgttttggggaggttc

SEQ ID NO: 17632 - DNA, 483 bp, Homo sapiens
  misc_feature (1)...(483): n = A,T,C or G
gaaaaaatgccgggggnttttnnattgagnnactgacgacactgcnccggaacnnccgggncgacccacgcgtccgcccatttatactctactctcagtatggattattaatgtattttaatattctgtttaggcccactaaggcaaaatagccccaaaacaagactgacaaaaatctgaaaaactaatgaggattattaagctaaaacctgggaaataggaggcttaaaattgactgccaggctgggtgcggtggctcacacctgtaatcccagcactttgggaggccaaggtgagcaagtcacttgaggtcaggagttcgagaccagcctgagcaacatggcgaaaccccgtctctactaaaaatacaaaaatcacccgggtgtggtggcaggcacctgtagtcccagctacccgggaggctgaggcaggagaatcacttgaacctgggaggtggaggttgcggtgagctgagatcacacc

SEQ ID NO: 17633 - DNA, 474 bp, Homo sapiens
  misc_feature (1)...(474): n = A,T,C or G
agcaagtgttagacgtcgatagcactgggcacggaaccccgggncgacccacgcgtccggaaannaagaatgataggaagtttctcgagttagcctttatgcttttttgtagattaaaacataaaatttgtccagaacttaaagatttagatgccttcctaaattgttacaatgctttaccaaatctatgacttctacataacacaaaccagtggtcaaatgtaaacactatattgtagatttactgtaggttttcaaccttttttagatttatgcatgtggacatttttataatgtaattacaatcaccacaaggttagcttttttaattgcagacagtaatgcatgtcacactaatatgtagtggccttttcaaggcctagtcccagggaaaacattttgtagagtatatgggagtgggaggaaggggaggaataattttttatttaaagctgatttctgcactatcttttt

SEQ ID NO: 17634 - DNA, 411 bp, Homo sapiens
  misc_feature (1)...(411): n = A,T,C or G
ccacgcgtccgaggggagagattggaagtgattctcttttagttttccagtgaggacaggaggtttcatatcagcatgagcaattcatagaccagttggttgtggatttagtctgggggtcagcagacagtcatttttaaacttgctgagtggttttaatatgtgaggggaacttgaggtaggtccagagacaacaccaactgagatatgtgggtccaagccatgttcaggatggatctttacacctgattgaacagttaaacccctgtgactaagcactggcacctccatcacatctgtcatgttaggccaggcacttgaaataaaggacttctgatgttccccacaaccctgccaagtggaaattgtgatccccattttataaaggggcaatttaaggcttagagagtn

SEQ ID NO: 17635 - DNA, 402 bp, Homo sapiens
gtcaaaggtgaagcaggacatgcctccgccggggggctatgggcccatcgactacaaacggaacttgccgcgtcgaggactgtcgggctacagcatgctggccatagggattggaaccctgatctacgggcactggagcataatgaagtggaaccgtgagcgcaggcgcctacaaatcgaggacttcgaggctcgcatcgcgctgttgccactgttacaggcagaaaccgaccggaggaccttgcagatgcttcgggagaacctggaggaggaggccatcatcatgaaggacgtgcccgactggaaggtgggggagtctgtgttccacacaacccgctgggtgccccccttgatcggggagctgtacgggctgcgcaccacagaggaggctctccatgccag

SEQ ID NO: 17636 - DNA, 401 bp, Homo sapiens
acaatgagagatccattcctaatgatggtacatgctttcaggaacacagttcttatggcagaaattctctggaagacaattcctgggtatttccaagtcctcctaaatcaagtgagacagcatttggggaaactaaaactaaaactttgcctttacccaaccttccaccactgcattacttggatcaacataatcagaactgcctttataagaattaatttggaagagattcacgatttcaccatgaggacacttatctctttcagtggtcctcccaagaaattatttaacaaactgaaaggagattttgattaaaattttgcagaggtcttcagtatctatatttgaacacactgtacaatagtacaaaaaccaacatagttggttttctagtatgaaag

SEQ ID NO: 17637 - DNA, 408 bp, Homo sapiens
  misc_feature (1)...(408): n = A,T,C or G
cggacgcgtgggaattagagccatcatcatcccaggcagggatatctttgagaaatgactcagttcagccccaggcccctgtgactctgcttaaagcacacatttctgctgactcttgtacctggggcagcaggataatcaccaacacactcttaacgagaaacaacacaccaagcacagtggagctgtcctaggcaacactcgcggtctcaggctgcggtgggcgtctgtcctgcatgtggcccagaccaccctgacccccgggcctgcctgcctggccctgcatgctgcacgctcactgtatttgtgcagatcctggccagtacaaagtcgttgctcttgtcttatcttctcttacagagnctccctccctttatagaatgtcaaccaaagagtgccctcctcccc

SEQ ID NO: 17638 - DNA, 407 bp, Homo sapiens
catcttaaatgtaagctgaaactggtctactgtgtctctagggttaagccaaaagacaaaaaaaattttactacttttgagattgccccaatgtacagaattatataattctaacgcttaaatcatgtgaaagggttgctgctgtcagccttgcccactgtgacttcaaacccaaggaggaactcttgatcaagatgcccaaccctgtgatcagaacctccaaatactgccatgagaaactagagggcaggtcttcataaaagccctttgaacccccttcctgccgggtgatagtggaggtgtgtgaagttactcgtgtcaaagccgttaggatcctggcttgcggagtggctaaagtgctttggatgcagggatcccagcagtgcaaacagacttcggagtacctg

SEQ ID NO: 17639 - DNA, 441 bp, Homo sapiens
agctcccgcagctcctgctctggtccgccgccgccatgttctgcctcgggaacagtaagaccgaggaccagcgcaacgaggagaaggcgcagcgtgaggccaacaaaaagatcgagaagcagctgcagaaggacaagcaggtctaccgggccacgcaccgcctgctgctgctgggtgctggagaatctggtaaaagcaccattgtgaagcagatgaggatcctgcatgttaatgggtttaatggagagggcggcgaagaggacccgcaggctgcaaggagcaacagcgatggtgagaaggcaaccaaagtgcaggacatcaaaaacaacctgaaagaggcgattgaaaccattgtggccgccatgagcaacctggtgccccccgtggagctggccaaccccgagaaccagttcagagtggactacatcctgagtgtgatga

SEQ ID NO: 17640 - DNA, 400 bp, Homo sapiens
ggctatgaaaatggaatctccttggtgtgcatttcattttagtgagttacttctgtttcagagtgaaccactgaaatattatgcgtactatgctatgatgaccaatactttattctgcatataattaactttttctaatccagatggaaaacttgcattaatgttggttatatgcataaacatggtaaaactggggttttacccatatacccgggttataaaatgttataaactttgatctaacacatgaaaacaactcgtgtatattatcttggaaactgaccttgcaagtcagtgcactgaaaatgttgaacgtggctaccaagctattgctgagactctggaaaacttgggtaacaatatagcttcatgggaggaaaaaaaaaagatgggcacaatg

SEQ ID NO: 17641 - DNA, 398 bp, Homo sapiens
cagtctggtgcttgggagagtcaggcagggttaaactgcaggagcagtttgccacccctgtccagattattggctgctttgcctctaccagttggcagacagccgcttgttctacatggctttgataattgcttgaggggaggagatggaaacaatgtggagtctccctctgattggttttggggaaatgtggagaagagtgccctgctttgcaaacatcaacctggcaaaaatgcaacaaatgaattttccacgcagttctttccatgggcataggtaagctgtgccttcagctgttgcagatgaaatgttctgttcaccctgcattacatgtgtttattcatccagcagtgttgctcagctcctacctctgtgccagggcagcattttcatatcca

SEQ ID NO: 17642 - DNA, 389 bp, Homo sapiens
atcaagtgctgtgaatgcatcatctcatttaattatcataccaacatgcaaaatagtgatattattcccattgtatataactgtgctgtgcgctcacatgactgtatggaagagctggctttccaacagttatgctgtgctgcctctttaataattcactttaccttaaatttagttagttgtttctttaatcagatatttagaagattgtcattttggttaataatatatgtgtatgtataaatatatatacacacacatactctgcatcttgtatgtgtatccaacttcattttgaaagattaaaaataagtttgtaacgcctaaatatccttattaaaatactgcaaatcccattttactaacggagtctcctttgtttcttggct

SEQ ID NO: 17643 - DNA, 398 bp, Homo sapiens
cccacgcgtccgcttttcaatcagattaggcattctgtttttttagtaatacttatatattaatgaagcgaaactttataggtaggtatacatcaatgaaatcttaggcttttaccatctatattgcatacttctgacattatatcttattttccttaggttctaagaattttacatccacttacctgcaaagagagttcacctgataatccattttttgagtcttcaccaaccaccttacttgctacaaagaaaaatattggacgatttcatccctatactagatatgaaaatataactttcacttgctgcaatcactgccggggagaactgattgccctttaacagacaatatgttggaggcatgctaaggtacttccttattacccaagagtcag

SEQ ID NO: 17644 - DNA, 416 bp, Homo sapiens
  misc_feature (1)...(416): n = A,T,C or G
atctgtcttaaagaactatggagaggttgaataggatgctatccataccctttacataaactatcatgcaaggtagagattcctagcttgtgaagagagacactgccttatagcgtgtatatataagggacgctacttagccaagaggactgagagatttgcacaaactttcatatattatcctttctacctgcttgatattttattttgtcattagagttacgagtataacaaaatatgccatctccgcacgcaagatgagtagagttttaattgcttatgtttattcttcattgtggaaataacacggatatatgaaatttgcagtatggcttgttaaagacaaataaattactttttaaagatccagctactttacagacaaaaatttaagtcctatctaatacccttttaan

SEQ ID NO: 17645 - DNA, 392 bp, Homo sapiens
ccgtcatcccgcagaaaccaagaaccgcctcacggcctgatgacattccagactctccatctagcccgaaagttgcccttcttccacctgtcctgaaaaaagttccttcagacaaagagagagatggccagagtagcccccagcccagccccaggacattttcacaggaagtttcaaggagaagctggggccagcaggcccaggagtatcaagaacaaaagcaacggtcctccagtaaagatggccatcaaggcagcaaatctaatgactccggggaagaagcagaaaaagagtttatttttgtgtaaaggtcacccacgcagaagtcttcctgtgcagggtgctttggtagccatcagagaggaaccaagggcaacatcttttcttcccag

SEQ ID NO: 17646 - DNA, 401 bp, Homo sapiens
  misc_feature (1)...(401): n = A,T,C or G
taagtgtacagatccgaagtttcaagggcaaacgtgtgagatgtgtcagacctgccttggtgtccgtgctgagcataaagaatgtgttcagggcagagccttcaataaaggagaaaagaaagacacatgcacacaggaatgttcctattttaacattaccaaggtagaaagtcgggacaaattaccccagccggtccaacctgatcctgtgtcccattgtaaggagaaggatgttgacgactgttggttctattttacgtattcagtgaatgggaacaacgaggtcatggttcatgttgtggagaatccagagtgtcccactggtccagacatcattccacattgagctggtgtggttgctggaattgttcttattggccttgcattactgctgatatggn

SEQ ID NO: 17647 - DNA, 395 bp, Homo sapiens
atttaaaaatagagaataacaaaacaaaactttttttaatattaacaaatggataagtctctagctggactagcaagaaataaagagaaaaggctcaaacttacagatataaaaaggattataaagaagtattatgaacagttgtaagccaataaagtaggtaactcatataaaattaacaatttctggaaagacaccaactatcgaaactgactcaagaaaaaatagacaccgaaatagacctaaaacaagcaaagagattaaattagtaatcaagaaaccacacacaaagacaggtccagcagacggcttcacctcttaattctactagacatttaaataataattaatagtaatttttcacaaacattttcaaaaaatagaagagagaacag

SEQ ID NO: 17648 - DNA, 401 bp, Homo sapiens
  misc_feature (1)...(401): n = A,T,C or G
gaatattaaattgtaacatgattgctctctgtctcttttttcagcttatgggtatttatcttctattagtatttgtatcttcagttcattccactttaggaaacagagctgccagttgaaacaaaaaaaaaaaaaaaaaaaaaaaaaaaaaaggggggggggcttttaaaaaaatccttggggggggccaaaaataggggggggggaaaagaaaatattttttctttttggggggggcttaaaaaaacccctgggggttttttggaaaaaaacccttttttgggggggggaaaatggggggcacccccccccaaaaaaattgttgcccggggggaaaaaaaaaatcttaaagggggatgaggggaaaaaaaccataatattctgttgtataaaaacatgcn

SEQ ID NO: 17649 - DNA, 394 bp, Homo sapiens
taaagatgaagctcaacaaagcacgaaaagatcacttaattggcccaaatgataatgactttggaaaatatagttttttgtttaaagatttaaactaatatgctggcttttatgtatgatacctaatcagagcattgaccagaaaaattgaaagtgttctgaggcacatagcagaggagctgcagatttcctgcttgtattggcgtatatcgttcctcctgagcagcaacccacagtaggtaggaaaatgggctgtttcacaggcctggccacgctctcacggaaccactggcatcagatggtgaagtgactgctacccggttgccatctgttgaacagacttttggatgaagtgtgttggggaagaggataaggttatatctaggacaactcg

SEQ ID NO: 17650 - DNA, 409 bp, Homo sapiens
  misc_feature (1)...(409): n = A,T,C or G
cagcttccaagagaggtcgggtcacagccttcatttatgtctgacataaatcttgactgggttgacaggcgtcagttgcagcgcttggaggaaatgctgattgttgtggatgagaatgataaggttattggtgccgacaccaagaggaattgccatctgaacgaaaacattgagaaagggctgctgcaccgagccttcagcgttgtcttgtttaacaccaagaatcgaatcctgatacagcagaggtcggacacgaaagtcacgtttcctgggtattttaccgactcctgtagtagccacccattatacaacccagcagaactggaagaaaaggatgccatcggagtgaggagggcagcccagaggcgtctgcaagcagagctgggaattcctggggagcagatttctn

SEQ ID NO: 17651 - DNA, 413 bp, Homo sapiens
caaggacctgaatgatgagaaacagaagaaaaatattattcaacgtttcatgtttaacattgcagatggtggttttactgagttgcactccctttggcagaatgaagagcgggcagccacagttaccaagaagacttatgagatctggcatcgacggcatgactactggctgctagccggcattataaaccatggctatgcccggtggcaagacatccagaatgacccacgctatgccatcctcaatgagcctttcaagggtgaaatgaaccgtggcaatttcttagagatcaagaataaatttctagctcgaaggtttaagctcttagaacaagctctggtgattgaggaacagctgcgccgggctgcttacttgaacatgtcagaagacccttctcacccgaacctacccc

SEQ ID NO: 17652 - DNA, 413 bp, Homo sapiens
cggacgcgtggggcagtttgcctttataaaaacttgctgcctgactaaagattaacaggttattcagatgtttctcatccttcttgctctgcctttgagttgttccgtgatcacttctgaataagcagtttgcctttataaaaacttgctgcctgactaaagattaacaggttatagtttaaatttgtaattaattctaccatcttgcaataaagtgacaattgaatgaaaaaaaaaaaaaaaaaaaaaaaaaaagaaaaaaaaaaacaataagaattctaaaaaaaaaaaaaaaaaaaagggggcgcccttttaaaaaattttgggggggggcccaattattgcgggggggggggaattttttttttttttttggggggggagaataaaactcccgcggggggggtttgggg

SEQ ID NO: 17653 - DNA, 407 bp, Homo sapiens
caggtactgctgggccggaaggtggtggtcgtacgctgtgaaggcattaacatttctggcaatttctacagaaacaagttgaagtacctggctttcctccgcaagcggatgaacaccaacccttcccgaggcccctaccacttccgggcccccagccgcatcttctggcggaccgtgcgaggtatgctgccccacaaaaccaagcgaggccaggccgctctggaccgtctcaaggtgtttgacggcatcccaccgccctacgacaagaaaaagcggatggtggttcctgctgccctcaaggtcgtgcgtctgaagcctacaagaaagtttgcctatctggggcgcctggctcacgaggttggctggaagtaccaggcagtgacagccaccctggaggagaagaggaa

SEQ ID NO: 17654 - DNA, 410 bp, Homo sapiens
  misc_feature (1)...(410): n = A,T,C or G
gccaccatggctctggagaagtctcttgtccggctccttctgcttgtcctgatactgctggtgctgggctgggtccagccttccctgggcaaggaatcccgggccaagaaattccagcggcagcatatggactcagacagttcccccagcagcagctccacctactgtaaccaaatgatgaggcgccggaatatgacacaggggcggtgcaaaccagtgaacacctttgtgcacgagcccctggtagatgtccagaatgtctgtttccaggaaaaggtcacctgcaagaacgggcagggcaactgctacaagagcaactccagcatgcacatcacagactgccgcctgacaaacggctccaggtaccccaactgtgcataccggaccagcccgaaggagagacacatcan

SEQ ID NO: 17655 - DNA, 538 bp, Homo sapiens
  misc_feature (1)...(538): n = A,T,C or G
tgtgtgagtcttgtctgttggcttgtttattatacatcgttgaatgactatagtttcataacacccccccagagggacccnccccattgagagcctgttagaccgcnctcgaaacccgggncgacccacgcgtncgcggacgcgtgggcggacgcgtgggcggacgcgttgtcggacgcgtgtgcggacgcgtgggcggacgcgtgggtgctgttgaaatctgaagttattctgattctgatcttttgtatataagtctttatgacctctaaaagttttcagaattctgtttgtttatggaattctgaaagttgatgatgtaccatagtggaatacttttacatttattgtactgggtattccaaaggccctttttatccaaaaactcatgttttttagtgctggaaatttttcttttgttattttcatatttttcttccccttttttctcttttcgctttctggaatgcctgttgggcaaatgtcaaattttctgactcattctatacaattagaaagcacacccaagttttaatgt

SEQ ID NO: 17656 - DNA, 409 bp, Homo sapiens
cctgtgctgtgccgcgcagttaggcagctttagtttcggagcagtacccgccgtgggagggagccatgaagcattacgaggtggagattctggacgcaaagacaagggagaagctgtgtttcttggacaaggtggagccccacgccaccattgcggagatcaagaacctcttcactaagacccatccgcagtggtaccccgcccgccagtccctccgcctggaccccaagggcaagtccctgaaggatgaggatgttctgcataagctgcccgtgggcaccacggccacactgtacttccgggacctgggggcccagatcagctgggtgacggtcttcctaacagagtacgcggggccccttttcatctacctgctcttctacttgcgagagcccttcatctatggcca

SEQ ID NO: 17657 - DNA, 408 bp, Homo sapiens
  misc_feature (1)...(408): n = A,T,C or G
agctccgtcctgacgcgccgcctcccgttttctccggccggctaagccgcggcggacaactatgctgaaagccaagatcctcttcgtggggccttgcgagagtggaaaaactgttttggccaactttctgacagaatcttctgacatcactgaatacagcccaacccaaggagtgaggatcctagaatttgagaacccgcatgttaccagcaacaacaaaggcacgggctgtgaattcgagctatgggactgtggtggcgatgctaagattgagtcctgctggccggccctgatgaaggatgctcatggagtggtgatcgtcttcaatgctgacatcccaagccaccggaaggaaatggagatgtggtattcctgctttgtccaacagccgtccttacaggacacacn

SEQ ID NO: 17658 - DNA, 413 bp, Homo sapiens
  misc_feature (1)...(413): n = A,T,C or G
ctcatgctctgggtctctcctagatctccaggctgctgcaggtggatcctgaggcacgcctgacagctgagcaggccctacagcaccccttctttgagcgttgtgaaggcagccaaccctggaacctcaccccccgccagcggttccgggtggcagtgtggacagtgctggctgctggacgagtggccctaagcacccatcgtgtacggccactgaccaagaatgcactgttgagggacccttatgcgctgcggtcagtgcggcacctcatcgacaactgtgccttccggctctacgggcactgggtaaagaaaggggagcagcagaaccgggcggctctctttcagcaccggccccctgggccttttcccatcatgggccctgaagaggagggagactctgctgctataacn

SEQ ID NO: 17659 - DNA, 408 bp, Homo sapiens
ttccagtgtggggattgttctgtctgaatttatagagttgagatcaggaaatacctgtttggtgtttcttggggttgtcttcttacagttcaggagacccttcctaaagccggtcttttctcacttccagacattcctgtattccatcaaccagacaatctgcttgcggttggatagcattgaagccaaattgcaagccctggaggctacttgtaaatccttagaagaaaagctggatctggtcacgaacaagcagcacagccccatccaggttcccatggttgccggctcccctctcaggacaacccagatgtgcagcaaagtgcgatggtaagaacagaccagggtgccggggccttcatgtcacttggggagaagcgcgtaacctcctcgcccaggcccgcagct

SEQ ID NO: 17660 - DNA, 408 bp, Homo sapiens
gctaatattcttggtatattttttatcattctcttgcctcccaagtggcaaatgactgtcaatatttagactagagtgttattaagaatatgaaatgttattatagagcaaattttgtgagaaatttgacccatcacattcagtatgataccagactctcaatcatgttgtaacattaaagttccatttttagtgttgcctaggcctggaattatgttcaaagttaaaggataaaatgagtgttgagaaaacgcattcatccttttcatatctccacctctgtcatactccgcctacccttttgactgctcatgggaattcggttgaaaataaaagacagtgcatgttgattcagctcttgctgtgtgcccaaaactgcccatatttgatgataatggaaataagcac

SEQ ID NO: 17661 - DNA, 414 bp, Homo sapiens
ctaccgccggggagaggccagcccggcctacagttttgtcacaggacagaggggagccaggttctttgcactgaccaatgctgagagcagaccctcggagcagccgggttggaagtgtctctccacagccaccagacagatccaggataggatgggcagcccagtgcaccgagtgttattgggggatacctggagcaagcaaatgcaccccgacatatagagcgagaggtatatgcagtcctttgacgtggaacggctcaccaacatccttgatggaggtgcccagaacactgcactccgcaggaaagttgagagcatcatccacagttacccggagtttagctggaaggacaattatttcatgacccagaatgagcgttataaggctgccatgcggagggcattacacatccg

SEQ ID NO: 17662 - DNA, 469 bp, Homo sapiens
  misc_feature (1)...(469): n = A,T,C or G
cttgatttgcaatggcatgcgcnaccgcganggaaggnccgggccgagccacgcgtccggaaaaattagagcataaatgcccaataattttttgttttttaacataattgtacgataatttaagtaatctatataattatatgggagacgtttatgatatagcaaatgataaagcacaatgtaaaagatatgtacagccaatagtatgaccccaattttctttaagaatatattgcgcatgggaaaaatgattagaccatgcgatgaaatatattaacagtacgtctctctatgtgataaattatggagagctttaaattttcttctcttgcattagctctgttttccgaacttttaacaatgaacttgcattatttgtgaaatgaggcgaaaggaaaaaatgacaaaggagaaagggttcaaatatattatctttattctctcagtgttgcaattaatgatagaataa

SEQ ID NO: 17663 - DNA, 412 bp, Homo sapiens
cctggacaccaacagctcgaagagcacctccttcttcccctgcccggcagggcacttcaacggcttccgcacggtcatccgccccttctacctgaccaactcctcaggtgtggactagacggcgtggcccaagggtggtgagaaccggagaaccccaggacgccctcactgcaggctcccctcctcggcttccttcctctctgcaatgaccttcaacaaccggccaccagatgtcgccctactcacctgagcgctcagcttcaagaaattactggaaggcttccactagggtccaccaggagttctcccaccacctcaccagtttccaggtggtaagcaccaggacgccctcgaggttgctctgggatccccccacagcccctggtcagtctgcccttgtcactggtctgag

SEQ ID NO: 17664 - DNA, 414 bp, Homo sapiens
  misc_feature (1)...(414): n = A,T,C or G
acttgatataaattattggaatcattgtcttttataccagtggtttatgtcagggtatagcgtttcaagggatttgagggtcagatggggaaatgtagccccttattttgccagtgtgaagcagataccctgcttttctttacagtagcggagtcagcttaagagctttaaaggtcctaaacttcaaaaacattacagtgccccatcctccgccttaatgtaattcaaaatacaaacaatactaaactgtgaaataaatgtaacaaagtccaataaagtttttatttttttctccangagnacacccaccacctaaacaaataacaagaggaaagaaaccaaagaacaccctcaaggttgctctggaatacccccacagcccctggtcagcctgcccttgtcactgatcctgag

SEQ ID NO: 17665 - DNA, 409 bp, Homo sapiens
cggacgcgtggggaaataaatcatttttaatccccagaagaaagtgctggaaatagcttctatatagtcagcagttcacctggagaaagatcttaattccttgttgttttgactaggaatatcaatatttggtataaaataactagaatagtttattaccttttccctcatgaaattttaaatatatgcaaatatatatatcattagattcctgtggtgaataataatttcttcagattctaaaacaggtgtctagtgactgcttaattgtttccaagttgcatcaaagatgaattggtaaataatggaaatgagtagtgatatgaaaatggttatgtaactacatattacttgtttctggtaatcaagtcttattttttaaaagcctattgtttttcagaattgagaa

SEQ ID NO: 17666 - DNA, 411 bp, Homo sapiens
tgggagggaccaaggttgtaaggatggctaagttccaccataagagctaaagggtcctgggagatgatggctcatttccacccaaccccaggatttccacagcacacacccacaggcctggacctgggatgaagatgaatgaagaacatggactcatgtggatgtggtttggctcagatgtccctgcaataaacaaggggtcagtacttactccctgagtgaggttgaggtttgaggtcctggtcgagcagggcagtactggaccaggtctacgtcagcattcaggttcaatggggacaccagtggcttcaaacttcctgatctaattatgtttttagacacttagaagttattgaggactttagagagcttttgtttatttgggttaatatttatgacatttgacattga

SEQ ID NO: 17667 - DNA, 412 bp, Homo sapiens
cacagtccccgggagaattcagatcccaaccgttgcttccggattctgtagaggctttggcctgtgtctggtctgaggacgcccggaaggcattgcactgaggctaagggaaaggtctctggagggagcctcaggaagagcaaatggaggccagagactggcaggagcgcgccagcgcaggatttaatcccgacgagcggattcagagccgtgcttatataaagcttcaggaagcgccgttccgacgatgaggtcgacacgcgagaggcgacctcaagagcggcggcgccagggatctgtgcgccaagggaggacgggagggagcaggttcgccataattcctggctccaggctctgttttgttggaccgagccactgtattttagctcacacaggagaattctggccctgg

SEQ ID NO: 17668 - DNA, 420 bp, Homo sapiens
  misc_feature (1)...(420): n = A,T,C or G
gcgcccacgcgttcgcccacgcgttcgtccacgcgtccggtagtagactggccaactgcagagcaagttgtttgtccagccgtgcggtgcagcctcatgcccccaacccagcttagccactgtaagaagacgttcactgtacagacgaccaaacttgccgtggaagagacagttgtgagattcccttgcaaatttacatacgagaatggcttgtgaaatcatgcctctgcaaagtgctcatgtaccccaagtcagcaatgtgtctgcaaccggagaactcttagaaagaaccatccgatcagctgtagaacaacatctttttgatgttaataactctggaggtcaaagttcagaggactcagaatctggaacactatcagcatcttctgccacatctgccagacagcgccgccgccagtn

SEQ ID NO: 17669 - DNA, 414 bp, Homo sapiens
ttgattgcctgtattgttatattctcctaaatggactctctgcatccatttcctccttatgatgctgccagtgctgatattattattctttgccagaaaaatccttccgtgacatctatttgcttacaaaaattgtgccccaccttcttagcatggtttccaaggctctctggaaactgatgcaaacctttctttctttctttctttttttttcctggcttgtgttgtgttcccaccaacttctccgccctcaacacacactgacacatgctctggttgccctcttggatgtttcttcttccctgtctccatctgtggaagtcttagaaattattcagtacccaacttaaatgttgcttctttctctgagtctccctgttagaaatagcctttccttgctgtaaaatttcatag

SEQ ID NO: 17670 - DNA, 484 bp, Homo sapiens
  misc_feature (1)...(484): n = A,T,C or G
agcgtgtaacctgatccttcggctgacnacgtatggaagggccgacccacgcgtgcgcccacgcgtccgtttttcccaagaaagtccccttgactaaacaaaactcattctctccctttctttcattcgccctgtcttcatgcaaaacccaactgctagaaaccttgtttcatctttctactattcctctcttagatttgcatttgtgtaatcaaatcctacaattctatctctgcattcacctgaggttttttttttttttttttggaaaacgggttctacttttgcaccctagggtgaagggcaggggttaaaacatggttcattgaaaacttgcccccctgattccaagggggtgggaacagaaggcccccccccccaaccccagttaatttttaattttttgggggaaagggggacaacccttgtcccccaggggggtcggaaactaatggcctaaaccaatcttcctgtttaagtcccc

SEQ ID NO: 17671 - DNA, 415 bp, Homo sapiens
  misc_feature (1)...(415): n = A,T,C or G
tcatcatcagatttgaaatattttaagaggatacattactatttcagcaatgcagacaattaattgtgtggttgtgggcgacggagctgttggtaaaacatgtctcctgatatcctacacaacaaacaaatttccatcggaatatgtaccgactgtttttgacaactatgcagccacagctatgattggtggagaaccatatactcttggactttttgatactgcagggcaagaggattatgacagattacgaccgctgagttatccacaaacagatgtatttctagtctgtttttcagtggtctctccatcttcatttgaaaacgtgaaagaaaagtgggtgcctgagataactcaccactgtccaaagactcctttcttgcttgttgggactcaaattgatctcagagatgan

SEQ ID NO: 17672 - DNA, 418 bp, Homo sapiens
  misc_feature (1)...(418): n = A,T,C or G
nnnnnnaaataagctttaaaatcgggtgttatgtgctttccttcatttttgagcatattatccaaaatggtctgtataatataaatgagaatgatgcagtttaagtaagccttgttataccattgtcatggacccctgtcataaagccatttcttggtttgtttgggaaagaggcatatgggatttatacagattcacttgtaaatgttggattggggatttttgtgtaaattttctcaaataaaggctagcngaaaccannnnaaaaaaaaaaaaaaaaaaaaaaaaaaaaaaaaaaaaaaaaaaaanggggggggcgcttttttaaaaatttcttgggggggccaatttttcggggggggggaaaaaaatttttttttttttttggggggggggaaataaacacgcgggggggttt

SEQ ID NO: 17673 - DNA, 426 bp, Homo sapiens
  misc_feature (1)...(426): n = A,T,C or G
cgtccgcnntnnnttccgcccacgcgtccgccaggcctctccaatacagcctaacgtaacctgaagcgaaaggagaagaggcggcagcagcaagagaaaggagaggcagaggccttgagcaggactcttgataaggtgtccctggaagagacagcccaactccccagtgctccacagggctctcgggcagcccccacagctgcatctgaccagcctgactcagctgccaccactgagaaagccaagaagataaagaacctaaagaagaaactccggcaggtggaagagctgcagcagcggatccaggctggggaagtcagccagcccagcaaagagcagctagaaaagctagcaaggaggagggcgctagaaaaggagttagaggacttggagttaggcctctgaagcctttggggaatagggaan

SEQ ID NO: 17674 - DNA, 471 bp, Homo sapiens
  misc_feature (1)...(471): n = A,T,C or G
cggttcgacttcgatcagcagtcggnaccggcccggaantcccgggncgacccacgcntngttgggaacctttcatctcctcatctctgtcagtccatctacttcctgcttcagatgaaccaatctttgccagacacgggggtagggaagcttccccacttgtttgacccttgcagcctcatgtgtctaccccacttcctatctctaggagccagagccaggatttaagcgcctggcttggggccagcctgtgggcctgaggcatacaggctacgtcattgagctgcagcatgttgtcaaggtgagagccagctgcagccttcctactgcagtgcctgctggggccaagatgtgagtatagcctgcagtcctcgttgtggttcccgggtctaattgctgctcccctccccccacttccagggccccagtggttgtgtagagagtctggaggtgacctgcagacgggcagat

SEQ ID NO: 17675 - DNA, 412 bp, Homo sapiens
agcacgcgtccgggtggacctgaggggcctggtacatgttgctgggccagggcaggactctgggtcacaggcaggtagtcccccgaccagagacagagatgtagatgtcctttcagctgccttgaaagagcagcttagtcattccaggcaagtccattcatgtctagaaggcttacgagagcagcttgatggcctagaaaagacttgtagccaaatggctggggtggttcagcttgtaaagtctgcagcacacccaggcctggtggaaccagcagacggggctatgcccagcttcttgctggagcaggggagcatgatcttggcactgtcagacacggagcagagactagaagcccaagtcaacaggaacaccatctatagcaccctggtcacctgtgtgacatttgtggcc

SEQ ID NO: 17676 - DNA, 408 bp, Homo sapiens
cctggctacagcgttttctatgaaatctacttggatctccatgcctgaaatttggaagcatatgtacaaaaatcatttttacgttttatttttaataaatcattgtgtttgaccgtacatgtctaacatttttttctaggatccattccgtaccgttttttaagggatatttgtttaagactttacgtgttaattctttattcttgatgcgtacttagagaaacttaagaggtcctgtggtttttttcccctctcctgttgccctgctagttgcgtgttgaattatatcccttacaggcaaaacttttgaagaggtggatgtgggtctttaaactcttaagtttctgtgcatccatctcttgtactaagcgaattgtttatcatcttgacatgggtggtcatttctac

SEQ ID NO: 17677 - DNA, 469 bp, Homo sapiens
  misc_feature (1)...(469): n = A,T,C or G
gtgttgattcgataagcctcggcaccggcccggaantcccgggncgacccacgcntnnnttcacgcgtccggttgaacaggcgagtacaacagcatcttcagaagttttgtcctctgtagataaacccatagaagttgatgagcttctggatagcagcctaaacccagaaccaacccaaagtaagcttgttcgcctggagccattgactgaagctgaagctagtgaagctacactgttttatttatgtgaacttgctcctgcacctctggatagtgatatgccacttttagatagctaaatccccaggaagtggactttacatgtatatattcatcaaaatgatgaactatttattttaaagtatcatttggtactttttttgtaaattgctttgttttgtttaatcagatactgtggaataaaagcaccttttgcttttctcactaaccacacactcttgcagagctt

SEQ ID NO: 17678 - DNA, 416 bp, Homo sapiens
  misc_feature (1)...(416): n = A,T,C or G
caacaaacagcctgacaatctgtccagcatttccattgatataaaatgtaagcattcgttcattctgtaggtaggaactccaacttcatccttatctccaacataatttcccaatttaacctatgtactgatatggacatttctttgtgaatatgccagattcaagaatgtatttttctaaggtcaatagagatacgacattttaagtcaggaaaaatcacctataaattagtaggaataactgtagaagcatcacaaaagataccccatgaatagatggcatggtgtgcatgctgacagccacggggtcatactctggagtttcaacatagaggctgtgtttcaataaataagacaaattggggaattaagtaaaacaaatggatgtaactgaggcccccccccaaaaaaagccn

SEQ ID NO: 17679 - DNA, 487 bp, Homo sapiens
  misc_feature (1)...(487): n = A,T,C or G
aggcgtaaaactagacctccggactgacncccgatcttanggnccgacccacgcgtccgcccacgcgtccgcccacgcgtccggcagtctgtcctatgcaagacagatgaattctcagccaggatacctcaaggcaggcaaaggtgagtggagggaaaattcacaaacattcagggtgtgtggtgctggcatcaccatggccaaatccaagaggtcttcctggaagagggcccaaactggaaccaaaagaatgctgtcagcagttggaatagagctgtgaattctagacagggggagtgtccccagaacaagcaaacggaggagacaagagggcaagggttataggaaagaccctgggcctgagagcacaagcagcggccagagctgcagcgctggggtgggtgatggagggaatgattcgcaagcagtgttggaacccagcccctagtgagcaaagtgacagaagctgccccagactttggaagga

SEQ ID NO: 17680 - DNA, 415 bp, Homo sapiens
  misc_feature (1)...(415): n = A,T,C or G
ttggaatgtagtcagttctatgtaataaaagatggcagggtccagatcatgaaggtgggttcttaacctgtagaagacagaaatatgatcagacttgcatttcaggaagataactctgtaattgtttgcaattcctgttaaacgaagaaattttctccagcattgacttatgtttattaaatacatataaaaactaaattctagaaacatcttatacagttatacatcacttagcaatgggatacattctaggaaatgcattgtcaggcaatttcttcattgtacaaacgtcatagagtatacttacacaaacctagatgtatatctttgtttatatttattttttcatatggaaaaccaaatttcttagccatgttactgaatgtcagtcatttcccttacttgatctgcatan

SEQ ID NO: 17681 - DNA, 486 bp, Homo sapiens
  misc_feature (1)...(486): n = A,T,C or G
agcgcgtaaaactggaccgtcggatcgagcaccgtctgtangggccgacccacgcgtccgtaccactcgtcccggaaagggtgagccggtgacctttcaccctctctgggcctcagtttccctttttgtgaaataatgtctggtacccctgctgtgctcccttactatttcagggccccgggcaagagacacactctgtgtctcagtttccgcataggtaaagtgaggatgatgttagaatttgatgttaaaatttaggtggtggttgtgagaattaagggaacctcagagcaatggccagcacacaatgacccttcaaatgtcagcggctttgatgatcaccattcttaccttttctttggagatttggacaagttaccgccccaccttcctccagggtctttgtgtattgatctgcaggttggatgtattggatgttacgaccactaaactttcttctgagcacacacgagcagtggtgttgtt

SEQ ID NO: 17682 - DNA, 417 bp, Homo sapiens
cccacgcgtccgaaatacaataagaagacaaaataagaaggaaagggaaaaatacagcacaggagttggggggaagaacaagccaagttccagatatggaggtcagcatgattttgggctttgagcagcccaccagctaaggcaaaaaaggaaactcattgcatagctcttacctatggaaaaagaagaaatctactgggggcagatggtcttgtgggattttgctgttttcttttatctcctttcccagcatttgattctgagatatttctcaatttggctcccaaataaagcttattgagtgttgtaaaaaaaaaaaaaaaaaaggggcggccgttttaaaggatccttgggggggcccaagtttacgcgggcatgcagacgaatacttttttccttatagggagccgtattatg

SEQ ID NO: 17683 - DNA, 411 bp, Homo sapiens
caaaaggaggagagagagatggaaaaaagattaaaggtaagaaagaggaaaggaaggaaggatggaagcaaagaaggaaaaaaggaagaaaagaggctgtcatttccaaattctacttgccattttttcaggtgagtcagcatatatcaattactatgcttatggatacatgattaccactaataaaaacattttattgagcaattaccatgtggtagaaagtataattcctttatatgcattattgaatttaattcttatagcaaccctgcagagtaggggttattattcccactttagatatcaagaagtagttgttcagagaagctaagtttcttgctaaaattgccacgttaatcagtggtacagctgagattccaaatcaggtctgcctgattaccaggtctctgg

SEQ ID NO: 17684 - DNA, 410 bp, Homo sapiens
  misc_feature (1)...(410): n = A,T,C or G
cggannnatgggattttcctgtgtttctatatatagttttgaaatctatccttaatagtctgttttatatgccttatatttaaaagtttgttttagttattttgaaagactattgctgctgcaaatagttgtgtgctttacattctaagcttcagtacatttatttaagagcatcataatctgacctgagcatccacttggagagtgttttttttgtgtgtggtctggggtgacaaaagaccacaaaaatgtgtggtctggattttttcaactatgtcattaactttatgatccaagaccagttataggatgaatctgtatgtaaaaatagagtcttatttatggaaggaattattctaaaggaaaaatcagggtcaagctgatcttttatgtccttatatgcatgtctt

SEQ ID NO: 17685 - DNA, 409 bp, Homo sapiens
cgaaaacaaactcaaagataacatactgcttttcacttttgaaaatcatgaatgttaggcatatgagaattgtaataacaagcatatgagtattttattccgcttacttttacaacataatttgggtgccatttcttcaggagaaaacatttgtcatttggaaagctctgtttcagtccttaagcttctacgtataattacagcatattattcataaacggagtccccaatgaaaataggattaagttccaaaagtttgcttttaagttagttgcttctaagtcttagacactgtcttgaataaaatttttgtagagatttgatattccctattaaagtgtaagggccttttccaacttgacttctactgtttcctccctgtctaaattgaactggaaactcttttatt

SEQ ID NO: 17686 - DNA, 419 bp, Homo sapiens
  misc_feature (1)...(419): n = A,T,C or G
tcgnggacnnccgggtttaacctttatttacgaagaacacatctactcttgacacaaacacacacattatcctagcgcatagaactacataaggtccggatcatcaagatgtcactaagagacaggaatattgttagctccattataatcttacgggactactgtcatacatgcccttcgctggtgaccaaaatgttattatgtgacgtatgactgtacttattctatgccaggtgctgtttaagcactttatatgaattatttaatactctgagcaactattatcaccctcatattttagaggaggaaattgagatccaaagaggtcaagcaggccaagtgcagtggctcacgcctataatcctagcactttgggagggcaaggtgggcggatcacctgaggtcaggagttcaagacc

SEQ ID NO: 17687 - DNA, 414 bp, Homo sapiens
  misc_feature (1)...(414): n = A,T,C or G
nnnttgagataaagcaacagcctgcccagatccctttgttttttctatcccttccaaggttggtccatgccaacataacctctgggcatcagacatcagcaggtctgtgtgcctcagccctgttaaggggcaggattctctttagccctcttcctgcacttgggagcaaaggcactaccagtagagaagggccatccagccgtgccccagcctggacccctggggctcagatagaggtgctgagcccctgtgtcaaagttgttaaatgtttttgttttggtccattgtagctctttttttttttttttccccttcccggggggggattccacaaaaaaaaaggaatcggctaaaaagcccttgaatggaaaggggggggggggcccatgaaatattcttttctcccgggggggg

SEQ ID NO: 17688 - DNA, 483 bp, Homo sapiens
  misc_feature (1)...(483): n = A,T,C or G
gannnnacccgggaagttttncctgaaaccctcgaaactgaagctctcgaaaccgccncaacgtccggtcgaccacgcgtgcgcccacgcgtacgtgcagatctccgctttctgtcccacacccactgtctggactcccagctaccagtcagtggagggcattgctggccacactgcatgggacatcctgggagccttgcgaaggcaagggtcttggtatcagagttccttgcaaacctgcactccttccatataataactcaaatatgcacattgagaaaattaatttattcccatgatgggggctgaaggagggcccagagctagagcctggtctcctgcccccttgcctcttcttccagatgaagagaggcttatctgaggcctgaacaggcctgggatggctcttgggcttgagggcctgttctggcaggatggcaagcagacactggacagggtcacttgggcggccgatatgccacc

SEQ ID NO: 17689 - DNA, 415 bp, Homo sapiens
aaaatatcacagattcagagatgctgactaataaaattaactcttgttactgtggtgtcaggttaaatgccatcttttcagagagaccttcctcatcctggttcacagatatgatcagaaacaggcagggtgtgattagagacccaatcctaagtcctttcctgttttgatgcttcctgtaatgtagcattaaagtgtagagaagtaggtggcagatgcaactagcttcaatggtttgatgattagttaactttaactttagcaaataaatggccaatgataacttcaacttcattcctcaagagcagcaatttcacctcatgctctcaaatagccactggtaggtgtctaaaataaaaaaatcaactgaaataaaacaaaaactaactcttctatttctttccctccttttctt

SEQ ID NO: 17690 - DNA, 417 bp, Homo sapiens
aaaggccacaactctgttacggaccactttattccttaactacatccaggaaagacatggagagtctcttaaaaaggaatttgagagcgtattttgcggtaaaactgggcgaacgctaaagctgaccacaccggactccttggtgacctgtcctgctcaggggagtttacagagcagaccctcgatggagatcaagcgatcggactgaacaggaatcctcggggggtgaacagccattcctttatgatctgtgcaacgccttctgcgaccctggagctctgctcggctagtctgactcgaacagggcgtgactcaagctgacgggactccagtagggactttgagagcacattttgtaaaactatttatctagacgcacatgcttatccgtgaatgtgctcttagaccatttgggga

SEQ ID NO: 17691 - DNA, 425 bp, Homo sapiens
  misc_feature (1)...(425): n = A,T,C or G
ctccaccccaggaccacccaggcccctcccccaggctctggctccactccaggaccacccagactcctcccccaggaccacccaggaccctcccccaggctctggctccaccccagggtcacccaggctcctcccccaggctctggctccaccccaggaccacccaggctcctcccccaggctctggctcctccccaggaccacccaggctcctcccccaggctctggttccaccccagaaccaccaaggctcctcccctagaggttcccaggccaggacgtctccaaatgtggtccagatgtgcaggaccttcatcaagatggagccagccctcatcctcccgccccgaaacccaaagagctggctgggtgacggnggcatagaggctgactgctgcctggcaggtggngcgctcgagagaact

SEQ ID NO: 17692 - DNA, 417 bp, Homo sapiens
ctcgagtgtataattctctggagctcaattctatgcagttgtgctgatatttcattagtcactgtgtatttttaagtgttgatacattaaaagtcgctttatggaagatgagtaaattttttaaatacttggaaattttatttccttgttaacttctacagatcagggcatgcaaccaaaagcagcttaaatgaaatattttaaaataaaatatcaggaagctatttttagatttcttctggcttatgtttctactttaggaccctcattgttctcttattaaaaaaaattatttcctgtgcatctcatggactgcagggtaaattatttgggcataaataatttaaatagttttctttcattttgactatctccagtaataacagtttttattatccagcatattggcttattgcg

SEQ ID NO: 17693 - DNA, 424 bp, Homo sapiens
aaggaaaccggagaaacttaaaacgctcttctgctactttagattagtcacagagaaaaaacctactgggtgggtgacatttacaagacagagtcttgaagattttccagaatgggaaagatgtgaaaaacccttgacacgattgcatgtcacttacgaaggtaccatagaagaaaatggccaaggcatgctacaggtggattttgctaatcgttttgttggaggtggggtaaccagtgcaggacttgtgcaagaagaaatccgctttttaatcaatcctgagttgattatgttacggctcttctctgaggtgctggatcacaatgaatgtctaattatcacaggtactgagcagtacagtgaatacacaggctatgctgagacatatcgctggtcccggagccacgaagatgggagtgaaagg

SEQ ID NO: 17694 - DNA, 425 bp, Homo sapiens
cggacgcgtgggttgaagcagagagaggaagcctctatatcaatggcaaactcatttttgggggagaaagcaagcgctgggcttctgggtgcccacgcagctgccatcacggcctatgccctgacactgaccaaggcccctgcggacctgcggggtgttgcccacaacaacctcatggcaatggcccaggagactggagataacctgtactggggctcagtcactggttctcagagcagtgccgtgtcgcccaccccggctcctcgcaacccatccgaccccatgccccaggccccagccctgtggattgaaaccacagcctacgccctgctgcacctcctgcttcacgagggcaaagcagagatggcagaccaggctgcggcctggctcacccgtcagggcagcttccaagggggattccgcag

SEQ ID NO: 17695 - DNA, 155 bp, Homo sapiens
  misc_feature (1)...(155): n = A,T,C or G
ccattattaggaaggtaaggactacacatgtcattgaattgtaggtttccttttttttctttacttttaaattttaacttttaaaatctatttcatttcttagttatgcatctcataatcagactccatgctttttaaagaacaagataatatcn

SEQ ID NO: 17696 - DNA, 426 bp, Homo sapiens
tcccgctcctccgcccgaccgcgcgctcgccccgccgttcctgctgcagccccagggcccctcgccgccgccaccatggacgccatcaagaagaagatgcagatgctgaagctcgacaaggagaacgccttggatcgagctgagcaggcggaggccgacaagaaggcggcggaagacaggagcaagcagctcgaggaggacatcgcggccaaggagaagttgctgcgggtgtcggaggacgagcgggaccgggtgctggaggagctgcacaaggcggaggacagcctcctggccgccgaagaggccgccgccaaggctgaagccgacgtagcttctctgaacagacgcatccagctggttgaggaagagttggatcgtgcccaggagcgtctggcaacagctttgcagaagctggaggaagctgag

SEQ ID NO: 17697 - DNA, 419 bp, Homo sapiens
  misc_feature (1)...(419): n = A,T,C or G
ggaggctgcgggcggcggcgctggacccgacgcgttgagagaggccccgagatgccgagcaggaagaagaagtacaacgcgcggttcccgccggcgcggatcaagaagatcatgcagacggacgaagagattgggaaggtggcggcggcggtgcctgtcatcatctcccgggcgctcgagctctttctagagtcgctgttgaagaaggcctgccaggtgacccagtcgcggaacgcgaagaccatgaccacatcccacctgaagcagtgcatcgagctggagcagcagtttgacttcttgaaggacctggtggcatctgttcccgacatgcagggggacggggaagacaaccacatggatggggacaagggcgcccgcaggggccggaagccaggcagcggcggccggaagaacggtgn

SEQ ID NO: 17698 - DNA, 413 bp, Homo sapiens
actgtattgaatgaaattgtgctagatatgagatactctctaaggtaactatttccaatctcagatttggttaaataaaagataagaattttgtcagtaagaacatgtttaaaaaatttaaaccctgttaacctcaaaggacatttatattttgcaaatatttctaaatagtaaactgctataaatagtgacataatctgctgtttcttttctcccccccttcttttatttttcagtacgtagaaaacaggaccaagagcagggagcatggcattgcaatgcgaaagaaactttttaatcctccagaggaatccgaaaaataaattgtattttcactcgatgccttggctgagagaagacctacagactctgggttgatacctgaaagaatcctgtcttatttggtctccatt

SEQ ID NO: 17699 - DNA, 406 bp, Homo sapiens
atcacacattattctggtactgaatgccgctatcaccatggggatggttcttctaaatgaagcagcaacttcgaaaggcgatgttggaaaaagacggataatttgcctagtgggattgggcctggtggtcttcttcttcagttttctactttcaatatttcgttccaagtaccacggctatccttatagctttttaattaaatgaagccaagtgggatttgcataaagtgaatgtttaccatgaagataaactgttcctgactttatactattttgaattcattcatttcattgtgatcagctagcttattcttgtgtactttttttaaactgtgggttttcctagtaaatttaatttacagaaatcaatggtagcatttagtaatctacaaaggaaatatcaaag

SEQ ID NO: 17700 - DNA, 392 bp, Homo sapiens
ccacaaagctgtggaaggtgacaaagcttaaacacctttgccctggctctgcattgtcacctagagagcaagaggtctatagaaacatcatgtcacatgaaacgattctctgctttttggttctgaacttgaagtccctaaactgcaaaatctaagagttgggtggttattaaaatgcttttaaaaagttaactgtggcaccaattctaatgtaatccaacttgtgactgctttttttttgttttgttttgtttttgagggtgggtgtgtgtggcactgggaaaagtggaaacaaacatgtattgaaatacatattggaaataaaaatggcttgagcgtcattgatattctcccaaaatgaacttatcttacctgggcatgtactgtagacc

SEQ ID NO: 17701 - DNA, 401 bp, Homo sapiens
ttccccacttaatagaatacttaatagatgttcagagtggtggagcttcatttttgaggggagtttactagaagggagaatggtctggaaatcatgaagaacagtaaagggaagattagtatttagctgggttaaaagagacttgcgattatagttattttcagatatttaaagaatattttttggaagtaggatttgatttattttatataggcctagaatataggggatgagaaggatataggacatcatatttggatttcattatggaaatttttttcctgtggaaagataagagaatgtggccaggcacaatagctcacacctgtaatcccagctctttgggaggctaaggtgggaaggttgcttaaagccaggagtttgagaccagcctgggcacg

SEQ ID NO: 17702 - DNA, 388 bp, Homo sapiens
  misc_feature (1)...(388): n = A,T,C or G
tcaggttttgcagagaaccaaatgggcaggaccctgccggagctgatcacacagttcaacctgacacaggtcacctgtcactcagccctgctggacctggagaagctcccagaattcaacagactgcacctccagcggctggtgagcaatgagagccagaggcgccagctggtggggaagctgcaggtccttgtggaggaggcctttggttgccagctgcaaaacagggatgtcctcaacccagtctacgtggagaggatcctcctgctgagacagggtcacatttgccgcctgcaggacttggtgtccccagtatactcttacctgtggactcgccctgcagtaggtcgagcacagctggacgccatctcggagaaggtggatgtgn

SEQ ID NO: 17703 - DNA, 405 bp, Homo sapiens
  misc_feature (1)...(405): n = A,T,C or G
cccacgcgtncgaatgagaagcatagaacaaaaccaataactgctcactaataaaaagattgagaaagagctaatttctttaatttactatgtgttcataaaaagcaataaaaaagttgcctgccacagaaacagacaaattgaattaaaaaaattaaaaatattcagcaaacattagaaaaatttccatcgcagttataatttaagaaatgcaaataaatagaagatttaaaaaatttatcagatagtgaaacatgcaaatgtttggtaatattcatagtttgtgaaggattggggaaatatacagtttcaaatacaattgctgccaaatatttggaagaaaatttggcaatatgtctcaaaattaaagatacatatatcaacagaactagatctcattgctag

SEQ ID NO: 17704 - DNA, 394 bp, Homo sapiens
  misc_feature (1)...(394): n = A,T,C or G
ctggctttgagtggaacgaggatggggcgggaaccacccccagcccagggctgcagcctgcccacctcaccttcccgctggactatcaccttaaccagcctttcatcttcgtactgagggacacagacacaggggcccttctcttcattggcaagattctggaccccaggggcccctaatatcccagtttaatattccaataccctagaagaaaacccgagggacagcagattccacaggacacgaaggctgcccctgtaaggtttcaatgcatacaataaaagagctttatccctannaaaaaaaaaaagaagaaaaaaaaaaaaaaaaaaaaaaaaaaggggggcccccaattaaaagaaccctggggggccccaactttacggggggggga

SEQ ID NO: 17705 - DNA, 494 bp, Homo sapiens
  misc_feature (1)...(494): n = A,T,C or G
gagcggttttactgagnccctaactgagaatcgtcgnanccgccncgacccacgcgtncgngtcggactaccgttggtttccgcaacttcctggattatcctcgccaaggactttgcaatatatttttccgccttttctggaaggatttcgctgcttcccgaaggtcttggacgagcgctctagctctgtgggaaggttttgggctctctggctcggattttgcaatttctccctggggactgccgtggagccgcatccactgtggattataattgcaacatgacgctggaagagctcgtggcgtgcgacaacgcggcgcagaagatgcagacggtgaccgccgcggtggaggagcttttggtggccgctcagcgccaggatcgcctcacagtgggggtgtacgagtcggccaagttgatgaatgtggacccagacagcgtggtcctcttgctcttggccattgacgaggaggaggaggatgacatcgccctgg

SEQ ID NO: 17706 - DNA, 489 bp, Homo sapiens
  misc_feature (1)...(489): n = A,T,C or G
aggcgggtccaattgaactctcactatgacggtcgnannnncnccnaannnngggggaccacgcgtgcggaactttaacacttggctcaaatctctaggtcatactgccaatctttagacaaatgggcatggagcacaggacaggggagctgaggttgcttcataggccagcctgcatagcctctgtcctcaggacggaacttgggtgcagctcagtgggtcggaagagaaggtggtggcctgcgggtgaggggaacggagcaggctcatgcagaattgagtacggtgcgtctgcttttcaaacccaaccatatcagctgctgctctttatgaactgcccaacttcctgtccctttgaggggctagacacaggcttctcgtaagaacacagccttagaggcacctgagcaactcaaaggtttccggtccatttctgggggtcccgatgggaaggttcattggcaaatgaagaaaagtgtgcacttctag

SEQ ID NO: 17707 - DNA, 491 bp, Homo sapiens
  misc_feature (1)...(491): n = A,T,C or G
ggcgggttttccgagngcctctaatgtcgtcgtcggaannnncncganccangcgnncgaaacagctcccacgatcctgaaattctgttaacgaatccttctctttggacatcttcccaagaaacttagccctgagtcctaggaggagcacctctgcaccagcacggacctctcgctccacccagctctgtgcccaaggcccctgatctctgctgaggtgcccacacccacgttcgatcacccctgccattcccttttattttcttttttttgagatggagtcttgctctgtcgcccaggctggagtgcagtggcaccatcttggctcacttcaacctccgcccccaaggatcaagtgattctcctgcctcagcctcccgagtagctgggattacaggcacccgccaccgtacctggctaatttttgtatttttaagaaagatggggtttcaccatgttggccaggctggtctcaactcctgacctcaggg

SEQ ID NO: 17708 - DNA, 399 bp, Homo sapiens
  misc_feature (1)...(399): n = A,T,C or G
acacataagtgcttaagtgattttaaggcaggagacttcctccagtttagctcttggagaatggaaacatcagaagccctaggattagccaggacccccaggtctgggaaggaccagctgagttgatgatgtctccatgctttgcatcctcagagcatccacaatgggtaccccagcctcggtggtcagtgagccacccccttggcaggccccgattgaggcccggggccgcaagcaggcctcggccaacatcttccaggacgccgagctgctgcagatccaagccctgtttcaacgcagcggggaccagctggccgaggaacgggcacagatcatctgggaatgtgcaggggaccaccgtgtggctgaggccctcaagaggctgcgcaggaagaggcn

SEQ ID NO: 17709 - DNA, 467 bp, Homo sapiens
  misc_feature (1)...(467): n = A,T,C or G
ataaatctgatatcccgttgaaccgccctcggaaanccgggtcgacccacgcgtccgcccacgcgtccggcggctacttgtccacagtgctccactgactgacacttacaaccaagaaggaaataagcaaaggaggcacatctgcagccacagtaggcatgaaaaggcccaagcagactaatcaatcagagcacattctgagccctaactcagtaagacccaattctggatatctggaacttccagctcattgccaaaaggcagcatcaaattagaggaaaaggtagacaagattcaagacaggtgcaccactgcaacaagtggcattagggtgtgagaagagagagcccacttaaaagaaaggggccaggtgaagtgcctcacacaacactttgaggccaaggccagaggactgcttgagcccacgagttcaagaccagcctgagcaacatagggagatcctgtct

SEQ ID NO: 17710 - DNA, 399 bp, Homo sapiens
gaaggggaagctagatggactaggatagacttgattttggtgctaaagttccccagttcatatgtgacatctttttaaaaaaaataacaacaaaaaaaaaatgagagaaaagctaaaaaaaaaaaagtagggggggaccagttaagggtattcattccacatacaatattggggtaaaacgatttcctgtaaaagaagcttaaagggttttggctctaaaaaaccgaaggtttatccttaaagcactcacgccatgcttttttccttgggttttaaacttcataaacctttaaaaaatgggagagcaaaattttggctgggcactgcacataaatataaaaaaccttatttaactaatcaaaacgtatttatggccaaactatgctttttttggtaaag

SEQ ID NO: 17711 - DNA, 406 bp, Homo sapiens
tgaaacgggctgcaaacacattccctgagcatcccttgctgatacagcttctttatatttatatcctactggatggtagcatattgctaaggtttcctgtactctgcttcaagggaatgtaagctttatggcattgaaacatttaggaaaaaaaaagatgtttaagagaattaatagagccgtagtctgtattaggatgtgtgtcatatgtgtgttctataaactaagcatcggtgggtttagagtgttaaagtgtcagcacattccttctccttttgtctctcaggctaacatgagagaaaatagaaaagtcttggctgtggggattggaagctcagggggccaaatgtccttgccagatccttagagcattactttgactcctaaaaatagtagtgtatgttat

SEQ ID NO: 17712 - DNA, 412 bp, Homo sapiens
ggacgcgtgggcaggtgccttggggaaatgtggataacattcaagcttgccgacactattcatcaatgaagattagcactgagatacaaagaggctggatgacttgctcaagttcaccaacatggtagtggcaaagagaggtccaaagtcctggcccttgatgcccagctcagtgccacaaagctcaatatgaaggatgttccactggatgagggccaccaggaagcacaggtccaaggctggtcccacacttatcaacagcaacaactgtcaggtcatcctgcatgggaaaaatgttggaatgggagtctgaaaaggggctactgtttcactcctaacgtgctgtgtgacattgagacaacactatccctctctggacctcaggttccctctgtatacaaggatcagattc

SEQ ID NO: 17713 - DNA, 477 bp, Homo sapiens
  misc_feature (1)...(477): n = A,T,C or G
tggaggtnccnnggggngttcccctgagccccttactgatgtcctcganaagcnccggaatnngggcgacccacgcgtgcggtgccacctcaagagagaggccgtgggcggcgagccgcgggcgtttactcttagcagaagctcacctgtgggttttgagaacttagaaaccgatgccttccctctcatcagtcgtgaggcgcagtctcctggccgctgggttcgttcctccttgacatctctggagacgcatcgaggagctattgttctctggcgtcggaggttgcgctgtgtccgcggcgttgagggccccttgctaactggaacacggggaaggcggccctgtgaggtttagtgaactcaatcaaagaggtcctgcaagtggagtagactccctgaagtaagactgccatctggaccgccgagtaatggcggtgttacctggagaacgtgaaacagtctctaaacacttactag

SEQ ID NO: 17714 - DNA, 408 bp, Homo sapiens
  misc_feature (1)...(408): n = A,T,C or G
tcagagtgtatgcaaggaaagccccgttctctgtttttgtgagaggttggtggtgacaggatggggaaccgacctcttcagccagcgtaaatgttccatacgggagagttcaaggcctgtcagaaggctctggcaggccttcctctggccaggagactccagcagggaatgcccttcactctgtaggcgctcgagccccaatcgaggatacagtgtgggtggtggtgctgggctggactagcaggcagactgctgaaggatctcaaattacgtttttgattcctgtacattttacagtcgcacagcaagcagtctcacagaaggcaggctagtccattcacagcctgacacgttctaataggtagaagctttcagtgaggctattttttcttcgagtgggtcttgcgn

SEQ ID NO: 17715 - DNA, 408 bp, Homo sapiens
cctggggcctatcaaccaagaccaggttttacttcacttcctggaagtaccatgacccctcctccaagtgggcctaatccttatgcgcgtaaccgtcctccctttggtcagggctatacccaacctggacctggttatcgataaggaggctcctctacaccaattaatgtagctgctagctattggcctcccaaaagactccagtactattttaatttgtattgaagaagttcagaaatttaaaagcagagcattttttatgatatcattgttggtgttaattgaaagtataatttgctggaacacaaagaccaaaatgaaagttttttcctccctgcttaaaaatgtagcagcttcttagttactttggaacactactcttacatgtataaagtgattgacttgact

SEQ ID NO: 17716 - DNA, 395 bp, Homo sapiens
ccccgccgtgcgcccttcgccgctgagctcgcagccttcggcgcccacctccacctgcagtgtcccgccgggggccgtcgccctccagcggctcgcgagcgtgggagacgtacctgggcaggcactgtccagcccaggcccaggcacagccgtgaggggcgaggcacggggacatcctggcggccaccatggtggccacgtgcctgcaggtggtgggcttcgtcacgagcttcgtgggctggatcggggtcatcgtgaccacctccaccaatgactgggtggtgacctgcggctacaccatccccacctgccgcaagctggatgagctgggctccaaggggctgtgggccgactgcgtcatggccacggggctgtaccactgcaagcccctgggg

SEQ ID NO: 17717 - DNA, 466 bp, Homo sapiens
  misc_feature (1)...(466): n = A,T,C or G
nggggttttcctgagagcctggctgagggtcctgagnanccgcgncgacccacgcgtncggaaataaccagatttcatgtgaactcggaagaagagctcacttatcaccaaggagatgtcctaagccattcatgagagatccacccccgtgatccaaacacctcctaccaggccccacctccaacacgggggattacatctcaacatgagatttggaggagatatccaaactatactaaattctttacaacttttctgaaaatctaaaattgttccaaaataaaaaggttatttttaaaaccaaaccaaaacataaaaccacctgggagaacccaggtttgaatatcagatctgacactgatataaccggtgttacctgggccagttacttaaactttctcagcctctgtttcctcatatgtaatatgggagtaatttaagacttattcttcaagatgtttatgag

SEQ ID NO: 17718 - DNA, 353 bp, Homo sapiens
attcctggtagaggaatttctgtatttgaaaattctccagaaggaataatataaactgtggactttgggtgataatgatatgtaggttcgtcagttgttaacaaatgtatccctctgttgggggctattgataatggggaaggctgtgcatgtgtgggagtaggaggtgtatgggacatctctgtaccttctaatcaattttgctatgaacttaaaactgctctaaaaataaagtttattaaaaaaaaaaaaaaaaaaaaggggcggccgttttaaagaatccttgggggggcccaagtttacccgggcttgcagacgaatagttttttccttatagggagccgaattataac

SEQ ID NO: 17719 - DNA, 484 bp, Homo sapiens
  misc_feature (1)...(484): n = A,T,C or G
aggcgggggttaaaatgaaaccttcgctgatggcagtaaanaccggcncgacccacgcgtccgcccacgcgtccgaagattagtggttatcaagagttatagaggtgaggaaggagaaagggaggaaaggaacaagtataaaaacagtagcatgagagacctgtgggatggaactgtactgtgtcttgactgtgatgatggttacataaatctgcatatgtgataaaatcacatagaactaaatatacacacacacacacacacacacgaatgtatgtaggactggtgaaatctgaataaagtcattggattttatcaatgttgacttcttagttgtgatattgtatggtaattatgcatgattattgcataattattgcataataattatgcataattccattggagaaaatcaggtgaaaggttttaggattcctctgtattatttcttacaattgcatgtaaatctacaactccatccaan

SEQ ID NO: 17720 - DNA, 429 bp, Homo sapiens
agcatttatcttatcttctcataccccttgcatctttgtacttatcaaagtcaatattttcccattttccaaatgcgtccatctctaacataaatattaattgaacatagagctatgtttggagtgagtggactggcaggacagttggaagtccatcacagtctattgacagcttcatcaaagctgtatagtccaactagtggggcagcttggctactatggtggaagtctcagcaaactgcctggctttgtttgtttgttttgttttaaggtacaggaaataagaggaataatagtggccaaagcaattagaacatcttcattccagaactgtgttcagcaatccaggcagattgatacatttttctttaaaaataaattgctattacagctagacgtcaattgggataaataaagggatgaagatcc

SEQ ID NO: 17721 - DNA, 424 bp, Homo sapiens
  misc_feature (1)...(424): n = A,T,C or G
tgctccctgaacactcggaggtggcggtttatcttactccttccagccagtgaggatccagcaacctgctccgtgcctcccgcgcctgttggttggaagtgacgaccttgaagatcggccggttggaagtgacgaccttgaagatcggcgggcgcagcggggccgagggggcgggtctggcgctaggtccagcccctgcgtgccgggaaccccagaggaggtcgcagttcagcccagctgaggcctgtctgcagaatcgacaccaaccagcatcatgtccatgacactggggtactgggacatccgcgggctggcccacgccatccgcctgctcctggaatacacagactcaagctacgaggaaaagaagtatacgatgggggacgctcctgactatgacagaagccagtggctgaatgaacan

SEQ ID NO: 17722 - DNA, 429 bp, Homo sapiens
agaggggtccatacggcgttgttctggattcccgtcgtaacttaaagggaaactttcacaatgtccggagcccttgatgtcctgcaaatgaaggaggaggatgtccttaagttccttgcagcaggaacccacttaggtggcaccaatcttgacttccagatggaacagtacatctataaaaggaaaagtgatggcatctatatcataaatctcaagaggacctgggagaagcttctgctggcagctcgtgcaattgttgccattgaaaaccctgctgatgtcagtgttatatcctccaggaatactggccagagggctgtgctgaagtttgctgctgccactggagccactccaattgctggccgcttcactcctggaaccttcactaaccagatccaggcagccttccgggagccacggcttcttgtg

SEQ ID NO: 17723 - DNA, 426 bp, Homo sapiens
  misc_feature (1)...(426): n = A,T,C or G
aaaacatctaacttaagagaaaaactattaccaaattatgtatttctatttccaaaatgtttgtatttatttttatttacttatgtatttgtttttgagacagggtcttaccaaggctagagtacagtggcacagtcatagctcactgcagccttaaactcccagactcaggcaatggatccgatcctcccacctcagccagcctcccaagtagctgagactacaggtgcgtgccccatgccagctaatttttgtattttttgtagagatggatttcgccatattgcccaggctgttctcaaattcctgggctcaagcgattagccaggctcagcctcccaaagttctgggattataggcatgagccactgcccctggcccccaaaatgtttttaaaaataagaaatgcctattttaattntaaaa

SEQ ID NO: 17724 - DNA, 424 bp, Homo sapiens
  misc_feature (1)...(424): n = A,T,C or G
ttttgttttgttttgttttgttttgttttgttttgttttgctttgttttgtttttctgaagaagtccctagaagcgctcagtgttggaatgctctcttgtagcagtggcggctgctgctggttccgggtcagatgccggaattgggggtgcgcttgggtgcagctgcatttcatctggtcctgggcctcggtcctggcttggagaggtgcagctcacagccacttcatggctgggatcccttctgtcccagacagctgaggagacccttggcctcagcctgagtgtcaggggggtagttctgataactctgtgttttgttcacaggagcaaccagggttttatgcacatgaaactggccaaaaccaaagagaaatacgttctgggtcagaacagccctccgttcgacagtgtcccggaagtcan

SEQ ID NO: 17725 - DNA, 427 bp, Homo sapiens
ggaggctgcgggcggcggcgctggacccgacgcggtgagagaggccccgagatgccgagcaagaagaagaagtacaacgcgcggttcccgccggcgcggatcaagaagatcatgcagacggacgaagagattgggaaggtggcggcggcggtgcctgtcatcatctcccgggcgctcgagctcttcctagagtcgctgttgaagaaggcctgccaggtgacccagtcgcggaacgcgaagaccatgaccacatcccacctgaagcagtgcatcgagctggagcagcagtttgacttcttgaaggacctggtggcatctgttcccgacatgcagggggacggggaagacaaccacatggatggggacaagggcgcccgcaggggccggaagccaggcagcggcgggcggaagaactgtgggatgggaa

SEQ ID NO: 17726 - DNA, 323 bp, Homo sapiens
agagaactgctaaggggaaagaacagctggagtttctgttgatgtgaagaaggcagctcttggcctcccactcccacacttctttgcctataaatcttcctagcagcaatttgagctacctgaggaggaggcagggcagaaagggcgagggcctgcctctgacctgccgtgtcctttgcaggaaggaggtaggcacctttctgagcttattctattccccacccacacccccaggcagggttggaaatgaaggacttttttaacctttgttttgttttttaaaaataaatctgtaaaatctgtaaaaaaaaaaaaaaaaaagg

SEQ ID NO: 17727 - DNA, 411 bp, Homo sapiens
gatcatttagatttggtaattaaattaatttatttttctgaaacaaaaaggccttttaataaagtgagacagaaacaacatatttatagataatttgctagcatttcttttaaaaataattttaaaagcatattttcctaagttttgaatatataaatttctatagaatatctttcagtagacttataggaagatggaaccagcattttgaaagcgactaatatgggagtttggtgttgtgaaggaacacaaatgtgtgactgtatgtcaacaggatgatggtagtgatgatctaaataatcactattgttataaccaccacttagcaggtgccagacacttccatgtaattttatttgatctttacagtagctttgtggtagctattgtctccactttacagattagaaa

SEQ ID NO: 17728 - DNA, 396 bp, Homo sapiens
cccggacgtaggtagtttgttgggccgggttctgagtccttgcttctctttacttttccactctaggccacgatgccgcagtaccagacctgggaggagttcagccgcgctgccgagaagctttacctcgctgaccctatgaaggcacgtgtggttctcaaatataggcattctgatgggaacttgtgtgttaaagtaacagatgatttagtttgtttggtgtataaaacagaccaagctcaagatgtaaagaagattgagaaattccacagtcaactaatgcgacttatggtagccaaggaagcccgcaatgttaccatggaaactgagtgaatggtttgaaatgaagactttgtcgtgtacttaggaagtaaatatcttttgaatagagaaagg

SEQ ID NO: 17729 - DNA, 351 bp, Homo sapiens
  misc_feature (1)...(351): n = A,T,C or G
cggacgcntccgcccacgcgtccgcccacgcgtccgcggacgcgtggggtggaacgaggatggggcgggaaccacccccagcccagggctgcagcctgcccacctcaccttcccgctggactatcaccttaaccagcctttcatcttcgtactgagggacacagacacaggggcccttctcttcattggcaagattctggaccccaggggcccctaatatcccagtttaatattccaataccctagaagaaaacccgagggacagcagattccacaggacacgaaggctgcccctgtaaggtttcaatgcatacaataaaagagctttatccctaaaaaaaaaaaaaaaag

SEQ ID NO: 17730 - DNA, 415 bp, Homo sapiens
acgcgtccgcccacgcgaccgcccactcgtccgagtacgcgtggggagaaacaaggatggggcggaaaccacccccagcccagggctgctgcctgcccacctgaccttcccgctggactatcaccttaaccaacctttcatcttcggactgagggacacagacacaggggcccttctcttcattggcaagaatatggaccccaggggcccctaatatcccaggctaatattcccataccctagaagaaaacccgatggacagcacactgcacacgacacgaaggctgcccctgtaaggtttcaatgcatacaataaaagagctttatccctaaaaaaaaaaaaaaaaggggggccgctctaaagaatccctggggggggccaagcttaccgcgggaggggaaggttttatttttc

SEQ ID NO: 17731 - DNA, 418 bp, Homo sapiens
  misc_feature (1)...(418): n = A,T,C or G
agatcaactcagttttacagagaaggaaacagactcagagaatcaagcctgctgcatgtgagctgtcggtgttatgcacaacacatccacagggcattctattcatgtggatttctacatggatagagcctcctagggttgtgcagtgtgcagcctgtgcaaccatacacaggggacccacgtgagaaaggttatgccacttgccaaacgtcccactactaagaagggcagagtggaatcctcacctgtctgctccaaagcctgactcctagtcctcagcctctttgcaaccacagcctggggaaagcgcttcataaatgcttaaagacagcacaatgctccaaaaaaaaaaaaaaaaaaaaaaaaaaaaaaaaaaannnaggggggggccctttttaaaatttccctggggggcccc

SEQ ID NO: 17732 - DNA, 426 bp, Homo sapiens
  misc_feature (1)...(426): n = A,T,C or G
cncgncnggaattcctctatagcccatccgtactacctggagactggatccgcaaagtagacacttggtctcatgaagccactgctgggctccagagagaagggaaaactaagaggttttaaaacccctaccctccttggtttacctccatcattaaaaaacaacaatgacaacgacaacaaaaaacaaaactaaaacgacttattatttattaattatgttggggcagacaatatgctgaacattagacataattaaatcttttaaaaaaaaaaaaaaaaaaaaaaaaaaaaaaaaaaaaaaaaaaaaaaaaaaaaaaaaaaaaaaaaaaaaaaaaaaaaaaaaaaaaaaattatanntggggggggggggtttatataattttttgggggggggcccacacccgccccggccggaaaatttttt

SEQ ID NO: 17733 - DNA, 482 bp, Homo sapiens
  misc_feature (1)...(482): n = A,T,C or G
tggagtggcccccgncggtttccaactgaaaccctccgnactgaccatcatncgaagnncnancnangcgnnncgaacggcctataggattgntaagactgaatattttaaaagagcttagaatggtgcctgacaaatgagaaacaataaatactgagtattggccataaagtggtattaaaactggatctcttttcttccatggcactactctcattttgaagtttatgaacagtacgacagtgtattgtaaattccctttagtttgttacagtagccaattgaaaatgtatatcccaaaatttaaaaaaaaaagtaccagcagcaataaaattgcactagttttatctggtacatacaaaaacagccatttaaaatctgatgattctgtggaattggcgtccctgttagcaatggcagagaccagcctggagcctagatctggtgctttttctgtgctgtggcttaccccaaacctttag

SEQ ID NO: 17734 - DNA, 473 bp, Homo sapiens
  misc_feature (1)...(473): n = A,T,C or G
gggttggctctggaaagcctccgtccgatgcntgcataggananncnccgnaantnccgggnagacccacgcgtgcgcagatctttttgactatcttcctctcactgccttggtggatgggcagatcttctgtgtacatggtggtggggtcgccatctatagatacactggatcatatcagagcacttgatcgcctacaagaagttccccatgagggtccaatgtgtgacttgctgtggtcagatccagatgaccgtggtggttggggtatatctcctcgaggagctggttacacctttgggcaagatatttctgagacatttaatcatgccaatggcctcacgttggtgtctagagctcaccagctagtgatggagggatataactggtgccatgaccggaatgtagtaacgattttcagtgctccaaactattgttatcgttgtggtaaccaagctgcaatcatggaactg

SEQ ID NO: 17735 - DNA, 422 bp, Homo sapiens
  misc_feature (1)...(422): n = A,T,C or G
nnnnnnnaacgcgtgggatgaacatgtcttacatgggttgctgtatctgatctctccttcatcctatgtacagctagaaatgaatgagagatcagatacatgaacatgtcttacatgggttgctgtatttagaattataaacatttttcattattggaaagtgtaacggggaccttctgcatacctgtttagaaccaaaaccaccatgacacagtttttatagtgtctgtatatttgtgatgcaatggtcttgtaaaggtttttaatgaaaactaccattagccagtctttcttactgacaataaattattaataaaataaaaaaaaaaaaaaaaaaaagggcgggcggtctaaaagattcctggagggggccaaacttatcccgggctggcaaggtatagcttttttcctttaaggagagg

SEQ ID NO: 17736 - DNA, 415 bp, Homo sapiens
gcgaatttaagaaactctccaggctctccatcttgatttatgcttgagttgttatgtgccatatttgctttgaactctgattatcagaagttttactaaaactttgaaataattcactttcatctgctttctagattttgtacatctcagtccataaagcaaagcttgttgatagtgtagttttctaaacgctgcaaatttgcagcctttaccactacaaagaagtttggatgagggattttttttttctttgtcaaaatagttcctgtttctgtagaaatttcatttttagattaaactgtgatggatgagctatcataattcaagtatacatttcttttttctatcagatattcattgtcatgcagtagtagtaaaaacatcaaagatgcagcaagcttattaagtattattt

SEQ ID NO: 17737 - DNA, 422 bp, Homo sapiens
  misc_feature (1)...(422): n = A,T,C or G
nnnngnaactcgttagcttgctctgttctgcctctgtccgatgaggactccgtgttctttccctttggaggaggccgtcttcaccatacaacggaacctagcagctccttgatcttagacctctcatcctccagaactgtcagaaaataaatttctgctctttatcaatttcccagtctgcggtattgtgttatagcagccacaagatggacgaagacagcttgcattgtatttctctggacggcactgttctagatggtgtagtgaatagacatgaagtgtggagctactatagcaattttttatccgtatgtgggaagtcagtttacgatgaaggcgagaccgaagaaggcagaaaaagaaatcagcctctttgacaaaaagataaaatatattttgggccgggcgcagtggtgcacgcc

SEQ ID NO: 17738 - DNA, 415 bp, Homo sapiens
  misc_feature (1)...(415): n = A,T,C or G
cnnncncccggtgtgaatgtgaacttagcacttttatttattggcttaatcacaccaatgtcactatagctgggcctcctgcagacatatattgtgtgtaccctgactcgctctctggggtttccctcttctctctttccacggaaggttgtgatgaagaggaaggcttaaagtccctaaagttctcccttttcattgtatgcactgtcactctgactctgttcctcatgaccatcctcacagtcacaaagttccggggcttctgttttatctgttataagacagcccagagactggtgttcaaggaccatccccagggcacagaacctgatatgtacaaatatgatgcctatttgtgcttcagcagcaaagacttcacatgggtgcagaatgctttgctcaaacacctggacac

SEQ ID NO: 17739 - DNA, 476 bp, Homo sapiens
  misc_feature (1)...(476): n = A,T,C or G
aggcgagtgttgatgtcataggcaccggcccggaanncccgggncgacccacgcgtgcgnccannnntccgctcatcatcgaccgaggagcacaaagttgttctgtttctgtttttttcaaactttattttagctgtcaagcagagaatagcttgaactattcagactattgttggcactgtttagtagtgaccacacgctcttctacccgggaaggaacatatgacgacatgctcctcccatgtcccctgatggtgtctgttcccacaatatccttctagtctgcatcgtgaagtggcttaggccaaagcttcctgtgtgatgacgcacgtccgagactgttccatctcattcctcgcaaatttgagctcttctgatcaattctaaatatttgattaattttaattctgaaagaaaattttgaggatttaagcttaggggattttatttttataaataccagattattgttagac

SEQ ID NO: 17740 - DNA, 419 bp, Homo sapiens
  misc_feature (1)...(419): n = A,T,C or G
gcgctannnntcctgccaggccgccgggatgggtcttctctttttagaatgcaccatggagacgtggcgggactccagctcgtgtgtcctcatggagaacccacgggacagctggtgcaaattcagaactgagggctctatttgtgggactgggttagaggagcctgtggctttttgttcagaattaagcagaacactgcagtcagatcctgttacttgcttcagtggaccgaaatctgtattctgtttgcgtacttgtaatatgtatattaagaagcaataactatttttcctcattaatagctgccttcaaggactgtttcagtgtgagtcagaatgtgaaaaaggaataaaaaatactgttgggctcaaactaaattcaaagaagtactgtattgcaactcttttaagtgccttgg

SEQ ID NO: 17741 - DNA, 420 bp, Homo sapiens
  misc_feature (1)...(420): n = A,T,C or G
nnnnnnntttgcatgaacaggcattctcgtcgcacatactggaaccaatagaagaactttcagaggaagaaaaaggaagggaaaatgaacagaaattaaataacaacaaaatgcatttaaggaaagctttgaagagtaactcctccctcactaagggactaagaacaatggtggagcagaacttgatggagaaactggaaaccttggggattaatgcagatatacgtggcatttcaagtgatcagttgcatagagtactaaaaagtgtggaatcagaaagacataagcaagaaagagaaatacctaactttcatcaaattcgagaattccttgaacatcaagtcagctgtaaaattgaggagaaagcactactctcttcagatcagagcaggggttctcaaatggataccccttcaactg

SEQ ID NO: 17742 - DNA, 415 bp, Homo sapiens
  misc_feature (1)...(415): n = A,T,C or G
catgctcctgcccacggtgtccgcgctcaggaattttggtgttaacctgacacgcagcaacaaggagacggtgaagcacagcgacgtcctgtttctggctgtgaagccacatatcatccccttcatcctggatgagattggggccgacgtgcaagccagacacatcgtggtctcctgtgcggctggtgtcaccatcagctctgtggagaagaagctgatggcattccagccagcccccaaagtgattcgctgcatgaccaacacacctgtggtagtgcaggaaggcgctacagtgtacgccacgggcacccatgccctggtggaggatgggcagctcctggagcagctcatgagcagcgggggcttttgcactgaggtggaagaagacctcttcgatgccgtcacggagctcatn

SEQ ID NO: 17743 - DNA, 419 bp, Homo sapiens
  misc_feature (1)...(419): n = A,T,C or G
cgggtnnaaaataggggatgctcctgagtagagccttatttttccttgagaccatttactgttactgctcagggacaacgcatgaaatgacattctatccctctgctggaattctgtaaagagctaataaaaattacatctcttaagtccggcgcttcaaagccttccacattgtttttctatagctgagtggcgccctctagtggctctaatcatgaacgtaccatctgggatgagatcagacctctgaacacaatacttcaggactccctctggtaaggagtcaatgttgcttcctgctgatgcacatcactacatagcaggtgactgagacaggataagaattcttaagcataacactctgttacttaacctacctatcctcccttttatactaataatcttattaaaaaaaaaaa

SEQ ID NO: 17744 - DNA, 410 bp, Homo sapiens
cctgcatcaagccacaggtcttggctttctccttatcaccatttgctgttatcacggcacacagcagggaatcccaggcccccccgccaagtggttacccaagtcaccactcctgacccaaaaatcaggcatggcattaaaacgttgcaaattcctttactgttatcccccccaccaccaggaccatgtagggtgcagtctttactccctaacccgtttcccgaaaaaggtgctacctcctttccagacagatgagagagggcaggacttcaggctggatccaccactgggctctccctcccccagcctggagcacgggaggggaggtgacggctggtgactgatggatgggtagtgggctgagaagaggggactaggaagggctattccaggctcagccctgctcctgg

SEQ ID NO: 17745 - DNA, 396 bp, Homo sapiens
attccactgattatatatagtgaaatctaattaagttttaagtaaaagtaatagtatttcagagatactttacctgctagcattctttttatcatgatctttattgaccgtaaatcagagcccttggctaaggatacattttattccagaaaaattatttcagaacttgatttcaactgtattattggtcaactattacatttccttttttatttcaaatgtcgatcaacagggtgtagccatttataatatttataattatttatatctacaattacaggcatttaatttgtcatttgaacaatgatatgacattgtgctaaatacttcaaggagagacacagaaggggaaatattattggttattacttcttaaatataaaagtttgtctttaa

SEQ ID NO: 17746 - DNA, 492 bp, Homo sapiens
  misc_feature (1)...(492): n = A,T,C or G
ggcgggtttttttgagcccctatacagaggtcgtcgnaccgcncgancacgcgtncgggagactttgcactcactatctcgccggccggactgcatgcccagggtcagtagtcagcagagctaaaggtgcccgaatttagcacagctggctgtggtgcctgacatagggcagtaccgggggattcttcagaggtcagccaagtcggtaacattctgtgaagcagattaaatacagtaaaatcaaacaaacggaggtctttggaagtgatgctgggcccaggcagtgaaaatcaagaaaagaggagaaagaccaagacctggatgtcctggacgacctgacccaaaaaggggcacaaagcagcagagcttcaccaggtgactgggtggcttctttgtcctcattaaatgtacatctttgcatgaaaaggaccttgactggtccggaccttaacaaagtaaaatatgaagaaacgtaaaattatgcttctgaag

SEQ ID NO: 17747 - DNA, 404 bp, Homo sapiens
  misc_feature (1)...(404): n = A,T,C or G
cttgcagtgagccgagactgcgacactgcactccagcctgcctgggcaacaagagcgaaactctgtctcanaaaaaaaaaaaaaaaaaaaaaaaaaaaaaaaaaaaaggggggcccctttaaaaaaaaccctgggggggcccaaaataaccggggggaaaaaaaaaaaaatttttttttttaagggggggaaaaaaaaaacccccgggggaattttggaaaaaaaccttttttttggggggggaaaaattgggcccaccccccccaaaaaaaaaaaacccttaaagaaaaaaaaaaatttttaaggggaaaagggggaaaaaaatcctttaattttttgtttaaaaaaaatgggcnnnnnnnnncccccccccccccccnccccccgcggggacacccaacaag

SEQ ID NO: 17748 - DNA, 467 bp, Homo sapiens
  misc_feature (1)...(467): n = A,T,C or G
cggttgccaactgaangctgcgnactgacantcatcgnaaannncnacnnanncgtngggnttgttgaatgttgcagtctgcatcttcttgaagtatcagaactgctggtatctgtttaaaagtaaaatgtgtctaaagacggtttggaaattaagatgtaagagattaatgcaccaaagcagtctcttaattacttaaaatgaattatttcaaagaatctttaattgaattttctgtgaagtctggaatttgtaaattatgtccctttgttcaaaccagcccctgaaaagaacaattaaggcaattaagatagcattaaagttttcaatgaagttggcattttccgtgtattaagattagatgttagctgctgaagtttgtggaggtcggacataaagcttccaacatcagtaatgcaaaattgtcttgaacctgcgataaaattttgttggacttttttttcatg

SEQ ID NO: 17749 - DNA, 476 bp, Homo sapiens
  misc_feature (1)...(476): n = A,T,C or G
gtagggccggggggggttttaagctgatagctgcgantngcnctgatancgtntggaannacgcgtnncgaaagatgcagngagggacggcttgagggctgncaaaaatgctattgatgatggctgtgtggttccaggtgctggtgccgtggaagtggcaatggcagaagccctgattaaacataagcccagtgtaaagggcagggcacagcttggagtccaagcatttgctgatgcattgctcattattcccaaggttcttgctcagaactctggttttgaccttcaggaaacattagttaaaattcaagcagaacattcagaatcaggtcagcttgtgggtgtggacctgaacacaggtgagccaatggtggcagcagaagtaggcgtatgggataactattgtgtaaagaaacagcttcttcactcctgcactgtgattgccaccaacattctcttggttgatgagatcatgg

SEQ ID NO: 17750 - DNA, 413 bp, Homo sapiens
aggaggccaccatcgtgaaagagtgaagatctgtttggctttatcaccaggatgtcacatgtcagagaatatcattaaaagaagacgctcagcactgtttcagcccgaagctgcttgcagttttcttttggatctgagcaatgactgtgtttggaaacatctgtggactctgttagatgaggcaccaacaaggcaaggtcacctgcctctttcccttgttcccggatggggcattcatcattgtgctgtttgcgttttgttttgttttgttttaacaaaattagctgaagaagttattctcaagaaaattggatgttttcattggccttcttaaattgtggccagggtcttttaatttcttcttcttttccttttggcaaagcagatataaccctcagcatgctaggagagtg

SEQ ID NO: 17751 - DNA, 409 bp, Homo sapiens
cggacgcgtgggcggacgcgtgggtgaggttcatttagctgctgacaagaaaagtcatcttgtgtcttttgtaaattgaattttttttttaaatctattaggaactggaaaacagcaagtatggttgattctcattattcaaggtagttatgttctataaagtcactgcgaacactgaattagcaaatatagaacctaggggaaatacaaggctagatttctgcaagccactggtcacattttcatcaagcagtcaacatgtaaatttctgttgtaaagacaccttatttaatataatcgattcattaacattgaagtcatgaccaacaacactgtaactcatgcctgaatgaagcttatctgacacataagcttcataaggcacacaacagcctttttgcccttagga

SEQ ID NO: 17752 - DNA, 407 bp, Homo sapiens
  misc_feature (1)...(407): n = A,T,C or G
aatgaattgaaataaagcttttagattaattctttatatgctacataggtgtcagccattggtaatcattgatgtcattatagttattatcaacatgattatttgctctaagaggaactcaggcatctgcagggtgaggggaaccctgatctgggtctcccctgttgggagatgggtncccatcatacccttaggacaacccaggttaggtcagggggatgtgcccttctcttccagccataggctgctctgcacccacagagtggtgaggacatattagacaatgacagacagccctggactgacactgctgggtttggtttgccactccacgcagaagcagatatattccgcctgatgaggcgttgaaaccactagccgctgtgcggaatgacgttcaagacttt

SEQ ID NO: 17753 - DNA, 411 bp, Homo sapiens
tctttgaaaacatgggcgcttacactgttgctgttgcctctacgttcaatggcttccagaggccgacgatctactatgtgatgtcagggcctgcgtggcaactcatgcagcaattccagaaccccgacttcccacccgaagtagaggaacaggatgccagcaccctgcctgtgtcttgtgcctgggagagtgggatgaaacgccacagagcagcctgtgcttcggctagtattaatgtgtagatagcactctggtagctgttaactgcaagtttagcttgaattaagggatttggggggaccatgtaacttaattactgctagttttgaaatgtctttgtaagagtagggtcgccatgatgcagccatatggaagactaggatatgggtcacacttatctgtgttcctatg

SEQ ID NO: 17754 - DNA, 408 bp, Homo sapiens
acagaacgcctgagtatacaaaaacccaatgcttactctttttccacagtgggccctacagaacccacgtatgtgataaatcagccctccatgtacgcaggtttcgccccctgccaatactgtattttcaacctgtatggttgaaaaaaatccatatataagtgcagccatgcagttcaaacccatattgttcaagggtcaactgtatagtttattgaacagccacacccattcctttacacatgatctatggcagagttgaatagttgcaacagacactatgtggcctgcaaaatcggaaatttttactgtctggccttttacagaaaagtttgccagcccctgatctagaccagcaactcatctgatagaggcagaggtggccttaaagatgtggccttcttcatt

SEQ ID NO: 17755 - DNA, 416 bp, Homo sapiens
  misc_feature (1)...(416): n = A,T,C or G
cggannnntgggatcactcctgtgatattcctgttgaagatatgttacctaaattaaacacaaggaaccaccagacaagtccaaattgagggactttctacaaaataacttaatagcatcaaggttatgaacatcaaagaaggcctgaagaaactgttccagactggaggagactaagacaacatgaaaaataaatgcaatgtgtgattctgacctggatcctttttgctataaagcatataactggtataataacaagcaacatttgaagaggatctgataattatatggaagtaatgtgtcaatgttactttcctgattttgacagttgtattgtggtaaagttggagaatgccccttgtttaaacaatcaattgaattcaaacagaaataaaaggatcttatatatttaaaaa

SEQ ID NO: 17756 - DNA, 410 bp, Homo sapiens
ccacgcgtccgcccacgcgttcgaaaacaaactatattttatcccctgccccagtgaagtttccttgatgtaacaatacctaggatgcaacactgacataacgctaggatttttgttaagattcacaaactgcataagttgaaagagagggtgacctgaagtattaagtgtacattttaagtagttagtgtttgcatgtatatatcgcctttcattcaggaagatcacaaagcatcacatacacaatagactgtaactatttctgggagggcatataaaagtcataagaatgctttacaagccatgaaggaggataatgtttttgtcaaggacacaagagaagcctccagccaagttaaacaccaaagatgaactttttagcttctttgggatggaaagatggaactctt

SEQ ID NO: 17757 - DNA, 412 bp, Homo sapiens
tcatgtaatacatcagaaaatgcaaagcacactgttactaggtacctactcaatctaaaaataatgttcccacacttgggaaaatgttaagcactaaatctttaaaagtcattgttttataaacaattataaacagaaaaaaactcttcatatttacataataatggtatgaaataactttggaataatataagaaacatcttgccaagaggaatcattttgctatataaaaagtaagcagaggccaggcgcggtggctcatgcctgtaatcccagcactttgggaggccgaggcgggaggatcacctgcggtcacgagttcgagaccagcctggccaacgtggtgaagccccatctctactgaaaataccaaaattggccgggcatggtggcagttgcctgtagtcccggt

SEQ ID NO: 17758 - DNA, 411 bp, Homo sapiens
  misc_feature (1)...(411): n = A,T,C or G
aatttatagagtccccttgcgtcatagatcattaattgaaggctccaaacacacccaagactgcaatctattacatttctatacactggcacataatttattaacaagctttaagaaaagatgcattggcacttctattcacagtgtaaaatttcctcacctgaacctccttagatgccaagcaagatggtttaataaactataattagtgaaaactgccttttttattatgcaaaagcgcgcctcattttacaacagaggggattttgtacacataacatgggttatttagtttaactctggcaaaaaaaaaaaaaaaaatttggaaggtggaggttggcatcccgcccaaaaaaaaagggcccaaaccttattacccattcttttcacgtaaaccatacttaaggttgn

SEQ ID NO: 17759 - DNA, 417 bp, Homo sapiens
  misc_feature (1)...(417): n = A,T,C or G
gcacagggaagttctggtgtcatagatatcccgttttgtgaggtagagctgtgcattaaacttgcacatgactggaacgaagtatgagtgcaactcaaatgtgttgaagatactgcagtcatttttgtaaagaccttgctgaatgtttccaatagactaaatactgtttaggccgcaggagagtttggaatccggaataaatactacctggaggtttggcctctccatttttctctttctcctcctggcctggcctgaatattatactactctaaatagcatatttcatccaagtgcaataatgtaagctgaatcttttttggacttctgctggcctgttttatttcttttatataaatgtgatttctcagaaattgatattaaacactatcttatcttctcctgaactggtgattn

SEQ ID NO: 17760 - DNA, 420 bp, Homo sapiens
atatataagaaatcaaatcagatattcaaatcattaaagctctctctgtttactgacctgctggctagggttattgtgaattgtttatatacctgtcaccttcttctggtcttttcataagacataatttaatccattatatttagcaccacaatacttttattttaaagcattatcttttgagcattactgcaatgttttataccaactttaatactggattctttgcttttttaaaagtaaaattgtggtgttgcttttcctgctagtcatttttttgggtttattgcctgaactttttctgcttttataatttttataatatgatattatttgaaaaaatgtaaatagatttatcatgtccaataattggccatctttttataatcactgttactatcaaaaacagtgacatgctgg

SEQ ID NO: 17761 - DNA, 422 bp, Homo sapiens
  misc_feature (1)...(422): n = A,T,C or G
cacgaccgccagactcgagcagtctctggaacacgctgcggggctcccgggcctgagccaggtctgttctccacgcaggtgttccgcgcgccccgttcagccatgtcgtccggcatccatgtagcgctggtgactggaggcaacaagggcatcggcttggccatcgtgcgcgacctgtgccggctgttctcgggggacgtggtgctcacggcgcgggacgtgacgcggggccaggcggccgtacagcagctgcaggcggagggcctgagcccgcgcttccaccagctggacatcgacgatctgcagagcatccgcgccctgcgcgacttcctgcgcaaggagtacggnggcctggacgtgctggtcaacaacgcgggcatcgccttcaaggttgctgatcccacaccctttcatattcaagg

SEQ ID NO: 17762 - DNA, 417 bp, Homo sapiens
  misc_feature (1)...(417): n = A,T,C or G
ctttgaactgatgcattctggaaagagcattcgaactgttgtaaagatttaattcaaaagagaaaaataatgtccatcctgtcgtgatgtgataggagcagcttaacaggcagggagaagcgcctccaacctcacagcctcgtagagcttcacagctactccagaaaatagggttatgtgtgtcattcatgaatctctataatcaaggacaaggataattcagtcatgaacctgttttctggatgctcctccacataaataattgctagtttattaaggaatattttaacataataaaagtaatttctacatttgtgtggaaattggcttgttttatgctgtcatcattgtcacggcttgtctgcccattatcttcattctgcaagggaaagggaaaggaagcagggcagtggtggn

SEQ ID NO: 17763 - DNA, 423 bp, Homo sapiens
acgtgacatgtgtagtgacctctgacatgaggacacttgcttgtgcacatgcgcacacagtgaatgttttaagttatacaaacatatgaccttaagatgcaaagagccataatattctaaagaggtgatgaacagagggggtggaaactgcatcacagatgttttccaagggccaaggtggaatctgagctctagtgtctgactttgagatgcgttatatttttaacacataaatgaggggatccatatcacattctttcttgtggaccaccaaattgaaggctttcttgtaattcacaagcagcagctctccatcatctctccgtagcctgggtgaagtcccagaagctggtgtgcatcattttccaaggaggcagagctgcttgctctgcagatcattcctttgagagaggagtacaagtg

SEQ ID NO: 17764 - DNA, 414 bp, Homo sapiens
ctgaggagaggagatgatgttataggctgattttatgtatataaaacactgtactgtttcaaaccagccaagagaaatatagcacactagactccagcacattttaaaaagtattattttcagtgagcatccattaaaaacaaaatcactccactgtataaagcatgctttgttacagtggaaggtgtatggtgacagttgattctatgggtagaaaatgacctgtggatgatgtcaacgtggctcaggccacttcacaggcacagaatggtgtggattttatggacaatgattgacatcacggaagtctgactggaagtatgcatgtaccaccccccccggccccagatatattttgtctgataggggtaagaattaacttgcaattatgcaaatatatgtatattatacgtt

SEQ ID NO: 17765 - DNA, 421 bp, Homo sapiens
  misc_feature (1)...(421): n = A,T,C or G
cttttgagagaggccaaaaaaaggaggatgacatgctgtctcctctcttcagtatagacattaggctcttattcagaaaggatttttctttaaaaatgtacttactttactgaactacttacaggcacatttcttcataaggccacacctaatccaaacaagacagtctcccaacactgaagttccaaaataatccttaccactttgtaaaccatttatagctttgaaagtgttaagtgattccttcgttattatttatgcatgttcatgaacttctgctgtacattggaataggagttaacacattcacatttactgtctattttcttgtgtgccttatgagatggcttttctgactgtatctcaatagtctttctttctatgcaggcttataatcagtacaactactgttttctaaaan

SEQ ID NO: 17766 - DNA, 414 bp, Homo sapiens
taatgctcctaaattctctaaaaagtaaccttactttgaggttatagtgagagccaaagtcctcttcatggcttataagagactttattatctgactgccctttcattgtcttggggcacacagaaatatatgtgtatttttgaggaactctatgttaaactatttttttcttttttttttgaaagagagtttcgctcgtgttgcccaggctggagtgcaatggctcaatcttggctcaccataacctctgcctcctgggttcaagcgattctcctgcctcagcctcccgagtagctgggattacgtatgccaccacgcccagctaattttgtatttttagtagagatggggtttctccaagttgttgaggctggtcttgaacccgcgacctcaggtgatccacccacctcacc

SEQ ID NO: 17767 - DNA, 396 bp, Homo sapiens
aagctcacctacgcagaagctaaggcggtgtgtgaatttgaaggcggccatctcgcaacttacaagcagctagaggcagccagaaaaattggatttcatgtctgtgctgctggatggatggctaagggcagagttggataccccattgtgaagccagggcccaactgtggatttggaaaaactggcattattgattatggaatccgtctcaataggagtgaaagatgggatgcctattgctacaacccacacgcaaaggagtgtggtggcgtctttacagatccaaagcaaatttttaaatctccaggcttcccaaatgagtacgaagataaccaaatctgctactggcacattagactcaagtatggtcagcgtattcacctgagttttttagat

SEQ ID NO: 17768 - DNA, 430 bp, Homo sapiens
attgcagtctttctacccttgggaatggggagaattttgaatctttaccccaagaccaaaaatagtaagtgctgtttctggtcctgaacatccagaattatggaggcttactgtggcctcacaccacattagaatttggtctggaaatcaaactttagaaacaagagattgtaagccattttatactatcgacctaaattccagtctaacagttcctttacaaagttgcgtaaagcccccttatatgctaggtgtaggaaatatagttattaaaccagactcccagactataacctgtgaaaattgtagattgcttagttgcattgattcaacttttaattggcaacaccggattctgctggtgagagcaagaaagggcgtgtggattcctgtgtccatggaccgaccatgggaggcctcaccatccgtc

SEQ ID NO: 17769 - DNA, 424 bp, Homo sapiens
  misc_feature (1)...(424): n = A,T,C or G
tttttaagaaaggcaagaaaatatctattaagactgtttaaatgcactgttctggttcctaacttgaagcagttgtccttgtgagaaccggtctttgcctttagctcatgtcgtgtttcacagcaaagagggtacagaaccatcactggtccaggttaatgtacaaaattttctggcaatgcctgattaaaaaaataaaattggcttgttgagaacagctgttttcgatttctaatgtgaagcaagacagagcactgctgtaaatgtctagcagcagattttttttttattggtacatattatccttcaaatctgagaatttggactaactgcaccaaagaaccctctaatttggtccctggcacatgcatacttgtcaatgtttttattcttttacaagacctgcattttatttgaattaccn

SEQ ID NO: 17770 - DNA, 407 bp, Homo sapiens
atttgaaccaagtgccagaaccttgtggcattatgatctgtcataaaatgtggttaaaagtcttagtagcctgcgcagtgcattctggggaccgaggtcgagccagccactgctgccgtcgcctgagggaagcgagaagaggccgcgaccgggaagaaaacgctgagtcgccactggagagaagtggactccatagcagcagaccccgccagagaggcccgcccacccgttcgcccctccccctgccccgttcacaatgcagcctgcttctgcaaagtggtgcgatcaaaggcactatgtcttcattgaattttgtgttgaagacagtaaggatgttaatgtaaactttgaaaaagccaaacttacattcagttgtctcggaggaagtgataatcttaagcattgag

SEQ ID NO: 17771 - DNA, 396 bp, Homo sapiens
ttgccagagaagctgatgcagaattctcaacaatatcataaggaaagagaacaaccaccacgttttgctcaacctgggacatttgaatttgagtatgcatctcgatggaaggctcttgatgaaatggaaaagcagcagcgtgagcaggttgatagaaacatcagagaagccaaagagaaactggaggcagaaatggaagcagctaggcatgaacaccaattaatgctaatgaggcaagatctaatgaggcgtcaagaagaactcagacgcttggaagaactcagaaaccaagagttgcaaaaacggaagcaaatacaactaatacatgaagaggagcatcggcggcgtgaggaagaaatgatccgacacagagaacaggaggaactgaggcgacag

SEQ ID NO: 17772 - DNA, 397 bp, Homo sapiens
tgatctcacatgcctcactttgacatttatcatgccttttattaaaaatatcccttaggaacagtaagtttgccttaactctctgcatggtttaaaaagccattggttttgtgtgtgtttacagtaattatgcagatgactaaatgagttgacacagtaaaattacttccatatggtacagtaacaacctaactcccttctacctgatgtaaccatttacaaattatagttattgtaccagtctttcaacatttcagggttaatctgacctatgcagaattctagtgtgaatttattgtgaaaatgctaaatgaaacaatttgtcagaaattatgtacaattttcattaccttcaaaatggatcttttgcactgtctgagagtatatatttttgcag

SEQ ID NO: 17773 - DNA, 476 bp, Homo sapiens
  misc_feature (1)...(476): n = A,T,C or G
ggcgtagtaacctgagagcctcgctgaagccctgcgaacngcncgaacacgcgtgcggacaagacatttctggagctgtgctctgtctccaaaaacctcaatgcctttagggcttttctcagtggtcgagctagccttctctttggaggaggatgaagccgcattgcacattctctgcttcctgtcgtagcctctgttgtcaatggaaatgcggaagcccatctggtgcccgtcagtgagaagcaacgttctgcgctctctccgttagacctccatgctgtccccagtcttgtccattccatgctgctgtgttacaaactctcagaggtaatttgcaggggaggaaggggaatatgattttaaaaacaaaatatttacaacaacaaaaattcttaggatcacctgacctttgtaatgttatttatgttggggagggaggggggctgagaagggaaaacaacagtgtgcaacatctt

SEQ ID NO: 17774 - DNA, 509 bp, Homo sapiens
  misc_feature (1)...(509): n = A,T,C or G
tggtnagtnacccanaggnnnagttttgnaattgatgngccnttcgaanacttgannagcactcgtganannccnccggaantnccgggncgacccacgcgnccgatctcgngcctcagcctcccaagtagctgggattatatgcacgtgctaccatgtccagctatttttgcattgtttgtagagacggggttttgtcatgttggccaggctagtcttgaactcctgacctcaagtgatccacccacctcagcctcccaaagtgctgggattacaggcctgagccaccgcacccagcctctccctgttctttaaatatctcttaatataggggggcatggagagaaagtctctccaatattttcttcttcttttccatttttgtatttttccactttatccttctcaattgtggcctcttcttccactttctaggatccgagaacgctctaagcctgtccacgagctcaatagggaagcctgtgatgactacagactttgcgaacgct

SEQ ID NO: 17775 - DNA, 492 bp, Homo sapiens
  misc_feature (1)...(492): n = A,T,C or G
tgtagggggccnnnnnagggtttcggaactganaccctcngancctagccncctactggaaanccnccggaannnnngggncgacccacgcgtgcgggggctcctccttctgtttcccagactgagagccgtttcggcaccatgtcagcttagggtaagagctacgatccgttcgacgacgacggggaggacgaaggcgcccggccggccccttggagggacgcccgagacctccccgacgggcccgacgcgcccgcggacaggcagcagtacttgcggcaggaggtcctccgcagggctgaggccacggccgccagcaccagcaggtccctggccctcatgtacgagtccgagaaggttggggtcgcctcttccgaggagctcgcccgtcagcgaggagtcctggagcgcacagagaagatggtggacaagatggaccaagatttgaagatcagccagaaacacatcaatagcattaagagcgtgtttggg

SEQ ID NO: 17776 - DNA, 477 bp, Homo sapiens
  misc_feature (1)...(477): n = A,T,C or G
gaagagaagccngaagcctttgagctgaaacccctgacgatctggtgaaagcnccggaatccgggtcgacccacgcgtccgcccacgcgtccgggcttaaataggaggcagctgggttctcctgttagtgttcgcattcagtctgttgcattatcatacattatgtagcctctggaaaattccagagtacacttgagagaatgtgggtggaaaaggcaagcagtgctctagtggtgtcattgaagtagttgtaacctggtggaacccctgcagtgcccttaagcctgtgtggtcactgggtcgcacttggaggactgttggtgtggccagtggagcactgctgtgcctccgatgacttgatactttttttgcagtggaactctgagacgaatcctgcataacattaattcatcttcttgtccctgttatttagatgaatggattaagtttgatgatgacaaagtcagcatcgtaaca

SEQ ID NO: 17777 - DNA, 403 bp, Homo sapiens
agcatcttttacaatgatgaaggttattctttcagcagtgtcctgtattatggaaatgaagctactcttcttatttttgatctgctgttcttctgtgttgtggatttggcttgccaaaattttattttagcatccttccttacatatctacaacaagagatttttagatatatccgtaatacagtaggacaaaagaatttggcatccaaaacattggtggatcaaagatttttgatttaacttcctgaataaataacttaaagactcagtataatcatggccaaaaaaaagtcatgatatcaggttagtttgccatattttttaaaacttataatgcagactattctgcttttgttttttatttgcagaaagatttatttttataacttgggaatatataacc

SEQ ID NO: 17778 - DNA, 397 bp, Homo sapiens
  misc_feature (1)...(397): n = A,T,C or G
acacaatggatctggtgctaaaaagatgccttcttcatttggctgtgataggtgctttgctggctgtgggggctacaaaagtacccagaaaccaggactggcttggtgtctcaaggcaactcagaaccaaagcctggaacaggcagctgtatccagagtggacagaagcccagagacttgactgctggagaggtggtcaagtgtccctcaaggtcagtaatgatgggcctacactgattggtgcaaatgcctccttctctattgccttgaacttccctggaagccaaaaggtattgccagatgggcaggttatctgggtcaacaataccatcatcaatgggagccaggtgtggggaggacagccagtgtatccccaggaaactgacgatgcctgcan

SEQ ID NO: 17779 - DNA, 412 bp, Homo sapiens
  misc_feature (1)...(412): n = A,T,C or G
atcgcttgagcccaggaggtagaggctgcagtgagccgagatcacatgactgcactccagcctgggtgacagagcaagactctgtctcanaaaaaaaaaaaaaaaaaagggataccccaattcccccctagggagaacataaaaagggtttttttttaaaaagaaaaaaaactggaaaaggaattcaggcttgttgtaaaagaaaaggccccttcttttgaataaaaggggggggggcaaaggtggtttaaagggcttttgggttttttaaaaaaaagcctggcccccttggaaaaattttcctcccagccccggggggcttggttggaagggtcctaaaaaaaaccaataaaaaaattttttttttttttccataggaacagggggggggtggttttcaatttggcgggaa

SEQ ID NO: 17780 - DNA, 403 bp, Homo sapiens
cacaagtcttcactccttcctgcgagccctgaggaagccttctttccccagacatggccaacaagggtcctgcctatggcatgagccgcgaagtgcagtccaaaatcgagaagaagtatgacgaggagctggaggagcggctggtggagtggatcatagtgcagtgtggccctgatgtgggccgcccagaccgtgggcgcttgggcttccaggtctggctgaagaatggcgtgattctgagcaagctggtgaacagcctgtaccctgatggctccaagccggtgaaggtgcccgagaacccaccctccatggtcttcaagcagatggagcaggtggctcagttcctgaaggcggctgaggactatggggtcatcaagactgacatgttccagactgttgacct

SEQ ID NO: 17781 - DNA, 495 bp, Homo sapiens
  misc_feature (1)...(495): n = A,T,C or G
tggangtnacccgggaaaagttaaaaactgaggccttttggaactgatgccntcggaanngacccacgcgtncgcggacgcgtgggcggacgcgtgggtgggaggcaaatatgtttttcatcctgccatatgacacctatgagaaacgttcacagtgaggagtagccaggttgctatgacagtaaccctgccacacactgcctgaaatcggaactcccttggcctccctcttaactaagtgacccatgtagaaggaagccaggagatatggtaccgaacaatgacaggggaagggtattggacacggcagcgtcctccttattgaaaacacattatgtcagttgggaattttaaataagcttttagcaaacctaacactaaaagcaaaatagaagaaagctataccattaccataatacatttttcatctcatggctacaatggaattcttgaaaaggaaaaaaaaatcctatctacatataaaaacctgcatgg

SEQ ID NO: 17782 - DNA, 404 bp, Homo sapiens
aggaagattctttgctggtcttgctctgtgtgcatctgaagcttctttggcctagattttagcacaaacctgagtatatctcttctactttcatcatgtgttctgtaccttctttttgtttcattgggcatgctagggaaataggtggattttgtgtgtaatgccatcagtttttatgaaagcttgatgaggtataggtcatttgttttgagtatgtgggccagaaatttaaaattagaaatttgtttttctgttgagtatataaacaaaaattggtcccaattctaacaggtttaatccttcttgaagccaataagttttatcttttataatctgtcaggatgaaccactccttagcttttatccaatattaaactgcaagtgttagcactgaaatattgtca

SEQ ID NO: 17783 - DNA, 496 bp, Homo sapiens
  misc_feature (1)...(496): n = A,T,C or G
tgcaagttacccgggggaaagttaanaactgaggccttctgaaaaatgangccctcggaanngcnccacgcgtncgcccacgcgtccgtttgggatcgcggattggggattggattggggatttggggttggatcctggatttggggccgggtcggcggtggggggcagtgaaaaggtgacagagagcagcccctgctcaggagccggtggttgggggtctgagaagtcaccaccaccaagaagttcttcggcttcgggagccgcgggggcgagatggcccgggctccatagaccacgtctgcacggttccgggtaccgaatccgggacgcggaacagcggaaaatccaagggcggctgtcaaggaccggaggtggagcgcggcctggagcgcaggagccggagacctggaggcccgggacaagcagcacagaactgctctacatttggcctgtgccagcggccatgtggaagtggtcactctcctggtgaacagn

SEQ ID NO: 17784 - DNA, 407 bp, Homo sapiens
atggtctcccgcagggaagtggacatgttgaaaattaggtctgaattcaagagaaaggacggcaagtccctgtactattatatccagcaagacactaagggcgactaccagaaagcgctgctgtacctgtgtggtggagatgactgaagcccgacacggcctgagcgtccagaaatggtgctcaccatgcttccagctaacaggtctagaaaaccagcttgcgaataacagtccccgtggccatccctgtgagggtgacgttagcattacccccaacctcattttagttgcctaagcattgcctggccttcctgtctagtctctcctgtaagccaaagaaatgaacattccaaggagttggaagtgaagtctatgatgtgaaacactttgcctcctgtgtactgtgt

SEQ ID NO: 17785 - DNA, 466 bp, Homo sapiens
  misc_feature (1)...(466): n = A,T,C or G
agtccccctgaagctttgganctgacggcntcggaanngccacgcgtccgaaaaaacctttggaaaggaaggacgactggaagaggaagtagccttaaagataatcaatgatggggctgccatcctgaggcaagagaagactatgatagaagtagatgctccaatcacaggtataaaaagtctttgcatgatacttttttacagtatagatttgcatgagcagttttgagaaataattacaaataaccagctaaaaagtggtgtggtaatttttctagaaattatgagacagtcaggattggttaggatatttgttgttaattgaagaaatacaattttaagtgtctcatatttccagtagaactatttagtatgagtagattgactacagttttgcagcagtcctgtcaaaagctggagtgatttaagttagaagttaaactgtgatcccttttggtgaatgccc

SEQ ID NO: 17786 - DNA, 406 bp, Homo sapiens
  misc_feature (1)...(406): n = A,T,C or G
ctggactccacgtggaatttattctaaacttacaatattgttctgggatctgggcaagttgtgttggggatggacatgggtctcatagagatgtgcgttggcgagaaacggacagtgatcattccgcctcacctgggctatggggaagctggcgtggatggagaagtgcccggcagtgccgtattagtgtttgacattgagctgctggagctggtggctggccttcctgaggggtacatgttcatatggaatggtgaggtgtcacccaacctctttgaagaaattgacaaggatggcaacggagaagtcctcctggaagagttctcagagtacattcacgcccaggtggcatctggcaaagggaaactcgctcctggctttgatgctgagctgattgtgaagaatn

SEQ ID NO: 17787 - DNA, 486 bp, Homo sapiens
  misc_feature (1)...(486): n = A,T,C or G
cccgaggggaaggtaaaaactgaggcccttgaanactganaacctcgtgaanngcnccacgcgtncgggagaatcgacacagttggcacggatgtccgccaggtttttgagtatgacctcatcagccagtttatgcagggctacccttctaaggttcacatactgcctatgccactggaaagcacgggtgctgtggtgtactcggggagcctctatttccagggcgctgagtccagaactgtcataagatatgagctgaataccgagacagtgaaggctgagaaggaaatccctggagctggctaccacggacagttcccgtattcttggggtggctacacggacattgacttggctgtggatgaagcaggcctctgggtcatttacagcaccgatgaggccaaaggtgccattgtcctctccaaactgaacccagagaatctggaactcgaacaaacctgggagacaaacatccgtaagcagtca

SEQ ID NO: 17788 - DNA, 407 bp, Homo sapiens
cacggggtccccgtagccccggcccccgcccagccccaggtctccccaggccctccgcaggctgcccggcctccctccccctgcagccatcccaaggctcctgacctacctggcccctgagctctggagcaagccctgacccaataaaggctttgaacccaaaaaaaaaaaaaaggggggcccccttaaaagaacccctggggggcccaaacttaacccgggcgggcaaggaaaaacctttccccttatggggggccgaataaaaacctaccggggaaccttggaaaagaacccttccttgggggggggaacatatgggcccaacccccctccaaaaattaaagcctctagggaaaaaaaaaacttttaaggggaaaagggggaaaaacaaccggcaaagcctgggg

SEQ ID NO: 17789 - DNA, 475 bp, Homo sapiens
  misc_feature (1)...(475): n = A,T,C or G
ctaacgctgaaggccgttgaanactgangncntcgtagncgcaccacgcgtccgatcctttgtcaacctcacagacaacaagtttaataacacattgcagagtgattcttgaagaacattccacttgtgaaaatgaagttagtaaaagcagacaggatttacttaaatccattgtttcaagaatgaaaaaggcagtagaagatgatgtttttattcctctgtatccaaagagtgctgtagaaaacaaaacatcacctcattcaaagttccaagaaagacagttctggtcaggcctaaagctcttccgcaatattcttctttggaatggactccttacagatgacaccttgcaagaactaggactagggaagctgctaaatcgttaccttattatagcacttctcaatgccacacctgggccagatgtggttaaaaagtgcaaccaggtagcagcatgtctaccagaaaaatggtg

SEQ ID NO: 17790 - DNA, 404 bp, Homo sapiens
cttagtaattggtaaatgctcttgggggaaagctatgtgtgatcttaactttctgtgtttcctgctttcagagaccgtaatccacattggttgccttccaatgcctgcagtcattgtacatattttagctgttatatcattaaggaaaatcttatatccaagccatttactttaactgacactatttaaaatcttaatctaatatggcttgaaaaaatatggtgtttgcatgttctcactcataagtgggagttgaacaatgagaacacatggacacagggtggggaacatcacacaccagagcctgtcagggggtcagggactaggggagggagagcattaggagaaatacctaatgtagatgatgggttgatgggtgcagcaaaccatcatggcacgtgtat

SEQ ID NO: 17791 - DNA, 485 bp, Homo sapiens
  misc_feature (1)...(485): n = A,T,C or G
gtngggggccgggnnagttagngcttggaccgttgaanctgatagcntggggaacgcccggattcccggtcgacccacgcgtccgcggacgcgtgggcaattatcggttaaaagaatcccctcgagtaatgaacccagtatgcaaatttctgtaagattatgttcatcactttaagtgatgaaaatgttaagactagaaactgtattaatctgagtaattaaatgtgtgtctatttcaaaagttatttctcattgaaagcaaaatttattgaactgataagttatgaaatagtgtcattttcatgttaataatggcatattaatgttgtcctgaaattatgtcagtttcaaagaacaaatctaattcttacaggaacataattttttagaagaaaaaagatgtaagctgtattaaagaaagtaaactctgagctatctggaaaattctatcttccaaataactgagctttcactgtcatttattn

SEQ ID NO: 17792 - DNA, 406 bp, Homo sapiens
cggacgcgtgggtgcaccactgcacctggccatatccatccttacgaatgggattattgttcttataaaaaaaaaataagggggggctgggcacgggggctcatgcctgtaatcccagcattttgggaggtggaggcaggcagatcacttgaggtcaggagttcgagaccagcttggccaacatggggaaaccctgtctctactaaaaatacaaaaattagcctggtgtggtggcaggcgcctgtaatcccagctacttgggaggctgtggcaggagaatctcttgaacccaggaggcagaggttgcagtgagccaagatcacgccttcagatttcagcctgagcaactgagggagactccatcaaaaatgaaaaggttgaagagagcaccctagtctcttttgtt

SEQ ID NO: 17793 - DNA, 430 bp, Homo sapiens
agagaacatcgatatgtatatacattctacagaataattcagtattgctgattttaaaggcggagaagttctgaaagttaattgacctatgttattttgtgtacaagttgatattgttgaacatacttcaaaaataatgtgccatgtgggtgagttaattttaccaagagtaactttactttgtgtttaaaaagtaagttaataatgtattgtaatctttcatccaaaatattttttgcaagttatattagtgaagatggtttgaattcaaattgtcttgcaacttcagttttatttttgccaaggcaaaaaactcttaatctgtgtgtatattgagaatcccttaaaattaccagacaaaaaaatttaaaattacgtttgttattcctagtggatgactgttgatgaagtatacttttcccctgttaaa

SEQ ID NO: 17794 - DNA, 489 bp, Homo sapiens
  misc_feature (1)...(489): n = A,T,C or G
agatcactgacactgcggtcnctgcccggacaccccgggtcgacccacgcgtccgatgaagccagccatggaaactgcagccgaggaaaatactgaacaaagccaagagagaaaaggctgctttgaatgctgcatcaagtgtctgggaggagtcccctacgcctccctggtggccaccatcctctgcttctccggggtggccttattctgcggctgtgggcatgtggctctcgcaggcaccgtggcgattcttgagcaacacttctccaccaacgccagtgaccatgccttgctgagcgaggtgatacaactgatgcagtatgtcatctatggaattgcgtcctttttcttcttgtatgggatcattctgttggcagaaggcttttacaccacaagtgcagtgaaagaactgcacggtgagtttaaaacaaccgcttgtggccgatgcatcagtggaatgttcgttntcctcacctatgtgcttggagg

SEQ ID NO: 17795 - DNA, 429 bp, Homo sapiens
cagcgccgtaatggcgttcttggcgtcgggaccctacctgacccatcagcaaaaggtgttgcggctttataagcgggcgctacgccacctcgagtcgtggtgcgtccagagagacaaataccgatactttgcttgtttgatgagagcccggtttgaagaacataagaatgaaaaggatatggcgaaggccacccagctgctgaaggaggccgaggaagaattctggtaccgtcagcatccacagccatacatcttccctgactctcctgggggcacctcctatgagagatacgattgctacaaggtcccagaatggtgcttagatgactggcatccttctgagaaggcaatgtatcctgattactttgccaagagagaacagtggaagaaactgcggagggaaagctgggaacgagaggttaagcagct

SEQ ID NO: 17796 - DNA, 494 bp, Homo sapiens
  misc_feature (1)...(494): n = A,T,C or G
ccgattaattaagactgaaggtcnnctgcccggaaccccgggtcgacccacgcgtccggttacacaatgaggtatggaaagccattgaaagtttccaagcaagagagattacatgatcaaaacaggaagattattttattttgttttttgcattatgtgcaagtgtagacatgcagaggattgttttagaatccatatgtaaagtgtccaaaaggaaaagcttaattcagggagacaaaatagaaaggtctagcaaaatctaggagtgaggtgtgaaggggccaaatcagatcagttgtaataggagtggaaagaaaaagcctaggatgtttcaacagagggcactgggccaaagctttggtgttacctggcatagggtttctttcttctcatttgttgataatgataagcttttgcccatatttctgtggaattatttaccattttggtactgatttgtagaagtctgtttagacacataagtgcttttagat

SEQ ID NO: 17797 - DNA, 430 bp, Homo sapiens
cgcaccagcatggcacatgtatacatatgtaactaacctgcgcattgtgtacatgtaccctaaaacttaaagtataataataataaataaataaataaaagaaattttactgtttgtagtcactacattttaggggtggtttcttctgtagtcaaagttaaatgaaaactttggcaagtcttaacacccacaatataatacaatcttagttttaacctaatggagtataataaatgatgctatgttatcatattcttttcacttgcatgatgataacatttcatgtattctagctttcatgcatgattcctaagcttactggacttttgatacctgcactttttcactggggtgttttcatttgggagcttttcttgagttaaatggagacaacaggagattgtcaaatccagttttgagcaaaacaaat

SEQ ID NO: 17798 - DNA, 437 bp, Homo sapiens
  misc_feature (1)...(437): n = A,T,C or G
cggacgcgtggggtcgaagcgaggacgtggtgggtcctctggtgcgaaattccggatttccttgggtcttccggtaggagctgtaatcaattgtgctgacaacacaggagccaaaaacctgtatatcatctccgtgaaggggatcaagggacggctgaacagacttcccgctgctggtgtgggtgacatggtgatggccacagtcaagaaaggcaaaccagagctcagaaaaaaggtacatccagcagtggtcattcgacaacgaaagtcataccgtagaaaagatggcgtgtttctttattttgaagataatgcaggagtcatagtgaacaataaaggcgagatgaaaggttctgccattacaggaccagtagcaaaggagtgtgcagacttgtggccccggattgcatccaatgctggcagcattgcatgattcn

SEQ ID NO: 17799 - DNA, 431 bp, Homo sapiens
cccacgcgttcgctctagtctcagctactcatgaggctgtggcaggaagatggcttgagcccaggaggttgaggctgcagtgaactaagatcatgccactgcacccatcttgggcaacagaatgagatcctgtctctaaaaaaataaaaacaatttacaacagtaagcacctgtacacaagccccatctccagtcctgtttctagggcttccaatttaacacacctagaggctgggcatagtagctcatgcctgtaatcccaatactttgggaggctgaagcaagtgaagcacttgaggtcaggagttcgagaccagcctggccaacatggcaaaaccccatctctactaaaaatgcaaacattacctgggcatggtggcacatgcctgtaatcccagctactcgggaggctgagacaggagaatcacttg

SEQ ID NO: 17800 - DNA, 437 bp, Homo sapiens
  misc_feature (1)...(437): n = A,T,C or G
cccacgcgtccgcggacgcgtgggtggggaccttctgtctgaagaggagctggatgaatgagactctgggaatcatctacacaggaccaaacccaacaggcgccctggcaccggggagggggtagttgtactctgcttgtacagtccttgagcccagtttacagatctggagagcaggaggccaggacaaggacaaaggctggaggatggagtaggacccaggggctctgccatcctaggcatcattcaaggtcttttatgaagactttacagatgtcctctgtaaatagcatcgagagtggagttcagctcctttctctacttttttttggnctgatggcacatatttattgttctgtggtctaatcacagtgtttctaaatgtaaaaagtgcatatgttggtgtagctagtcccgcgacattgagctcctctgan

SEQ ID NO: 17801 - DNA, 433 bp, Homo sapiens
  misc_feature (1)...(433): n = A,T,C or G
tccaagatcttcagtttgatgaaggaagcacgaaagatggtgagtcgatgcacttacttgaacattctcctgcagacccgttcaccagaaatattggtcaaatttattgacgttggcggctacaaacttcttaacaattggctgacgtattcaaagacaaccaacaacattcccctcctccagcaaattctactgaccctgcagcatctaccgctcactgtagaccatctcaagcagaacaacacagctaaactggtgaagcagctgagcaagtcaagtgaggatgaagagctccggaaattggcctcagtccttgtcagcgactggatggctgtcatccgctctcagagcagtacccagcctgctgagaaagataagaagaaacgtaaagatgaaggaaaaagtcgaactacccttcctgagcgacctttgn

SEQ ID NO: 17802 - DNA, 437 bp, Homo sapiens
ctaggatagagaacttactctgatttgctcgtggagttagaaccctacttgcctaaatgaggaatgtctttgctaccatctaaaatacgaaggtttctggctgggtaaggtttgtacttgacagtaaaacctgatgacaccatttgtttgcctgcaagtctacattacatatttcacaactttgtccctctctagtaggcacattggaaaaattcttcaactgaaaactaccttggtaccatgtcctacacgttttaaaccttagttttaaaaattcccctgcgaaatagccataagtattcatatcaagtcagttgtgactccttgtgtatacaattcattttttgtgtcttcagggtaaactcaatttttggtaaagtggcttcagcttttgtgaaaaccgtttttgtgtgtaagcatgacacacaacagactca

SEQ ID NO: 17803 - DNA, 434 bp, Homo sapiens
  misc_feature (1)...(434): n = A,T,C or G
ggactgccccccacccccaccatggtgctattctggggctggggcagtcttttcctggcttgcctctggccagctcctggcctctggtagagtgagacttcagacgttctgatgccttccggatgtcatctctccctgccccaggaatggaagatgtgaggacttctaatttaaatgtgggactcggagggattttgtaaactgggggtatattttggggaaaataaatgtctttgtncaaaaaaaaaaaaaaaaaaaaaaaaaaaaaaaaaaaaaaagggggggcccttttaaaaaacccctgggggggcccaattttatcgggggggggaaagaaaaattttttttctttggggggggggatataaaacccccctggggatttttggaaaaaaacctttttttgggggggggaaaaaaaggaaacaaccacc

SEQ ID NO: 17804 - DNA, 426 bp, Homo sapiens
  misc_feature (1)...(426): n = A,T,C or G
attggtatgtttttgccatctggtccactcaattgtatatttttattttgcaaaacaacccaaaacttactttacgttgctttgttcagtaccttttgaattcccccagaagagttgttttcaaaacaaacattccagaatgaatgtcgctcttcaatggaacgtctttattgtgcttgaagtatttcttctctggttgtaattctaaattacagagtcatttgagctttctcccctcccgctagtatctttacaggagcagggaagagcagtagaggatgtataattttgggcgaagttaaattacaatttatttgaggttattcctaaacctatttatttggtgttttggaggagatcacacactaagagaacgttgattgcctcggctattgtgctggctggacactntggtcacttttgaag

SEQ ID NO: 17805 - DNA, 408 bp, Homo sapiens
cccacgcgtccgctactttagatgatccaataatgattaaagaatacctgtacctgcagattccagtttcaaagaaatttaattattatttacacagttaaggaacaggtgatacattttcatttgttagaaactgatctttctgtaataaaatagattttcaattcaaaaaaaaaaaaaaggggggggccgtttaaaagaatccttggggggcccaaatttaacgggggttgggaaggaaaaatttttttccttatggggggcggttttaaaacctacttgggatttttggaaaggaaccttttttttggggggggaacttattgggccaccctccttccaaaatttaaagcctttggggaaatataaatttttaaggggatagggggaaacctacttctttttgtt

SEQ ID NO: 17806 - DNA, 460 bp, Homo sapiens
  misc_feature (1)...(460): n = A,T,C or G
ctttgatccctttcggaatttgaacgcatggcagggncgacccacgcgtncgngagatgcgggtcacggcaccccgaaccgtcctcttgctgctctcggcggccctggccctgaccgagacctgggccggctcccactccatgaggtatttccacaccgccatgtcccggcccggccgcggggagccccgcttcatcaccgtgggctacgtggacgacacgctgttcgtgaggttcgacagcgacgccacgagtccgaggaaggagccgcgggcgccatggatagagcaggaggggccggagtattgggaccgggagacacagatctccaagaccaacacacagacttaccgagagagcctgcggaacctgcgcggctactacaaccagagcgaggccgggtctcacaccctccagaggatgtacggctgcgacgtgggggccgacgggcgccttcttcg

SEQ ID NO: 17807 - DNA, 397 bp, Homo sapiens
cagacacccaccagccctttctctcccggcgcctgtccaccctccacccacaggctcacgggtccaggacttggcgtgttgttacatgttccttccgagttttctttcgctggaaagagggacaggggcccccacccgtcaccacgccccaacactccccccgaaccagagccgtgcacttgtgcctggtaggagagagacaggacagacccgcttttcccgagacaaggaccccccatgtcacggcagcttcacagacgcggctcgcgcccaccggggtcctggcgggtgggacccgcagcctccacgcggcccaggccagcctgccaccctctgggcctcctacctgtgcctttctctgaggggacaccccgccagagaaggccccgggagccgg

SEQ ID NO: 17808 - DNA, 396 bp, Homo sapiens
ctcctttacctttcagagtattttcttttcacattaggctggtggatcaaacttttgggagcacggactgtcagttctctgggaagtggtcagcgcatcctgcagggcttctcctcctctgtcttttggagaaccagggctcttctcaggggctctagggactgccaggctgtttcagccaggaaggccaaaatcaagagtgagatgtagaaagttgtaaaatagaaaaagtggagatggtgaatcggctgttctttcctcacatttggatgattgtcataaggtttttagcatggtcctccttttcttcaccctccccttttttcttctattaatcaagagaaacttcaaagttaatgggatggtcggatctcacaggctgagaactcggtcacc

SEQ ID NO: 17809 - DNA, 470 bp, Homo sapiens
  misc_feature (1)...(470): n = A,T,C or G
ggggttaaannccggggnccttgnanatncancctgnngngctngcannaacccnnnnntannnnnnnnnacangggggggttaaaataccntttttanccataatgggaaaggtttagactcatatgggcattgtcgtcattgggggcgtggattcgggcaagtccagcactactggccatctgatctataaatgcggtggcatcgacaaaagaaccattgaaaaatttgagaaggaggctgctgagatgggaaagggctccttcaagtatgcctgggtcttggataaactgaaagctgagcgtgaacgtggtatcaccattgatatctccttgtggaaatttgagaccagcaagtactatgtgactatcattgatgccccaggacacagagactttatcaaaaacatgattacagggacatctcaggctgactgtgctgtcctgattgttgctgctggtgttggtgaa

SEQ ID NO: 17810 - DNA, 496 bp, Homo sapiens
  misc_feature (1)...(496): n = A,T,C or G
cagcgccttccactagacactcgnactacaaaccnccctcgaaccgccccggaagggcggggncgacccacgcgtccgcggacgcgtggctttgtcttattctcgacatctcaagattacacattcggaacttcgagaggattactaccagggtggaagaatgcttttgcgaatgtctcaagctctgggtcgaatactcttggctgggcgtgaaatgactagattggccgcctttactgctcggattacagaattaatgcacgtactgaaggatttaaatcatggcaaatatgagcgcacaatggtctcacaacaggaaaagggtattgaaggagtacaagtcattcccttgatacctggtgctggagaaatcattattgcacataacattataaagcttgatcatgttcctttagcaacgccaaatggagatgtcttgatccgagccttaattttgaagttcgatctggggctaatgttctaacttgtggtccat

SEQ ID NO: 17811 - DNA, 420 bp, Homo sapiens
ctgggttgtggagggaaattggctcagagatggacaacctggcaactgtgagtccctgcttcccgacaccagcctcatggaatatgcaacaactcctgtaccccagtccacggtgttctggcagcagggacacctgggccaatgggccatctggaccaaaggtggggtgtggggccctggatggcagctctggcccagacatgaatacctcgtgttcctcctccctctattactgtttcaccagagctgtcttagctcaaatctgttgtgtttctgagtctagggtctgtacacttgtttataataaatgcaatcgtttgaaaaaaaaaaaaaaaaaaaaaaaaaaaaaaaaaaaaaaaaaaaaaaaaaaaaaaaaaaaaaaaaaaaaaaaaaaaagggggcccccttttttaattcttc

SEQ ID NO: 17812 - DNA, 494 bp, Homo sapiens
  misc_feature (1)...(494): n = A,T,C or G
gagaggcctttaccctaaaaccctcgtgaccgactgagaccntcggaacgacccacgcgtccgcgctattcctgtggtgggagaaggccttcatgcagcccaccaagccatactccagcagggagggcctgttggctttcagccttaccgccgacctttaaattttccactcaggatatttctgttgattgtcttcatgtgtataacattactgattgccagcctcatctgccttactttaccagtatttgctggccgttggttaatgtcgttttggacggggactgccaaaatccatgagctctacacagctgcttgtggtctctatgtttgctggctaaccataagggctgtgacggtgatggtggcatggatgcctcagggacgcagagtgatcttccagaaggttaaagagtggtctctcatgatcatgaagactttgatgttgcggtgctgttggctggagttgtccctctccttctggggctcctgtn

SEQ ID NO: 17813 - DNA, 418 bp, Homo sapiens
gacagaggctgatccctatggcaggcaaccacaaaattaagccacttacagtgttggaatccctgggcaaagatttgctcactgatgtttaggataactaggaggaacaaaatgtactgaactggaaggaagaggaaaaaaagaaatattacgatgctaaaactgaagacaaagctcgggtcatggcagactctatgcaagagaaactacgtatggcaggacaaatgcttcttcaaaccttttttaacatagaccacatatcccccaataaaaaagctcatccgaatatggaggctgtaccacctgagtcaggagaatctacagatgccctcaagctttgttctcatgaagaattcctgagactatgtaagaaagagctgaagagatctatccaataaaggagagaaacaaccgcaca

SEQ ID NO: 17814 - DNA, 491 bp, Homo sapiens
  misc_feature (1)...(491): n = A,T,C or G
aggaggcctttccccaaaagctgcgtaccgctgagaacntcggancgaccacgcgtccgcctaatacaaatggggtaaggattatttcagctgaaaatacggaattgtttagttagtgtttttccatgtacattggccctctcaaaaagtatttctttatatgaaaatacattttgttaatatcgtgtatatactacataattccaaggaacatataatatttgtctgtatccatttcactgtactgagtcatctgactgggaacctggtgtttggcaaaaatcctaacacaaaatataggctattcaaagcttcactatattactgggagcggaaacggctgtttgtaaagttcttttgtgacaacatttttgtgatatatgaaataaaaacaaatggattgaatttctcataaatcagtgtttaaagtaaccaaaatatgagagaaaattgttttttgccaaaaaagatatattttaagtatcactgan

SEQ ID NO: 17815 - DNA, 418 bp, Homo sapiens
gctgttttcctgcgcaggagccgcagggccgtaggcagccatggcgcccagccggaatggcatggtcttgaagccccacttccacaaggactggcagcggcgcgtggccacgtggttcaaccagccggcccgtaagatccgcagacgtaaggcccggcaagccaaggcgcgccgcatcgccccgcgccccgcgtcgggtcccatccggcccatcgtgcgctgccccacggttcggtaccacacgaaggtgcgcgccggccgcggcttcagcctggaggagctcagggtggccggcattcacaagaaggtggcccggaccatcggcatttctgtggatccgaggaggcggaacaagtccacggagtcctgcaggccaacgtgcagcggctgaaggagtaccgctccaaactcatcctct

SEQ ID NO: 17816 - DNA, 497 bp, Homo sapiens
gagcaggcttttccccagggaccctgagtaaccgatcgagaactctcgggacgacccacgcgtccgcggacgcgtgggtttaaatgcatttatcttttttgacactattcagtggaatgtgtaagctagctaattcttgttttctgatttaaagcacttttaaatcttatcctgccccctaaaaacaaaaggttttgatcacaaggggaaatttaagattgttaaccctgtttttcagaagggctactgttaattgcacataaacatgaaatgtgttttcccctgtgtactaacacattctaggcaaaattcaaacttatagtggtaaagaaacaggttgttcacttgctgaggtgcaaaaattcttaagacttctgtttgaaattgctcaatgactaggaaaagatgtagtagtttactaaaattgtttttctaccatatcaaattaacaattcatgcctttatagggtcaggcctacaatgaataggtatggtgg

SEQ ID NO: 17817 - DNA, 489 bp, Homo sapiens
  misc_feature (1)...(489): n = A,T,C or G
ggcgggattcccaggcgctgctgaccactgagaccctcgggacgacccacgcgtccgggcaattcatctgtaggaaccagtaggaagatggttaagtgggtacctgtggtagtggatgtttgtgaacattcttttcttttccattggttctattttctcaataaagtgggaagcaaaaatcagctgagtgaagatgaggaagaaggtgttaaaggtttgaagaaaaaaggaaaaggatatactaatctaagaggacaagtaagtagaacatagataatgaaaatgctggcccttaggactgttgggcctaaatgctcatattatattggtagtcacaaatttgaactttctctagagccaatttttgcatgtgtgtgcaggcctggagtagttggagagttggatttaatagaattgagggtcaagcaactacaaccaggaagagtgggacaagggagataaaggatattggcaggggagcaattatan

SEQ ID NO: 17818 - DNA, 414 bp, Homo sapiens
aaataaaaagtgtattttttttgttaacattttgaagtttatatacattatcgaatgcttatttctaggtaattaaagctttatcttgttaacatttttgtggttagaccacatgaaattgtaagcatttttcaaaaatacaaatacattatgaactatagtcaccatgctgtacaataaatctcttgaaattatcttttatccaagcataattatgtattccttgacagacatctttcaatgcccccatttcttctaaatacctttgcatttggtggacaccattttactctctacatcgatgagattaactttttcagaatccatgtgtaagtgaactcatgggacattgaatctttctgtgccttgcttatttcaactaataaaatgtcctctacggtaatccatgtgatt

SEQ ID NO: 17819 - DNA, 413 bp, Homo sapiens
  misc_feature (1)...(413): n = A,T,C or G
cccacgcgtccgcccacgcgtccgcccacgcgtttttcttcgcgttcgcgaggagtcaaggcagcaatgaatcgtgtcttgtgtgccccggcggccggggccgtccgggcgctgaggctcataggctgggcttcccgaagccttcatccgttgcccggttcccgggatcgggcccaccctgccgccgaggaagaggacgaccctgaccgccccattgagttttcctccagcaaagccaaccctcaccgctggtcggtgggccataccatgggaaagggacatcagcggccctggtggaaggtgctgcccctcagctgcttcctcgtggcgctgatcatctggtgctacctgagggaggagagcgaggcggaccantggttgagacaggtgtggtgagaggtgccagagcccag

SEQ ID NO: 17820 - DNA, 403 bp, Homo sapiens
tcgcaagtttcaagactcagctcaaattctgcctcctctgtgaagcctttcctaataccgccagccagagtgagaggattcctcgcttgtactctactttgaacatgtttctattaaggagctggatgcattatgctgtaagggtttatgcaagaagctctgtccccattagtgcattaaaaccttgaaagtaggcatcttgtcttattcaacttcggatatccagtactaagcatgagtaggtactcatatttttttcagctgacatttagtaggcacttagtttattcaatcatacattcatgcatttaacaaatatttgttgggaatctactgtgctcaagtcttctgaaagcaaatgtaaacgtaacttacagactttgtttcctcatggagctgtggt

SEQ ID NO: 17821 - DNA, 440 bp, Homo sapiens
cggacgcgtataacactccacacccgctccagcccttcatcagcctgggcagtcttaccaaaatgtttaaagtgatctcagaggggcccatggattaacgccctcatcccaaggtccgtcccatgacataacactccacacccgccccagccaacttcatgggtcactttttctggaaaataatgatctgtacagacaggacagaatgaaactcctgcggctctttggcctgaaagttgggaatggttgggggagagaagggcagcagcttattggtggtcttttcaccattggcagaaagtggaacagcccggagcctgatgtgaaaggaccacgggtgttgtaagctgggacacggaagccaaactggaatcaaacgccgactgtaaattgtatcttataacttattaaataaaacatttgctccgtaaaaaaaaaaa

SEQ ID NO: 17822 - DNA, 446 bp, Homo sapiens
  misc_feature (1)...(446): n = A,T,C or G
cacaccactggcaccaggccccggacacccgctctgctgcaggagaatggctactcatcacacgctgtggatgggactggccctgctgggggtgctgggcgacctgcaggcagcaccggaggcccaggtctccgtgcagcccaacttccagcaggacaagttcctggggcgctggttcagcgcgggcctcgcctccaactcgagctggctccgggagaagaaggcggcgttgtccatgtgcaagtctgtggtggcccctgccacggatggtggcctcaacctgacctccaccttcctcaggaaaaaccagtgtgagacccgaaccatgctgctgcagcccgcggggtccctcggctcctacagctaccggagtccccactggggcagcacctactccgtgtcagtggtggagaccgactacgaccagtacgcgctgctgtacagcn

SEQ ID NO: 17823 - DNA, 469 bp, Homo sapiens
  misc_feature (1)...(469): n = A,T,C or G
ataagcctgagnactttgaanctgacagcntcgaagnngcccacgcgtccgtatttttaagatttacctgcattattaacaatttcttcatctcttttttagcagttaacagaacaacagtcaagccttcatttgcagacttctgtgtgataaatgctactgctatgactgatttcaagttaccaatgtgcagtcactgaacacagaattagaaaaagatgtgcagtacccacaccattatatgttgtttccatcatacagatacaatagacagatagcctcaggagcatatagttaatagtaaaatgtaatacagtaattgggaagtgataagttttgagtatttattacctatgcttttaatataatttgtgcatttatatgatttaatttttattgatgattttttcacaaccagcttacaaaaacttctgaacatttagcagtcaactctcttaagctgatgtgg

SEQ ID NO: 17824 - DNA, 391 bp, Homo sapiens
tctaatttgatgccttccttttagtgtttttgaatcacctatcctcagtgctgaaattgttttgtataactgagggtactgttggttcaaactatgttagtttacagtttgttgcaaacattgtaaaatacagcgacatgtatattaacttttttctatttatctttattatagaaaataccttagaatgttcttgatagagtagcatggtaacgatggtgtcacacccttggtgtgaatggtagcttattgagcaacctagctcaaggatttgcaaagttaggaagaaggacgagagagcctctctccccaccccaatctaaatatggaatttggtaaattagaatactttgtaatttgtaagaccaaattcatactaattacccgcgtg

SEQ ID NO: 17825 - DNA, 406 bp, Homo sapiens
aaatctatctatataatgtagtatgatgtaatgtggtcttttttttagattttgtgcagttaatacttaacattgatttattttttaatcatttaaatattaatcaactttccttaaaataaatagcctcttaggtaaaaatataagaacttgatatatttcattctcttatatagtattcattttcctacctatattacacaaaaaagtatagaaaagatttaagtaattttgccatcctaggcttaaatgcaatattcctggtattatttacaatgcagaattttttgagtaattctagctttcaaaaattagtgaagttcttttactggaattggtgacaatgtcacataatgaatgctattgaaaaggttaacagatacagctcggagttgtgagcactcta

SEQ ID NO: 17826 - DNA, 395 bp, Homo sapiens
  misc_feature (1)...(395): n = A,T,C or G
agcatgttccagaggaccacgtacaagtatgagatgattaacaagcagaatgagcagatgcatgcgctgctggccattgccctcacgatgtaccccatgcgtattgatgagagcattcacctccagctgcgggagaaatatggggacaagatgttgcgcatgcagaaaggtgacccacaagtctatgaagaacttttcagttactcctgccccaagttcctgtcgcctgtagtgcccaactatgataatgtgcaccccaactaccacaaagagcccttcctgcagcagctgaaggtgttttctgatgaagtacagcagcaggcccagctttcaaccatccgcagcttcctgaagctctacaccaccatgcctgtggccaagctggctggcttccn

SEQ ID NO: 17827 - DNA, 487 bp, Homo sapiens
  misc_feature (1)...(487): n = A,T,C or G
ggaagttaccagaggaaagttggacactgataccttcggacatgatcgccatngnaggnnncanccacgcgtccggaatcaggggaggaaacacatggcccagtggagcctggccagtgttttacaaagtgcagtgtgctgagggaagagggaagtattggtttgactcttacttcaatagagtcaatttccctccacatgggcgctctctgtggaccacctgaattacacctgatgttgcatagagagggagcacgaaacagaaacacgcttgtcctggaaggctgcccacctaagctcagctgtcagctgcagtccttacttcctcgtaagggaagagcagatctctgtgcttcagtttcactgttggtgaaatgggaagactggatttgatgacttgaaagtgcctttccacatctagcctgatgattctaataagctcttggactcatttcctctagtgacaggtgaagaggcaaaacctagc

SEQ ID NO: 17828 - DNA, 409 bp, Homo sapiens
atgcacacttcattttatgtattatttagtaatttgcagtggtatgtgtttaatatttttgctacctacacattaggcaaaaaaaagatgtaaataatttgggagaaaaagaggaagaacagtgtaaaataaaactttctataagtactccatttcaatgtgttcaacatcatcctaaaaggcaagattttcccacgcaggtgacaaggtggtttatgtactatttaagggcggaaggtgcgtgcccgttcaataagcatgttttttgccaggtaggaaatatgttccatatctttacttatcattgcatttcagatgggaactagaaaaactggagagaaaaatgtaatgaaactgctgctgtaaattattccttttagcatgtattcacttgctaaatacacatttc

SEQ ID NO: 17829 - DNA, 418 bp, Homo sapiens
ctttttcttttagttcacagtcatgaatgaaccacagtgcttctacaacgagtccatgtgccttcttttataagcgaagtggaaagcatcttgccacagaatggaacacagtcagcaagctggtgatgggacttggaatcactgcttgtatcttcatcatgttggccaacctattggtcatggtggcaatctatgtcaaccgccgcttccattttcctatttattacctaatggctaatctggctgctgcagacttctttgctgggttggcctacttctatctcatgttcaacacaggacccaatactcggagactgactgttagcacatggctccttcgtcagggcctcattgacaccagcctgacgcatctgtggccaacttactggctattgcaatcgagaggcacattacggct

SEQ ID NO: 17830 - DNA, 412 bp, Homo sapiens
ctgaaagaccataagtgagaaaggcagagaatcatcacagatctggaaagttcgggcttatttgagaactaaggatttgacacgattttgccctttgatttgattgtagcttcctgttatggcttccagagtatacctattaggctacagttgagtacctcccatctagataataagcattcaattagaatgaatttctcatctttagtccgctgatgtaaatgatgtctttatgagatgaagtccaagtaggaatgagcttgtaaattatctctgtccttaggtcctgtgttaatttatccctgtcagtgttttgtgatcattatgtcatggaggatttcccctgccacaccatgctgtagggagttaacttttcatttgtgcattttctggttggaaacagcttactgct

SEQ ID NO: 17831 - DNA, 408 bp, Homo sapiens
cgaagagtcagccccgacttcctgactctcacctgtactattgcagacctgtcaccctgcaggacttgccacccccagttcctatgacacagttatcaaaaagtattatcattgctcccctgatagaagattgttggtgaattttcaaggccttcagtttatttccactattttcaaagaaaatagattaggtttgcgggggtctgagtctatgttcaaagactgtgaacagcttgctgtcacttcttcacctcttccactccttctctcactgtgttactgctttgcaaagacccgggagctggcggggaaccctgggagtagctagtttgctttttgcgtacacagagaaggctatgtaaacaaaccacagcaggatcgaagggtttttagagaatgtgtttcaaa

SEQ ID NO: 17832 - DNA, 410 bp, Homo sapiens
aacttctgcctcccaggttcgggtgattctcctgcctcggcctcccgagtggctgggattataggcacatgccaacacgccccgctaattcctttttgtatttttggtggagacggggtttcaccatgttggccaggctgttcttgagctccggacctcatggtctgcccgcctcatctcccagagtgcagggattacaggcttaagccatcacgcgcagcctgtttgagatctttattcatttttgttttgttaactttgttgtgtaatatcagaaaagctatactttggtagtaatactttgtgtgtttttgtgtgccagaagttgtcttttttagccctttatattgggctttttttagaccgtcaggaagtttcaatctttaccctagtaagtcaacatgtgttta

SEQ ID NO: 17833 - DNA, 409 bp, Homo sapiens
  misc_feature (1)...(409): n = A,T,C or G
atttcacagttattattatttaaaattacttcaactttgtgtttttaaatgttttgacgatttcaatacaagataaaaaggatagtgaatcattctttacatgcaaacattttccagttacttaactgatcagtttattattgatacatcactccattaatgtaaagtcataggtcattattgcatatcagtaatctcttggactttgttaaatattttactgtggtaatatagagaagaattaaagcaagaaaatctgaagtattgtcttgtttttaaaaaatacagttcctagtgtttttagaagtcacttaatttgtctcatttttccacctggaaattaggaataatgtagaatgcaaggcagtaatttccttttggaaaggactctgaaggcagaaaagaaagn

SEQ ID NO: 17834 - DNA, 414 bp, Homo sapiens
  misc_feature (1)...(414): n = A,T,C or G
gtccttggaggtcatgtcccaggtccaggtgctgctgtacttcctgcagctggaggccatccctgccccggacagcaagagacagagcatcctgttctccaccgaagtctaaaggtcccagtccatctcctggaggcggacagatggcctggaaacctctggctaatcgggccatccgtagagcgggaaccttcctgaggtgtccttgggccacccccaagtgttgggccatctgccaagagacagcgacccaaagccgaaggacaggtggcctggaaagatcccgcccaggtctgggagccccaggctggcctcagactgtggttttttatgtggccacctgagggcgccccaagccagttcatctcggagtccaggcctggccctgggagacagggtgaagggagtggtttn

SEQ ID NO: 17835 - DNA, 411 bp, Homo sapiens
  misc_feature (1)...(411): n = A,T,C or G
ggaagcggcggcaggcgccatgtccggccgcgaaggtggcaagaagaagccactgaaacagcccaagaagcaggccaaggagatggacgaggaagataaggctttcaagcagaaacaaaaagaggagcagaagaaactcgaggagctaaaagcgaaggccgcggggaaggggcccttggccacaggtggaattaagaaatctggcaaaaagtaagctgttccttgtgcctgaggagatggtgaccctttatttcatctgtatttaaacctctctattccctgccataacatcttttgccacgtatagctggaattaagtgttgtcttggagctgttgtacatttaagaataaacttttgtaaaaaaagaaaaatcttacagnggctcatcatctctttagttgttttcact

SEQ ID NO: 17836 - DNA, 405 bp, Homo sapiens
cccacgcgtccgaacaaaacaaagtcacggggggggggctgacttgaagactcatctttctattacttagaaagggaatttaccaagtagtagaagacacaggaactccaaaataagatatctcattgtcttatcagaagggttgacaggaaaatgggctgggcactgtggctcaaggaaaatgggctgtgcactgtggctcacacctattatcccagcaatttgggaggccaagatgggaggattgcttgaggcctggagtttgagaccagcctgagcaacataacgagaccccgtctctacaggaaaaaaaaaaaaaaaaaaaacgttttccaggcttggcccttgtggtctaactttctcaggaggttaaggcgggaaattcgggctgaaaaaagcttttag

SEQ ID NO: 17837 - DNA, 415 bp, Homo sapiens
cccacgcgtgcgcccacgcgtccggcatttggtagtctgaaatggtgacagactacttgttaaaattgtgaaaactctgttgtgtcctctcttcctacatttgtccctgagagtactccacgattactaggttcttgattcccttatatggcaatcaggcagaggcgttccttaagcattacagagttctgaagcttaagatttgttttggttggatgaagtccttagtacagttgaaaaacagagcattaacgactaatcaattgttttgcctcaccagtcattttaaatagtagaatacttatttctcagtgcttaaaatttctttttcaactgtgagattgaataaacagtctctatttctgtggaaaaaacaacagaaaagagatattacgtaccatagaatgtaactctg

SEQ ID NO: 17838 - DNA, 418 bp, Homo sapiens
  misc_feature (1)...(418): n = A,T,C or G
ggctgtgggggaccttccttggagcagatgtttgtatcctattacaactactgcaatctcttcaactacattcttaatgccgatggtcctgctccccttgaactacccaaccagtggctctgggatattatcgatgagttcatctaccagtttcagtcattcagtcagtaccgctgtaagactgccaagaagtcagaggaggagattgactttcttcgttccaatcccaaaatctggaatgttcatagtgtcctcaatgtccttcattccctggtagacaaatccaacatcaaccgacagttggaggtatacacaagcggaggtgaccctgagagtgtggctggtgagtatgggcggcactccctctacaaaatgcttgngtacttcagcctagtccgagcttctcccgcctgcactn

SEQ ID NO: 17839 - DNA, 429 bp, Homo sapiens
gcgcccaatgctgcccagggctgcagaggcaggaacttcggtgtgtatgtggacacactgcactgtgtctctgacgtacgtgtgattgctcccatgaggaggacagctccacagtttcacttaccgttgtccattttgttttgattttcggcagctccatcctggaattgttccccaaattattatgcctggatggccagcagtcacccagagcaactttatgtggtactgaagcccacaagaggttaccaacctgtaaggtgagaagagaggatccagcagggtggtgcatgaggaagggggggtaccatctgtggtcctggggactctttattccagggaagcttctttggatctgagatgttgaagaatctggtcctgcaattcctgcagcagtaagtatccctgggaatctgaggcaagagaagg

SEQ ID NO: 17840 - DNA, 425 bp, Homo sapiens
  misc_feature (1)...(425): n = A,T,C or G
tgatgacataggcacctctccctgaccccaactgtatctaaagcctcggagtactactaacgaatactatgcctgtgctaagacctcacactgcactccagctgcttctatctttggaggggccaagcctgctgacacacctggtacataaagagaagtataagaacggctacagaaggaacaagagaagttgcagcgtcagctggatgagccaaaactagaacgacggcctcgggagagacacccaagctggcgaagtgaagaaactcaggaacgggaacggtcgaggacaggaagtgagtcatcacaaactgggacctccaccacatctagcagaaatgcacgaaggagagagagtgagaagtctctagaaaatgaaacactcaataaggaggaagattgccactctccaacttctaaacctn

SEQ ID NO: 17841 - DNA, 486 bp, Homo sapiens
  misc_feature (1)...(486): n = A,T,C or G
cgtgttgacgcctgttgaggccgtaagaaccggcncgacccacgcgtccgcacttagcagtgagctctgtgtggcctttgtattggagacgcaccctctttattaggaagctgccgaagaggaaagtcacgcctgtgcctgtgggctgagtgggggcgtgggcactcaggctggctctgttttccctgcagcatttgaagacatgctggagaacccactgaacagcacccagtggatgaatgatccagaaacggggcctgtcatgctgcagatctctagaatcttccagacactaaatcgcacgtaggtggcgttgttccactcggctatcaggccacagcagccccctggtgcggcccgagaccgggcagagtggacctcacctggaaactcaccttcagcgcctcagccctggactgttagaggtgctgcagctgctcctgctctctgatcttattgcttataaactttggtgacggtagtgtg

SEQ ID NO: 17842 - DNA, 425 bp, Homo sapiens
  misc_feature (1)...(425): n = A,T,C or G
gtgggaggattgagcttttcttctttctagatcactatttataaggcacattcatgctgctgaatggatagtatgtttgaccctgagtgccacagtcaagttttaggggacaggcaagaggcaaaggaacaaaaagggagacgaaggaaggaatgagaaaggcaggggaaaagaggaaggaggaagaactggtaacaaagggtgggccacggagtgtggctagcagagcctctgagggaggtggcccccaccagaacagaggctccctctgcctggggaggtgcaaagggctggtaaacaacctgactgctgttatttacaaccccccagcctatgggcctgaggggtcagtctaaggaggctgaggctccctccgccctgcccacctggggagggttggggaagtggagagttctgcacagtan

SEQ ID NO: 17843 - DNA, 499 bp, Homo sapiens
  misc_feature (1)...(499): n = A,T,C or G
nctgtgattgatcgctctcggnnaccgtttgataaccttcgggacgacccacgcgtncgcggacgcgtgggcggaaaggggcttgattattgcgagttttaactctaagaggtttttaattattatgaatttgttagcttcttaatgaatatggatttaaaactctccagttcttattttatgaaatgacttgcctttctggtaatacaatgctgattttttagtaattgccttttcattactttgttaagaagaaatgccagctgtttaatcacacctacccctggaaaagaggtaaaccttttgaacaggtgaatttcatcagaagctctatagctttttggtgagaggaagtgatactctttattacaagaaacaaggaattaacaaaaataaggaacttgttgctacctttcttttctgttgaacattaaaaataatttggtttgtggactgggcatggtggcttatggaaaagaggtgagcctttgtgaagaan

SEQ ID NO: 17844 - DNA, 425 bp, Homo sapiens
cccacgcgtccgagccgaaggagaaggggggtaagtaaggaggtctctgtaccatggctcgtacaaagcagactgcccgcaaatcgaccggtggtaaagcacccaggaagcaactggctacaaaagccgctcgcaagagtgcgccctctactggaggggtgaagaaacctcatcgttacaggcctggtactgtggcgctccgtgaaattagacgttatcagaagtccactgaacttctgattcgcaaacttcccttccagcgtctggtgcgagaaattgctcaggactttaaaacagatctgcgcttccagagcgcagctatcggtgctttgcaggaggcaagtgaggcctatctggttggcctttttgaagacaccaacctgtgtgctatccatgccaaacgtgtaacaattatgccaaaagac

SEQ ID NO: 17845 - DNA, 423 bp, Homo sapiens
gctccggaaaggcgtttgggatgccaacgatgaggctgctgtcatttgtggcgttggctctatttgctgtcactcaagcagaggaaggagccaggcttttggcttccaaatcactgctgaacagatacgccgtggagggacgagacctgaccttgcagtacaacatctacaatgttggctcaagtgctgcattagacgtggaactatctgatgattccttccctccagaagactttggcattgtgtctggaatgctcaatgtcaaatgggaccggattgcccctgctagcaatgtctcccacactgtggtcctgcgccctctcaaggctggttatttcaacttcacctcggcaacaattacttacctggcccaggaggatgggcccgttgtgattggctctaccagtgcacctggacagggag

SEQ ID NO: 17846 - DNA, 425 bp, Homo sapiens
cccacgcgtccgcccacgcgtccgtgccgccactgccctcgccagagcccaccggccagcatgtcctctgctcacttcaaccgaggccctgcctacgggctgtcagccgaggttaagaacaagctggcccagaagtatgaccaccagcgggagcaggagctgagagagtggatcgagggggtgacaggccgtcgcatcggcaacaacttcatggacggcctcaaagatggcatcattctttgcgaattcatcaataagctgcagccaggctccgtgaagaagatcaatgagtcaacccaaaattggcaccagctggagaacatcggcaacttcatcaaggccatcaccaagtatggggtgaagccccacgacatttttgaggccaacgacctgtttgagaacaccaaccatacacaggtgcagtc

SEQ ID NO: 17847 - DNA, 492 bp, Homo sapiens
  misc_feature (1)...(492): n = A,T,C or G
ggtattgacgcctcggtaccggcgcagaactttcgggtcgacccacgcgtccgctagaatagcccctcctagccagaagttcagcttctgcttccaaagggagcctgcccttggaagcaagcacctaaaattgagaggtgggggaatcttccagcctgctctgttgtggtgaacatcgttgaggttaactgggccctattcggtttagcttagctgattttgacatatgtgttcagcagaggccatctttaacccagttcctcttcttcctctttgccctctaatggaaaggcatccctagagaggtcagaaggaaaaagtcagtatctgctcccacagctctgcgggaaggggctggggaaggaaatcaaggtgtctcccaggtctccagatacacctcccttccatgcctggaagccagtgcagtggagcaaatgtggtttcccgggagggggctctggggcagagacctaaaggggaattttgagaagn

SEQ ID NO: 17848 - DNA, 432 bp, Homo sapiens
cccacgcgtccgccaccgctggctgggaggagtcggagactgagacctacacagaggtggtgacagagtttgggaccgaggtggagcccgagtttgggaccaaggtggagcccgagtttgagacccagttggagcctgagtttgagacccagctggaacccgagtttgaggaagaggaggaggaggaggaagaggaggagatagccactggccaggcattccccttcacaacagtagagacctacacagtgaactttggggacttctgagatcagcgtcctaccaagaccccagcccaactcaagctacagcagcagcacttcccaagcctgctgaccacagtcacatcacccatcagcacatggaaggccccttgtatggacactgaaaggaagggctggtcctgcccctttgaggaggtgcaaacatgac

SEQ ID NO: 17849 - DNA, 423 bp, Homo sapiens
tctgtgaacaattgatatttgttcagatgaacagattttatcagatgctgaatcagattccatatgattacgagtcctgtcgcaaccagccaggcccgccgggtccaccgggacctcctggtagcgcaggagccagaggagaacctgggcctggggggcggtcaggcttcccgggcacaccagggatgcagggaccccctggggaacgaggtttgccaggagagaaaggtgaaaggggtactggatcttcaggacctcgggggctgcctggccccccaggtccacaaggagaatccagaacaggtccaccagggtgcacaggttcaagaggtccccctggcccccctggcctgtctggaaactcaggtatgcgatgacctccaggtccttctggatgctgtgattcttcttagtgtgccagct

SEQ ID NO: 17850 - DNA, 439 bp, Homo sapiens
gatttctctatctcattcccaatacatttcctacaagccagtgccattcccttgaattgctttatagcaatctggaatgttttcccattggattttctcacttgcagctcaagtctgtgaacaccatgaggtttaatcaacatgaggtttaagccaactttataggcttcctatatctcccttcctggtcagcaatatagcccattctctggagcttcccgtggggatttttcttcccagtgaattcttcctattagttatctaagtggcttaactgttgaaatgttttccgtcatctttagatccttttgaaaccactttctctacctgcttcagttccatttgatgaccgccatcatctttgagattcccatccagaaccatgcatacctcttaggttctcacagccaggagctatttcctaagttgtctttctggg

SEQ ID NO: 17851 - DNA, 435 bp, Homo sapiens
  misc_feature (1)...(435): n = A,T,C or G
caaatctcacgaacctcaccccaagatctttacattctggatctcagctgctcttgaaggacagggacttgggaccaccgcaacagcagagcctgccatccccaacagatcaccagttgtccctgacatcgtgccctaccttgtctccctttgtggtctcctaaatgcccatctcgttggccttggttcggctagtggtatggaggggtgctgcctagcactgacctgagagtgtgtgtgacccactgacccaatggacatcaaaggccagttctggaatgatgacgactcggagggagataatgaatcagaggaacttctctatggcgttcaggggagctgtgcagctgacctgtatcgacacccacagcttgatgcagacattgaagccgtgaaggagatctacagtgagaactctgtatccatcagagaatn

SEQ ID NO: 17852 - DNA, 438 bp, Homo sapiens
  misc_feature (1)...(438): n = A,T,C or G
tatttgcttattcactaactgctgcctgtcctgtctgtgggaactttccaccgtctggatgctgtctgggatacaggcgcttggagctgctgagctttcctgaaaagggggacccttccttaaaactctaggaactagagtggcattgtgatggaaatactcttatgctcattgaaactgtccctctgaacttctccctcgaaggcccgccacgatgactatcatggtggaggacatcatgaagctgctgtgctccctttctggggagaggaagatgaaggcggctgtcaagcactctgggaagggtgccctggtcacaggggccatggccttcgtcgggggtttggtgggcggcccaccgggactcgccgttgggggggctgtcggggggctgttacgtgcctggatgacaagtggacagtttaagccggttcctcn

SEQ ID NO: 17853 - DNA, 440 bp, Homo sapiens
catattatatataacatgtaaaagtcgccaggatttacatcttggttttatgtttgagaaattattgctgagactgcggggtgtaaatattatatgggagtccataatcttcattcatatttttctctactttctcctttagggcgctggaaatgtaaacaaaaatagactgttcattcctgatggcttttagtctatactaacatattgttggtcatggcatccgagactgaaaagacccatgctttactgcagactcgtagcactgaatctcttatttccagccttgggctgggggcattttgcctcgtagctgacagacttcttcagttttccacaattcaacaaaatgactgccttcgtgctctctcagataatgcagtacattgtgtaattggcatgtggtcatggacggtagtcacttgaatcaagaatacaag

SEQ ID NO: 17854 - DNA, 436 bp, Homo sapiens
ctatattctacagtcacccacttctgttttagaagcattttgaaacactttttggggttatagaaataagactcatgattcaatatatttatttatatttttaaagtataatatgacctcaaatcaatggaggaatgctgtattatgcaggtttgtgtcaatttcatgacattaaaattgtctgattttgtccgtttcttaaaattatgattagtgagtggtctaacagtttaaggcattgataacttacaagtagaatggggctctcaaagcattttaactcagttgctttagggtccatttttttatgtaatcacttactcagtgataaatgaatctctgaaaacaaatgcttttacattttaatttaaaaagaaaacaggtgcaggccacagaaaagttttaaagtatgccttcttaccagcaatagttcatt

SEQ ID NO: 17855 - DNA, 441 bp, Homo sapiens
aaaatttatttttaaagtgcttactcaacttccctattaactgcctagaacatgtttatagatttcatttaatatagagttccttttcattggaaacaaaaagtagtaagtcgaaatactgttgaatttgcttcacaggtgttcctgatccaagcagaaccctgttatttgaagagcctgagaaatcttatcccgtttacaaatgtcctgggagtgcatccaaagtgaaacttgggtatcctcaatactaagaaatctctgagaatgactgggtcttggctctttgatcttacctctactcctctgaaaaacatgattatctaaaattgtgttaggtggatgaaccgcatcaaagacttccagaagccactccagtgaccataagataaatgtcagaatcgcataacccccaggatcagagatggagtctcgctctgtcac

SEQ ID NO: 17856 - DNA, 411 bp, Homo sapiens
agagaattcattggaggtgagattgaagtatattgtgaagtgggatttgaacagcacatatgctctggtttgctcaaataactgcagtttatgcttacatctaaattttgtttctgttacctaaacgggagcttctagaattacgaaggccatacctgccacatttataaaataatggttttatccctgcccccaaatcatcaggttcctcgggtttaagagaagtggtctaatagacaggaatagaagttgtggtggaggtgatttgggatagactaggtttccttatgcaagtggatatgagctcctcatagaaaccagacctactgtattagacagtaacctctaacctcacctccaagcccaagtatatggccctgctgggttacctggtgactacatttcccagat

SEQ ID NO: 17857 - DNA, 411 bp, Homo sapiens
  misc_feature (1)...(411): n = A,T,C or G
agaaatcaagcttcagtgtgtaaggacgtgtatgttcataccacccccaagaatgtgtattgtggtatttttctggaaataagttaatgcatattaatatattttgccaattcgtaggatggaatggtatgtaaccaataaaaataatgtattagttctatacagatttatactagttttgctttgagagagttccataatgcatttttttctatcttaaacttttaaaaaaaatagacacggtgtctccgtctgttgcccaggctggtcttgaactcatggactcaagcactcctcctgccttcgcctcccaaagtgctgggattacaagtgtgaaccactgcacccagcatataatgtatttttaagcatgaaatgaaagatgccagaaagtacatatatatattaatn

SEQ ID NO: 17858 - DNA, 482 bp, Homo sapiens
  misc_feature (1)...(482): n = A,T,C or G
ggcgtagtaacctgaggccntcgactgatcccgtaagaacggcncgacccacgcgtncgcgtaaagtccacaccccgatgctcagaagtgtcttgccagcaacattcctgctagcatacaggagtgatttcctaaaccagtgtcattctagtctgaatagggacaaacaaatcttgaggaagcccaagtgcgtacctttatttttgcccccaccaccctctttctgtacttcaatttttgtttgttttttgtttttttggccctgtcataaaatattttggtgcttcaaaacttgtaccttcattgtacatccttttcttttctccccttgggtcttattataaaagaagacaatgtacgttgtaattaccaaaaagaatagggaaaaacaagaatttcatgacgtctacctgtggctatctttaatttcatttcttttgttaaaaataaaacaatgagtatgtttggatactatgaatatg

SEQ ID NO: 17859 - DNA, 486 bp, Homo sapiens
  misc_feature (1)...(486): n = A,T,C or G
ggcggagtaaaatgagaagcctcgactgagcgcgtagagaanggcncganccacgcgtgcgcacggatctgagaatctttattgagaaagagcacttaagagaatattttaagtattgcatctgtataagtaagaaaatattttgtctaaaatgcctcagtgtatttgtatttttttgcaagtgaaggtttacaatttacaaagtgtgtattaaaaaaaacaaaaagaacaaaaaaatctgcagaaggaaaaatgtgtaattttgttctagttttcagtttgtatatacccgtacaacgtgtcctcacggtgccttttttcacggaagttttcaatgatgggcgagcgtgcaccatccctttttgaagtgtaggcagacacagggacttgaagttgttactaactaaactctctttgggaatgtttgtctcatcccattctgcgtcatgcttgtgttataactactccggagacagggtttggctg

SEQ ID NO: 17860 - DNA, 498 bp, Homo sapiens
  misc_feature (1)...(498): n = A,T,C or G
aagcaggncttttcnattgaaagctntcggtaccgactgataacctcggaacgacccacgcgtccgcctatttatcacattgtacgaagcaattttaatcttaatcacatccagcaaacggtgtccctgctgaaactttgaactggaaacctcacacctggcaggcagcactctctgcagccgagcccttgtggagacagcaagagctggtgtgtttcagccagacagaggcataataaagagactgatgtttacagaacccaaatgatgtcttcctctctctcaaaataaactaacctattcatatggctgcgaatgcttaatcttggagatagaaaatataatgataaattcatcatgtgttcagaattcgatttggagttggaagtggacagcctaatttttatctcacctccactaggactttgaccttcccaggggtccacactttacctcctgtatcttcatacgcgnngagggatgcatagagatggaggg

SEQ ID NO: 17861 - DNA, 416 bp, Homo sapiens
  misc_feature (1)...(416): n = A,T,C or G
tccagtatcagttacttcctatttttatccttaaaagaccattgcaaatcagtgtaagggtttttccagtaattactcacagcactttgttaaagtttgcaatttcttcagccatttaataatatctttctgtgaagaaactttgctgagttaaccataaatgttcattcattgactgggtgggatgtgaatggaatgttagaaatgttgtgtgaattgaagttctgtattcattatagatgtagcccttatttaaaaaagtgaattccatactaaaactaggaatgaaagtgagagatttctaaacttttgcgaaagtgggtcattttttgtttgactataatagcaggaagaattatagcaatcgtcattttacctgaaacagacaagcctatgtattatgaatactttcaagn

SEQ ID NO: 17862 - DNA, 496 bp, Homo sapiens
  misc_feature (1)...(496): n = A,T,C or G
gagcggcatcccaatgagagcctcgtanncactgaaagcatcggaaccgccccggaatcccggtcgacccacgcgtccgcggacgcgtggggaattacttggtctataaggttaattttttggtcatattgaataaggcacattttttatatgctttggagatacgtgctacatccttttgttaaaaagtctttttagtgatactaattctgcgttcagcgcgtgaaaagtaaaataccacaattttaaaagtctaattatttttaattttgtttaatgacagagatatagatcagctatcaggaagggacttctgccattcaaagaaaatgacaggaagtaacactgaggaaatagactcaagaatccgagatgcaggtaatgatagtgccagcactgctcctaggagcactgaggagtctctttctgaagatgtgttcacagaacagaactttcccctatacgagaggagcttgtatcttcagatgaactgcga

SEQ ID NO: 17863 - DNA, 488 bp, Homo sapiens
  misc_feature (1)...(488): n = A,T,C or G
aagcggcttttcccagtagctgcgtacctcagagaaccctcgaacaccccgcgnccgcccacgcgtccgctgccagtagcatatgcttgtctcaattattaagccatgcatgtttaagtacgcacggccgggacagtgaaactgcgagtggctcattaaatcacttatggttcctttggtcgctcgctcctctcctacttggataactgtggtacttctagagctaatacatgccgacgggcgctgacccccttcgcgggggggatgcgtgcatttatcagatcaaaaccaacccggtcagcccctctccggccccggccggggggcgggcgccggcggctttggtgactctagataacctcgggccgatcgcacgccccccgtggcggcgacgacccattcgaacgtctgccctatcaactttcgatggtagtcgccggcctaccatggtgaccacgggtgacggngaatcagggttcgattccgga

SEQ ID NO: 17864 - DNA, 417 bp, Homo sapiens
atataagtgcatctcttgttggacataggcaaaataacttggcaaacttagttctggtgatttcttgatggtttggaagtctattgctgggaagaaattccatcatacatattcatgcttataataagctggggattttttgtttgtttttgcaaatgcttgcccctacttttcaacaattttctatgttagttgtgaagaactaaggtggggagcagtactacaagttgagtaatggtatgagtatataccagaattctgattggcagcaagttttattaatcagaataacacttggttatggaagtgactaatgctgaaaaaattgattatttttattagataatttctcacctatagacttaaatgtcaatttgctctagtgtcttattagttaaactttgtaaaatatatata

SEQ ID NO: 17865 - DNA, 434 bp, Homo sapiens
atttggacaaagtgtgaccaaattagccagtctgttttcttccatgtttaattagaagtgagaggtagaagtacttcaaattcaacaggccagcaagcaatcggcttaaaattccctttcttaaatgttgtgctcttatgttctcggctttttaatgactttatttttacagtacttgttcagtcacttgagatgaaatgcttggggtagcttttccatcctcaaacttaatgtttttactagttcatagtgtttggaacagtatatgccaatcactgagactgcatcagagtttgcaattttgtatgtttcattgccaaagaaggcttagtggttgttgactgtagtataagtcagctttctgtagcataagatttgattttcccatacttacttcacttgttatacatcactgattatttgggttaaactgg

SEQ ID NO: 17866 - DNA, 415 bp, Homo sapiens
cattgatcacttcacactcatcttcatcgatgaggctggtcactgcatggagcctgagagtctggtagctatagcagggctgatggaagtaaaggaaacaggtgatccaggagggcagctggtgctggcaggagaccctcggcagctggggcctgtgctgcgttccccactgacccagaagcatggactgggatactcactgctggaacggctgctcacctacaactccctgtacaagaagggccctgatggctatgacccccagttcataaccaagctgctccgcaactacaggtctcatcccaccatcctggacattcctaaccagctctattatgaaggggagctgcaggcctgtgctgatgtcgtggatcgagaacgcttctgccgctgggcgggcctacctcgacagggg

SEQ ID NO: 17867 - DNA, 486 bp, Homo sapiens
  misc_feature (1)...(486): n = A,T,C or G
ntttgatcgcccttaggtaccggccctttgaccgcctcgacccacgcgtccgcccacgcgtccgcgaaattgctgttgcagcatcccgtctgcagccgtggaagagacagctgactccaccaccggccacatcctcaatctgtactgggggaacaggtcgctgtaccaggcactgagggaaggcacgcgagttcagagcatggagcagattggcgaggtggcctcagtaaaggcccgcattcgtggggagatattgggcctcatcggcttcggtcgcacgcagcaggaggttgcagttcgagccaaggcctttgcaggatgggatcgagcggtccctgggtgtgcatagggtctacacccagcaggatttgctgtatcagaacgactgcgtcttcttgcattgcaatctcaacgaacaaaactaccaccttatccatgactttaccataaagcagatgaggcagggagcattccttgtgaacgcag

SEQ ID NO: 17868 - DNA, 416 bp, Homo sapiens
cttgaattccttcgctgtctggggacctaagtcattcttaagaggtggagaaaagatattttcagattggcagaatgtgggagttttgaaatgagaaaacctgttgttaatttgcattttggaataactctcaattgatctcttttctgttccccgcccccctcttgtttctctttaggacctataaacagaagtgaagtttgaagtctgctctctgcaaagagggtgggagtgggtggagaagaggcttgttttaaaagccaaaaacagaaagtaaaaagaaatgggaaagtaaaaccaaagcagcaagtgactctcttctgatgtgcacttttcatttttctcccccacatttcagtgttagaaagaaaacgagaggagctagggaaagaaggagttggggacagaagactaaa

SEQ ID NO: 17869 - DNA, 487 bp, Homo sapiens
  misc_feature (1)...(487): n = A,T,C or G
ntttgatcgccnttaggtaccggccctttgaccccggtcgacccacgcgtccgcggacgcgtgggctttacaccaggcttctggttacactataagtcaagcccattaaggattttaattgtttttcatttggttgttgagaagggtcaaaaatcagttttcaagctgtggtctttcaaacacatctgcacataagtcacacatttcaataaagcattttcaagactgttgaccacttgaatttctttggtgttagtggattaacctaaccattactctgagattttatatctctaatccagtattttttttctttttatgctaaacatgggagatcctggttttgtgtgaatgcattattttggatgtgagaaataaatgccaattatatgtactttcccttttctgcacaaattctgggaaaatgtaaaagccttcattttttaacatggttttagggaacaactgtaagtccattcagagcagg

SEQ ID NO: 17870 - DNA, 434 bp, Homo sapiens
ctccgacaggatgagctcgctgcatcggggctgcctatctgcgatgccgccgtcaacctggccggagagaacatcctcaaccctctccgaagatggaatgaaaccttccaaaaagaggtaatcggcagccgcctagagaccacccaattgctggctaaagccatcaccaaagccccacaaccccccaaggcctgggtcttagtcacaggtgtagcttactaccagcccagtctgactgcggagtatgatgaagacagcccaggaggggactttgactttttctccaacctcgtaaccaaatgggaagctggaccaggctttctggagaatctacacgccgggtgggggtgcgctcagactctccttggattttacttcaaggaatgtcaccctagatgatgcttgcccacagacagagccttgatagttacatg

SEQ ID NO: 17871 - DNA, 410 bp, Homo sapiens
  misc_feature (1)...(410): n = A,T,C or G
aaataatgtatattattttacctattagattctgatttgatatacaaaggactaagatattttcttcttgaagagacttttcgattagtcctcatatatttatctactaaaatagagtgtttaccatgaaaaaaaaaaaaaggggggggccgttttaaaggacccttggggggcccaaattttacgcgggcgggcaaggtaaaagttttttccttatggggggccgaattaaaacctacctgggaattttgggaagggaccttttttttgggggggggacatattggcccaacctccctccagaaattaaaggctttagggaaaataaaaatttttaaggggtaaaaggggaaaaccaacctccatatccttgctgttagaaaatttggncnnnngnnnnacccccgccc

SEQ ID NO: 17872 - DNA, 396 bp, Homo sapiens
gaggcctgcccccgctaaccggctttttgcccaaatgggccattatcgaagaattcacaaaaaacaatagcctcatcatccccaccatcatagccaccatcaccctcattgcccttaccacgctactcctacctatctccccttttatactaataatcttataaaaaaaaaaaaaaaaaaaaaaaaaaaaaaaaaaaaaaaaaaaaaaggggggggcccctttaaaaaaaccccggggggggccaaatttaccggggggggggaaaaaaaaattttttccttttggggggggggttaaaaaacccccgggggattttggggaaaaaacccttctttgggggggggaaatttggggccccccccccccaagaaatttgggggctggggggaaaaaaa

SEQ ID NO: 17873 - DNA, 434 bp, Homo sapiens
cccacgcgtccggtccatgtgcttgagcacttgctgtcctgcttggcctgccctcctctgatttttttttgcacagcaggattctatttctgctattgttcagaaaccattagcacctattcagaagtcagttattcagctttgagctgaatgacaattatttgaatggtaaagggtgttaatgtataattattcacattcataccaggacagtcacagtttaatcatttctctgtaggcttccttaagtttgtgcttaaagtcttaggcataattcttttgttaaataagtttaggaggctctaagtattgggaaagtgagtataaatacgcctctgtgggagcttcaaggatgtggtgcctcacctccaggagcgagcctcctaggtgaaactgtcactaggtgccccacacttcagccaggaggaaggtcc

SEQ ID NO: 17874 - DNA, 417 bp, Homo sapiens
ccagaatcttctggaattctgacttatagtcgttgttatagaagaccttgttgctatggaacatgaaactgtgtgtcagatggagagatccccttaacctaagagccttaaatagccctgaaagtacactgggacggcttgcgatggaattaaaattggaagtgaatatttttaggtgctcttgaagctttctggggactcaaaattatcaaaagtcatggacagtccggaggaagagcgtctgcaaaactgggttcctagaagtatagacggacttagctttttgtagaatttggtgaggagcagcgcctcgtgagagcagaatggcctggcgtgggcagtgctttccggcagcacgcagctctgcggcctccagaaatcccctgtctgagcttgatgcccctagcctgtcccctg

SEQ ID NO: 17875 - DNA, 493 bp, Homo sapiens
  misc_feature (1)...(493): n = A,T,C or G
ggcgggtttttctgacagcctcgatgagcacgtcanaccggccgacccacgcgtgcgattgaattgccatgtaaggctgtgcccttgtcttttatcgaaggttattctaagaaacagccacatgaagagaacttctctatctttagcgaaattgcagataaaagcagtgcctattatgctagttaatgtcccttttaagattttacacaatacactttttaacatctaatgccatatatatctatgtattgacctattgacggtatagtttaatgtcatatatatatttattttggtcacaaacacacacacacttacacacacacacacacacacactaacacacaccccacatgttaagtaagcaaaatccttttaaaaaaaaaaagaagaacttgtagtgtgtgcgcctaggcattgtattaggatttataatattttttatttagggtgtgtgcgattctatagattattcctcttggtctgcgggtgg

SEQ ID NO: 17876 - DNA, 418 bp, Homo sapiens
gcgataaaatatgatttatcttttctttttaaaccttcagttttttcccattcctttttttgggggtttttttggggggggggggggaaaataaagggtatatggaaccttaaccctgggggggggaaaaaaccccccatttttgccccccaaggagattagaaaacgggggccccccccccccccgggcttattttaaaaaatttttaaaaaaaggggcctttcctttttctccaggggtgaaaaaataaaaaagttttttgggaaatttgtatatcgggaacccctcatggtgttggcccccaaaatattacacaaaaaaaaccccctttttcaagggccccaaaaaaaaatatttatttgagggtccaaaccccggggggaaaaaaacaattaattttttttcttttggaaaaag

SEQ ID NO: 17877 - DNA, 495 bp, Homo sapiens
  misc_feature (1)...(495): n = A,T,C or G
ggcggggtttaaactcgatnngcctgcgatagagcccgtaatnaccgggccgacccacgcgtncgcaaaaaatacacttaatggagatttggcatcagcaaccattcctgaagaaagcagacttatggccaaaaaacaatctgaatcagaagatactcttccatccttctcttcctgaagaaactgaagtgtccaacttcctctaagtattgctatgcaaaagctgctgtaattaaactattgttatagggagtagttctttcccttaggactctgcactttatagaatgttgtaaaacagacaaacaagaaaacaaaccacatacttttgaagtgtattttatctttatatagtttgcttgcaagagtattttcctaataacttcacaagatgaatgtgcatcttttttttttgaacaaaggaagggggaacattttgacatccataaggacaagatgtaaaattttttttaaaaacctctgggggactgaccg

SEQ ID NO: 17878 - DNA, 491 bp, Homo sapiens
  misc_feature (1)...(491): n = A,T,C or G
ngcgggttttctgaagcctcgatgagcacgtcgnaccgggccgacccacgcgtgcgccccaagccagcgggaggaagtctcaggaactgcccctgggccgaaagggcgccgctgcgagcgcctggctgacagccacagcggtggtgacggtgctgggagaccccgcgtgcgctttccccttgagatgtaaaccgggaacggggaaggggctgaggggagaaaggacatggcctttcccgcgagtccatggccagtgactgtggcccgactcgaaaacaaccctcttcttaaaagggaccatcaccgccccgagcgtgcgcacacagaccggtcggaggcgagaactggtctttacagggcacaggtcaacttcctctgtggatgcgtccccacatcgcaggattttccaagaaaacgagcctgtcccttgggcacttgggaataatttccccaagacagcacttctggatttcgggtttatcctgatggtg

SEQ ID NO: 17879 - DNA, 418 bp, Homo sapiens
gcccaacacctaacatagccttgtatgcagaactgatagaacttggggaaagtgatgaagtagttgacctcacctgtgaatctctagcacctgtagtgattgacctaactcaccgtgactctgtagtgattattgaacaaaggaggaggccaagagcaaacacaaggccactccaagaccacactggcagttgtgtggtgaacaatgatgaggagggagtgaaaagggacagagatgtatgtataaccaacagtgcccaccataattccctgcaaaaaaattttttttgtcatatactacctggttatattcagtgtcaagtttgcatggatggatgctcagagattgaacttagtatacaacacatctactctatagaatgtggccacatctgtagtcagggcttctgcactttctt

SEQ ID NO: 17880 - DNA, 488 bp, Homo sapiens
  misc_feature (1)...(488): n = A,T,C or G
ggcggggtttttaggagggcctgcgatgatgcccgtctnaccgggccgacccacgcgtccgaccgagttgggaccataaagtctaaggttgtgggtgacagagagaacggcagtgacaacctcccttcctcagcggggagtggtgacaagcccctgtcggatcccgcacctttctaagcctgtggttgcttcacccgctgcagagcacacgcaacccagcctcagcatcacagccgcagctctgttcagcggagcagccagccagggcggatgagcagagccggccctgaggacagtcctgcccatccacgcggagatgtggctgccgcgtttgcatgaatttgaagaacacaggcttgtacacagatgctttacactcacctttganatgaaacaaaaaactgngctgggctttctaagggtgcccgaanngacagggccggggggtgaaaagaaatttaggcagaggccgggtgtctttggggaac

SEQ ID NO: 17881 - DNA, 416 bp, Homo sapiens
aagcgcgctagtagcagctctggcagaagcaacggtgtcttcgagggatggcggcggctgcaacaggacctgcagcatcccagaggaactgactaagactttggaacagaaaccagatgatgcacaatattatcgtcaaagagcttattgtcacattcttcttgggaattactgtggtgcagatgctaatttcagtgactggattaaaaggtggcgaagctcagaatggctcggaatctgaggtgtttgtggggaagtatgaaaccctctggaattactggccctcgatgtgtggcttgcctttctgctgggacgcttcctgatatgtattggaaggctatgacggtgttcccccgcgtgggaacaaacgaggcagaaaaagttgtcctggaagtgcaccaaggagagcacgttag

SEQ ID NO: 17882 - DNA, 475 bp, Homo sapiens
  misc_feature (1)...(475): n = A,T,C or G
cggccggggggttttntaatgaataccggcaatcatgcnacggacnnnnggnnnganccacgcgtccgctttattgagtggatgaaaggagcaactaccaacatttgctactatgtactggatcgaaatgtccatgagaaaaagcttggagataaacttgctttttactgggagggcaatgagccaggggagaccactcagatcacataccatcagcttctggtccaagtgtgtcagttcagcaatgttcttcgaaaacagggcattcacaagggggaccgagtggccatctacatgcctatgatcccagagcttgtggtggccatgctggcatgtgcccgcattggggctttgcactccattgtgtttgcaggcttctcttcagagtctctatgtgaacggatcttggattccagctgcagtcttctcatcactacagatgccttctacaggggggaaaagcttgtgaacctga

SEQ ID NO: 17883 - DNA, 432 bp, Homo sapiens
cccacgcgtccgcacccacaccagccttggtgccaccaaaagtgctccccaaaaggaaggagaatgggatttttcttttgaggcatgcacatctggaattaaggtcaaactaattctcacatccctctaaaagtaaactactgttaggaacagcagtgttctcacagtgtggggcagccgtccttctaatgaagacaatgatattgacactgtccctctttggcagttgcattagtaactttgaaaggtatatgactgagcgtagcatacaggttaacctgcagaaacagtacttaggtaattgtagggcgaggattataaatgaaatttgcaaaatcacttagcagcaactgaagacaattatcaaccacgtggggaaaatcaaaccgagcaaggctgtgtgaaacattgttgtaatatgcgactgcgacg

SEQ ID NO: 17884 - DNA, 419 bp, Homo sapiens
  misc_feature (1)...(419): n = A,T,C or G
gtggattgtggtaatttactttataattggttgtagttagaagacacatgtgaaatgtgaagttccttaaccaaaagtgtgcagcttgttgataaagtttagatctactgttacttcttggcactttagcagagaagttatatgctgaggagaatgaaatacagaaagctggtcacttgattaatttaaaatgtagggaggatgggaagagatcaccctgtccctctgatgtcttccaaatcttttctgttaggtctgtcagctgctgctggaattggtgttgatgaacttcgtcgcttatgcatactcaagatgagttttgtgaaaggctggggaccggattacccaatacagagcatcaaagaaacaccttgctggattgaaattcacttacaccgggccctccagctcctagacan

SEQ ID NO: 17885 - DNA, 433 bp, Homo sapiens
cgtgaccccaggctgagcccaaggcgcgccactcctcccggaggcgacatggggcacccggtgtaccgcggcgagaagccccagctgcactacgcgggtgatttcacctggaacagcatgtcaggccgcagtgtacggctgaggtcagtccccatccagagtctctcagagctggagagggcccggctgcaggaagtggctttttatcagttgcaacaggactgtgacctgagctgtcagatcaccattcccaaagatggacaaaagagaaagaaatctttaagaaagaaactggattcactaggaaaggagaaaaacaaagacaaagaattcatcccacaggcatttggaatgcccttatcccaagtcattgcgaatgacagggcttataaactcaagcaggacttgcagagggacgagcagaaagatgcat

SEQ ID NO: 17886 - DNA, 402 bp, Homo sapiens
gtaattggatcttgggggcggttcccccatgctgttcttgtgatagttctcacgagatctgatgattttataagtttgatagttcctcctgtgttcattctccttcctgccaccttgtgaagatgccttggttcctcttcactgtctgccatgattgtaagtttcctgaggcctccccagccatgtggaacagtgagtcaattaaacctctttcctttataaattatccagtcttgggcaattcttgatagcagtgtgaaaatggactaatacacttgtgtttatctgtaatttaaatttcatgtctttttctccttgccttacatagggtaaagaccaagaaatgccaaacgtgaactaaaatatgtagggccttcaacttttttacttcctccagtatct

SEQ ID NO: 17887 - DNA, 419 bp, Homo sapiens
  misc_feature (1)...(419): n = A,T,C or G
atctcatcgaagatggcggcgcgatctgtgtcgggcattaccagaagagtcttcatgtggacagtctcagggacaccatgtagagaattttggtctcgattcagaaaagagaaagagccagtggttgttgagacagtagaagagaaaaaggaacctatcctagtgtgtccacctttacgaagccgagcatacacaccacctgaagatctccagagtcgtttggaatcttacgttaaagaagtttttggttcatctcttcctagtaattggcaagacatctccctggaagatagtcgtctaaagttcaatcttctggctcatttagctgatgacttgggtcatgtagtccctaactccagactccaccagatgtgcagggttagagatgttcttgatttctataatgtccctattcaagn

SEQ ID NO: 17888 - DNA, 397 bp, Homo sapiens
  misc_feature (1)...(397): n = A,T,C or G
acgtccgtgggggtctgcaatggccacctttagccgccaggaatttttccagcagctactgcaaggctgtctcctgcctactgcccagcagggccttgaccagatctggctgctccttgccatctgcctcgcctgccgcctcctctggaggctcgggttgccatcctacctgaagcatgcaagcaccgtggcaggcgggttcttcagcctctaccacttcttccagctgcacatggtttgggtcgtgctgctcagcctcctgtgctacctcgtgctgttcctctgccgacattcctcccatcgaggcgtcttcctatccgtcaccatcctcatctacctactcatgggtgagatgcacatggtagacaccgtgacatggcacaagatgcgaggggcn

SEQ ID NO: 17889 - DNA, 408 bp, Homo sapiens
atttgttagatacttagggagatatactgttgaatttgcacaggatgtgactctgtttatacatattaacaaatttccttttggattccttagcagttcatcaaattagtattaaatttttaaatttaaaactagcatgaagggacatgaaatatttgcagtaggtggatctatgtaagatgtttgggtatggcattaatagcttgacaaagatttggggaaaggtgttaagaatgagtccatctcagccaatagtgcttggtgtataattcaagaacagagagttttccatcttgaaaaaacatggaaagtaatgctctatacccatatgtattaataagagcattttccttcttgccgttgatcatttcagatgataccacaatatgagtataattttttattatt

SEQ ID NO: 17890 - DNA, 412 bp, Homo sapiens
caggctttcgccatgttgcccaggatggtctcaaactccctggctcaagcaatctgaccaccttgacctcccagattattggaattacaggcatgagccactatgcctggtcaatctaaataatttctagtttttgtatgtttaagctgttcccaatgtttcctcaaatatcaacaatgctgctattgtatgtgtgtgattatttctaattcatgttttcctaaaagtagagttgtttgctcaaagagcatgcacatttaaaattgtaattgatattgtcaaatttgtatccccattcgtaatacacacaatataggagagaccttttcccacaccattggcaatacaggaataacatcaacctatatgtttaatagcagaatactgcttaaggtaactgtcatatctatat

SEQ ID NO: 17891 - DNA, 404 bp, Homo sapiens
cccctctggtctggcttctaactgggggccccaactacgaggaggtcctcagtttcctgggatactccttagcaggtgggatcccattacagaaaagaccgtctctgttgacttgacacctactacccagaatttggaagtagaattttaaactgaggtcagccccttcactttcatagtttaagaaagttagtgccccaaaggggatcattttctgccagagatcacatggggatggagctgaatctaagacccaggttcccctgattctcactctaattccctaagctgccactgcaaagaaaaaaaaaaatcaagttgggatctcattctgggggaaaaatctcataattcctcgttggagctatggaatagctttatattatatacttgtattcaaactg

SEQ ID NO: 17892 - DNA, 403 bp, Homo sapiens
ataatttgctgaattgagtaaagagtatcatcgcgattgctgagaattctttcttccatattcagcatgtatatattactatcatctggtgttaggtttgattgatcccaagtagttaaaacattttgcagcaagacatttcaagtaattaagacttacttgcattttatgatcgtaaggaactaaatgtgaatgggatgggactgactggcaatttataaacacatcccctccaataaccagcagatttctgagacctgtaggaaaaccaacattattgcgtaactgtgtgaggaattctaattacataataatttagtttcgaagtttaagacttgagagcaaagtcctgtcttttcgattagcttaaatttatttgattaatctataattaatgcttcat

SEQ ID NO: 17893 - DNA, 411 bp, Homo sapiens
gcacagctccctgccgcagaggcgtctcctccttgcctatgtagattttacgttctacccagacacttggtccgtgccttttctgacttctcttctttcagctagggggtgacgccttttccttcaaattcagctcaggtgttaacttccagaaattctttgatctgccaagcctggggtaagagagtgttctctgcccttttgtgcataattctatcagaatacacatcacctttgtaaaattctgcatttacatgtttcttgccctctctggaatgtaaactctgagggcttaaggccttgtctttgtgttacattccccaaccctgtgcgcctgaacttgacaggtgctccgtgaaagttggaagtgttgattgccttcaggaagagattgatgttaattggaataca

SEQ ID NO: 17894 - DNA, 475 bp, Homo sapiens
  misc_feature (1)...(475): n = A,T,C or G
agggctgcgttggatagcctgttatgantcgtccggaanncccggnncgacccacgcgtgcggaggtcttgcgtaccctgaatcttgactttttaaaatatgtactgttgtgcttaacattccagaaacttcatatgttaaccaagaccactctggtttttctagaaaggttgaaactgttatatcaggctcttaaagatagactgggaatttacctattattttaaaacagcctttacataaaaccaccattcaggccgggtgtggtggctcatgcctgtagtcccagcactttgggaggctgaggcgggcagatcacctgaggtcaggagttcgagacaggcctggccaacatgacgaagccctgtctgtactaaaaatacagaaattanctgggtggcgtggcatgcgcctgtgatcccatctactagggaggttgaggcatgagaattgcttgaactcaggaagcagacgt

SEQ ID NO: 17895 - DNA, 414 bp, Homo sapiens
ctagcacatggcgcaatctccagtttgctcctttacgttttattcacatatgtaaaaattaacattttaatcaatctaaatcatgtgaactagggacaaagaaataacaatacccactttactttgcatatttgtcctggtgttggaaatgattcctaataatcctgtttaaaaaaaaaatcatgaatagagcctataatcagatacgaaaattatgaaaaagtcatagcaaggagtaaggctaatgttcatgataatcttattagcattagttaatgctcttcaaacttttggtttgaattaataccagttattaatttcagaaaacataatcttagtatgacttctaaaatcagtctacttaaaatgaacatgcttttttgttataaatgtttcatgcaatgactgcttgtc

SEQ ID NO: 17896 - DNA, 405 bp, Homo sapiens
tttctttgtaaattctacaaaatgaatgttaccattctgctgaatcaaaagaaaggcttacctctgtgggatgaattcacacatcatgaagcattttcacagatagcttctttctggttattttgtgggatatttggcttctctgtatgaataaaagggtttcagaatttttcttcataaattctacaaatagagtttttccaacctgctgaatcaaaagaaagcttcaactctttgaggtgaatccacacatttcaatgcattttcaaccatagcttcttactactttttattgaaggatattcaccttctcactagagatctcagtgggctcaaaaatgttttattgtagataataccaaaagagtgtttccaacctgctatatatatatatatacactcgcc

SEQ ID NO: 17897 - DNA, 487 bp, Homo sapiens
  misc_feature (1)...(487): n = A,T,C or G
cagtctataatctagtgtactagaaccgcccgaannnnnggtcgacccacgcgtccggaagtgaaagtcatggctgaccgcatcattttcatgtttactcaactggtctccaacctcaagaaggaggggtccacccacaattggcaacacatcaccgaccaaattggcatgttctgtttcacagggctaaagcctgaacaggtggagcggctgatcaaggacttctccatctacatgacaaaagatggccgcatctctgtggcaggggtcacctccagcaacgtgggctaccttgcccatgccattcaccacgtcaccaagtaatgtccctggtgcgaggaaacagagacaacctttctgtcttcagcctctgctattgagagcttcacacagacaatgagagagggtggatggtggtgagtggatcatttctttcagccacagtgtgtaacactcagcatttgaatgcttctcagaanagaacatg

SEQ ID NO: 17898 - DNA, 406 bp, Homo sapiens
aaaataaattgattgaaatgaaggaattttacttttgagtgttattaggccattttagcaattagcttttaaatttttgcttggtcagttctttcttctttgccccagtgcctttgctccccaccctactcctcttttaacagtcttcccgtggtttctcattgctgcaagttccttactttagcacacattctaattatttgtgatctggcctgcagtattgccagcttctgctcttgtttctcatgtccttcccattttgtgccctagtcatactgaactgcctaggattgtgttgtcccacatcatagccattagtcacctatggctgttgagcactgaaatgggatttgttcaaattgagctgtgctgttgagtgtaaaatactgatgttgaagagttagat

SEQ ID NO: 17899 - DNA, 402 bp, Homo sapiens
cggacgcgtggggaaataaatcatttttaatccccagaagaaagtgctggaaatagcttctatatagtcagcagttcacctggagaaagatcttacttccttgttgttttgactaggaatatcaatatttggtataaaataactagaatagtttattaccttttccctcatgaaattttaaatatatgcaaatatatatatcattagattcctgtggtgaataataatttcttcagattctaaaacaggtgtctagtgactgcttaattgtttccaagttgcatcaaagatgaattggtaaataatggaaatgagtagtgatatgaaaatggttatgtaactacatattacttgcttctggtaatcaagtcttattttttaaaagcctattgtttttcagaa

SEQ ID NO: 17900 - DNA, 412 bp, Homo sapiens
gcgctcagcccccacagcagtcttactatccacagcagtaatatgtctgctcagcagctcagctgattcagatcagagggaaagaaataccaaccctgcaataagtgtactaaactctacgctctggttaatgtaatgtactctcctggactgaatgcagtgtataatttctgtctacagctagaagctgtgccccagttccacatttgattacacatgtgagatttgctgctgttgcagtataaacactaggtataataggatttgaaattgcattacagttcataaaaattgaaaatgagaaattaaacctgcaagtgaaacatttgaaacgattatactttctacataagacatggttgggacatcagatacttacaaagatggcttaagtatggatactagagaaaat

SEQ ID NO: 17901 - DNA, 400 bp, Homo sapiens
gacgtggttcacggcgtggaaagcctagtggagcttctgggctggacagaagagatgcgggaccttgtgcagcgggaaactgggaaggtacagactgctgaggaggaccatccaaggggctgcccttctcactgctctaggcttgatggaccagacaaataggatgatggctgcccccacacaataaatggtaacataggagacatccacatcccaattctgacaagacctcatgcctgaagacagcttgggcaggtgaaaccagaatatgtgaactgagtggacacccgaggctgccactggaatgtcttctcaggccatgagctgcagtgactggtagggctgtgtttacagtcagggccaccccgtcacatatacaaaggagctgcctgcctgtttg

SEQ ID NO: 17902 - DNA, 408 bp, Homo sapiens
aacgtttctaagaacgaacttcagacattttaattacagtaataatagcactccttttaaggagtttcagatccacactaaaactaaaatcataaaaggctgatacttttgttagctgctaggctatattcttccattctttgaagtcctatgatgtaatatttttgaaacctagtgtatgtcttgtcactgttgtgatatttaatcgattaagaataccttgtaaaaaggagcaaaagcttcaatgtgaaacaattttctctctttatactaaacaactgaagatagatagtttagaaagataaggacctttgaaagaagacaactctgtcaaagttcataaggaatataaaaattcttcaggaaaagagaattcaatctatatgtcctcccgtttaatatcaagaa

SEQ ID NO: 17903 - DNA, 400 bp, Homo sapiens
cccacgcgtccggtaaatggggccgggtatggtggttcatgcctggaatcctagcactttgggaggctgaggtaggaggactgcttgaggccgggagttggagaccagcctgagcaacatagtgagaccctgtctcaataataataataataataataataataatagtaataatgaagtaaatgggataaggaaagaaggataattatctttaaaggttgattcccaccctccctccccagttacttaaggaactaagtgagtacatctccagttgcccatgaaagcataagtttgttttcctcagctgaggcaagtggtagagtatacaggataacgaagtaacatgtaaaaggcaggacgcacataaaggtgtacatggctattgtttcacctggag

SEQ ID NO: 17904 - DNA, 408 bp, Homo sapiens
agtcggaacccgaacggaagcgggctcgcaccgacgaggtgcctgccggaggaagccgctccgaggcggaagatgaggacgacgaggactacgtgccctatgtgccgttacggcagcgccggcagctactgctccagaagctgctgcagcgaagacgcaagggagctgcggaggaagagcagcaggacagcggtagtgaaccccggggagatgaggacgacatcccgctaggccctcagtccaacgtcagcctcctggatcagcaccagcaccttaaagagaaggctgaagcgcgcaaagagtctgccaaggagaagcagctgaaggaagaagagaagatcctggagagtgttgccgagggccgagcattgatgtcagtgaaggagatggctaagggcattacgtatg

SEQ ID NO: 17905 - DNA, 400 bp, Homo sapiens
cccacgcgtccggttcaggttttgccatctgcctcataaaaaatctcttctgttcttggagccttgaattccccatctgttaaacaggaggaagaatatctacctcacaaagttcttatgagataatgaatataaaaatgtttcatccaggttgttgaatcatcccagcttatataataattacaaaggacatatgtactttaacaatggagaatgctgtgatttacctcttcaccgagtaacaaaatgtcacattgcttagattgagacagcccacataatgtgccaccttctgtgatgtaataagctgaaaaatgttcaacctgaatttaatcaagcttcttggacctcattgccaggttacaggaaatacaggaggcagaggaacaaataaaagacg

SEQ ID NO: 17906 - DNA, 398 bp, Homo sapiens
caaaaatacatgcttttggtagaaacacaaacatacaaagatgttctataaaactgactttttatcgtacattttaagatatttaaaaatattttctgtaatttcatgaagagtactaaagccacagtcactgacattgtaaacacctctgttcattctctaacctgttaggtggttaagctatttttaattctagggggctcaggctgaacttgaggttggggaggagaatttgcctctgcttttagttgcaattttcaagtgaggtgaaattaagtaaaatttgtaagagcttttttggctttttaattctagataaatacataaataaatttgggtctctgtaatagaatatgtgcttttataggatagtgatatttgcttgataaatggaggat

SEQ ID NO: 17907 - DNA, 496 bp, Homo sapiens
  misc_feature (1)...(496): n = A,T,C or G
aggtcacccggacaacncgtgcggggngngattttntcctgaaatccctgtntcatccaangnacnncnggnnngacccacgcgtccggtactgtctgtgagacccactcatagctccaccaccttcaggctacctacaaattgtagtccaatggcaggtttcactgtagcactttcaggtcactgaggaaggtgtctagaagagaagtaaatgtcacttacattcactgatacttagaaatggctttggttttgagaagttaaaaaaagaaggtattgtagttatttaaatccaagataaagtacttttcagctaaatctgcctttttgtttgcttgcttgctttttggagacagtttcactcttgtcacccgggctggagtgcagtggcacagtctctgcccactgcagcctctgcctcctgggttcgtgtgattctcctgcctcagcctcccaagtagctggggttacactcgcctgccataaagcccagctg

SEQ ID NO: 17908 - DNA, 399 bp, Homo sapiens
cactacctgccccaagacacttgagattgggatgacgctggtgtcaaagatcaaggcttccacgctgagttcagggagttagtttgatgcagcaggtcataggtcacaccagtgagaagactctaggggagtcccaaacccaggaaatccagtcctttgggaggtttgaagcttcttttagcaagaactccatcaattagagttcaaggagatagtatgtcgtaggggtcaaaggcaggcaaggagagcctctggcgatgtcaaaggtcatagacttagggtgccctctaagactggtaacagatgaacagcttcacttatgcacgctcctctcctgactagaagggtcccagcaccatggaggacccgaaccctgaagagaacatgaagcagcaggaa

SEQ ID NO: 17909 - DNA, 416 bp, Homo sapiens
  misc_feature (1)...(416): n = A,T,C or G
cacgtgtagggggagctggtggacagttgagagttcagccgaaacatccagagggttaggagtccgtttttacgtttgagactcccaacatcataaaagcatattttcaggcttctggaaaaatattagtctcttgacacgggaccagagacagcccatttacatggaaatttagattccagttaacagttataaaattttcagtgcctccctcanaaaaaaaaaaaaaaaaaaaaaaaaaaaaaaaaaaaaaaaaaaaaaaaaaaaaaaaaaaaaaaaaaaattaaaaattttttangggggggggtaatgaaaagtattttgggggaaataatgagaagagagtataaatatatttgtctctttttaaaaaaggttttttttttattcttttgtctctttacaaaaaaaaaccn

SEQ ID NO: 17910 - DNA, 405 bp, Homo sapiens
agtgaattaaccatgtttcttcatttttttactttagttaaaaaagaggacatttaatattctacatgctgtaactatcaggacatgggtagcaatctcaatttcatttttgatattcaaattaattcttacagcttgagcatatcagccttattaccagagcaaatccttccttcagatgggatagtttactgactagatggagcattcgtaagcacatggtgaaatcagcccctgcccaccaaaataatctttatgttaccaagtgattcccatttgtctaaggatttgaagggggtctaaattggatgtatcttagtctaaagaaccaaaaccatccctgacatgccttgctaatacaactaatccttccatatatgtgccatacttacttttttcctcagg

SEQ ID NO: 17911 - DNA, 401 bp, Homo sapiens
attgtcgacatctgatatttgaaaaaacagggtctgcaatcacctgacagtgtaaagaaaacctcccatctttatgtagctgacagggacttcgggcagaggagaacataactgaatcttgtcagtgacgtttgcctccagctgcctgacaaataagtcagcagcttatacccacagaagccagtgccagttgacgctgaaagaatcaggcaaaaaagtgagaatgaccttcaaactaaatatttaaaataggacatactccccaatttagtctagacacaatttcatttccagcatttttataaactaccaaattagtgaaccaaaaatagaaatcagatttgtgcaaacatggagaaatctactgaattggcttccagattttaaattttatgtcatag

SEQ ID NO: 17912 - DNA, 476 bp, Homo sapiens
  misc_feature (1)...(476): n = A,T,C or G
gccccatgtgttgaatcataggcactcggcccggaaccccgggncgacccacgcgtccgcggannnnagggatcactcctgtgatattcctgttgaagatatgttacctaaattaaacacaaggaaccaccagacaagtccaaattgagggactttctacaaaataacttaatagcatcaaggttatgaacatcaaagaaggcctgaagaaactgttccagactggaggagactaagacaacatgaaaaataaatgcaatgtgtgattctgacctggatcctttttgctataaagcatataactggtataataacaagcaacatttgaagaggatctgataattatatggaagtaatgtgtcaatgttactttcctgattttgacagttgtattgtggtaagttggagaatgccccttgtttatacaatcattgaattcgaacagaaataaaaggatcttatatatttaaaaaaaa

SEQ ID NO: 17913 - DNA, 413 bp, Homo sapiens
cccacgcgtccgcttcgcgccctcctcgccctccccaccgacatcatgctccagttcctgcttggatttacactgggcaacgtggttggaatgtatctggctcagaactatgatataccaaacctggctaaaaaacttgaagaaattaaaaaggacttggatgccaagaagaaaccccctagtgcatgagactgcctccagcactgccttcaggatatactgattctactgctcttgagggcctcgtttactatctgaaccaaaagcttttgttttcgtctccagcctcagcacttctcttctttgctagaccctgtgttttttgctttaaagcaagcaaaatggggccccaatttgagaactacccgacatttccaacatactcacctcttcccataatccctttccaactg

SEQ ID NO: 17914 - DNA, 403 bp, Homo sapiens
gcggaggtgcaggtcctggtgcttgatggtcgaggccatctcctgggccgcctggcggccatcgtggctaaacaggtactgctgggccggaaggtggtggtcgtacgctgtgaaggcatcaacatttctggcaatttctacagaaacaagttgaagtacctggctttcctccgcaagcggatgaacaccaacccttcccgaggcccctaccacttccgggcccccagccgcatcttctggcggaccgtgcgaggtatgctgccccacaaaaccaagcgaggccaggccgctctggaccgtctcaaggtgtttgacggcatcccaccgccctacgacaagaaaaagcggatggtggttcctgctgccctcaaggtcgtgcgtctgaagcctacaagaaagtttg

SEQ ID NO: 17915 - DNA, 412 bp, Homo sapiens
  misc_feature (1)...(412): n = A,T,C or G
atgattgtcatagaactgggcaccaatccgctgaagagctcaggaattgaaaatggggctttccagggaatgaagaagctctcctacatccgcattgctgataccaatatcaccagcattcctcaaggtcttcctccttcccttacggaattacatcttgatggcaacaaaatcagcagagttgatgcagctagcctgaaaggactgaataatttggctaagttgggattgagtttcaacagcatctctgctgttgacaatggctctctggccaacacgcctcatctgagggagcttcacttggacaacaacaagcttaccagagtacctggtgggctggcagagcataagtacatccaggttgtctaccttcataacaacaatatctctgtagttggatcaagtgacttcn

SEQ ID NO: 17916 - DNA, 403 bp, Homo sapiens
cggacgcgtggtcggacgcgtggagaaaatcccttaagaatttcataacttctgagctgtggctttgattgcttcaacttggcaagcacccacttgtatttgacactccaaggtgaaggtgatgacgtaaaaatgtatttttctaggcacatgaaaagaaaaattatgttaaaagagaaaacagtatactccaaaccttcaaaatatgcaagtgaaaatttcagacttaactttatgttgacttgactttatgttctaatgcatactagataagatttgaacacagacgggccaagcgcagtggctcatgcctgtaatcccagcactttggggaggctgaggccggctgatcatgaggtcaggagttcaggaccagcctgtccaacatggtgaaaccctgcct

SEQ ID NO: 17917 - DNA, 403 bp, Homo sapiens
caaacagactctggtccaaggttggtaatgaaatgactgttcctgacagggaggaatagaaggaccgccgctccggcctcccgcgacttctcgaaggtgggcaggtcccaccttgtggaggatggaggtgaccggggacgccggggtaccagaatctggcgagatccggactctaaagccgtgtctgctgcgccgcaactacagccgcgaacagcacggcgtggccgcctcctgcctcgaagacctgaggagcaaggcctgtgacattctggccattgataagtccctgacaccagtcaccctggtcctggcagaggatggcaccatagtggatgatgacgattactttctgtgtctaccttccaatactaagtttgtggcattggctagtaatgagaaatgg

SEQ ID NO: 17918 - DNA, 398 bp, Homo sapiens
cccacgcgtccgatttttattagcgaagtttcttaaaatgcaagcttatcattaaaatgcaagaatcttaggcagtgttccaactctattttttaaaacttttggcaatccaatatagttgtgatgtttaatatccccgtataatgtttcattttgcaaacctggtgcagtaaatagtatatatttctagatattaagagctcagtgtgcctggaatgactggtctggttagctgcccccggcataaagaaaagaataattattccattccattccattattttcttaaaaaaaaaaaaaaaccctccttatgggcctaagggttgacttctaaccatctatatttacttaaaagcaatcctttaagaggggattactaggaattctttttttttttt

SEQ ID NO: 17919 - DNA, 398 bp, Homo sapiens
cagcatttaaaaagatcatcattaaaaaacaagatttatacaacaattacttaggatgtttgtgatctgccgaccttgctatagatgccatgttaccaatgatttcctgtggtgggggcttgccattgtttactctcttatttaccaacttctggcctaggcatgacagtgggcaccttcccccagccctggctgggcccagcgcctgtgttctgtgttagaaaggttttatatatatataaaattacatatatatgtagaaatatatgtaattttgggggccctgttccttgcacattttacagttacctcatttttcccatgtatgtatttgagaaaatgctaatatatagagaaaaaaatggttcttaaagcttaaatgtgtggttttttccatt

SEQ ID NO: 17920 - DNA, 463 bp, Homo sapiens
  misc_feature (1)...(463): n = A,T,C or G
cggagggttaaaatgaggcgtcgtgacactgatgccctccggancgacccacgcgtccgagatttcggagtgcgattgagctggacaccccctctatgactgcagagcaagtagctgccattgagcagagcgtcaatgaaaaaatcagagatcggctgcctgtgaatgtccgagaactgagcctggatgatcctgaggtggagcaggtgagtggccggggtttgcctgatgatcatgctgggcccattcgggttgttaacatcgagggcgttgattccaacatgtgctgtgggacccatgtgagcaatctcagtgaccttcaggtcattaagattctgggcactgagaaggggaaaaagaacagaaccaacctgatatttctgtctgggaaccgggtgctgaagtggatggagagaagtcatggaactgaaaaagcactgactgctctgcttaagtgtggagc

SEQ ID NO: 17921 - DNA, 419 bp, Homo sapiens
  misc_feature (1)...(419): n = A,T,C or G
tcagctttgccttccacgctgtctccagacccccaccccttccccactgcctgcccacccgtggagatgggatgcttgcctagggcctggtccatgatggagtcaggtttggggttcgtggaaagggtgctgcttccctctgcctgtccctctcaggcatgcctgtgtgacatcagtggcatggctccagtctgctgccctccatcccgacatggacccggagctaacactggcccctagaatcagcctaggggtcagggaccaaggacccctcaccttgcaacacacagacacacgcacacacacacacaggaggagaaatctcacttttctccatgagttttttctcttgggctgagactggatactgcccggngcagctgccagagaagcatcggagggaattgaggtctgctcgg

SEQ ID NO: 17922 - DNA, 176 bp, Homo sapiens
taactatttggtcccactaaccaggacttgcttagtgggatagtcttgggagatttaccactttccacattgtcttctacgtttttttaaaggtatgtgactcacctaacctgcaagatttggaggaaaggagctgtttctaattcatctttgtatatctgtggtcgacgcggccg

SEQ ID NO: 17923 - DNA, 329 bp, Homo sapiens
  misc_feature (1)...(329): n = A,T,C or G
atcaccttcctgccattggtctaaacaccctccacaggaaaagcactggacgatgtcctttatacctgtgtagaaaagacctgctttggccagtgctgcaactcccacagctgattcccggggccagtccttaaaagagtccagccgtagttcttcgtaagcaaagatgctgtcattgcaataagcttgaataaaaagcacaaggtgagaccagcaggctttagncttttttttttctatacctttatggcgggggcccaaattaaaaagaccagtaggctttgatattgcaagtatcagcgttcaagtggtcccttcacagttacaga

SEQ ID NO: 17924 - DNA, 332 bp, Homo sapiens
ctagggaccagactgactcttttcatccctgaactcctttcctatgctgatccctctgccagaaacatcctccctggatactcatatttgtcttcccctgtctgaaggaaactttccctaattatttgccttgccctgcaagtaaagttagataaagttagtcacctccttcttgggtaccttgtgcgtgcaccgactttttccgtacaaaactcattttgattgatttgttcccaagtctgtcttctgtaaaagacttcgagttacatgagagtaaggactgggcctcaattttccctggatcccctgggcttcacacagaatctgacaga

SEQ ID NO: 17925 - DNA, 345 bp, Homo sapiens
  misc_feature (1)...(345): n = A,T,C or G
ggctgagtgttgaggnnnnttaagaaattttaagatgcagaaggtgacatggaaggaggaaaaggaccctgccctggctagcatcctcctctccctaatgcacttaatccatccttcccaagcaaatatctaaagagtcatctaccgtgctgtttttctgcttcttcctttcccattcacttctgaatccttatcagtctgactttcacacccattactttactgctcagcaaagttcatcaatgctgtcaggaaagccaagtccaaagactatgttttgttcttgcctttacttgacctgtaacatgagttacaactccctctttcttgaacctttccctttta

SEQ ID NO: 17926 - DNA, 365 bp, Homo sapiens
gttccttctcttagcttccaaatgtgctgaagaaactccaacatgcagacggtgacatggcaggaggaagaggaccctgccctggctagcatcctcctctccctaatgcacttaatccatccttcccaagcaaatatctaaagagtcatctaccgtgctgtttttctgcttcttcctttcccattcacttctgaatccttatcagtctgactttcacacccattactttactgctcagcaaagttcatcaatgctgtcaggaaagccaagtccaaagactatgttttgttcttgcctttacttgacctggaacatgatttacaactccctctttcttgaacctttcccttttaacaaactgatac

SEQ ID NO: 17927 - DNA, 351 bp, Homo sapiens
gtgcaacctctcttgttccctgccacacttctgcctcagtgcctttgatgaattctgccctctgcttggaatactcaccacgtccagacacccacctggcttacctcctcacatcctttcagtctttgctcaatgatcacctttcccgaggtctacaagacccctgtgtttaaaagagcaacttagcacacttcccttcctctgctttgtttttctttgtagtaattaccagcttctagcatcctctgtcacttacttatggatcatgtggattgtctgccccttcctcttcgaatgcaagctccccaggggcaagacttggttggtttttctcactgccacattcctgga

SEQ ID NO: 17928 - DNA, 357 bp, Homo sapiens
cttgaactctggaggtggagggtgcagtgagccaagattgcaccactgcactccagcttgggcaacagagtaagactctgtctcaaaaaaaaaaaaaaaaaaaagccccgggggggggggttaccccctgaaccccaaccttttgggaggcccgaggggggggataaaaagggtaaaaaaaaaaactttctggtgaaaagggggaaaccccctcttttataaaaaaaaaaaaaaattttgtggggggggggaaccccccctcgtatcccccgttctttggaaggttggggacaaaaaagggaagaaaccttgggagggggactttcgttggaccctatattccccccgtgccttccg

SEQ ID NO: 17929 - DNA, 363 bp, Homo sapiens
tttgtcactctccattgacttccattactcaaagttacaggcacagaatttcaattgtcttgtacttccaggttgtatgggcacggagccatctctctcacctcagcaggaacagagaaacctgagattagaagatgcgaagagtacagtgccatcatgaggttgtatgattttaggctgtgcctatatacatcatttgttataagtttttaagtaaagggaaaggcaaagagtcctagaaatagctgtggccaaaagaccatgagaagagtaataagaagcatctaatataagtggatataaacttaaagaggaatggaaatcctcttagtaggcaaaattatgagtaacatctgttttttt

SEQ ID NO: 17930 - DNA, 339 bp, Homo sapiens
tgcttctgcatttgtgctcatggagaatctaattttaaaacatttagatgacaattccaagactgatatagtaagcctataactggtgcccaaaaaaaaccacatttgtttttgtttcaataattaaaaggttttagaaaaacagttccattaatttcagatgttaactctattatgtaatgcatcctctaatccttacaaatttactaaggctcttttctttttttttttttttaaaaaaacacttttcttgaggtaaaatggaaataaccggcccatgtagggggtacaattggaaaaattttttgtttatccttatacttgaaaacccttgactac

SEQ ID NO: 17931 - DNA, 410 bp, Homo sapiens
gcaggatgtgcaggtttattacgtaggtaaacatgtgcaacacatgccacattatcttttcagttcggtgtaattttcattaatattaacaatacttaatgtttaccaacatgtattaaatagtttgggtctagtaaacatagattttctagaaatatactccattgtgaaatactttgcagctggcaggattatgtttaaaatgaccctaacagaaaaaggtgaattgtttagtgactgattttgtgacagcatgttagctatctgaataaacaggaagaagaacctagatccctcccttaccacttaagtaaatcccagctgtatcaaagacttacatgtaaataatgaatcataaaagtattagaacatgactgttttacagaatctgagggtggagaggaccttcc

SEQ ID NO: 17932 - DNA, 389 bp, Homo sapiens
ttcagataatgtattaaaataagccccctctgatgagctgaagtttgaggagacacctaaagtgatgttgcttttcttggattttcctggtagatatttacttatatcactatgctctttcccagtcacagcaggatttccaagctcctggagattgcctgtccagtggcagcaacaccaaagacttagactgtaaagaaagcctctaaaattcccagtgttcctggatttaaataacacatccagagttcttcccagtcacaactccagctggattttagaggcacaaagagctgaatgtgatcctggtaaatctacccccgacccatcacaatatccacctgctttataaactgcctaacagaacaattccaagagattataataac

SEQ ID NO: 17933 - DNA, 178 bp, Homo sapiens
gggaatactcttccaaggataaaagcagctccagtgcagctttggttcatattcagtcatctcaggagaacttcagaagagcttgagtaggccaaatgttgaagttaagttttccaataatgtgacttcttaaaagttttattaaaggggaggggcaaatattgggtcgacgcggccg

SEQ ID NO: 17934 - DNA, 388 bp, Homo sapiens
gtttttttcccttcaattcctcaagtctgggtggtgacaaggtaggggctaggtactggactaccacaggtttttaggaactaaggtgtttctcataaacacaaaatgttgggtgaaactgggaacaactactcaaaagctcatttatttgcttaaatggaaagtgagggagccactaccctctcttttgatctgccaaggatttcctctcagagctgttgcacagacagagattgtacttggtaagataccaaacaagacagatatggatctaaatttctaatgtgttctatgggtttcaattctgaaaaaagaaaatgaataaagattttaataaatattgaaaaaaaaaaaaaatattgtggacccggccgctatttcaaaataa

SEQ ID NO: 17935 - DNA, 230 bp, Homo sapiens
  misc_feature (1)...(230): n = A,T,C or G
gacctcctgtccttggacctatcttactggagaatggacattacgaggccctaatctcaagagatggacttcttgacggaagtgggaaattgcccctttataagaaaaacaacagcaagtcttttagtagaaatttgaaagaagagtttgctaccattttgacccattattcccttacctatcagatgaatttgccattcactggatagaaaccattcttggatttgggn

SEQ ID NO: 17936 - DNA, 126 bp, Homo sapiens
tttaaggtgtgctctccctcaaaggaagtgtttattttttggagctcaaagaccccagaaaaaagcaaccccccccgcaaaaaaaacccataacaacaggcagcacatgccccgtcgacgcggccg

SEQ ID NO: 17937 - DNA, 379 bp, Homo sapiens
taacaatctaattgttaaaaggaaaagatggcttattgacacatatttcattaaactttcactggaagaacagtgggtcatcctactgtggattaagaatactactgacaagcaaaaagcattaagctctgtaactgtctccaacaccaccttcaccccgcctttagtgtaccttagtgtactttagtgtacctattttggcagtacggtgttttccagattctacttgtgccctgcacattgtgaggactcattaaatatttattaaattaatgaatgactaacaggaagagaaagattgtttgtgagtgttaagaatgagtgatgattgagaaattgatggattagtgcaatggattgggaatgaatgatgctttct

SEQ ID NO: 17938 - DNA, 358 bp, Homo sapiens
aaactatctgtgtttctttcttagtgatatagcacccttaaagtaacttgagtgggaaaggaaataaaatacaccagttttcattcattttaatgactgtgcctcagttttctctaaattgggtagaaatatatactccaaggttgtggaggattaaatgatttaacatatgtgaaatgtttatgctaaatcctgatacctaaacactagtaagtgttatataagtgttgcccattatgttgttgttgatgttacttcacgttgtgagaaaagagtgtgagtgacagtgcacggttaggtacatagtaagcttttaattaatatgaaattttccttccatatacgaagatgtgttcac

SEQ ID NO: 17939 - DNA, 355 bp, Homo sapiens
  misc_feature (1)...(355): n = A,T,C or G
caaaatgctatgagggtggcacagctggctctagacgtttcaccaaaaaacgacaacagttgtattttggagtcattatctagggaagaatgttttcacattgtttgatattttatgataaaggttctttctagcatcttctctatggtccttgcctccttcaccattcaactctaaaccatgtgctgtataagttttaccaaggaagtctcagtgttgtctaaggaggcaagccaatccttggaaaatgaaaaactggtacattcataccaagatggaagacatgagccagtttacagaaagcaagtcaatgacaatctcccagttagtcaaagcctttcaaggctctgcgccn

SEQ ID NO: 17940 - DNA, 407 bp, Homo sapiens
cggaaatcggcctacgtccccatataaatccctttacacctcagtacgaaactcaaataatacaaaaaaattagctgggtgtagtggagtgtgcctgtaatctcagcaacttgggaggctgaagtgagaggactgcttgagcctgggaggttgaggttacagtgagctgagatcgcactcctacactccaacctgggcaacagagccagaccttgtcttaaaaaaaaaaaaaaaaattctgggtttctggcatctcaaaaaaaaaaaaaaaaaaaaggggaggggggggggtgttacagcccttttttaaaaaaggggcccaaaaggggggccctaatccctgggccatgggtaaaccccgccccaaattccaaaatttaaaatgggaaaaccggaaaaccccccgg

SEQ ID NO: 17941 - DNA, 378 bp, Homo sapiens
  misc_feature (1)...(378): n = A,T,C or G
gtcagtgtggcgattcctcagggatctagaactagaaataccatttgacccagccatcccattactgggtatatacccaaatgagtataaatcatgctgctataaagacacatgcacacgtatgtttatggcggcactattcacaatagcaaangttcgctnccacctgggaagcagatccataccttgtcttaaaaataaaaaaaaaaagcctggattccctggatttctgaacaggcatgatatataaaggaacgctcgcgggtgtgtattgcttgtttattacaagggccccaagggggggtcttaatccttgggccggtgggcaacccccgccggaattccaaatttttacgtctaaccttaaacacccccggt

SEQ ID NO: 17942 - DNA, 361 bp, Homo sapiens
cgagatcacaccattgcactccagcctgggcaacaagagcgaaactccatctcaaaaaaaaaaaaaaaaagggcggtttggggggggcacccttgtggccccaattatttggaaggttgggggggaagaataatttgaccctaaaaggaaaaggttctagggacctgaaagggcccctctgctttccgcccggggtattaaaccaaccctttgcttcaaaaaaataaaaaaaaaaacccccccttttaaggccaaaattttaaccttattggggtggggtgggaaaaaaaccagggaggccggcaaccccctttattccaatggaaatccagaagggtttttttaaaagttttggaccaag

SEQ ID NO: 17943 - DNA, 358 bp, Homo sapiens
gtgggatgatccagtcactcatccttgagagtcaccatacctttctcaggtcatcaatactttactagtcaatttactgtcaaagttgtgcaagggcataccaagagatgccaaatacattcctttttgccatcactgtataagagcagcctgacctcctcccagtatttagaatgataaacctgccaggatggtgactgctctcgttgcctgatcctttggcagtagaaggcagaaatgccccagtgacagccatagtttaaagttcactgggcctcttgctgtgtctcctggaggaaatgctcaccttttgggaacaatacctctaaacctacaaatctcagagctatggagatga

SEQ ID NO: 17944 - DNA, 354 bp, Homo sapiens
gtgatcccggctactcgggaggttgaggcaggagaatcgcttgaacctgggaggcggaggtttcagtgagccgagatcgtgccattgcactccagcctgggcaacagagtgagactccctctcaaaaaaaaaaaaaaaaaattacttggctttgggggggggcccctggggccccacttcctcggggggttgaaacgggaaaatcctttgaccccgggaggaggaggtggaagggacccattgttttccatcctgggcaacaaagggagactttgttttaaaaaaaaaaaagttttcagcccgggttcaggggattgcccctgaagtttcagctccttgggatgtggggggggg

SEQ ID NO: 17945 - DNA, 373 bp, Homo sapiens
ctttcttcattctgttcttgcgttcctttcgttgctttcttgaggtctttttcttctcatacaggccatgtcttgcaagtctatgtttgggttcatttttctttgcataatccagggaatcataaatcatgccaaagccagttgtcttgccaccaccaaaatgagttctgaatccaaatacaaagatgacatccggtgtggtcttgtacattttggctagtttttcccgaatttctgtcttaagcactgtcgccttcccggggtgaaggacatcaatgaccatttgtttcctctgaagtaatcggttggtcatgaactttctagtgcggatagttacggtgtcgttcatgatgggtcgacgcggccgcgaatt

SEQ ID NO: 17946 - DNA, 381 bp, Homo sapiens
gagaagtagaaaaaagaaaagtagccttacaagaagccaaattaaaagcaaagggattgaatccggatggaactccagccctttcaaccctgggtggattttctccagcctccaagccatcatcaccaagagaagtaaaagctgaagagaaatcaccaatctccattaatgtgaagacagtcaaaaaagaacctgaggatagacaacaggcttccaaaagcccttacaatggtgtaagaaaagacagcaagagaagtagaaatagcagaagtgcaagtcgatcgaggtcaagaacacgatcacgttctatatcacatactccaagaagacactataataataggcggagtcgatctggacatacagctcgagatcaagaaa

SEQ ID NO: 17947 - DNA, 377 bp, Homo sapiens
aacctcatcttcactgtctcctgatccataaccacccagtccaccgagtccagtgagggaagccagtgcactggactgtgccagctgttttgcaggagctttcgttgctttgcggtgtgcatctttggctacgtaataaatttcttcatctgtgacatccagcagaatttctgttagaagcatttttgtcagcaacatcatttgatactctttctcctcttcagtcatctcaggatcactgtgctcttcttgaggaactggggatggacttctggtgactttcccactacttgcagcctcaacattttcagagtcttcttcttcctcatcactatcaaatttacttctctgaggtatacgagggccatcccctcctt

SEQ ID NO: 17948 - DNA, 355 bp, Homo sapiens
gccccttctcctgactgacacatctcaccaggtcgtcttccctgactactgacaggtcccaccagcaatactcaactctgcagaagtacaaggaaaatgcaaaggagatctatttagcattagatctggtatttaattaaacttaaacacgctggtctagaaagatttatggctctctcagtagaagctgctaatgcatatggaatattttcttcattgctgaatttaaaaacaaaatgaaagatagaacatggactgtggtgccagtggattctgggaggctatggccctagctaattcccaaagcctttggctttcaagattaaaaataaaatataactaatgagcatatatg

SEQ ID NO: 17949 - DNA, 347 bp, Homo sapiens
  misc_feature (1)...(347): n = A,T,C or G
gtgactttgcaaaataaggaaaggcacagagacagagagagacagagaaacggagacagatcatacatgagacatacaaaaggaacaggattgaaaaaaacaaaaaaatgagacagaagacaaagacagaggtcagaggccaaaatatggggagacagacagatttagagagagacccagagggtaacgaggtaagaacaacacacaggcagagagacagagagacagacagacagagagaggccgtcagacatcaggtctgacagaccagctgtgggattcacttcctctctttgggcctcagtttccctcctgaggacttctcaatgacgtccttccttttctan

SEQ ID NO: 17950 - DNA, 399 bp, Homo sapiens
aggaaggaagggtgcacatgataaaatatcatttttttaagtatgctaaaaagtaagtcttcctctgatctctggctcttaactcctggctgccctccccagaaacaactgtgttctccatttcctggatattcttcccgggaagaggataaattgtgtgtgtctatattgcaagtgttctaaacgtggtatttttctactgaataatatatcttaaagatcatcccattccatatggacagcactaactcatttattttttattttttattttatttattggtttttgagacagagtctcgctctattgcccaggctggagtgcagtggcgcagtctcttctcattgcaacctctgcctcctgggttcaagcgattctcctgcctcagcctcctgagg

SEQ ID NO: 17951 - DNA, 346 bp, Homo sapiens
tgatagtgaaatggattttggcggaggtttggtctagggtgtagcaagacaaaagcccatccaacataaagagtgagaggttgaagagatataagaggtgggaaactgatgcaattcattttttccgtagagacagggcttcaccgagctagcccaaatggtctcgatctcctgaccttcgtgatccaccgcacctggccttgttttgttttaaatgggaaaataattgggacagatttgtatagctagagaaaagcccaaccaacagaaagagtgagaggttgaagagatagaacaggtgggaaactgatgcaattcatttttgatccaggaagtgatgtgatgg

SEQ ID NO: 17952 - DNA, 358 bp, Homo sapiens
cttccgtgtataagggtggcgagaaaaaaaagggccgttctgccatcaacgaagcggttacccgagaatacaccatcaacattcacaagcgcgtccatggagtgggcttaaataagcgtgcacctcgggcactcatatagattcggaaatttgccatgagggagatgggaactccacatgtgcgcattgacaccaggctcatcaaagctgtctgggccaaaggaatatggaatgtgccataccgaatccgtgtgcggctgtccagaaaacgtaatgaggatgaagattcaccaaataagctatatactttggttacctatgtacctgctaccactttcaaaaatctacagacagtcgg

SEQ ID NO: 17953 - DNA, 345 bp, Homo sapiens
caagatctaaataccattcctttgatacataatagagttcaacggtgacagtaaattataaaaccaaaatataattgataatgaaactccaaaaatgaacaaattaggtataccctaaagaagcctaagaaaaaaagagaaagaaaacaataatatacagtattagggttgagaaaagcagtataaccacagatttagatagtaccaaaaatgataaaacattttgtgcagttttaaacatacacagttattaaatctagatgagacaattacattttaaaataaaatataaagtatcagaatgaaacttgagagagaaaacctgaacaaactgataacgatggg

SEQ ID NO: 17954 - DNA, 339 bp, Homo sapiens
  misc_feature (1)...(339): n = A,T,C or G
gtcagtagttgggagacgagcctggccaacatggtgaaaccccgtttctgctgagaatacaaaaattagccaggcatggtggcacatgcccgtaatcccagctacttgggaggttgaggcaggagaattgcttgaatctgggaggcggagattgcagtgagctgagaccatgccatcacactccagcctgggtggcagagcgagactgtctcangaaaaagagagagagagagagagagagagactgtctcacgaaaaagagagagagagaaagaaaagaaagaaagaaaaggaaagaaaaggttagaaagaaagaaaaggaaagaaagaaagaagaaa

SEQ ID NO: 17955 - DNA, 268 bp, Homo sapiens
cattactgagcgttcgaagttcatctgaatgagccacgcaaatctcatgcaatgctgctaaatcacgggacaggtccgttctagaatgctctgtagtgtccggaagttcaggtacattcccaagttcatctaaaaacatgatcatacgatgtttgttgcttttgatgaatggattgacaccttccatgtagggctccttagctccaaattccacaagatttgctaggttctgcacagatttagccactaatatcagtcgacgcggccg

SEQ ID NO: 17956 - DNA, 380 bp, Homo sapiens
  misc_feature (1)...(380): n = A,T,C or G
atagaagacagcgttgatgccagacagctgctgggacagctgcagcaccacagcgatgaggatgggctggcggtaggcgggggagcggaacagctccaggatggtgaccttcttctcccgcatcatctgccgactctcttccttcatctcctgcaggtcatgggtcacgtcagctgtcccgcgcagcttctttagcacactcttggcccggttctcctcgttgcggttgatgagcaggaagcggggactctcggggcagaagggcagcacgatgcactgcagcagggctgggatgaagatgatgctcancagcaggggccacaggtccttggtgcccatgatggagtccaggccgaacacctgggcgatgaggatgccgg

SEQ ID NO: 17957 - DNA, 337 bp, Homo sapiens
caggtgcaacatttggtgcccggacaagttgtaaaacctgaccttggggagggccttcactggcagccagtgtccacccgtgagcccggtgagcacagacgttagagccagggccggcgggctcagaagttggagccggggaccagtgggctcagaggtcggagccggggaccagtgggctcagaggtcggagccatgtccctgccgtgaagctctgagggttggtggtgacatcaggggcgattgtggcatcgcgattgtggtgtcttggctgcctttggccggcgctgccactgccctggtttcatgacgtaggcaccacatggtcctgtgttgt

SEQ ID NO: 17958 - DNA, 380 bp, Homo sapiens
cttcaccagatgtaatccagggccaccagccaagagacaaccacactgatcatggtgggtcagctgtactgattgtcatcctgactttggcattggcagctcttatattccgacgaatatatctggcaaacgaatacatatttgactttgagttataatatggttttgtgacttatgagctgtgactcaactgcttcattaaacattctgcattgggtatatctaagaattgtttacaaaaagattattttgtatttacccttcattcctttttttgatccttgtaagtttagtataaatatatctagacattcagactgtgtctagcagttacgtcctgcttaaagggactagaagtcaaagttccttgtctcactatt

SEQ ID NO: 17959 - DNA, 382 bp, Homo sapiens
cttgatattgcagcatccatactggctttgtaatcattaattttttggcagattgaatgtgctgtattgatatgtatctatgtaattgtattgtatgtctatagctaattcacgttttgaataatgttattttatttacttttttaagagaggagaatgtaaatttgtcagtttatttctgactagggatattttctttccatttagaaaagaagaaaaaaaaaaaaccttactgtcatacaaagcggtactagcgtcgggctgtataaaatcatttgcacattcctgagtagaggtatactgattataagacccaagggtaatttcatagcaaaatacataaaatcagtcggagcttttatacaaacatggaaaccaactg

SEQ ID NO: 17960 - DNA, 390 bp, Homo sapiens
tttcaatctatttacaggacagcactgcctactagccaacaatgctgtgttagcaacatcccatttttttctagacagtagtacttgtgcacttaaatatatatagtaaaaagtagaaataaaatgtacttatattcctaaaacataaagctttaaatgtaattggaaaaaatatagaaatcaccaggcatgcccaaaataatacatctacaaccttcataaggctatttgctaaaacagatgtatacttgtgaagggaaaaaaatctaaattaaaaaagtttatgaagactagaaatatggctaaacaatgtgtgaggacgaaagctttaatgcaaaatagctctagctcacaaaacccaaaatgtggacgaatgggggtacagggagg

SEQ ID NO: 17961 - DNA, 383 bp, Homo sapiens
ctttgcaggacaagtggacctggacctgctgcggtgccagcagttgaagctatacatcctgaaagcaggtcgggcgctgttctcccaccaggataaactgcggcagatcctgtctcagccagctgttcaggagactggaagtgttcacacagatgatggagcagtggtatcacctgaccttggggacatgtctcctgaagggccgcagccccccatgatcctcttgcagcagctgctggcctcggccacccagccgtctcctgtgaaggccatatttgataaacaggaacttgaggctgctgcactggccgtttgccagtgcttggctgtggagtccactcacccttcgagcccaggatttgaagactgcagctccagtgagg

SEQ ID NO: 17962 - DNA, 388 bp, Homo sapiens
  misc_feature (1)...(388): n = A,T,C or G
catggtctactgcagcctccaccttccaggctcaagtgatcctcccgccttggcctcccaagtagctgggactacaggcaagagccaccacatctagataattttaaaaaaacattttccatagagacaagatattatgttgcccagggtggtcttgaactcctgatctcaagcagtccttttgccttggcctccaaaggcctgggattataggcgtgagccgctgcccccagcctagaataagagttttgatccccanaagccttcagagactggcagtggagagagacaggcagtcccatgatgccattaaagtgttacaggtgctgttaaagatgagttcatgttttttaggggttaggctaaggtgctctaatatagaccccag

SEQ ID NO: 17963 - DNA, 385 bp, Homo sapiens
gtggattcagtgaatctaggaagagagcatcagacaggattccaggaaccagtgtttgatgaagctaggactgaggagcaagcgagcaagcagcagttcgtggtgaagataggaaaagagcccaggagccagtgcgatttggtgaaggaagctaggaagaaggaaggagcgctaacgatttggtggtgaagctaggaaaaaggattccaggaaggagcgagtgccatttggggatgaaggtagcaggcggcttggcttggcaaccacacggaggaggcgagcaggcgttgtgcgcagaggatcctataccagcatgccattgtgccaaggccacagggaaagctagtggttggcataaatccgcgagggcgggtatatggttgtg

SEQ ID NO: 17964 - DNA, 347 bp, Homo sapiens
  misc_feature (1)...(347): n = A,T,C or G
nncctgatgagnnnagctggagtaacgaggagtcaggatgccctgcaattgatgttgctctgttttgtgctcacaaaacagccatgtaacacatgagcacctgagttgaagccatccagtcgcaagtcagcagacagcagttgatggaattctcagtagaaattcagtaagggtgcccaaattttattttttttttcacctatactctaccaatatatggtatttaggaaaacttcttttatccaagcacaaagaaaagcacacacatttttataatcatctgcttcatcagggtaaataaataatttaacaaatttgatcagcatctctagtttaccagtacttta

SEQ ID NO: 17965 - DNA, 345 bp, Homo sapiens
ggaaatcattgccaaggccagtgtcatgaagcttttcccctatgttttcttttacacgttggcggtttttatattccttgaatttgccaaatgtgtttccaccttagagtctttgcacttgatggtcctctgcctcctctgcctgccttttcccaggtcttcccaggtcaaacacacatccccaggccctccctgaccatagctctgaagttgctgagcagcttctattacatgattatcatgttttactttcttcattgaactgataatatgtatctgaaattactttgctcacttatttacaagtttgttatcttcctagaatgtaagcttcacgaaaggtgg

SEQ ID NO: 17966 - DNA, 274 bp, Homo sapiens
cttccgagcagcgtgtctggaatctgtcctcccagcatgtgggaagggagggtgtattcctggtcttgaatggtttcagtgggtaccattttctctgaagagtggatagcctgacaccttctttggggtatgaggagcaggaatatttagagcatagggaaaggctggagccggacactgggggaccccgctgggatggggctctgccttcaagtggactccttcctgtgtgcagtgtctgccagctctgtttgctcaagcgtcgacgcggccg

SEQ ID NO: 17967 - DNA, 346 bp, Homo sapiens
cgttcagcctcaaaaattctgcttccaaatcttcaaatgactagtccttcatgtcattcaggttttggcaaaaatgtcaaattttcaaagatcacaccttccatgatcaccttatcaacgcactggtgctatcctcacactttctaccacatgatggagtttcacattctaagcatttgagatctgaaaagctctatctatgtatttatttaattttctgtctctctcatcattgttttccaaagtggaatataaatcccatgaagacaagaaccaagattctcctgcactgctctttccctcgcatctataacagtgcttggtgctttttgttcaatgtatgaat

SEQ ID NO: 17968 - DNA, 398 bp, Homo sapiens
atacagaaaaaaagaaaggggtgtctaaggcaactaaggtgaatatttgaaaagatatgctctgacacgcaagaatttatttcaccagaaataaatccacaaatttgtagttggttgatttttgacaaaggtgccaagaacatgccacaggaaaggacagtcttttcaataaatggtcttggaaaaactggctatctacatgcagatgaatgagaccaggcccttatttcacaccatatacaaaaatcaactcaaaatagattaaaatgcaaacataagatgtgaaactgtaaaactactggaagaaaacacaggggaaaatctccatgatactggtctgggcaatgttttcctggatatgaccccaaaaacacagccaacaaaacaaaaatagacag

SEQ ID NO: 17969 - DNA, 408 bp, Homo sapiens
  misc_feature (1)...(408): n = A,T,C or G
taaaaatataccttttttctttcaatttataagtattatttttttcaaactgctaccaagttattaggacagctccttagtagctgtttgaacgtaggtacttaataagttaactgttaggtatttcttttggcctaaagacaccaccatagtgggagattaatcactctcccactacgtgggagattcatgaatcaagaaaatttgggaacctctgctgaaagttaacttggcgtcttggagttgaatcaaacatgtctatagaagattttgtgaatagaagcatacttctgatcttgctctgttcttccccacctgatagggtcagctacagagccaaggtgtttacactcattgcttcaattgccccccgccccccccttnttttttttttttttggagaggaag

SEQ ID NO: 17970 - DNA, 397 bp, Homo sapiens
ctggagcacagtggggccatcatagcttactgtcactgtagcctcaaactcctgagctcaagtgctccttccgcctcagcctcctaagcagctgggactgcaggcatgcgacaccacgcctggataatgcttttaatttttattatggatggggtcttgcaatgctgtccaagctgatactcaaactcctggcctcaagtgatcttcctacctcgccctcccaaactgctgcgattatagacatagagccgctgcacctggcctgagagcatcttcttcaacctagatgctcatttttcagcacgagattccatgtaaacgtcagaaaattttcctgacaattattttcttattatacaaacatacaacacaaacaacaacaacaaaaaccctgctg

SEQ ID NO: 17971 - DNA, 90 bp, Homo sapiens
aatgttggacactgcagaagctaaagagagctaaactggatcagcaaactttgcgtaacttattgagcaaggtttccccttccttttctg

SEQ ID NO: 17972 - DNA, 292 bp, Homo sapiens
  misc_feature (1)...(292): n = A,T,C or G
tctcactctgtcacccacgctagagtgatgtggagtnccacatgaacctgcattgaaccctcattgactatgcacgtatgttttactttacaaaaatagaaactaacataaccttaaaacatattagcggacttccctgacgcgctgaaagtaggatattattctaaaatttttcctttatgtatgtagctttttataaaccctacctatgtgttttgtgtaaaaggacgtacacggcagtcattgtctgactcttggtgtaaaaaaaaataaggggccgtcgacgcggccg

SEQ ID NO: 17973 - DNA, 337 bp, Homo sapiens
gtctgagaagaagcagagaaaaaaggtggaatcagaaagcaagcaagaaaaggctaatcgtataatatcagaggccatagcaaaagcaaaggagcgtggggaacgcaatattccacgagtaatgagccctgaaaactttcctactgcttcagttgaaggaaaagaggaaaagaaaggtagaaggatgaaatccaagccaaaggacaaagacagcaaaaaacaaaaacatgttctaagttaaaagagaagacaaaaattggcgaactcattattacattgggtaagaaacaaaaaagaaagaatgagtcttcagatgaaatatctgatgcagaacaga

SEQ ID NO: 17974 - DNA, 353 bp, Homo sapiens
cgcatccgtacagcagctgggcttaggtcttgacattaccgggtcccagactctttcattctattgtatttactacaaggagattttgtttgttctgaaccattttgctgagtattgtggctgtcttatgaacaatgaactcccagacccacatggcttcatgagagaattctttcagaccttcaaagagcagagttcttatgctatttaaactacatcagagcggaggaagaggaactctgcccagttctttttatgagccagcatagccttgatacctaatcctagcaaaaatagcagaaaaaggtgagtataagatgaatctcaatcattgattctatataagcatgctg

SEQ ID NO: 17975 - DNA, 347 bp, Homo sapiens
  misc_feature (1)...(347): n = A,T,C or G
cgcatcagtacagcagctgttcttagttcttgacattaccgtgtcccagactctttcattcaattgtatttactccaaggagtttttgtttgttctgaaccattttgctgagtattgttgctgtcttaagaacaatgaactcccagacccacatggtttcatgagtgaattctttcagatcttcaaagagcagagttcttaggctatttaaactacatcagagcggaggaagaggaactctgcccagttctttttaggaaccagcataaccttgataccaaaacctagcaaaaataacagaaaaaggtgagtataaaatgaatctcaatcattgattttaaataaan

SEQ ID NO: 17976 - DNA, 248 bp, Homo sapiens
ccgacgatggcccaggggacattgatccgtgtgaccccagagcagcccacccatgccgtgtgtgtgctgggcaccttgactcagcttgacatctgcaggtaagaggggggccttctggggttttggaggcaggtcaggagatgctggatgacccagttctactgacacaggagcatgtgtttggcccaggctctaggctccagcctctgcagctactgccctggcagtggcgtcgacgcggccaccac

SEQ ID NO: 17977 - DNA, 379 bp, Homo sapiens
tcaagtaatccttctgctttagcctcctcagtagctgggactacatgtgtgagccatcatgtccatctcagaaaaaacttctttgtaactgttaacagaaaagaaaattaagcaatgaaaaagaactttatcaacagtaatagttttgcagaagcaatagaaatgttcttcaagtagcatctgcttatatcaaacataagtaatttcctgaggattttttatttttttaactctgaattctgtgaagacatttcagtagagaccaaactagaagtccaatgatgtgatattttggttatcaacaaaatacagcagtagcaagacctttgtctgttcttacgggttgtgtcagagctggagggaagcccctggaagtaag

SEQ ID NO: 17978 - DNA, 364 bp, Homo sapiens
  misc_feature (1)...(364): n = A,T,C or G
gcctgttgccctttctgtaccatttatttgctcccaatgtttatgataataaaggcaccgctgatggggacctccaaaaaaaaaaaaaaaaaaaaaaaaaaaaaaaaaaaaaaaaaaaaaaaaaaaaaaaaaaaaaaaaaaaaaaaannaannnnnaaangaggggggggggggggccaaaaataaaaaaattttagaggtggaaataaaaaaggccccccgaaaaacaattaaaaggggtgtgcaacacaaattttttttttttttaaaaaaaaaaaagctccctttttttagagaacctccccccccccatcctgtttttgtggggggtgcgaccctcttgaaaaaaaaaatttttttttta

SEQ ID NO: 17979 - DNA, 341 bp, Homo sapiens
cattgctcactgcagcctcgaactcctgggctcagggatcctcctgcttcaccttccttagtagttgggactacaggaacatggcaccatgcccagctgataattttaatttttttgtaggtatgagttcttgctatgttgcccagactgtcaatgtaaattttacaatcagcttttcagttttcacagtattggctgccaggatatttaagatttcattgaattttgtaacaacattgagtcttctggtccgaacatggcattttgttcaatttataggtctttgatttctcttagcattcttttctagttttttaaagatcttgccgttcttttgtcaa

SEQ ID NO: 17980 - DNA, 241 bp, Homo sapiens
ctatacgttagctcttgcacatgctgtgtggcaccattctagcatcggacaactttctctcattccaaagtttcttactgaagtacttcttcctatagtgaagaccgaattccagttgctttatgtataccatcttgttggaccatttttacaaagatttcagcaagagagaactcgttgtatgatagagattggtgtggcgttttatgacatgctgctgaatgttgagtcgacgcggccg

SEQ ID NO: 17981 - DNA, 361 bp, Homo sapiens
  misc_feature (1)...(361): n = A,T,C or G
gcactatgtcaagtgacggggaactgcagagaaaacaaaagcaggacggggaaagggaagtacaacagggagttgggccctcccccaagtgtgaggagatggcactgcacagagtcctggagcccgagacagcacatccagccttccaggagcagctcccaggcagaggcccggcaggcccagcaaaggcaccaaggcaggaagatgcttggcgcatcaaaggacattaaaagccagatggctgcagtggcccatcccagggaaaaggactggagagggggtcttggggaccatggagagctgcaggctgttatgaaaaccttccacgtggaagggggcttgtgcggngctttgagcggan

SEQ ID NO: 17982 - DNA, 356 bp, Homo sapiens
cttaatcataaggacaaataatgaaaattatatttcaaatttctaagcttttgtggttaaaaaaagcttctagaaactattgtttctcctcccatgcagttataatatgcttaactttctttaagatgggtgtttggtagtatcatttacaatatatttatttttgttttttaagcatgtttttatatttgtttaaggtggataggcatgtagacctgctagaagttgcccaggaaactgatgggttttcaggaagtgacctaaaagagatgtgtcgagatgctgccctcctctgcgttagagaatatgttaattctacatcaaaaaaaaggtatgttattttgacttgacttttt

SEQ ID NO: 17983 - DNA, 384 bp, Homo sapiens
ttttaaactttgcaagccaaaacggtactgtggcagctgctcatacctattgattgtaaagcgcaaggagaaaagtgtaaacaaatgggcggggctgagttcctaaaaactttgacactcaagtgtgaatgtcatatatcctgggtcacaaaagattctcccctgcccccaaccatttaaaagtacagaattcattctcaactggtgggcagtacacaagcaggtggcgagctgaattgacccacagacttcccagcttttaaggaaaacagacagcaatgagccagacaagtgaacaagataccgcatttcgcttgatagtgtatgtgttcctaaaaactatgacactcaagagtgaatgtcatatatcttgtggcagagaag

SEQ ID NO: 17984 - DNA, 530 bp, Homo sapiens
  misc_feature (1)...(530): n = A,T,C or G
tgtgtggagnaaaanaattgaaaaactggatgtgcantatgtatataacctatctatnncgatgaatgaagatancccccaccaannacccaaaaaaagaagatnnctctcgaggtatccgatattcgcgtgcccgcgtcgaactctcgcttctatattgcccacggctggagtgcagntggcaccgatcttggctcaactgcaancccctgccttcctggatttaagcaanttctcctgcctcagtctccccagtaactgggatttacaggcaagcgccaccacacccggctaatttttgtattttagtagagacggcgtttcaccatgttgcctcagcatttggaacattgtggaaagaagcattttaatatttaaaatttcccacaaaatccattatgcttgaaacagactatcatatgagggtaatgggcaccctctgatgattttacagcttttaaattacataggctaacaccattgcattttaacctctcatttccatgcaacaaaatgttagatgaatcgtn

SEQ ID NO: 17985 - DNA, 283 bp, Homo sapiens
cttttttgttgttaaaagtctgttctctagccaggtgtggtggctcatgcctgtattcccagcactttgggaggctgagaccggaggattgcttgaaaccatgagtttgagatcagcctgtacaatgtagtgagaccaccatgtttttatgaatacaaaatttaacccgatgggggggcacgtggccacatatctgggtacccaacaaattatgagggtaaagtgggttgatcccgtgaagccggaagtgcaaagatccagtggactgcgtcgggacttcccc

SEQ ID NO: 17986 - DNA, 400 bp, Homo sapiens
gctgaggctgtaggtgctgtccttgctgtcctgctctgtgacactctcctgggagttacccgattggagggcgttatccaccttccactgtactttggcctctctgggatagaagttattcagcaggcacacaacagaggcagttccagatttcaactgctcatcagatggcgggaagatgaagacagatggtgcagccacagttcgtttgatttccaccgtggtcccttggccgaacgtccacggggcatcgtaactctgttgacagtagtaagttgcaaaatcttcaggttgcagactgctgatggtgagagtgaaatctgtcccagagccactgccactgaaccttgatgggaccccactttgcaaactggatacagcatagatcaggagtctaggg

SEQ ID NO: 17987 - DNA, 376 bp, Homo sapiens
cgcggccgcgtcgacgcacaatctgtgagaaagtaggccctcgccagacaccaccagtgctttgatcttggatttcccagcctccagaactgtgaaaaatgattttctgttgtaaattacctagtgtttggcattttgttatagtggcttgactggactaagacaggcccctttgtaaaacactgagagagggatggacttcataccctttaggggatccttctctgtagaattctttttttcagaagatttttttttttcttttattaataagctttttatttttgaatacttttttattgggacatagttgtacgtattatggggtacttgtggtattttgatacaagcatacaatgaatgcataatgattaag

SEQ ID NO: 17988 - DNA, 383 bp, Homo sapiens
gaggaggctgtgctgtgtgccaatgtttcgtttgcctcaaacaggtatctcttcgttatcagaagagttgcttcatttcatctgggagcagaaaacagcaggcagctgttaacagataagtttaacttgcatctgcaatgtccatctcaaaatactgcttttacaaaagcagaataaaagcgaaaagaaatgaaaatgttacactacattaatcctggaacaaaaaaaaaaaatagtaataataattttaatggggccccatttctttttacttttgttccttgggtttttggggccacgtgtccaaaacttagggaatgcagggttatgaagatttacccctatgttttcttttaagaattttatagttcctctcttatctt

SEQ ID NO: 17989 - DNA, 392 bp, Homo sapiens
aaaatataccattttaaggcatgtggagacaatgctatttgccttagtttattcgttgttgactttgcaaaaagtgagacttttatgtactaacacatttgattgattgtgtattgaatcggaattattatttctaaactcaggattagagtccttaaatgacgagtgtcttttaccgaaatgagtttatttagaagcacgatatcctgggttggtagttagcgcatatcatcagccctccatctaatgtgattgctatgatgtgcacgatatgacagcttagaatgagtgccttgacacctacataaggctgcattccatacctcactgaagaagcctacagatgctgacacacagtgatgtggagggcattccggagaaacttttgcaag

SEQ ID NO: 17990 - DNA, 400 bp, Homo sapiens
ctttttaagaagaaaattctgtttttgagggggaagatcatgagcaaataccatttttgaattccacattaaaaagtcaggacatttccattttgcagttaaaaaaaatcttctggagatggatggtagtagggatggttgtacaacaatgttgaatgtacttaacaccactgaactgtacacttaaaggtggttaaaatggtaaattttatgttatttgtattttaccacaattaagaaatctgttagggctgggctcacgcctgtgatctcaacacttcgggaggctgaggcaggcatttcacttgaactcaggagttcgggaccagtttgggcaacgtggcaaaaccctgtctctacaaaaaatacaaaaattgactgggtatggtgacatgtccct

SEQ ID NO: 17991 - DNA, 248 bp, Homo sapiens
ctttgagaattatatgaaaaatggaacaaatgactttgcaaagtattaaagagaaatagtgtagaacctaatgggaaccagtgaagtctagactaagatgacaggtgatcctgacctgtcaaacctaaaaactaaactccaccaattttaaaaaataaagaatttgattttgccactctgagtcaccatcactactgctcttcttgccttcctatctcagccaaccttgtagaacgtcgacgcggccg

SEQ ID NO: 17992 - DNA, 342 bp, Homo sapiens
ctgcaaatgatgggtcagctccttggcccctcacagcaggggctctagggacccctaaagccttgatggtggatttgttcacctgtgatgggggacatcctggagagcctgttatgtctctttattattatttttttaaataaatagagacatgttgcccaggctgttttcaaactcttgggctgcagcgatcctcccaccttggtcccccaaagtgcttggattgcgggcaggagccactgcgcccagctgagcctgttgtgtctcggcctcccgagtagctgggactgcaggtgcgtgtcaccatgcctggctaatttttatatttttagtagagacggg

SEQ ID NO: 17993 - DNA, 351 bp, Homo sapiens
caacgcctgacaccagcaggcccagagactgaggaggagccataccggcgccggaaccagatcctatctgtgctggcaggactggcagccatggtgggctacgccttgctcagcggcattgtgtccatccagcgggcaacgcctgctcgggccccaagcacccggaccctgggcatggctgaggaggatgaacaggaatgatttgtcctcacgctcccaagactggattttctactctcatgcattccagaggcccccgtgcctcctcgttgttgggacagacggacacggtgtgctgccacccagaataaagccactcacgtcgacgcggccgcgaattccagatctatg

SEQ ID NO: 17994 - DNA, 342 bp, Homo sapiens
attgaatgttacataggaactttcactggttccagctagccttggctgttagcaattatttttatctactttaacaggggggacagagtaggggggcaggaaactaagctggcattatggtcacaggaaagaacagactgatttggagccttccaaactgcagacctttgttactgaccgatgcttaatttggtttctgggttttgttagttttttcccctgcccttacctcatttaccttaacgacagctcccccctctagagctcagctagggcaggctgccactgcggattggggggccaagaggcccagggcaagaagaaagtgggttgaaagcagag

SEQ ID NO: 17995 - DNA, 346 bp, Homo sapiens
  misc_feature (1)...(346): n = A,T,C or G
gttagcctgaatacaggaccactgcaattagaagaggctttagtggaaaagacatggccaaaagcaaatgtcaactgttagagaaccctggcatcccaaattaatattcgtgacagctatttgcaagtggcctcaaaattcatgtcctgttattcgcaattagctaaattcagtggggcacaaaagtaaaacacatggactctcaggctggatggctacattgggtctcttaggatcagtatttacctcacccagctccctgttctctacttttccatgtgtatcaagctgctgtctagtgtcctaagtttattatgttattcagtacatttcaatatcgtctctn

SEQ ID NO: 17996 - DNA, 402 bp, Homo sapiens
attcgatgaatgtgtatatcttcaattaactacaaataatccaattttatttgtagtgttaagtatagtaagaaatataagtacaatacctgtttaaaaattttacaaaatattttagcaaagtactttttaaaactttaatttttaacttaatgtaattttcaggtaaaaggataatatattcagtgcattttaatggcatgagtttttaattaatgttgtatagtcgaagacatagtaatatgtttatatattttctagaataacatatttcagattaaatatgtatttatttttgaatttaaaatattcatgtttgaatggttaaatgagaatgtacccttatttctgtggaaatatagcttttattaacagcaaatataaatatatctaattgagaag

SEQ ID NO: 17997 - DNA, 388 bp, Homo sapiens
  misc_feature (1)...(388): n = A,T,C or G
gatggccgtgtctacgtttgacacagtatgactatgaagatccctatggggcattatactatgactgatgttgctcctgctcctgggcctaatcagatatctcccaggcccatttcagatgcaccggtcccccagccatccatggcatcccgggtatccctgggacacctggcccctaaggccaacctggtaccccacggtttttatgagagaaagggcttccagggctggctggagaccatggtgagttcggagagaagggagacccatggattcctgggaatgcaggaaaagtcggccccaagggccccatgggccctaaaggtggcccaggggcccctggagccccatgccccaaaggtgaatcgggagactacaaggtcacccn

SEQ ID NO: 17998 - DNA, 401 bp, Homo sapiens
ctcacatttactcttcctcgtgtcctgatcctgctgacttgtccacatgggcaactacgaagctggcacaactatacttctttgttcactttggtcaccaccatttgttctgctgttgggctgcccatgtgtaggcaggtttcacgaaaatatcaggttccctaagcaacatgaactgggaggctcagagagggatttccctagtcactgacttactgagggattgactcaagattcccaggcactagacagaagcagtcgggaaaggaatcatttcctgattgcctgtgggggaaaaagaaacttttttggatagaacagtctggatggactctaacacagtaaaaagtgaaggcagtgcattcttcagaagggcggcagatggggcaccacgcatcccc

SEQ ID NO: 17999 - DNA, 365 bp, Homo sapiens
tttttacaaacaagcatctatccccacaaaaactttttttaaattaaaaaggcacagtgatgcacacttagtgtcacagctacttgaaaggctgaggcaggagaatcgcttttgagtccaggagttcaaggctgcagtgagctaagatctagccaccacactccagcctgggcaacagagcgagaatctgtctctcaaaaaaaaaaaaaaaattaacaaagggggttttttaagaaattatttatattaaacatgatgggattcagggtttcatattttggggactgcaatgaccttgataataaacctttcaggaaggtaggcagctagggaatttcaaaacccggaaaggaaaaaaagaactt

SEQ ID NO: 18000 - DNA, 350 bp, Homo sapiens
gttttgataagataaaaacataaacataattactaaatgccaacaaaactgaggaatcataatatgttaaggtaaaaccaaaataaatgcttgtagcactcaatatctcaaacctatgtatctttaagaacaaatatatttctttgaaatattctataaagattagaagttattagcccagagttcttaaaaaaaaaatggaagcaaaagctgaggacgaaacatctctctctctgtctctctctctatctctctctctctcaacctctctttttaatcatctcccaaaaggatacaaccaagctcctgattggaaaagcagagatgttatctccccatgggttatatag

SEQ ID NO: 18001 - DNA, 345 bp, Homo sapiens
cgggagttcgagaccagcctggtcaacatggtgaaaccctatctctacaaaaaacaaacaaacaaaaaaaaattagcagggcatggtggcgcacgcctataatcccagctgctcaggtggctgagacacaagaatcacttgaacctgggaggcagaggttgcagtgagctgaaatcatgccattgcactccagcctgggggacagagcaagactcttgtcccaaaaaaaactgaaaccctttcccccaagagtggagaactgctgcttcttatcaaggaagctgaggcacagagaaaggaaaccagaattgttaataatgaaacagatagcacgtattagacagt

SEQ ID NO: 18002 - DNA, 356 bp, Homo sapiens
  misc_feature (1)...(356): n = A,T,C or G
gggaaggacaggaacatcctctccagggcctccgcaccatactcgccagcgtgcgcgccgaccttaccccaggcggccttgacgttggtcttgtcggcaggagacagcaccatggtgcccccacaaaaaaaaatactgaaaactcccccccgcctcagttacacatccaaactctacatttacaaaacgaattcagggtgaggaagtaaaaacaggtcatctattcacaaaactgaaatacttcattaccccaactaaacatacaaactgcttacagatttgctgaaattgtctcaatttggctatcaaattcatttggttttcctcaaattcgtgtaaaaaaaaaaacccacaan

SEQ ID NO: 18003 - DNA, 315 bp, Homo sapiens
ctctagtgcccgggcaaattcctgggaactgcggacacagcttgccacagtaccttatcagctaattgcactctttgatgtgctgggagtcagcttgcacaagttaagtccttgaggaagggggtgggtaaggagcccttaacgtcttgcaaatgaaggagccgaatggaatccctccggctttcttagctaagagagagtcaatcaagttaatacaagttagggtatcacaaaagtatataatttgatacattttaacgtatttatacactgaagagaccatcaccaccatcaagacaagggtcgacgcggccg

SEQ ID NO: 18004 - DNA, 342 bp, Homo sapiens
cggggaccctgcgcatgaacctggaccccttcggcagctactcaaaggaggacatttggggggctttggagctgtcccacctgcacacgtttgtgagctcccagccggcaggcctggactttcagtgctcagagggcggggagaatctcaggtaaacactgggagtgcagaggtcaggaactgcaaccctccctgggaaaccctggcgggtgctgggaaacctgacaccaatgacacagagatgaggccagcccggatgtgcacagggctgtcctttcgtattgagcatattccgtgtgccaggcatggtgtactgccccgccgactcctcacacaagcccc

SEQ ID NO: 18005 - DNA, 359 bp, Homo sapiens
agttggcagggtttacaaccagtcagaaatttgtgcctctaagaaatccagaagactgggtcttttcagctcctctttttctctctttactcatagctcattgtccctcatgaccaggactaagtttcactgaattatctaaaaatgaaagaaaaagattcaatactctatttctctatacctaattcaggaaaaaaaaaatgtgaggagaatgcaacctttgttaataactttatcaggacctcaaaaactctacgcaaaaaaaataagatttctctccacatgtctatagcaattagaaaaccttatgttggttgtttccttatttggagacaaatgacaaaattgaagaagcatta

SEQ ID NO: 18006 - DNA, 357 bp, Homo sapiens
gaaccagtttattcttacagtggattacagtgtatttcctctttcacccacggatcctatttgaagtcaaacagagcaagttattttgcttctttcaagggacagtcctttggttttttggagaccattgtccttccctcacttatttctttattccccctgagacttttctcctctgggctaatacttccatacctccaaaaccccaacatccaccaccacccctttgggctgttgcaaatctccttaacatcttcattgcttcactgggaatgaatttccgtttgtgtacatcctccctcgcagtgcagtacactgatctgaccacagtgctccacggacagtgagcagaactac

SEQ ID NO: 18007 - DNA, 353 bp, Homo sapiens
  misc_feature (1)...(353): n = A,T,C or G
cagtcattgaggaattccaaagtcttggacataaaaatgaagatcttggagcataggtagagttggagacttttccagcttcaagacagttggccccttaaagaatagctggtcctgtgggtggcttaaagaagatgcatttctagaccccggttacagtggtaaagcgataagtcctggtcagggctcgtgtggccccactgagggctgggaagagcacacttgcctgcagactggggccagttcctggggctggaagaggaaggcaggaggatggaggggcaggaactttgtcctcagtatgccattgctctggggtctgtggacggatgcccagagcangacgcatgggg

SEQ ID NO: 18008 - DNA, 345 bp, Homo sapiens
gctgaaggagccccagaagtggtaggacctaaatctgaagtggaagaagggcatggaaaactcccatcaatgccagctgctgaggaaatgcataaaaatgtggagcaagatgagttgcagcaagtcatacgggagattaaagagtctattgttggggaaatcagacgggaaattgtaagtggacttttggcagcagtatcttcaagtaaagcgtctaattctaagcaagattatcattaaacagaaattataggttggcatggatcctattagctgtgtaatactggaattatcaatgatatgcactggtggaggtgttatttgtgctttagaagatacttgctg

SEQ ID NO: 18009 - DNA, 354 bp, Homo sapiens
ggctcacggctattataccagcactttggaaggccgagatgggcggatcacgaggtcaggagattgagaccagcctggtcaacacagtgaaaccccgtctctactaaaaatacaaaattagccgggcatggtggcacgcacctgtagtcccacctacccgggaggcggaggttgcagtgagcccagaccatgccactgcactccagcctgggtaacacagcaagaccgcatctcaaaaaaaaagtcccagcagggatttgaaaagacagagtgggtgaggcttgagtagatgatctgggatcatgtctaatccaagaatctatgtctatgtaacataataagtcgacgcggccg

SEQ ID NO: 18010 - DNA, 347 bp, Homo sapiens
cgcggacgcgtcgactgtgcctgtggtacagagccttcaggtgagaacgcctagtccaagttggccttcagctctttgcagctactctcagctgtgacctggcatcatttcatttcatgggagttttgatttttctccaatcgtctgattaggggatttttatatacaccatttgttgatttaaagaaaaaaaaacacaattaggaggagcgtacttgccagaaaatttaaatgtagatagacttgtatgttatcttgaaaagtttttagctagctttgtactaaaaaacattttaattgcccttttttaaaaaaaacacatgaaagttgaatgagaatctaatttg

SEQ ID NO: 18011 - DNA, 395 bp, Homo sapiens
  misc_feature (1)...(395): n = A,T,C or G
ttcagatctaactttggctacaacattccactaaaacatcttgcagacagagtggccatgtatgtgcatgcatatacactctacagtgctgttagaccttttggctgcagtttcatgttagggtcttacagtgtgaatgacggtgcgcaactctacatgattgacccatcaggtgtttcatacggttattggggctgtgccatcggcaaagccaggcaagctgcaaagacggaaatagagaagcttcagatgaaagaaatgacctgccgtgatatcgttaaagaagttgcaaaaataatttacatagtacatgacgaagttaaggataaagcttttgaactagaactcagctgggttggtgaattaactaatggaagacatgaaattgttccaan

SEQ ID NO: 18012 - DNA, 358 bp, Homo sapiens
caaatttctcctttttgtcataacccaacatcttattttggttttatgttataatctttgcctgaacatttctttccttcagacttttcctagattttcttatgcctcaaacctactttccttttgattccttttttcatctcttctgcacttccatgggtactacctcttataattattccctgaaactgtcttgtcttttagggattgttggctacaaagtgaggaagaaagagaacctggtccattcttatcaacacgtatttttggaggtctatactgggctacccgcatagagtattcagcagagtgaagggtctcaatttcttatgaagataattacagctaacaatagagc

SEQ ID NO: 18013 - DNA, 356 bp, Homo sapiens
  misc_feature (1)...(356): n = A,T,C or G
aaatagtagtcattacttttaccattcctcctccagattgctctagatccccagaatcccatatagtagccactagccacatgaggctatttaaatttaaattagttgaaattaaatgaaataagaaattcagttcttcatccatacttagccacatatccagtacccaaaagccacatgtagctagtggctgtcatactggacagtgccaatatagaacctttctatcactgcagaaagttctattggctagcactgctctagagcataggaattactttttttgttcacaagctccactggtaaaaatttttagcttttatttgaaaaggaaatatttcaaaataaacattcan

SEQ ID NO: 18014 - DNA, 274 bp, Homo sapiens
tttttttttaaaaatcaagccatttaattgtatctttgaaggtaaacaatatatggagctggatcacaacccctgaggatgccagagctatgggtccagaacatggtgtggtattatcaacagagttcagaagggtctgaactctacgtgttaccagagaacataatgcaattcatgcattccacttagcaattttgtaaaataccagaaacagaccccaagagtctttcaagatgaggaaaattcaactcctggttttaggtcgacgcggccg

SEQ ID NO: 18015 - DNA, 381 bp, Homo sapiens
tgttcttgtcgacgaaaattccggagcttgggctactggcgtacaaattcagtggcgaagggcttgtaaaacagtattacacatgacattacatctcccctcatatgtgttacacatacggtgactgtacagattagtcgataaggaattataatgaattatgttaagtgctactgtggacgtactgttgcctattaagggcatatatatgaaaaattacctaaatctgactttcataattaacacacatcctagagcattctaaactgatatagaaagatgtgtcacagtgaaacaggaaaactgaagctatgcaaaatgctaatattcctgaaataagaaatattgtgtcacattcaatcatacaactagaagcctaga

SEQ ID NO: 18016 - DNA, 333 bp, Homo sapiens
  misc_feature (1)...(333): n = A,T,C or G
cttcttggaaagaaaaaaaagaggctccgggttgacaaatggtggggtaacagaaaggaactggctaccgttcggactatttgtagtcatgtacagaacatgatcaagggtgttacactgggcttccgttacaagatgaggtctgtgtatgctcacttccccatcaacgttgttatccaggagaatgggtctcttgttgaaatccgaaatttcttgggtgaaaaatatatccgcagggttcggatgagaccaggtgttgcttgttcagtatctcaagcccagaaagatgaattaatccttgaaggaaatgacattgagcttgtttcaaattcn

SEQ ID NO: 18017 - DNA, 330 bp, Homo sapiens
gggaagttcaaaaatagggcaaatgtgtaatgtgttcagttcaaagaaaagaaaaattaatctgtctggagcatggtgccagggaggtgtaagatggcctggggaggtagtcagagactagaccacacgggacctttatcctaaaagcaatgagaaaccactgaatggtttccagcagaggagtggccaggcctgcatttggaaagatctactctgccagaagctggagaatgaactaaggagggacgagaatggaagcaggaagaccacttaggatgttatcacatagccagcctagagataatagtgaccaggaggtcgacgcggccg

SEQ ID NO: 18018 - DNA, 334 bp, Homo sapiens
tgaaaccccatgtctactaaaaatacaagaactagccaagcgtggcagcgcatgcctgtagtcccggctactcgggaggctaggggcaggagaatcgctttaacctgcgtggcaaaggttgcagtgagccgagatcacgctaatgcactccagcctgggtgacaagagtgcaactctgtctcaaaaaaaaaaaaaaaaaaattgggggcaaatttggtttccttgggaaaaagggaccggattattggccctttcccaaaaacaaaaaaaaaagggtttggggaaccctggaccccaaatggggaaaacagaaaaacttttgcttccttttccg

SEQ ID NO: 18019 - DNA, 390 bp, Homo sapiens
agaaacgattttctcactaagggacagcagcggagacactgaaggaaccttttctctgaatgaccattttttgtttataaaatgatgtgggcattgatggaacttctgaattttatagctgattttcaccatatgacgagggtgtcctctcacccttttgtgaccttcctattctggagaaaagtctgtgtgcttgggagctttatgtgttgggtggggtactttgggaacacaggattagagtttggattagagtttgacttagaatggaaattaacctttgacttaattgtgtgtgagagtggagaaaggggaggggatagagttatgaggctgtgaagttaggaatgcttgaatgctgtctgagaggtttagaaattttaattactt

SEQ ID NO: 18020 - DNA, 332 bp, Homo sapiens
  misc_feature (1)...(332): n = A,T,C or G
gtcgacgctgngaataggagagggaagaggagggaagaatggaagactttccatgtatctactttatgaaaaagttttcataaacttttacctcctctctcaactttctgatgagctctgtgtcattgtgatgggttttgatgagttcagctttgccacttgcaacaagggatgcactttctattagatcaggccgtaaagtaccttgggcaaggaaaacctcctctggtttcaagttcatttctccaattacttcattggcaatcttagcaaaagtatccccaatgatttttcttttctcttcaggacttgtggtcatatttaacgttttg

SEQ ID NO: 18021 - DNA, 331 bp, Homo sapiens
gtccagataaggcagggctataccaccttaccatggtaagtcaaacccttagaacaaaattagggagcataatttttggaaagttataactatttatctttctccttcgttttcttgtcatcccttttgtttgtttttttagtaatagccagtattttttatttccactttcccatgagtctattatagctaacttgtaatactgtaactagaaaggaaaatgttttcctctcctgcctcaactcctaaaataaagcacttaatcattaggacttctatgtgaaaaaatatatgctgtgtgtaataaacccaatgcactttaaatatattt

SEQ ID NO: 18022 - DNA, 344 bp, Homo sapiens
ctgccctggacctgtgacattctgcactatttctgtgtttccttgtggccaagtataacatccatacaataaatcacctcttctgcagtcttagctgaagaattaaaaaaaaaaaaaaggaaaaaaaaaccattaaaattttggccccaagcttttccttgttgaaaacctactagggcatttactgaaaccctcaaaacaaaacaaattttgtaaaaaggaaaaaatttttaagggccacaaaaggggcatagtactaaacttcaaaaaaaaacatagttaaacaataacaagctgcccactaataagcaaaactgcaagggctttaaaattatcccccatta

SEQ ID NO: 18023 - DNA, 348 bp, Homo sapiens
cgcggccgcgtcgactatcattctggtttattcagattaagaaagaaatacactactgaaatggtatgaaactcactgtcaaagggcacttaggtccgttggctccgtttcccacagttccccaaatgaacaggtggtacaagactcaggctttcccctaattacttacttgggtaaagtgacttgggtaaaatgaaagatacagccaggcgctgggctcatgcttgtaatcccagcactttggggggccagggcgggcggatcacgaggtcaggagttcaagaccagcctggccaacatggtgaaaccccgtctctactaaaaatacaaaagttagctgggtgtggg

SEQ ID NO: 18024 - DNA, 337 bp, Homo sapiens
  misc_feature (1)...(337): n = A,T,C or G
ttatactgccccaaaagagcctgcagccctggagaaacccataacatcagcactcctgcctttcaaaggaaagaaactgaggcccacaaaggtgaggagatgccttctggaaagtccacctgccccacaggacccctttcttggaaaacctcctacccaagccacaagctaggccccaagccccagacttctctgactgaatgaaaactgaacactggccgggcacagtggatcgcacctgtaaccttagcaccttgggaggtcgaggcaggaggatcacttgaggccaagagttcgagcaccctggccaacatggcaaaatcccatctctactaan

SEQ ID NO: 18025 - DNA, 395 bp, Homo sapiens
gccttttcatgtcctttgactagttttctttttttatttttaattgttttataggttttattcccacaatgtatgttaggtatattcctttgttatacatgtttgtaatctccaagtcttttaattttgtttaggataccttttatagtacttgtttttttggctatttgtgttagctaaataccttttatagttcaaacatgtcacatgcttgtctctttattataatttttggttgaggactctattctgtgttctctttatgattatgtaaatattgttcattgctgggccaagaaatatgctgtaatcacattttcgttcttatataactttttccaggagttaattattgctttatgatttttcctttggatctagctttattttcattt

SEQ ID NO: 18026 - DNA, 394 bp, Homo sapiens
gtcatcaaagacctagcatagggctttgcccatagacagtattgaaaaaagatgtgttggtttaataaaacttattttatgaaacaaaatcagagaaggtagcaggatgatttgatggagagtagtgtttcttggttatcaaagctgagattgaataagagctctgctgtttgccctggggcagttttcttaaactctgaaagggtttcctagttgagaaaatgatattatctattttaccttgcagccttgttttaaagtttagtggtaatagctatgaagtgtctggtattgggcaatcatagaaaactgggagctcttaatattaaatgtttttcttttttagttataagggtaaattaaccacggttgctccaatgggcagctggttgat

SEQ ID NO: 18027 - DNA, 402 bp, Homo sapiens
  misc_feature (1)...(402): n = A,T,C or G
cacgtcaactgtttatttttccaagaactctgagccccagtcctaaaaaatcagcttaatatatgcctcaaaaattccctgacagttttaagaagaactggttttaccaacaccaacaagagtaacttgtctattcactgctctaggcatttcccaggaaccatctgagatctcaggacaatttctagatgtgatctggtgggccagcatgattcaacctgaccggccggaccaagaggctccaacgcctcacctgcagatggcctttctattttccaaagcctctggattacctgattcgggtccttgttgttgttgttgttgaaccggactcataagaataccttgcgtaatattttctgataacaggccaggcgctgtggctcacgcctgtaatcccan

SEQ ID NO: 18028 - DNA, 367 bp, Homo sapiens
  misc_feature (1)...(367): n = A,T,C or G
gctacttcttttatttttaggagagaggaggttttgccattttggccagggtggccttgaattcctgacctctggtgatccacctgctttggcctcccaaagtgctgggattataggtgtgagctaccacacccagccttgtgacagtgattcttatctcatagtgcaaaagatggcatttggatgggagataatagttcagaaaagttccattctacagcaactcacaatttgaggaccatagttctaagaaatatccacaaagtcagttgaactatgacttttagctacttggcatataaagtcttgctggtaagtaatgacttaaatccataacttttcanaaacataagccttacttcaaaag

SEQ ID NO: 18029 - DNA, 355 bp, Homo sapiens
tttatttcgaagacttttatgcagtctgaaaatgactcacttcagaagtcatccatttttcaatacttcaagaatacaaactgaatgagggaagattttgttctctaaaatcacattttaaaaaacgatacagtatttctacaacaaaaacacttacctctagaaatgctaaggtttgaaatcacaaacctttgaatcccaaaataaatcaaatactgtgttactgtttcccacttagacaatttgacttaaatttccctcttcctacaccaacctgctgagctgcatctccattcaccaagtggggcatcatggctacctctccgttcaacaatgggggcagagtccaaaggat

SEQ ID NO: 18030 - DNA, 348 bp, Homo sapiens
atttcatggaggaacagaggtccaagaagtccagatgactagctaaaatctacaaagatttagactgtacataaataaatggaagtaataaaaatccacaattcacagatgggtgtagtaaacactgattatctattacttgaccagtggttgtagtgtctaagttctaaaacagcgcatattaacttctatatgcttgaaaaatgtgagccacactagctaataaaagactttgaggccagagggtaattacaggaaggcttttaagtagaataaaaaacaaaacaatttttctaagtcttcttacaatataaacaaaaacttgtaaaacccttttttattgctgaa

SEQ ID NO: 18031 - DNA, 373 bp, Homo sapiens
  misc_feature (1)...(373): n = A,T,C or G
tgaaacctaacgtgggctttaggagcttccgatgaggcgccctctccatgagctcaccgtgtacttagcttgcctttttgtgacttattcgacctttcgcccaactcagcttctcaatccctaaatgacaaaggtttgggaaggaagacttggaccgatgcttgcatttgtttctgagaattaaacgttatgttttcttcaatccaaataggtttgcttgtacagccttgttcaatgggtgtttttttttcttttccccgtgaaaaaaaacccaaaccttttttcccctctttaaatggctacccccaccaaaagggggggngangccgactgcttactgtangaacaaacagtggtgaaccacatgcctccc

SEQ ID NO: 18032 - DNA, 355 bp, Homo sapiens
gttttccaaatatttgtcaagatatgcaatttacagctttcacggcaatggtcatttcatatattctataactaggtatgcttggattcttgattaagccattaaatgtccactttaatagcctatgttaggtggataaattgatactcttcatttgagaggattagcttttatatttcctattttcaatttaaattcacaaattcaacattcaattaactatgatctcagcccttagaatccctagtggatagaggtttctaaatggcctaaaatgcaatggcttaactaaatccagattctaaggctcactctggcatatccgcgctggcttaaaagtacttaaattaggacg

SEQ ID NO: 18033 - DNA, 347 bp, Homo sapiens
aaattacagaccttttgctttacttataggacccccttctcctgcccaatattggtgcatttacctggtttcatgccattttcccctgtgaaactgttaactcctgaagacggatgcttcactagtttatctgtacatcccacatcaactatcatgtgtggctgacagcggcagcttctataggtggacaattgcgaggggggcacgatcctggctggagagatgggagaaggggtcacggtgtaagggtatttcagaaaagtcctaaaacatataaggtggtcattcttaagggtgagggagcggtcaactgcacaggcaaagacgcggttgcagaagaaggaaag

SEQ ID NO: 18034 - DNA, 316 bp, Homo sapiens
cttttgtcatgaagaaggtgatggattgacagatggaccagcaaggctactcaaccttgacttggatctgtgggtccacttgaactgcgctctgtggtccacggaggtctatgagactcaggctggtgccttaataaatgtggagctagctctgaggagaggcctacaaatgaaatgtgtcttctgtcacaagacgggggccactagtggatgccacagatttcgatgcaccaacatttatcacttcacttgcgccattaaagcacaatgcatgtttttttaaggacaaaactatgctttgccgtcgacgcggccg

SEQ ID NO: 18035 - DNA, 355 bp, Homo sapiens
atacctctctcctttcataatgctgtgaagtagctcatataattcatcctccacgtttatatacgaatgactcttttgtgcccagagcatcattttgagattcttttttcattatcaaaatacatcggatctatgttattcataactaatctgaggctgaatttgatacatgcgagtattttaaatgattaatgccatatgtattgaataccaaaatttaccatctaaaacacctgggtattcttttgtaagaggtttgttttcattagcttttttgagctaaagcttaaagaaaatcagggaccaaaggaaggttagaaagtggctggaggtatcataaacaccagctaagtcg

SEQ ID NO: 18036 - DNA, 345 bp, Homo sapiens
  misc_feature (1)...(345): n = A,T,C or G
ctggcatcattcagctaatagatggnggcgccagatgggctattgggttattaaacttccctgaatctttgtttttttttttttttttggggagaaaaatccccctttttgcccccggggggggacgaggggcccctttttggtcaattagacactcgaccctgggggatagaaaaaattttcttcgcccccccccccaaaaaggggggataacaggggggggccccctggcccggttgattttattttttttaggaaagagggggttcccccttgggggccgggggatttttaaactcctctcccccggggggcaccccccgctttccttttcaaggggggggg

SEQ ID NO: 18037 - DNA, 344 bp, Homo sapiens
ggaggccaggagtagctgagggtcctttctgtgcccttaaaccgcccagaggagccctattccactctggttttaggctgatctgagagggtctccctttgttcctttctggagcatttctctaacgtttattacaattaggagggggaccccacatctgtgagattctgtttcatttgaggtttacagaaaaaaaaagtggccagatgtgttccccccatgggtgagaggcctgggcaactgcctggtgaatgtgtctcgcggcagctgcagcaagtggaggggctgaactactggccagctcactggatgatgggttaatacaacaactgcactgtaaggaa

SEQ ID NO: 18038 - DNA, 344 bp, Homo sapiens
ctttgaagtagaaaaaaaataggtatcttttatgagagacattttccctattattgtgttatacttacccagttcctttgattagaaggttctttactccaagacagaagagaagccagatgaggtgattcatgtttataatcccagccctttgggaggctgaggcgggagggtaatttgaggccaggcatttgagtccagcctgggcaacatggcaagatccttgtctctacaaaaaaaaaaaaaaaaaaaggcaacgggcccggaattcccaaatttttaattggaaaatcctgaaaacccccgaaggtccttttaactggggcttggggccccttttaatt

SEQ ID NO: 18039 - DNA, 341 bp, Homo sapiens
cgtatgtccatgaattgatgaatggataaagaaaatatggtatggccacataacagaatacaccattgtataatataacattttggtcaacaacagactgcataaagtttggacagtgatcccataagtttgtaataccatatttttactgtactttttctgttttgatacacaaacacacaccactattttataactgcctgaagtattccgtacagtaacctgctgtacaggtttgtagcctaggggcaataggctacaccatacagcctaggtgtgtagtaggctatgccctctatgtgtctctaagtacgctctgtgatgttcacatgagtaaaaaa

SEQ ID NO: 18040 - DNA, 191 bp, Homo sapiens
tacgggagatatacctaatgctagatgacgagttagtgggggcagctcaccatcatggcacatgtatacatatgtaactaacctgcacaatgtgcacatgcaccctataacttacagtataataatagaaaaaaaatgggacaccaaagggatcaagttaattaaattaattaattagtaaaataaataga

SEQ ID NO: 18041 - DNA, 343 bp, Homo sapiens
tgaaaataaatgttttttattaagcataattcagatgctcaaggcccttcataatatcccccagattagcagcgtggacttagggaacaaaggaacctttaatataaattggaccgtttgaaagcgagcttagtgatacttgtgggccagggcattatccacaccaggcaccactttctgataggcagcctgcactggtggggtgaattctttgccaaagtgatgggccagcacacacaccagcacgttgcccaggagcctgatgttctcatgatccacgtgccgcttgtgacagtgcagctcactcagtgtggcaaaggtgcccttgatggtgtccagatgt

SEQ ID NO: 18042 - DNA, 365 bp, Homo sapiens
ttgtggccgcggtttacccaacatggggaaacactgtctctactagaaatacaaagattagctgggcggggtggcacgtgcctgcaatcccagctactctgggtggctgaggcagaagaatcacttgaacccgggaggtggaggttgcagtgagctgagaccgcaccattgcactccagcctggacaacaaaagcaaaactccgtctcaaaaaaaaaagggatggagggaaggaattcctggacctgaaaacccaaaatatttgccttttaaggcaccctggctccagattttgaaacctctgaaatgttatgttaaaaagctgttacccacctcttttatgttggatagggacaaggaccatat

SEQ ID NO: 18043 - DNA, 344 bp, Homo sapiens
ccttgcttctctgattgctgcagaaaagggtacacagcaatcagagaagcaaggattatactgatatataatcttcagtcataaatttgttgcttcaagtacattgttcctgctcttaaaaagaatgtgttttactattttttaaatttccaaaaggataacatactgaatctttataacttggtgaaaatttaatatagtaaatatagactagtctgttcatagtcaacacgtacatagtttattccttaaagactatgtgaatttccagcagcaatctacctttcacattttctgcatctgttttaaaatgtatttttattatttcagaaataaaatatgac

SEQ ID NO: 18044 - DNA, 347 bp, Homo sapiens
caactgtgttcactaacaacctcaaacagacaccatggtgcacctgactcctgaggagaagtctgccgttactgccctgtggggcaaggtgaacgtggatgaagttggtggtgaggccctgggcaggctgctggtggtctacccttggacccagaggttctttgagtcctttggggatctgtccactcctgatgctgttatgggcaaccctaaggtgaaggctcatggcaagaaagtgctcggtgcctttagtgatggcctggctcacctggacaacctcaagggcacctttgccacactgagtgagctgcactgtgacaagctgcacgtggatcctgagaacttat

SEQ ID NO: 18045 - DNA, 212 bp, Homo sapiens
tagcttttataaagtgaacacattataaatgctaggtctggctttgggattttttgttttgtttttggaaacatttcaaaagtggaatgtagcctgttaaaggtgtgcacaaaaatattttgcatgtgttttttttttgcctgtgggaattctactttttagcaaaaataaagccccccaaaggatgtgcaaaaaaaaagtcgacgcggccg

SEQ ID NO: 18046 - DNA, 333 bp, Homo sapiens
ctggaactggagcttactgggacttccctgtttaccacctcggggcaacccagcctggggcttgttcagctgtcatgaccccaggtcagggccaggcaaggagtgaacctgtcatggagctaatgggccccagctctggcaagtggacacacagccccataggtgggactgagctttctaggcccatgggggcaggtaaaagcagtttgctgtggttaacataacctaggctctaaggcagtgaagaacaggatgtcatccccaaatataccgctgtggtacaagaattattctgagtaaaagcagatgcaggaagagctctctgtactccta

SEQ ID NO: 18047 - DNA, 350 bp, Homo sapiens
ttatttcagtgcctggccatttattttgcttttagttctcattttatttgtgaagtagagttgattaccatgtaattatcaaaccagctccagccacccgccttttaccttccctaatttctcctcaattactcattattctggtcttctcaaatggatggttaagaaaatcttttttccgggtactaggcttaatacctgggtgatgaaagagtctgtaccacacacccccatgacacaaatttacctaacaaacctgcacaaaccctaaacttacaatcaaagttaaataaaaggaaatgctttcctgagacatggtattactgcaaaattatgtacagataattcca

SEQ ID NO: 18048 - DNA, 340 bp, Homo sapiens
  misc_feature (1)...(340): n = A,T,C or G
cttgctttcatgacagagtgcccttaataaggttgagtgattaaaagttagaggaaagataagtgaacatacctggctcagagctacaatgcatttagtatattaaagcagctgacatgatgactttttgcgagccttcccaggcactggagtttttctgttaatttgccgcactaggtcataaaagatctgcaaatacaataatttgttttaatttacaggaggaacacctatcccccccaatgaaaaaagtaaattgaaaaaacagaaatttccatggatataaattaatgcccagaattgttcagctaaggaatgagaataaaatcaggtgttatan

SEQ ID NO: 18049 - DNA, 340 bp, Homo sapiens
cacactttgtgtactcaccagcacatacacggtattattgtttcctcagaagagtgtgtatttaaatacctgccaggaaactgtgcaggtatttcacattaagtagcatatggggctcagtgtagtcaagaagtcacagggattaggaaagagaaaatgaattgctgtcattctatatatgttatatgcttagtaaatgtcagaacagtagtcacagaacctcaggatgtttctagcatattttggcttataaatgttttgtctacataatggatatctatcagtagctttcagaattcaagtaattttaatgaaataacactaaatgttcaagtattag

SEQ ID NO: 18050 - DNA, 382 bp, Homo sapiens
agtaaacatacaaacttgcttaattgtatgttattggcactggagtattttgtctgataaatgcaatgttaaatcgacatagatttacccttaggagtttatggtctagtaggagagatgctcttagtcaaaatatacgagacacagaggcatagaaaaacactattgaattttggggtgggaattatttccagttgtgggaggcatttataaagaaggaagaaaatgagctggagcttgccaaattactataatttaaatatataaagatgataaatattaatatatttgccagaaggatcaacataataataacagaaacgacataataataataacaataagatctaacttccacattatatcctagcaaataacaatc

SEQ ID NO: 18051 - DNA, 377 bp, Homo sapiens
cttgactaaggctgacagagggctgggcccaccactgctcaccctgaggcctcgtcttctgactcccctcctttcatttctaggtggcattggtgaggctgtgtccagtgcagtagtgggcgagcctggcatcactgtcacccacctggcagttaaccgggtaccaagaagtgggaagccggctgagctgctgaagatgtttggtatcgacagggatgccattgcacaagctgtgaggggcctcatcaccaaggcctagggcgggtatgaagtgtggggcgggggtctatacattcctgagattctgggaaaggtgctcaaagatgtactgagaggaggggtaaatatatgttttaaaaaaaaaaaaaaaaaaaaat

SEQ ID NO: 18052 - DNA, 351 bp, Homo sapiens
ctcgtacactatttttttgtactgctggtcctgtaccagaaacattttcttttattgctacttgctttttaaactttgtttagccacttaaaatctgcttatggcacaatttgcctcaaaatccattccaagttgtatatttgttttccaataaaaaaattacaatttaccccccccaaaaaaaaaaaaaaatggccccctcccccttgaagggggggcttttttccaaccccccattccctttgggggcaattttgggggcccgggttccccggggggcctaatttaccaaaaaacctaaaaggttcttgggattttaaaaaaaaaaaacccagggggtaaagggggggc

SEQ ID NO: 18053 - DNA, 341 bp, Homo sapiens
gacgtggatcacaaggtcaggagatcgagaccatcctggctaacacggtgaaaccctgtctctactaaaaatacaaaaaattagccgggcgtggtggcgggcgcccgtaatcccagctactcgggaggctgaggcaggagaatggcgtgaacccgggaggtggaggttgcagtgagccgagattgcgccactgcactccagcctgggcgacagagcgagactgtctcaaaaaaaaaaaaaaccggatggtccgggaaatgtttttgatacccagggttttaggtaaattttccccagtattagttttattggcaaactgaaaaaggtggaaggctaaatat

SEQ ID NO: 18054 - DNA, 352 bp, Homo sapiens
ggctcatgcctgtaactccagctacttgggaggctgaggcaagagaatcacttgaacctgggaggcagagagtgcattgagtcaagattgtgccactgcgatccagcctgggtgacagagcgagactttgtctgaataaataaatggacataaagccctgatggatttgctaattgatctttctttctggaggtatccatctttgacaatttagagttggtttatgaagttgtacagcaccagctagtgttgtcaaaaagctatctattttgtcataatataaaaatattgaccaggccatgctgtgataaaatctagtaattatgtaataaatgcttcaattacagcaagt

SEQ ID NO: 18055 - DNA, 373 bp, Homo sapiens
ggaaatttcagcctttttgtgctggtttttcctcatcttcttggatttatctacctttggtcattgttgttggtgacctttggatggggtttctgtgtggacgtcctatttgttgatgttgatgctattcctttctgttaggtttatttctaacagtcagacccctctgctgtaggtctgctggagtttgctggaggtccagtccagtccctgtttgcctgggtatcaccagcagaggctgcagaacagcaaagattgctgcttgttccttcctctggaagctttgtcccagaggggtacccgccagatgccaaccagagctctcctctatgaggtgtctattgacccctgatgggaggtgctcctatgcagg

SEQ ID NO: 18056 - DNA, 384 bp, Homo sapiens
taccttaactattgtttagtatcagttagcctatggtaaaattggtttccttgtatgttgatttgcttttgtaagttgcagtttcaaagaacctgttgatgactttaagtgaggacttaactgtaacaatagtaagcccattacttattgataaaaataacatggtattatgaaaaataacttttttttttttgagtcagggtcttgctctgttgcccaccctggggggcaggggcttgatgatagcttacagcagccttgaactgttgggctaaagcagtcctcccacctaattctcctgaggggctggaactacaggcacatgccaccatgcctggtttatttttaaattttttgtaaagacaggggtttgctgtgttgccc

SEQ ID NO: 18057 - DNA, 386 bp, Homo sapiens
  misc_feature (1)...(386): n = A,T,C or G
ttacgtgaaataaagcatgatgtgataagtaattggggaagatggtttaggttagatggtcaggaaatgcctctctgaaaaagtctcataaatgtctctttttctttttacattttgttttcttgaattaggaccaaataaaggccacacattgagattgcttgctatgtctcttaagtctctttatgtataggttcctctttcatatctcgcttttgaatttttcctggtaattcagttgttgaacaaagctggtcatttgtcctgtggcgtttcccatgatctggtttctgactgcacagctttcaagtgaatgccatctgttgcggnaagtcagggaccccaaatggagggacctgctgaagccgtgacagaagaacataaat

SEQ ID NO: 18058 - DNA, 385 bp, Homo sapiens
attttttctaaataaatagtactgggacaactggacaatttctttttatttagaaaaaattctatttatatttcatattatatacaaaaataaaatccaaatggattagtgatccatttagaagcttaaaaaataaaaccacacaagtattagaaaaaaacacaggaaaaaattctctttaccttgaggtagagaaaggattgctaattatgactcaaaatccagaaccaataaaagactaaaaatatgactacatatttcttaaaaaaaattttgcatggcaaaaaaattaccataaacaaaaccaaaagacaactgaaagctggaagagaatacttagaacatttaccacaaacagctagtacccctaatatgtaaaaagtcc

SEQ ID NO: 18059 - DNA, 376 bp, Homo sapiens
gtggttttgcatgcttgtgcctattggcctggggtcagagagtaagggctaatgttgcctaagttctatttcccacttactgctttaggccactggccagctgttccttctgggctgttgccactacatgtaggtaagagtgtggttacattatagagcagggcttcttgagtttgacaaagcacgaatcccaaaatggggcataggctgtaattctgatttttttccacattcaagttatggcttttctacagttgataaaacatttttttttaaattgccaaacatggatattttgataggttgcacagctccagtttgcataattctgaattatgcaaactgggtcgacgcggccgcgaattccagatctatg

SEQ ID NO: 18060 - DNA, 368 bp, Homo sapiens
  misc_feature (1)...(368): n = A,T,C or G
attaaccaagaaggagtggatccaggaggaatgcctctggtctacctgctccaggatataactagcaggacagggacagcccccaaaaggagagatgaagactcttcccctttgaatttctcaagctgcagtgtagaatcactaccacactagggaaaccaggagagcagtacccagatcaaaatttggagctccattcctggtcactttagtttaaggtccaaactcagtacagatttccagaaaccgaatggctaggttcatacaatcacagaggcttataactggacacaagcttatctaatttaatcccatactgtanaagaaacactgangccagagggaaataatctgtcctaagtcacata

SEQ ID NO: 18061 - DNA, 373 bp, Homo sapiens
  misc_feature (1)...(373): n = A,T,C or G
caaatttattgactccaatcattcttagtcaacatttaagcaaactgtagacaatggaattgaatacaaataagcaatggattaacattagatagaaatcctattttaccatgaattttcagttcgaaaaagcttattcctaagtaaaatggaaaaatgacttactctgctaaggcatatgacaaaatacacagaattataaaaccattcgtttttcttttaaccataagcatatattcaatggaaaacttgaaatagccttggacaaatgttctgaaaactagtattaactgagtataactgtgtgaaaaatctggacagcattaacaaatgaaagagcactgaattctggtattttaaagatttacaggan

SEQ ID NO: 18062 - DNA, 344 bp, Homo sapiens
tttttcttggagacatgagtagcttattgttcgtttagaccaaacacatccaatatggaaactcaaagaatactttccacctgaaacaattaaactagattctactagcatataatgcttaacacattacagcaataaagacggtaacccattggcttctatacctactaaagccaagatggtaaagccaatttggttgcaatagtgccataaggatagaatattaccatcaaaaaataaaacaaaatcagcaaataacagcaatgcgagaggaatattttcactctgtttcactgaaaagaggacaaaatgttaaaactccacagtactgcaggtgaacaacc

SEQ ID NO: 18063 - DNA, 288 bp, Homo sapiens
agtttagcatattttaaaaattagtctgtactcaaatgcatagttaaaaaaatgaagcgagatggcagtttgtgcagtaatatctgcccttcgaagttcatgcaaccaactaatgcaatttttcctttcactcgtaaatctgaatgcagttcagtcatttgaaaccatctacaaaatccacaagattaagcagtttgccaagattaatatctaacagttgagcactggagaaagtgagggaaaggagtaaaaacaaacaacgaaaaagaccaagtgtcgacgcggccg

SEQ ID NO: 18064 - DNA, 347 bp, Homo sapiens
  misc_feature (1)...(347): n = A,T,C or G
cttttatgatccgagaattcatagacgtttatttggtttcagagaacaccacagttttctcaagctgtgcctgaagctactttcaaatcaccttgctcttgcacttgcgggaggggtagctaccagcattctcgggaggcaggcaggtccacttcgaaatttgctcttcagactgatggactcaactgtcccagatgaaatccaagaggtaagagaataggacttgtgaatctgtatctcaaaccacgtctttctctgagattttagctatacaatatattcaactgtacattggacaatttcaattggatgttggttctcttactcctgttttcttggagagagan

SEQ ID NO: 18065 - DNA, 337 bp, Homo sapiens
  misc_feature (1)...(337): n = A,T,C or G
gaagaattagcaggacttgttccagagggctgcaagggagtcagtgcactcagggagagccagaagatagagtagacttttagggaggaagttgggataaaccttgggaacaaagagggctttaattacagtgtaagaaagatttgggaggagtcactgcagaggaagattgggaaaggggatggcagtggaaggacaagcagaatgaggtagtaaaggtctcatgggcatgaccgctgtgagacagacctggtattggtcaggaccaccttcacttccatccctggtcccaagagcagctatgctactggagtgagaagctgcatcctcttctccn

SEQ ID NO: 18066 - DNA, 314 bp, Homo sapiens
agcaattcttctgccccagcctcctgagtagctgggactacaggtgtgcaccaccatgcctggctaatttttgtatttttagtagagaccggttttcaccatgttggccaggcttatctcaaactcctgacctcaagtgatctgcctgccctggcctcccaaattgctgggattacaggcatgagccattacacccagccatctttcattattttttttaatataaaaatcctgctcaagggagaaagcaaaatttcaccattgcattagcgcattattgatgtcaaacccaattcttaataaaaccttgtaga

SEQ ID NO: 18067 - DNA, 372 bp, Homo sapiens
ctcaaagtgctgggatttacaagcgtaagccaccgcgtccggttgacaatcttttattcaagacatttggaacaccagccatcacatgctcacaaaatgcaaaataactgtggttaccccaagaacacagaattggtcaaataaatatttaaaataacaataaggccgggtgcagaggctcatgcctgtatacaatcccagcattttgggaggccaaggcgtgcagatcacttgaggccaggagttcaagaccagcctagccaacatggcgaaaacccatctctatatacaaaaattagctggacgtgatggcacgcacttgtaatcccaactactcaggaggctgaggcaggagaatcacttgaacccggg

SEQ ID NO: 18068 - DNA, 314 bp, Homo sapiens
gttgcccttccccctttcctgcccctcctcagccaggtctccctcccccaggcagtcaggcaggtactccccgagccaggagccactgggacatcctcctcagcttgggaattcctctgttgggatggctaagaagtgtgggtgtgaaaacgaaatagcagccattaagtttcaaggagaggaggctggagaaagaggcggctcatatccagccctgcctgtgatgctgtcaagcacacagactctggagccagaggcgagtgatgcaagttcagtttcctggacggtaccagggggcctgacctcaaagactg

SEQ ID NO: 18069 - DNA, 312 bp, Homo sapiens
cagtggttcactgtaggttttccatggatagcctttattagaataaggaaatttccttctattcctaacttgttgggaattttatcattaattaatattgaattttgttgaatgccttttctgcatttatttatatgatcattcgatgttgcgtatttagtatgacaatatgataaaatacattgattgatttttgaatgttgaaccaactttgaatacctgggatagaggaaggtgaaaaaattctacaaatggatggtggagatggctgcacaacatcgcgttgtggatgtggtcactgagttgtacaat

SEQ ID NO: 18070 - DNA, 366 bp, Homo sapiens
aaagaattgaaaaagcatgcaggattaccaagtaaaaaaacagaacatgtttcctcaaaatgcattatatgatcaacataactggatacacaagagttaatgcccttacactgggatgctgctttccatgatataacaattaagcaaatggggtgaattaattttcttattccatcattactatttaaatatgagactttagagtaaaaaaacctgtatcctgagtattttgttacagaggcttttctttcttttctttttaaagacaccagcattagaaagtttcaggtccataatctcagaacaactcacgagagtacagatctatctcaattaatattggattgtattggaatgtattatatt

SEQ ID NO: 18071 - DNA, 370 bp, Homo sapiens
  misc_feature (1)...(370): n = A,T,C or G
gaagtctgaggtgttctgtttgtttttttcgggcagagtctcactcacccaggctggagtggcgcgatgtatgctcactgcaacctacgccttctgggttcaagctattcttctaccttagccgccctaacagccaggattacgggcatgtgacaccacgcccagctaatttttgcatttttagtagagacagggttttgccatattggccaggcttttctcaaactcctcacctaaagtgatgtgcccacctcggtctcccacagtgctgggattacaggcatgagccaccatacctggctgaagactgaggaagtgtaacttatgtcagtatgcattaggagaaccagtgttgatttgtgaacggaan

SEQ ID NO: 18072 - DNA, 365 bp, Homo sapiens
  misc_feature (1)...(365): n = A,T,C or G
cccaactcctttattttccacctggggaatttcaggcaactccttccaccttttaaactttgtcatatgtagagtgggaattacaccacctacctttagggttactatgaagattaaatgagatgacataagtaaacagtctagttccatgcctagcacagattgcaggttgagaaaaagaatagctgctattgatatcaccattatcatcatcgttcttaagtggttacgagttcaaagtgctaggattcagacaaacctagaattcaaagtgcctgaattcaggcacattcaaactgtatcatttaattctgtctctacctcacggnttctttaaccgtgatagtgttgtagtgaggacttan

SEQ ID NO: 18073 - DNA, 347 bp, Homo sapiens
ctcccaaggccctgcttattgtagaaaagtcattcaacaaatctttttaggtctctattaacaatttattttctctacccccatcacaaaaaagcagaggaagtagtgtagcagccccagccacagccacagccacaccccacttgcttcctaggtgtgtgtggtgtgtgactgcctgcaagcaactccagctctctgaacttgtttcctcatctgcaaactggaaatatttatttatttgacaaggacattatgagaatttactctgaaaaatacatgtagagtacctagcattcaattaagactaggtgaatgcccttctcaggaaccgtactagagaaggtgag

SEQ ID NO: 18074 - DNA, 369 bp, Homo sapiens
  misc_feature (1)...(369): n = A,T,C or G
cctttctatgtcccctctctcatttcatcctctctcattttccagcctccttcagttcatttctggaagctctttcttctctcattctcctactctccaaggaaaattttatccgtactctcagcttctttgagctctctctaggtcccaaatctacatccaactgctttctaggatctctagatgttccccaggtgctccaagctcaaccatacaaatgaaaatacagtatgtcctgaaacctgctcttctttatgtatttcattatctacagnaccaccatcactcaaaccagaatctcaggaatttctcctctccttcaccgtgaaaggatccagaataagccactatagcataaaaattattttg

SEQ ID NO: 18075 - DNA, 360 bp, Homo sapiens
  misc_feature (1)...(360): n = A,T,C or G
tttattttttgttaataattttattccaacatcctgttttccataatttctaagtagtaaaattaatacttgctcactttagaaatttgggaaaagtataaagtagtataaagatgatactaataatcattcataatcctaccacttgaagataattgttagtaacatggntgtgtatttccttctgatccttcagttgtttacagtaatcccctcttacctgaggtttcactctacacagtttcaggtaccctggggcagctgggggctgaacatattcaatagaaaactccagaaataaacaattgataaggtttaaattgcacactcttctgctccatcccacttgggtgggaatag

SEQ ID NO: 18076 - DNA, 361 bp, Homo sapiens
  misc_feature (1)...(361): n = A,T,C or G
ttctcacagagacatcacattatcacattgtatttatatcggaccgcncccgtanttcctgctttgtttaattaacacttgctcactttttaccctggggaggagcgttaagtactataggggtgcttctaagcctcgttcataatcctaccacttgaggataattgttagtgcacatggttgtgtatttccttctgatccttcagccggttacagaagtgggctcttacctgaggtttcactttacacagtttcagttacctgtggtcacctgtggtctgaacatattcaatagataactccagaaataaacaattgatcaagtttaagttgcacactcttctgctgcatcccacttggg

SEQ ID NO: 18077 - DNA, 408 bp, Homo sapiens
cttcatcttcccgccatctgatgagcagttgaaaattggaactgctcatcagatggcgggaagatgaagacagatggtgcagccacagttcgtttgcgctccaccttggtccctccgccgaaagggagggggtaactactatacaattggcagtaataagttgcgaaatcatcacgctgcaggctgctgatggtgagagtgaattctgtcccagatccactgccgctgaaccttgatgggaccccactttccaaactggaggcatcatgaatcaggagtttaggggctttccctggtttctgctgataccaggccaaaaacgtaacaatattttgactggcccggcaagtgatggtgactctgtctcctacagatgcagacagggtggaaggagactgggtcatctgg

SEQ ID NO: 18078 - DNA, 402 bp, Homo sapiens
  misc_feature (1)...(402): n = A,T,C or G
cctgaatacattggctgaagatttgctctccagcgggactttcaacgttgatcagattgtgaagaaaaaagataatgtcaaccagcgtttcctgaatgtccaagaattggcagctgcacaccacgaaaaattgaaagaggcctatgccttgttccagttcttccaggatctagatgatgaggaatcctggatagaggagaagttgatacgagtgagctcccaggactatgggagagatcttcagggggttcagaacttgctgaagaagcacaaacgcctagagggggagctggtggcccatgagcctgccatccagaatgtgctggatatggcagagaagctgaaagacaaggctgctgtggggcaagaggagatccagttgcggctggctcagtttgttgn

SEQ ID NO: 18079 - DNA, 401 bp, Homo sapiens
  misc_feature (1)...(401): n = A,T,C or G
gttttttctgagatgttgcaagaaggcactgcagaggtcaggaattccagttagttttgctactagctcaagatacagggtttttaaggtattaatttgtaatactttctaaaagtatttaattgctgttttttccatttcatcatccatctggttggccctatggtttctctacagtttattccttaagaaaacttcaaaatccaaggcaaccttgcttaggctgatgaattcaaattagcttgtatgttagaatccaacaagaacaggaattaataacttcctctttctacctcattaagaaactatttcatttgtatctgtcccacctgaattgtaaggcatgaccctttttcctagcattgcgtttgtgtttttcccagcatctgaattctacctgn

SEQ ID NO: 18080 - DNA, 395 bp, Homo sapiens
attttatatatggataatgctttgtaaagggtaagagaaaggttgcagttggatcactataaaacaatgaccaagccaaaatcagcaccctagggccttaaataaaatagagataccccacaaaatgaaatattttgaaggatgggaggggacagaaggggggactataccccaaggatgcaagatactttttacagtcgctatcattatactttggcttcttgcttcagctaggaaggttttgatggtaaattctgtcatggtaatagatacctattttcctaacctgagattttacaaggaaggtttttaggttggcttaaatggaggtatttatttgagtgagccctaatttgaaaattaccagacttgatcctcctggtatgaatcaaggg

SEQ ID NO: 18081 - DNA, 403 bp, Homo sapiens
gctgacgaccccgaatctgactaattcacactgacttctcctatattgcgtctctcaccatcttgattatactaatttaaacccttcaatggcttatctcatggaacctgtctcccataagtacacagcatgtccctacatcccaccatgtatagaaagatttaagagaccagagtccctgctccctcctgcctttgtacctgccttctagccgaaagcttatgactgcggcttaactccattcgcattgctagatcttcacaacctggagattgctgtctctctgtagttataattacatctttcctgtcttgtgtggggattaaccaataaactatttagctacatccacagcagtatgattgtgtaaatattacctcccacaaaaccaacagcaatgctt

SEQ ID NO: 18082 - DNA, 304 bp, Homo sapiens
  misc_feature (1)...(304): n = A,T,C or G
acagctgcaagccaggagacgagatagagctgactggcatctatcacaacaactatgatggctccctcaacactgccaatggcttccctgtctttgccactgtcatcctagccaaccacgtggccaagaaggacaacaaggttgctgtaggggaactgaccgatgaagatgtgaagatgatcactagcctctccaaggatcagcagatcggagagaagatctttgccagcattgctccttccatctatggtcatgaagacatcaagagaaggctctggtgcccctgttcngaggggagcccaat

SEQ ID NO: 18083 - DNA, 400 bp, Homo sapiens
  misc_feature (1)...(400): n = A,T,C or G
caacctcatacagacaccatggcgcacctgactcctgaggagaagtctgccgttactgccctgtggggcaaggtgaacgcggatgaagttggtggtgaggccctgggcaggctgctggtggtctacccttggacccacaggttctttgagtcctttggggatctgtccactcctgatgctgctatgggcaaccctaaggtgaaggctcatggcacgaaagtgctcggtgcctttagtgatggcctggctcacctggacaagctcaagggcacctttgccacactgagtgagctgcactgtgacaagactcacgtggatcctgagaacttcaggctcctgggcaacgagcttggctgtgtgctcggccatcactgtggcatagaattcaccccaccagtgn

SEQ ID NO: 18084 - DNA, 401 bp, Homo sapiens
  misc_feature (1)...(401): n = A,T,C or G
gtttgtattttttccccctaaagtttattttacctgcaggagggtcagtcttacaggaacttacttggctacaaccagaagtaatcccctaggtgatttttttattattgttttaacatggctcaggtgtttcctattaaatgctctgtggatttcctactttcttccttatttcctctgttccagctacagtagctgtacttcttcataggtcttcaaataagccctcatctttctgcctcaaaacttctatacctgaaggactcttccccagctgtcctatttaacattataaacattgtgcgcccccccgtctnnnctnnnnnnnnntctntnttttntttttttcctttntnnntnatttttatnttacatttttttntttttataaaaatttcatc

SEQ ID NO: 18085 - DNA, 349 bp, Homo sapiens
  misc_feature (1)...(349): n = A,T,C or G
taaaggtctcccaaaccccaagatgctgggatacattcattcatctactccacagattcattagttaagcaccttcaatatggcaggtcctttcagaggggtgggagaagcaaaggcaaacaagccagatggagtctccagtctctcagagctcacagtctgactggaaaggcagccagggagcatgtaaacccataagtaaataggattttgaggaacacttttgggaagtccgctgcagtgaataaacagggtaatgtgaaggagaatccagaaggtgttgctttacgtctggggcctggggaaggaggcacttgaaggagaaatgaatgaagacatgggaaatctn

SEQ ID NO: 18086 - DNA, 349 bp, Homo sapiens
ctaggattcttggtaaagtatatattgtatatctgaaaaatgtaatagcgacaatattaaagtgttgccacttagtgctgtgttacctaaagtgtgcgacgctttctgtcagtcttatcactgacatttaaatttcagatataggtgaattcaatattgaagtgaatagagctaccgacatttgctttcctaatattcatggaaggtgttgttgacctctcatagataaataagcaaataatatcttcaaaaatatatctaacttgactcaaatacttctaagcattttgtcatttgaagggatatgagcaagttgagaagaacatatgtggagagagaaatattcatg

SEQ ID NO: 18087 - DNA, 316 bp, Homo sapiens
  misc_feature (1)...(316): n = A,T,C or G
tttaatgtctgaggatggggggaagaagtcaatggtgaggcttctctgggaaattctgcaggccttgtagttctctaagcccctctagcaacatgtggatatgggctttgatattcatggagtccttggtgaggctgttgctgagcctanagaaaagaaacaagaaagggcaaaatgggccccacatgattatgatgacccttccttatcacttcaagatctacttatatcctggatgatttccacctggctcattcctatgtggaaatgccaagccaccatctggttttcactgattcaaaggtcgacgcggccg

SEQ ID NO: 18088 - DNA, 343 bp, Homo sapiens
ctcttccagacccacagggtgactcactcagtggcccctacacacgaaccagggtcatccctctcaccattctgacaccatccagaccactgtgaccttcaacccagatgcctgcagctgctttcttacgcttgcccctgtcacacccacctttatacggcacaaactggacatgtctctccctactgaaaatctcaaatagctccacgctgttccctctgctggaccctgcacagttcacagggctctgtccttgctgacctctccagatgtgatatagtcccaagcttaaccaaaaacagctgtccttagtgacttctctgggtcatcacacccaatcttt

SEQ ID NO: 18089 - DNA, 364 bp, Homo sapiens
  misc_feature (1)...(364): n = A,T,C or G
tctttttcatgtttttttgcactggctggaaattttaggacaatatgagatgacagtggtgagagtgtgtaggtttgtaatgactgtggccatttgctgttgcttatatttatctatactcctacaacagactggtaatgcatccaacttatcttcaagggcatttacttatttacacacagctgtgagattcaggtgtggctggatcaagcatcccagcctaggttctaagtgtgtatatgtgcttcccctctctgtcacaagatggctgcaatagctctagactgtatgtccgcttgggtatgaatccaagggaataatgtgtgtattttttccagaatttccagaanaagtctaattatgg

SEQ ID NO: 18090 - DNA, 336 bp, Homo sapiens
gggtgtctcttgcttcaacagtgtttggacggaacagatccggggactctcttccagcctccgaccgccctccgatttcctctccgcttgcaacctccgggaccatcttctcggccatctcctgcttctgggacctgccagcaccgtttttgtggttagctccttcttgccaaccaaccatgagctcccagattcgtcagaattattccaccgacgtggaggcagccgtcaacagcctggtcaatttgtacctgcaggcctcctacacctacctctctctgggcttctatttcgaccgcgatgatgtggctctggaaggcgtgagccacttcttcc

SEQ ID NO: 18091 - DNA, 355 bp, Homo sapiens
ggtgccattgccccatgtgaagtcactgtgccagcccagaacactggtctcgggcccgagaagaccccctttttccaggctttaggtatcaccactaaaatctccaggggcaccattgaaatcctgagtgatgtgcagctgatcaagactggagacaaagtgggagccagcgaagccacgctgctgaacatgctcaacatctcccccttctcctttgggctggtcatccagcaggtgttcgacaatggcagcatctacaaccctgaagtgcttgatatcacagaggaaactctgcattctcgcttcctggagggtgtccgcaatggttgcaatggctgtctgccaattggctacc

SEQ ID NO: 18092 - DNA, 338 bp, Homo sapiens
  misc_feature (1)...(338): n = A,T,C or G
ttctttttcaccagttggattttaatattggcatccagatgttacaaacggccaaaggccattcttaaaagcagatccaaattaggggaggattaaacgtatatagacttgagtttttcatagcattcactggaaggaacatcagcagcctcacaactgttagaattccctcccgctctgggtgtggacattcattgattaaacgtttatttcaggcagcggggattctctggtgaacaagagacaaggtccttgcttttgtggagcttgcactgaagtagaggagacagatactaaccaagtaaacgaaaataattttaggtaataatttcaatgan

SEQ ID NO: 18093 - DNA, 349 bp, Homo sapiens
gtgaaccactgcgccctgcctttttttaaatgcagactccacgtttcaactccgattcctgggccttcttccacttgcactgtcaaaatgcaaacttttagaaactttgacggctcatagtttgttgcaaagaggatggccatctttgctccataattgcatttttacatttatgtgaaaattacattttcatttttggtcatataacaccaattcgaattagtgcagtaattttaaaatctggctttagtgtctgtttgcttctagctacttttttatatatgtacacatgctttcaaaatttgtctgttgactcactgcattgagtaatttttaatgtgatgactgg

SEQ ID NO: 18094 - DNA, 336 bp, Homo sapiens
  misc_feature (1)...(336): n = A,T,C or G
gggcacattcatcctctccgtctcagcacagccaccatccttcctccaaacaccttactggaggattnnnnnnnnntttttttttttttttttttttttttttttttttttttttttnnggggccccccccctttttttggggaaatttagggggggggccccccaaaaaaaaattttccaaaaagcccccttttttttgggggggaacccgttttttttttttttttttttgggggggggggggggggggcccccccccaaatttttttttttgggggaaaaaaaaaaacatttttttggggggggcccccccccttttttttttttttcccccc

SEQ ID NO: 18095 - DNA, 384 bp, Homo sapiens
atcatttctgtggcgaaatttctctccatatatatgtatatatgtgtattcatatagttatatctaacatcctaacattccatggaaaaattttacaaaatgtagcctcagaaaaaaaagcattttctttcagggccctttgcatgcccttccaacaacgcttactttggggattcgtatattttattatgaaaagccaacaggaaatcttaataataaaagtaaaagttgatttttggcaacctctaagatggcgctagagtcaaacccaaagacaaaacaagtggactaaaatcctggctcttctacttatcagcttgcaaaatttattagcttgtgaaattaatgacattgatctatctgtctttattttctgacatataa

SEQ ID NO: 18096 - DNA, 370 bp, Homo sapiens
  misc_feature (1)...(370): n = A,T,C or G
ctacagtattaatctcaatcctgatcattacataattatagcatttaccaatctgtgattttataaattaaccaaatttgttaaattaagaagaaattcatagacaccatttttttcctgttacaacatatggaaaagccatcaaaaaacttaacagaaccaaatcaaaaagaagtatattttatgctaaagttactttctgtccaggtcgaaacattgttccactttgattttttctcctctttggattntgaaagctttcatatctgaaaaaagaaaaagataatttaatatgtataaatactaccattaccaaacaaaagataatggattgttggcaaacacaattatattttaagaaatgaaccgg

SEQ ID NO: 18097 - DNA, 360 bp, Homo sapiens
ctttgatgaaaggcaaaactttatttgctatctctactaattagcctttatctgacactgtcaaggaatggaacatgttacttggtatatctgccagcatcagacatatcacttattgttttttattagttgttcatccagggcatctctgggagatagttctgaatggtcctgatgtagatttaatcccatacaactgataaagacaaaattctcttctggccttgcctgtgatataaaccattggttagtacgtggttatgtccgcttttataaacattcctatccttaatagataaactttctccctttaagccttcttgaagggggtatattcatttccttgcaagctccaacttg

SEQ ID NO: 18098 - DNA, 329 bp, Homo sapiens
  misc_feature (1)...(329): n = A,T,C or G
gttcaattcagcaaaaatattttgtaattcccaatatttgctggatactgcttaagttgattaagacactgtcctttgtcaagaggctagtgggaggaaaataaagacagacctaattctttactgtgaggtgaagacaaggcaagtgggttgtaagaacagtgcagaagtatcacaggattagagtgttcattttgctactaacaaagatatattcatgttcttctgtttgtatgttggatacttttaacatgaatagggaaattgctgtttttcattntaaatgattatgcatagcttttcataggtatgcaggtgaactaagctcc

SEQ ID NO: 18099 - DNA, 328 bp, Homo sapiens
ctgaggttgagttcgagaccactctggccaacatggtgaaaccctgtctctactaaaaatacaaaaaaattagccgggcgtggtggcgcgtgcatgtaatcccagctactcaggaggctgaggcaggagaatcgcttgaacccgaggcagaggttgcagtgagttgagatcgagccactgcactccagcctgggcaacaagagcgaagctctgtctcaaaaaaaaaaaaaaaaaaaatggaaaaaaaatttccctggggctaaaaccttttcaccttttgtataaaaaaaaaaaatttctttttgagcctttaatggaccccggaccg

SEQ ID NO: 18100 - DNA, 338 bp, Homo sapiens
atttcattttatttgtttgctgctgctgttttatttatttttactgaaagtgagagggaacttttgtggccttttttcctttttctgtaggccgccttaagctttctaaatttggaacatctaagcaagctgaagggaaaagggggtttcgcaaaatcactcgggggaagggaaaggttgcccgagatatcgcaccattgcaccccagcctggataacaagagtgaaactctgtctcaaaaaaaaaaaagggctgttaaggggcaaaaaccttctaaggggttagcattttttaggggagccactacctaaaaaaagggggggttcccaccttgctgg

SEQ ID NO: 18101 - DNA, 403 bp, Homo sapiens
  misc_feature (1)...(403): n = A,T,C or G
ggacatactagatgcacaataaagatttgttggatgaaggaacgattgacagaatatggggagagagaatggtttagatggatgtttgataaggataagagaagcgcatataaaagtagcagcaggcttgagatgaaggagatgctgaattcaggttggacctgttggattgaccgtgtttataggaaacgtagatggatgtggccagctcagtacttggagaaaaggcaagaatggagatatttggcgatccatgccaagaaaggagtattgaaggcctaatagtgactgagatcatgaaggaaaagagtagagagagaaaaaaggtggaagggaaaaaatacttctttcctcctagntcctcctcattcctatagcctcttctctcactaccctgttaacn

SEQ ID NO: 18102 - DNA, 315 bp, Homo sapiens
  misc_feature (1)...(315): n = A,T,C or G
gaaacctgtcatccctactccactccatgttctgctttacttaacagcaattgcacatatggccccctgaataatatacatttagtcacttatttttacttatctgctaattaaaatgtagactttttctattctgtttactgctgtattcccagcatgttttatccgaatgtgcagnggtttcttttcttctcccttatcgngggaagtgatgtgcacaaatacacataatggagcctgaatgtcatattgctttcatacctgtgtgaattttggtaagaaaggaaaagtagcgattgacagtcgacgcggccg

SEQ ID NO: 18103 - DNA, 272 bp, Homo sapiens
gccatcactaaaggcaccgagcactttcttgccatgagccttcaccttagggttgcccataacagcatcaggagtggacagatccccacaggactcaaagaacctctgggtccaagggtagaccaccagcagcctgcccagggcctcaccaccaacttcatccacgttcaccttgccccacagggcagtaacggcagacttctcctcaggagtcaggtgcaccatggtgtctgtttgaggttgctagtgaacacagtgggtcgacgcgggcg

SEQ ID NO: 18104 - DNA, 349 bp, Homo sapiens
taaaattaaaatctccatggagattttaattttagctttcttatccaaaagtacggaaagctggggatgagggacccttattagctcaggcatctctcccgttttctacttgaactgagaaggtccagaggagaaatacctaagattggcaggaaaccttaggttctggagctaaacacgtacccgctcttcctcgaggcctccaactctctcggcattgaaaatcatttccttaacatccagagtctcgtcaatgacctgaaacagtcatgagaatgtcggcagcaagcaactgggtgaacggggagtttggtatttactgcctccttcctctgctacctgctgcttg

SEQ ID NO: 18105 - DNA, 340 bp, Homo sapiens
atattatttaattaagcctgctatgggtaccaaataaacataactgttttcttgaaattattttaattttctgttaattttatctggataataaagttcatatattttagaaatctctttctttgcctcataatttagttcatagttttcaattaatcaaataaacttatataagacatatgcatataaaatcatccttgtgaggctctttacatctacaatgttcaggaattgagagaggtggatagagagagattaaatgattagattttgcccctgagctcttatattatgcaagactggacactacacaggagaaaagaagatatcctggctagta

SEQ ID NO: 18106 - DNA, 337 bp, Homo sapiens
attaatagattggaaaaggtaagataaattgtcgtgcttttacattgcctagttttccaatggagaataaattggcccaaaataagaacatgttcaccgtacattaatagaagctagtgtttctggctggggatggtggctcacacctgtaatctcagcggcttgggaggctgaggtgggaggatcacttgagggtcaggagtttgagatcagcctggggaaatgtagtgagactccatcactaacaacaacaacaacggaatcactgggctcctttgcagctacttcttagtattctctaattgattcttatggcaaatctcagttttcctaatca

SEQ ID NO: 18107 - DNA, 349 bp, Homo sapiens
tgcacctgtaatcccagctactcaggaggctgaggcaggagaattgtttgtaccggggagacagaggttgcagtgagctgaaattgtgccactgcactccagcctgggcgacagaatgagactcactctcaaaaaaaacaaaacctagctgaaagtatgatctcatctgagaagccttcctgaattcctcttgtgattcagatacacctcctctgagatcctccagcatcttcttttttagaggtagggtcttgctccatcactaaggctggagtacattggtgcgatcatagctcacagcagtctctaactcatgagatgaagtcatcctccctcctcagcctcccga

SEQ ID NO: 18108 - DNA, 341 bp, Homo sapiens
caactacctaggtggccataacaaaaaaagcagaaaataacaagtattggccaagatgtaaaaaataatgtaaaaagatcagcaagattgcaggatacaagataatgttacaaaaattacttgtatttccctcccacctcagcctcctgagtaactaggactataggcatgtgctaccacacctagctaattttaaaatttttgtagagatagggtctcctggcctcaagtgatccacccacttcagccccccaaagtgctgggattacaggcatgagccaccgcacccagccaccataacaagcttctcatacgatataaaatgaagtacatagttttaa

SEQ ID NO: 18109 - DNA, 255 bp, Homo sapiens
  misc_feature (1)...(255): n = A,T,C or G
tgaccctcttcccacgctgacctgtgctccctccccaatcatctttcctgttccagagaggtggggctgaggtgtctccatctctgtctcaacttcatggtgcactgagctgnaacttcttccttccctattaaaattagaaccttagtataaatttactttctcaaattcttgccatgagaggttgatgagttaattaaaggagaagattcctaaaatttgagagacaaaataaatggaaggtcgacgcggccg

SEQ ID NO: 18110 - DNA, 329 bp, Homo sapiens
taagaatgcatccccctcaggtatcaggggaggtgtagtagggaacctgattctaccccagtaatcaggatgaaccagcaataataacacagtctccccattcccttctgggagtggtaacagaggaaggcaactaaaatagaaagtttaagtaagatccaaagtctcataacataatacccaaaatgtccaggtttcaatgaaaaaaaaaatcacttgtgataccaaaaaccaggaagatctcacactgaatgaagaaaaaaaaaagcagtcaacagaggccagcaccaaaatgacagggatgttaaaattgtctgctaaggatttta

SEQ ID NO: 18111 - DNA, 327 bp, Homo sapiens
agcggacagacctcggctggtgttcctgttaacaggtcccacttagcagcctccgtttacagccagcccgggacctgcctggcaggacccctggtagttctgtgtcataggagcccctctttgttccaggccaaccaggacaggcggtcaccccacatacagggttctgaacgttctgacgttacagcgggggtctggtgctgttgtctcaggcaggaatggaggctgagggtctgcacgtttactgctgtgtgcaggccccgtcccaggagcgaggtggagcccatgtgaggaggttgtggtctttgtaaaggtgggcagcagcga

SEQ ID NO: 18112 - DNA, 349 bp, Homo sapiens
  misc_feature (1)...(349): n = A,T,C or G
tgtcattcacttgnttttttatataagtatgaattttagataagaatgaatattcctataaaatatttttaattcactgtttacaaagaaaatgtgacaaatactaacaataaaatagacttgggaaaattaacaacagtactttaatagctattcttaaaaataccaacaaattaattcaagagccaattcccagccttcctcatgggggtcttaggagcagcaggaagggtgggttacatctgtgggagcaggcaaaagcccactgagaacctcctccaaagggtctgggcactcacaggggtttacgaggaaccagctctgctccccaaggctaattntaatcttt

SEQ ID NO: 18113 - DNA, 359 bp, Homo sapiens
ctttattcccaataattaactaacttaattggcctgaacatgtcacgatcaattgaaaccaaagatttgtatttgctcactaaatatacctttgaatgtctatataccacaagaggccctctttcttagtgtttaatctggctgaggcagaaggaaccatataaattaatgatcaagtttctcctggcttctacaaacttcttcgcttccctgtctttattaaatacatattctaataataaaagaacgcaatggcctgtcctattcccttaaaagaagctaattgctgctatcatgtttaaatcattaagagtcaaaacaggtataactagtaactaacacttattgatgaatgaata

SEQ ID NO: 18114 - DNA, 377 bp, Homo sapiens
gtaataaaaccccgtgttcttggatatggaaatctgtatgggtttttttttttttaaaaggggggtttgggggaggtaaaccctatggttttttattgggaggccctagggcatataaggcccattgggaattccctacggaaaggaaatgggctttaaaattaaaccggttaaaataaaaagagggaaagggagggcccaaaacctttaaagggggggtttgggggaggctccccctatggttttttattgggaggccctagggcttataaggcccttagggaattccctccgggagggtaaaggcttttaaaattaaacctgttaaaaaaaaaagggggaaaagaaaggcccaaaaccttttagaaaaaggctga

SEQ ID NO: 18115 - DNA, 387 bp, Homo sapiens
tgatgatatgatcttatatctagaaaaccccaaagactccaccaaaagactcttagatttgataagcgaattcagtaaaatgtcaagatacaaaatcaacttaaaaaaatcaatagcatttctatataccaataaggagtaagctgagaaacaaatcaagaagacaatcccacttataataactaaaaaagaaataaaatacctaggagtatatttttaaccaaggaggtaaaagatctctacaaggaaaactaaaaaacgctgacaaaagaagttgtagatgacacaaacaaatggaaaaacatcccaggttcatggatcagaataattaaaacgaccatactgccaaaagcagtctacagtctgaatgcaatccctatcaaaata

SEQ ID NO: 18116 - DNA, 388 bp, Homo sapiens
tatggatatctgattgctccaacaccgtttgttgaaaaaacaatcctggccaggcgcagtggctcacctagcctaccttttcattttcttaatggtgttttttgaattgtaaaaggttttaagtaaactacattttatcaattattttatgacttatgcttttggtgtcatatctaagaatctgccaaacccaaggccattaaggctttttgttatgttttcttctaatagttttccagttttagcattacattcaggtctgtgatccattctgagttaatgatggcgagcaaggatctaagattgtttatttgtaggttgggttgtatatggatatctgattgctccaacaccgtttgttgaaaaaacaatcctggccaggcgcagt

SEQ ID NO: 18117 - DNA, 345 bp, Homo sapiens
tttaattctgttgagtcttgctagcaaacggcaggtgttcttctttcaaaaactctaaaagtttctttaaaaaaaaaaaaagacttcacccctgttttttttccccccccccccccaatcttgcccgggggggctggggactttggaaacccttttatgatccccaaaactcgcccaaaaaaaaaaggggccaaaattctttttgaaaatataccacaaaaacaaaggggggatcaaaaaacttcttcgcccaaagttggggggttgggaattgccccccctttttttcccccaaggggaaaataaaaaaaaaatggggcaaacccaaccgggaagggccctggg

SEQ ID NO: 18118 - DNA, 318 bp, Homo sapiens
gtgacctggagtgaaacagaatctacataacctaagcccatatactctgcactgtgtaaaggaaaagggagaaatgtattatacttgagacattgcacctaccccggaaggctggaaatacggaaacagcatggagttgcaagtcctctgaagacaatgagaggatttaggatgagcccgataggtgtggcagaccaaatggacatttctctaaattcaaggcggtattcaacggagtgcagtagtttggcttgtcagaaggcacgtagcctggcagacacaaacacttgtaggaaccatcggtggtcgacgcggccg

SEQ ID NO: 18119 - DNA, 352 bp, Homo sapiens
  misc_feature (1)...(352): n = A,T,C or G
gtcgagatcacgccactgcactccagcctgggcgacagagcgagactccgtctcanaaaaaaaaaaaaaaaaaaaaaaaaaaaaatttggggggaaaatttttaaaatgggaaaaaaaaaaaaaaccttaaaaaaccaaaacgttccaaaggttttaaaaaaaacccaaaaaaaagggcccccggggccctcccaagggaatttcttaaaatccaccccctggaaaaaatttttaaaaaacccccggggggggaaaaaacccttttgggccccaaaaggaaaaaaaaaaagaacgggggctttttttttcaaaaaagggaaccccaaaattccctgaaaaaaacctttaaag

SEQ ID NO: 18120 - DNA, 332 bp, Homo sapiens
cgcgggcgcgtcgacctccatctcaatataaataaataaataaatgccggtaaacagaatgtgaagttatataactttactcacattatatcatgaaaggggcacgtgtgtatgttttggtatgtgcatgtgagcacacatgcgtgcatattatcaaactgttaagagtgacaactcctgtctgaccaaactggtaactgtgatttttgcttcctcacaattctctgtgttagctgaattccctacagaaagatagattgtcatataatcatttaaaaaaatttttaaagacatatttcagaacaggcatagttatcacaaacaccacttta

SEQ ID NO: 18121 - DNA, 329 bp, Homo sapiens
ctccactggtccccttctagggactaatcaagttatgctcagtccctaggctgcgtgctatatgccatgatgtttggggaaggcccttatgacatggtgttccaaaagggtgacagtgtggcccttgctgtgcagaaccaactcagcatcccacaaagccccaggcattcttcagcattgcggcagctcctgaactcgatgatgaccgtggacccgcatcagcgtcctcacattcctctcctcctcagtcagctggaggcgctgcagcccccagctcctggccaacatactacccaaatctgaaaaagcagcatgttgagaagatggcc

SEQ ID NO: 18122 - DNA, 397 bp, Homo sapiens
  misc_feature (1)...(397): n = A,T,C or G
tgaaaagtttaggccgggcatggtggctcacacctgtaacctcagcactttgcgaggctgaggcgggcggatcacgaggtcaggcgatcgagaccatcttggccaatatggtaaaaccctgtctactaaaatacaaaaaattatccgggcgtggtggcgtgtgcctgtaatctcanctacttgggaggctgaggcaaggaaatctcttgaacctgggaggtagaggttgcagtaagctgagatcgcaccaatgcactccagcctggcaacagagcaagactccatctcaaaaaaaaaaaaaaaaaaaaaaggggttattttaatcctgggaaggggtttttttcattcctaagggggaatacacccccctggggtcacaaaaatccgggtcgagccc

SEQ ID NO: 18123 - DNA, 363 bp, Homo sapiens
ttttgataagccttctgctcacatttttgtgaatgtctgaagtatatagcttgtgtatattgacagagctcttttataactaaagcaaatttaatttttttgtactagaaaaaaatttgaacattttagttcttggttataaaaatgttaattcagaattagtttaatgccttaattaaactaattaatagctttggacacttaaaagagctctaaatttgcttgtacataaaggcttaatttgttttccttggtagggtcaaaggtgtcctccactctttaacagctgctggacagacacattagagcagctgtttgttattgataataaaatattataaaaaaaaaaaaaaaaaaaaaagg

SEQ ID NO: 18124 - DNA, 116 bp, Homo sapiens
  misc_feature (1)...(116): n = A,T,C or G
acaaaaaatgntcctgaaagagagggtggaggactactaaaacagggctcccatcatataagaagaatagagaattatatggtacaggtaattacaggagagtgaagagtcttggc

SEQ ID NO: 18125 - DNA, 334 bp, Homo sapiens
gagatccggacgatcactgttgtgcagagacagcagtgtgctttcatccagcttgccacacggcaggctgcagaagtggctgctgagaagtcctttaataagttgattgtaaatggccgcagactgaatgtgaaatggggaagatcccaggcagccagaggaaaagaaaaagagaaagatggaactacagactctgggatcaaactagaacctgttccaggattgccaggagctcttcctcctcctcctgcagcagaagaagaggcctctgtcaactacttcaacttgccctcaagtggtcctccagctgtggtgaacattgctcttgccccgc

SEQ ID NO: 18126 - DNA, 333 bp, Homo sapiens
gttatgatacagtgggcatcctgagatggagaaatgtctctcatgttttcctgtaaggtgtcctgttaaaggagggaaaacttaatctcaagaaagaagacaagcttataaagtagtatgtttctctaagacaaacctgtttttttgctacatcatttttatcaaatatatgtctgatcagactgaatccaccaaacataaggctggtagggctataacttacactcattcttttcttccacaggatggatctggcagtctttgaacatgcttatgtatgatcaatataaactataattctttctgctcttagacttctcaaatctcaaaatg

SEQ ID NO: 18127 - DNA, 121 bp, Homo sapiens
  misc_feature (1)...(121): n = A,T,C or G
aaagagcaagccatcattggctacagctgacattattcaacaactttaattgggttatctatattgtttagaaatcaatcagtttctacatctctaatccactcctggacccatccccagn

SEQ ID NO: 18128 - DNA, 120 bp, Homo sapiens
  misc_feature (1)...(120): n = A,T,C or G
aaaaagaggngnctcanataataataataataataataataataacatgttgtagggtttataatttatgagaagaagcaaaactaatgtataatgacaaaaccactcagtgatttacca

SEQ ID NO: 18129 - DNA, 331 bp, Homo sapiens
cctccttcctcaaaaaagtgatgctacatatacacactcaaaattttgcatattatttcagatagttctagaatgccttatggtctaccattgaacctactgaaggtccatgaaccctaggttaaaaactttgactctatctatataaaatgccaacagctggcacagtatgttctgtcctctaaatcaagcttgtccaacccgtagcctgtgggccacctgtgatgcaggatggctttgaatgtggcccaacaaaaattcataaactttcttaaaacattataagctttttttgttgttgttatcccatcagctatggctagtgttagtg

SEQ ID NO: 18130 - DNA, 239 bp, Homo sapiens
tgaacatttaaactgggattcccgtcatgcattgctcatttacaataacgaatattaaaacatgtgggctttacatctaacccacacaaagcccaccgtaaatgttttgtgtatcaaatatccacctcatgtgcactatgaaaggtatatttatgccccattaagccaaaaggaaattatattaatctaatgacctgcatattttcatatgtatgaatggtcgacgcggacgagatttg

SEQ ID NO: 18131 - DNA, 335 bp, Homo sapiens
cgactgtctactttttgtatttttagtagagatggggtttcaccatgttggccaggctggtctcgaactcctgagctcaggtgatccacccgccttggcctcccaaagtgctgggattacaagcgtgagccaccacgcccagcctgtgatgtaatttaattatcatagagaagcctttattttatccttcttgcctataataaaatgtttccatatagcttggctttcaaggccctccagaatcaggtaataatgctacctaatctgtcactcattagcattttgagaaaatgtttagtacccactatgcagtgccctgtacctgcacttagcac

SEQ ID NO: 18132 - DNA, 321 bp, Homo sapiens
ggaaaactaagtttttctgaggggctatttatttacttagggatttgttaaaaggtcaaatggggtcacacagaatactaagaagagctgttcacccaggcctcactaagaactcttcttcatgcagtagctatatagtaatatgacaactgctcctacgacccaaagaggaactacagcaactactctttagcatctgttgctcccaactctgctttgcaattatatgactcaagcattctggctccgttaactattactgctgttactcccaagtaaattccctctaaaaaataaaaatttttaaagctgtaatttaag

SEQ ID NO: 18133 - DNA, 420 bp, Homo sapiens
  misc_feature (1)...(420): n = A,T,C or G
tatgaggagatcctcgagttatctgcgaacttcctcggacccgaggtattaccggacatcactactgattacttacgtgagcactgtggcactggggccagagcgggatgttagactgatacgttgagcatgcgccttgaatccagatcgtatgctaccatgaactatttggggctaggcctattactcctgaaatgggaaatgacttacgatgctgagagatgtgacaaattacactgagacctaaaaccattctgttttcttttaaccatggccaaatattaaacggaggacttgttagaccgttggtggaatgttctgaaaactagtattaactgagtataactgtgtgaaaaatctggacagcattaacaaatgaaagagcactgaattctgttattttaaagatttacagtacan

SEQ ID NO: 18134 - DNA, 364 bp, Homo sapiens
caaaattgagccatcactataagaaagaaaattggtggcagtgagtcccacgaatacacataatagtttctttaaaggcagggctaattggtgacacatctctcttggaaagacacatgtaccacaaacaaaaacaggatccaaccacttgtatctagatagttatctttctaggcagaaaatctaacattcagtaactaaaccaaatcccagagcctcagcagccaaaatggccctagctgacatttcatccagcctcattttatagaggagaaagtagaggcccatatcttgtccatagttgtacacctgggatccaagccagaattcttataactacacgggcctgggatccagcatttta

SEQ ID NO: 18135 - DNA, 346 bp, Homo sapiens
aaactcagggggtgatgacggctacacgacattttcctttgggcctcagacacgagcgggactgcgaagattcctgctgacagcagccttgtgtccaatacacatgctgctgtgaggggaatttgtgcctaggagctctggcactaaaaaaacatgaatatgacttatgatgcatgcccatttttgatttggaccgcttttatcctatacaacatctgacctgagcatgtggtcccacacaaaaaacatgagccctaatgtgtgacttggaccccatagcaatttgagttttaacaagttctggagttgcttctaactctaaaatttcagtagtcaattcagtctc

SEQ ID NO: 18136 - DNA, 360 bp, Homo sapiens
tacatctgtcctcttggcatctcattgggatttccttgactgctctcccctgttggatctcctgtgcccttatcctgtttgttcttctttcttggtttattttctcactttggtagacttcatcttctagtaagtaggtcttgagagtagatagctgggaggtaaacatttatgaaactttgcatatttgaaaatgtctttatttgctttcgtatttgggtcactgtttggccaagtattgaactctagacttgaaaacattgtcggttgcttcaaatggtgccattcagatgttccgaagttatttgggtttctaaacctttgtatgtgacctttgcttccccttcctctctctggaag

SEQ ID NO: 18137 - DNA, 331 bp, Homo sapiens
  misc_feature (1)...(331): n = A,T,C or G
cgggggttcttggtgctgtaatgtgcctcacaggcagcgacataagccgactctgggaagaagtcatcgtggtattctgctaaaaacctcaaaaagagatcaaagtgcttcaataaagccttcagattcttctcagaaaaggacatctttccaaggatttctggaagtttcacaaacaatcgcagcaaatgttgtgccccataaatgtaagagggtggaggcggctggtcacctggggggtaattgtcaggcacaagcttccaggagaggacctcngttatttcattagttcttctgccttcaaagccagggggacgcggccgcgaattcc

SEQ ID NO: 18138 - DNA, 89 bp, Homo sapiens
gttctttgagtcctaggggagcagcggcagacttctcctcatgagtcacgggcaccatggggcccgtttgaggtctacgcggccgccat

SEQ ID NO: 18139 - DNA, 331 bp, Homo sapiens
taaaattttaattcttattactttttagtaactgtgcattttattttgtaggatgtacgaagtaggtccaaagttgttgaccgtatttacagtctctacaaacttacagctcataaacataaaatgaatactgaaagaatactttacaagcaaaagaagaattcttctataagcattccttttatcccagaaacacctgtaaggaccagaatagtttcaagacttaagccagattgggttttgagaagagataacatggaagaaatcacaaatcccctgcaagctattcgaatggggggggatacgcttgggcattccttattattaaatg

SEQ ID NO: 18140 - DNA, 363 bp, Homo sapiens
cactgagcccgctaaggttgacgctgcagtgagtcatgatcatgtcactgcacttcagcctgggtgaaggagtgagaccctgtctcagaaaatggaggaagctgattcattaacaagaaccagcgttgggcgggggggtttctgggaatacaatacaggtgggggcagtaacaaggatgaaatcagttaaacggttttattccaggcttatttgaaagtcataattttttagaacttgtgcccaaagtattagaatagggaaaggcggtggcttttcttaggagcggtcaactttatccaaattacgtgaaaaaacccccaaaatttaattaagtgtaaattttcccaattgggaagccttat

SEQ ID NO: 18141 - DNA, 336 bp, Homo sapiens
ctccatctttatttaaataaattaacactgggctgcagggcagccagtctgcggaggaaatcagttttgtgagctcttgccgctgcagcccatactctgctgagcatgtggtctatatcactcacacgtcagggaaattctcagaaacgtaggaactcagaatatctccccagagtcattatggggtagagcagatgctgtccagtgttttaaccgtgatgcatgggaagaagcacattttacatcacaaaccagtgcccccacacacacaccaaaaagttaccaaaataatacctacacttagaacgtggtcgacgcggccgcgaattccagatt

SEQ ID NO: 18142 - DNA, 335 bp, Homo sapiens
ccgggcccaagggatcctcccgcctcagcctcctgagtggctgggactacaagcaggcagctaattaaaaaaaattttttttgtagagacaaggtctcgctatgttgcctaggctgattttcctgccactttataggaaggactttttttcctacttttaagagttttttattaggaattgtctgttgaatgttagctaaaatagtcaataaaatgtattaagtgccagctgcatgcaagaccctaagttagatacaggcagcccttctcatcatcaggtccacatcttcagattcaactagaggaggctggatatttgaaaaagaaacactaaa

SEQ ID NO: 18143 - DNA, 414 bp, Homo sapiens
cgagaccatcccggctaaagcggtgaaaccccgtctctactaaaaatacaaaaaattagccgggcatagtggcgggcgcctgtggtcccagctgcttgggaggctgaggcaggagaatggcgtggacccgggaggcggagcttgcagtgagccgagatcccgccactgcactccagcctgggcaacagggcgagactccgtctcctaaaaaaaaaaaaaaaagaagaaaagcgcccccaaaaacttggggtggggtggtaaaaaaaaaaacacccccccacgggccttatgggggaaaaaaccccttttcccttttggaggggagaaaaaaaaaaaattttttaatgggacacggggggtttaaacaagggggtggcccccccaaaaaaattttggggggagttttttagaaga

SEQ ID NO: 18144 - DNA, 341 bp, Homo sapiens
  misc_feature (1)...(341): n = A,T,C or G
gctatatacaactttaatgagagcttcttacccaagactcctccaatatgtgctttttctgaatcgttgaattttactagttggaggttgttaaatgatgaaaggaaaagggtaaccatgaaacacaatttttaaaatggatttcctttcatatattttctgttcatataagtataaaacactaataaatttgacccagctgaggacagaatttatcttctgtgatttctaagccagctctatgtaactcctttatagaccattttacatagcatcctttggctccctacacttaatgcagagcaagagagtagctatgtaaacctgctgacagctgtttn

SEQ ID NO: 18145 - DNA, 386 bp, Homo sapiens
  misc_feature (1)...(386): n = A,T,C or G
tttttttttttgaaacatgctgccacttttgtggcccaggctggggggaaggggcatgatccctcattataacctcaaactccggggctcaaaaaaccctctcaccttaccctcctgagtagctaggactacgggcccaccccaccatgctgggctaattttttattttttgaaaatggggggcctggctgtatgggctagcctaatactcctggactcaagcaatcctttaacctcagtctcccaaggcactgggattataaacacttttgataaaaagtattttcaaagttaatggaaacttacttttacttgagatacttttctattaaccttaggctctatggctagntctcttctttattcttcatgacatttttctcaac

SEQ ID NO: 18146 - DNA, 397 bp, Homo sapiens
accgcatgttctcactcataggtgggaattgaacaatgagaacacttggacacagggcggggaacgtcacacgcctggactgtcggggggtggggggctgggagagggatagtgttaggagaaatacctaatgtaaatgacgagttaatgggtgcagccaaccaacctggcacatgtattcatatgtaacaaacctgcacgttgtgcacatgtaccctagaacttaaagtatataaaaaaaagaaaccttgcactgattttgttagatttattcctaggtatccttcctcttttttgatttgtcattgctattgtagatggcatctttttaaaaagttatattttctaaagaaaaaaataaaaaaagttgtattttctaatttttattaccaatata

SEQ ID NO: 18147 - DNA, 340 bp, Homo sapiens
gcggtacaatgaggagacctttggctacgaagtgcccatcaaagaggagggggactacgtgctggtcttgaaatttgcagaggtctactttgcacagtcccagcaaaaggtatttgatgtacgattgaatggccacgtcgtggtgaaggacttggatatctttgatcgtgttgggcatagcacagctcacgatgaaattatacctatgagcatcacaaaggggaagctgagtgtccagggggaggtgtccaccttcacagggaaactctacattgagtttgtcaaggggtactatgacaatcccaaggtctgtgcactctacatcatggctgggacagtg

SEQ ID NO: 18148 - DNA, 339 bp, Homo sapiens
  misc_feature (1)...(339): n = A,T,C or G
gttaaagtaatgttacttaaagccaataagaacataaatataaacaaatgccctaaaatcaggaacaatagtaggttatatattttatcttctcaataatcaagagcgtgtttgagttttctttacattttcatagaaatcaaaacacaaaatttcccctcaaattcttgggcccctgaaagtatgtctgtaaattctggtttgagaaacattgatctaaacctatgtttcattgaacacctagactgaatacttgaaactaaataacatcaaatttttttggagannnnnnnnnnnnnnnnnnnnnnnnnnnnncnnnnnnnnnnnnnnnnnnnnnnn

SEQ ID NO: 18149 - DNA, 255 bp, Homo sapiens
cagcaaaataaaattcctgtttattgttggacaacattgtttcacacatacatcaaacaggccaaaaaaaataaacagcaacttcatagacaaaaaaggaaaaaaaaagaaaccttttatctttggcctttttaaccatctcatacaaaccaactacttatagtacagctaagtacatacacaaaaaagttactggaatgctcggaataagattgtttttctgttggcatttttgcttttttgtcgacgcggccg

SEQ ID NO: 18150 - DNA, 339 bp, Homo sapiens
tcactagcaacctcaaacagacaccatggtgcatctgactcctgaggagaagactgctgtcaatgccctgtggggcaaagtgaacgtggatgcagttggtggtgaggccctgggcagattactggtggtctacccttggacccagaggttctttgagtcctttggggatctgtcctctcctgatgctgttatgggcaaccctaaggtgaaggctcatggcaagaaggtgctaggtgcctttagtgatggcctggctcacctggacaacctcaagggcactttttctcagctgagtgagctgcactgtgacaagctgcacgtggatcctgagaacttcag

SEQ ID NO: 18151 - DNA, 378 bp, Homo sapiens
cattcattcattcattcattgacccgttttgcttccttggaacacagcttgggaaacaggagatgttctaatcagaaagaattttctccaaggcccaagttattaatataagcaaggcatagatcacctgacctgaggttttcatatccagaattcccaggattaaaaagttaaactgaagatgtaatttaggaataagatcattaattatattcatctcctttcctttaaataacttgcataaattgtactattctatacagtaaatcaattagtattcccttttatatggtatcagaaacttccacattttcccatttcccacatacacttagggacttactgggtgtcttcattctcaacgcattctccggaacg

SEQ ID NO: 18152 - DNA, 345 bp, Homo sapiens
agcttttattgttttagtaatcttaacataacttaaaataagagaggggaaatgacatctggagatctaggtatgtggcccattgcaattgagcacatttcttgggtctgtttctctatctctaaggggagtctcaaaaccccagctcaaaatacgacactaacatgatgaacatgcatgagctttgaaaagtgctctgtagtcttatgatgatctagaagagcactgtccaatagaactttctgtgatgatgaaaagattctacttctgacctattcaatagggtaaccactaatcatgcatggctctcaagcacttgaaatgttgctagtgtgattggggagc

SEQ ID NO: 18153 - DNA, 328 bp, Homo sapiens
gccattctgaaggacaaactggctctgactttaagaggggcattcccgcacttttctagccactgggttgacaatgactcaccaaagcctttggtagccaccacaggacacccagagcatatgttctaaagctgaacaccaaactgcggactttgggaacccaaacacacttggaggtcatgttcaatatgaatacctcacagagaaggaaatttacacgcgagaagtacatctgcagaaagccagctggcatgtcaccattcaaaaactcagggtgttctggataaagaagactcaggaagacaagtatgaagcataatctgtgaca

SEQ ID NO: 18154 - DNA, 143 bp, Homo sapiens
aaagatgagagtctcagcactaaagatattcaatagaggctagacaactatcaaaagaaattagttaaagacaattctattagataagaatccccttcatctgtaatattttatgcttccccaagctaaaagaaatatcctgg

SEQ ID NO: 18155 - DNA, 398 bp, Homo sapiens
  misc_feature (1)...(398): n = A,T,C or G
cctcggccggcgcctagcagccgacttagaactggtgcggaccaggggaatccgactgtttaattaaaacaaagcatcgcgaaggcccgcggcgggtgttgacgcgatgtgatttctgcccagtgctctgaatgtcaaagtgaagaaattcaatgaagcgcgggtaaacggcgggagtaactatgactctcttaaggtagccaaatgcctcgtcatctaattagtgacgcgcatgaatggatgaacgagattcccatgtccctacctactatccagcgaaaccacagccaagggaacgggcttggcggaatcagcggggaaagaagaccctgttgagcttgactctagtctggcacggtgaagagacatgagaggtgtagaataagtggggtcgaccn

SEQ ID NO: 18156 - DNA, 338 bp, Homo sapiens
aaatgatgggactagatctggtaactggtgatgatgtcatatagtgggcagtagtgctgggatggctggggtcagggccacatggcaggggcctcaaataaaatgtgaaggagttagaaatttattctgttggcatgagaaagtgttaaagcttttgaatatagaatgatatgtgtaactttgagtttttaggaagataattctagtggcaaagttgaggataaaggcaaaagggaaaccagatgaaataatggggcactgtagtaggacagtgttggtaagtttgaggaaaaaaggagtaagagatatttttaaggaaattcatgtcgacgcggccg

SEQ ID NO: 18157 - DNA, 345 bp, Homo sapiens
  misc_feature (1)...(345): n = A,T,C or G
ttcctgtgcaaattgtaagcgctaagtaaatatatatgctgattgaattacagtcatctgtggcgatttgtgctctgttccacctcctgctggctgcgttgtatcccatgttggaagtggctgagtgtggcttcagaatagacacagaggaagtgggagagtgaatatttggatgagggagtatgccttgactaaatactttctataagcaaatacaaatcatatgacctagagcttttattttttaaaatcagtctattgcttttctcttgagcacatcattggtgaattgactctatttggcttgatgctttcttacaacaactcggtgnnnacncnnncncc

SEQ ID NO: 18158 - DNA, 301 bp, Homo sapiens
acagctgcaagccaggagacgagatagagctgactggcatctatcacaacaactatgatggctccctcaacactgccaatggcttccctgtctttgccactgtcatcctagccaaccacgtggccaagaaggacaacaaggttgctgtaggggaactgaccgatgaagatgtgaagatgatcactagcctctccaaggatcagcagatcggagagaagatctttgccagcattgctccttccatctatggtcatgaagacatcaagagagaggcctggtggccctgttcggaggggagccc

SEQ ID NO: 18159 - DNA, 210 bp, Homo sapiens
gcagaatgttggctaccagggtatttagcctagttggcaagcgagcaatttccacctctgtgtgtgtacgagctcatgaaagtgttgtgaagagcgaagacttttcgctcccagcttatatggatcggcgtgaccaccccttgccggaggtggcccatgtcaagcacctgtctgccagccagaaggcactgaaggaggtcgacgcggccg

SEQ ID NO: 18160 - DNA, 182 bp, Homo sapiens
ctccatacctaagatatgccctccgtagctggtctgacttaggtatggagcctccattcttcacatggcgagataggaaagcacggactgctgggtgatcagccttctcaagtgggatgttggcttccaggcacattttcacaaagtcctggataacactgactttctcgtcgacgcggccg

SEQ ID NO: 18161 - DNA, 397 bp, Homo sapiens
cataagtctttctttataaatttaaccatatttttaatggtgggcattgcagacaacaatagtacagactttgcaaagactatttttttttggggtgcagtgaatacttcgcaatgcctgctgaactttacctatcctgtctgtctttttgggaaccgatgagccccttttctcttagttgcctttagcctttgtttttattatggcaattggtatgaaagtttaccttttcattacttcttttatggagagcacacctctggcttatctcttcattctctgattagtttcatattttactttaaattctgcacatcaatatctgccattatagcatttaagctcttggaaacatcaggcatttgttaacttgttgagaaaataaagcactccactg

SEQ ID NO: 18162 - DNA, 146 bp, Homo sapiens
ctcctacataaccacaatacaatcatcaaaatcaagaaatgaactctgatacatctccaccttctaagcttcagactccatttaagtttggccaattatactaataccgtcctttttggcaaaaggatccaacgtcgacgcggccg

SEQ ID NO: 18163 - DNA, 357 bp, Homo sapiens
  misc_feature (1)...(357): n = A,T,C or G
gtgaataatgagaatcagctatttcaggcataaagcctgatatttaaaatattaaatattataaagcctgggtgacagagtgggaccctcagttaaaaaaaagttttatataaattcaatgtcaatatcttctcctgtatgtctgtttgtgtgtttaataactggatgcccggcctgcaaacacattttctaatcaatggtgtcactaanggggaaaaaaaaaaaaaaagggaggcgatcttttttaaaaggtttttttgaaaaggatttgcttttaaaaagccctttttattaaggacctctttttggggaatcccctttttcattaaaatttactcgaaactccaaaatcagggc

SEQ ID NO: 18164 - DNA, 356 bp, Homo sapiens
atttcaaatcaagcaggtttttatgttatgtatcaatttggatgacattaatgaagttcataaaatatgttcagactatataatttaatggataatgactactatttttatttgtaatacaaataggaaattgactgttgtctccctccctccttggttcttttctcctacctaggtaaatgggcatccttaaacagcttctcccctttacgaccagggtatagagcactggccaatatcagtaaatttacctttgtaatttgccacgtagtttttacaacatgacctaattaatttgagcacgaaccatattattgctactggagtcattttctgtcacaaacttaatttccagg

SEQ ID NO: 18165 - DNA, 217 bp, Homo sapiens
gaaagagctgggacattacaatggaagacgcatgatgaacaattaactgaagaggctctttatggataaataatattgaataacgcattatgtaggtgttcacagcaatattttgcgttgtgagaacatttttaattgtatttaaaaataaatgaaaagacattagtatatgatcgtactaattgtacttctgtataataaaatccagtgtattttt

SEQ ID NO: 18166 - DNA, 364 bp, Homo sapiens
  misc_feature (1)...(364): n = A,T,C or G
gccgaacaaagacattgaacattttgcttgagaagcaattgcgttataactattataatccattttcataaacagtcctcttgaaaactactgttttgcattttcaatatcatcaggtaaatctcaagtgttggttcaaagcctcaatccctgctcatgtcacaaattccaaatcaagaaggtttcttcagattctggcaataaagcaaacatgactccaaagggccctctcattacaaattaactagatctttaataaaatataactctcattaacagtgataccatatagcaattgtaggaaacaaggaaaatatcccagctgcctcagtaactgcccccaacccaaaataatgactaaatn

SEQ ID NO: 18167 - DNA, 202 bp, Homo sapiens
gtcacagtcaacactgaataaatgactagaatgacacgtgtgcgtgcgcacgcgtgtgcgtgtgtgtgttcatctgtctgcatgtggatcaatttcttttagaaaataatttattgtatgatttattttggagttatattctgattacagtgctccctctcccaaatagcattgattttttccccccgagtcgacgcggccg

SEQ ID NO: 18168 - DNA, 362 bp, Homo sapiens
  misc_feature (1)...(362): n = A,T,C or G
ctttattggagaaggagacagtggggtttttggccatgggaggggaggaatggggtgcggatcaacagggcctcagggggagcggtagtgtggccaattctggatgaggtggtagagctggttgcctggaaagagtgtacgctgcacatcccggtgtcctttgagcacatagttggacctcagggctccctgagccacaccgcaggccagtagaccctgggctgcccggatggcctggggtgtgggcacccgatccatgtagttgcccatgaagctgatgccaatggacatggggttccataagtgacctgagtgggcacccgtgaagtttcagccacggccctcgtatacgagcccgtctn

SEQ ID NO: 18169 - DNA, 359 bp, Homo sapiens
  misc_feature (1)...(359): n = A,T,C or G
ggcactcgacacaacatttgcgctcaactgtcttgtccaccttggtgttgctgggcttgtgatctacgttgcaggtgtaggtctgggtgccgaagttgctggaggtcacggtcaccacgctgctgagggagtagagtcctgaggactgtaggacagccgggaaggtgtgcacgccgctggtcagagcgcctgagttccacgacaccgtcaccggttcggggaagtagtccttgaccaggcagcccagggccgttgtgctctcggaggtgctcctggagcagggcgccagggggaagaccgatgggcccttggtggaggctgaggagacggtgaccagggctccctggccccagtagtcn

SEQ ID NO: 18170 - DNA, 366 bp, Homo sapiens
gtaggtgatgagcggcctggcagccaccacgtttcattggaaaaagtgcagattggatttgccagggcatgtagctctccaggcttgcaagcgattaccagatgaacacaatgacgtacagaagaaaacctttaccaaatggataaatgctcgattttcaaagagtgggaaaccacccatcaatgatatgttcacagacctcaaagatggaaggaagctattggatcttctagaaggcctcacaggaacatcactgccaaaggaacgtggttccacaagggtacatgccttaaataacgtcaacagagtgctgcaggttttacatcagaacaatgtggaattagtgaatatagggggaactgacat

SEQ ID NO: 18171 - DNA, 359 bp, Homo sapiens
gtttttgcctctgaagcatatctaaaatgaggtgacaggtcagaaactattttctctatattttaccttaccctccatctacctgtttcccttttcttccccttttctgttctactctttgcatttcttctgtattgaaattcactttgttcacaattatttaaaggaaaacctgaactcaggggccttgggtacctttaggttcaggtacaataaagacatgagactggatttgcgtgcatcctaaaagaatcacttttaaataagttttatatgttttcatcttgattcttctagattcatcttgattcaaattacatggttggcatttaaaaagaaagatgcatttctaaatgtac

SEQ ID NO: 18172 - DNA, 192 bp, Homo sapiens
ttgccacacaaaaataatcatatggaacagccccatccccaagacactgactcggtcctcagacctatgggcttcctatgacccacctctcaccagtctctcagaagtacatcagtatttcttttacctgattgattacatatgagttctctgatgagatccttctaaggatggaagaggtcgacgcggccg

SEQ ID NO: 18173 - DNA, 388 bp, Homo sapiens
  misc_feature (1)...(388): n = A,T,C or G
gtcccggctcatcacccggcctgtggcccactcccaccgccagctggaaccctggggactacgacgtccctcaaaccttgcttctaggagataaaaagaacatccagtcatggataaaaatgagctggttcagaaggccaaactggccgagcaggctgagcgatatgatgacatggcagcctgcatgaagtctgtaactgagcaaggagctgaattatccaatgaggagaggaatcttctctcagttgcttatnaaaatgttgtaggagcccgtaggtcatcttggagggtcgtctcaagtattgaacaaaagacggaaggtgctgagaaaaaacagcagatggctcgagaatacagagagaaaattgagacggagcgtcgacgcggt

SEQ ID NO: 18174 - DNA, 355 bp, Homo sapiens
atttttttaacccttcatacctactgttaatcattgttttttcctggaataaattttaaaatatattcaggtaaactatattcatgcataagatgactgtggtgagtatttagtgtaaaagacattttcttttgaaactgcagtattttggataaattacatgtgaacctcaagtcgcctgtgacccaagtgagattgttagtgttctgaatactagtatcatttttagcctttgtgtatctttttatatgaagtgtctacttctcaagctgattataggatgaatgtgcttaaggttgtgtgcatcagtatgcttaacaaatatcattttagtctctggaagaaagcttgctag

SEQ ID NO: 18175 - DNA, 335 bp, Homo sapiens
  misc_feature (1)...(335): n = A,T,C or G
ctgatttactctgttaatgtggtaaattacatacattgattctgaaaactcaacatgacaggccaggtgcaatggctcatgcctgtaatcccagcacttcaagaggcagagatgggtggatcacctgatgtcaggagtttgagaccagcctgggaaacatggtaaaaccctgtctctattaaaaatacaaaaattagccaggcatggtggtgtgcacctgcaaccccagctactcgagaaagactgaggtgagaagagcgcgcnnnnntnnnttgtnnttgtnnnnnnnnnngnngnnnnggntgntgggggggntgttttgtgtgaggaaggat

SEQ ID NO: 18176 - DNA, 355 bp, Homo sapiens
gtaagttccaatccaggtgttatttcctatttatccccctgctttttataagcactgattgttctccgatgctggctttttatggacttaatagtctggaacatgcaatccaacagtctcaatataaccctggacctcaacttagaaaatcagttcttttccaaatagacatcctacataggataattttttaaaaacatgaactggcattttggtacaagcaattggtaaagtcggtaacaccggaataggtttttgattaaaaacaagaaagttgaccatgctgtacggattctcttactgacagctacttccctacaggttttcgcatctccaatttctagcactgtcaaag

SEQ ID NO: 18177 - DNA, 329 bp, Homo sapiens
cttgttttgattccttaaagacttatgatactactggctgatgtccaccttcccctcccccaaatctgagagaagtaagtgaatattttctctgctgaagcatttaaaacgggtaattgctttcatttcaaacatttttgtgaaatcaaataggaaacagggttttaaattctgtttccctcaagttgcatgagcttaaaaaaatttctgcggagaattttatttcttgtgctgcgactttaataactccattaaggctcctgctttctttctgatccccagctgtgtatatttgggtgtggaatgcaattttctctggctacagctag

SEQ ID NO: 18178 - DNA, 318 bp, Homo sapiens
gggtgccctccccgaggcctggcttatggtggtggccagggccctcgtcaccctcgtgcatcttctcgtgggaggcccaggttagcctcgccatcagcatgatgaactcctcgaagctcagctgcttgtctgcatttgtgtccaggtcctccatgatgtgttctatgaccttttcattcttattctccttcttgagaaaattttgcagatcttttcgcaccagctctttgaattccccctggttcagggtgtctgggtgccccagcttcacagagtattggtgtcgacgcggccgcgctttagtgtaggaatttttaa

SEQ ID NO: 18179 - DNA, 343 bp, Homo sapiens
gacaagcctcttcagttctctgtattctcctcagctgtaaaatgaaggactaaactattcaaatcagttccataagcattcatcaggcaccttctcggagtaagacatcatgctcagccacctataaaattctatgatcctgaatagtatcaatgggaaaatatcagagcaaagcaaaatagtctgtttgtggcaaggttgaagagagaacccaaatagccgactgcattacatcatctcaatgagcaatgtttgtaaatatccaagggggtaattttgagacactcttgagaaatcctttgccaataagaaattggcagatatggttctattgtcgacgcgg

SEQ ID NO: 18180 - DNA, 222 bp, Homo sapiens
ttttcgccgcccactcagactttattcaaagaccaggaagggccggtgcaaggaggggaggagggcccgttgggaggcccagcgggcaggaggaacggcgagctgcaggatcccaggggaggggtctctctccccatcccaagtcatccagcccttctccctgcactcatgaaaccccaataaatatcctcattgacaaccaaaaaaaagtcgacgcggccg

SEQ ID NO: 18181 - DNA, 254 bp, Homo sapiens
ctgacacccacatatggaacatttggcatgcctccatggcaacacgggatccctgaagtttatgaaagcgttccatgtgagagaggatgctcatatactcctgccccaccctccaaagatgtactaatgatgctaactgactacatccaaggagccagaggaaaaataatctgagggctgcagagaacccactcaagctgtcactgcaaagctggtcttcccaagagcaaaggaggaagcagtcgacgcggccg

SEQ ID NO: 18182 - DNA, 180 bp, Homo sapiens
atcttgggtgggagatattgagatccaagcaataagccatatttgaaaggcattatagttttcaaaagctgtagcgcaatcattcttaaggccagttaccttctccccacatctctgggatcctgtttgaagggagttctaacaaggcctgtgttcgagcagcccaggtcgacgcggccg

SEQ ID NO: 18183 - DNA, 354 bp, Homo sapiens
cccaggctggagtgcagtggtgcaatctcagctcactgcaacctctgcctcctgggttcaagcaatcctcatgcctcagcctccccaatagctgggattacaggcatgtgccaccgcgcccagctgatttttgtattcttagtagagatgggatttcgccacgttcaaggtaagattctcttactcttacagtcactttgttttattttaacttaacaaaaatgtggccattagttctagtgcatgaaatctcattctagtcacgcaaggccagagtagatttaaaatttagggattattactccccgataaatactttaaaagcaaagggtgattttcatgatacttctggcc

SEQ ID NO: 18184 - DNA, 342 bp, Homo sapiens
  misc_feature (1)...(342): n = A,T,C or G
ttaatttattggaattccaggaaagaatagttaacttttatttttaatattatgaaaataagagaaaaaagcagatgacattcaaataaatgctctttctttatatattttggtttataacctgtatcttttcatgcatcataatattcctctgagaaacatatatatgtatatatatatgtatgtatatacttgaattttttttaactttagcattgaggctataaaccttggcacactatttatggttaaggttaacctggggtttgttctgaggctatgatccttggggggttgacctgggttcaactgggcattgattgttgagtgactacaaggcan

SEQ ID NO: 18185 - DNA, 355 bp, Homo sapiens
gctactgcttgggaagtgatgttgctcaaaaacagaatttctggggtggtagactggtagtacctactctaaatttttttccttctaaagttagtgcagaactctgagtctggataattcattcacatgtaaaggcaaacccaaaatagattttgaagaaaaatcttggccttgctttcatctttctgagggggcatttccatgacaatgaccatccaatcacaagacggtcttgatcacgctcttacaaaaaaatccatcaatggccacctctcaagttaccagtttgattttaaccaaccacaggttgcggtataacaaaaaataaatacatataatcatgccttgctaaacg

SEQ ID NO: 18186 - DNA, 343 bp, Homo sapiens
  misc_feature (1)...(343): n = A,T,C or G
ttcaaaacagaatctttctcggcacttgtagcctgaatggaatttcaaatgaaataataaattaataaagtaagtttcatagactatacatttactagttcacaatataaatgacagtttcattaccttcaagcctgatggtttctcagaagacactgtcctagatttttctccatccttgttttctctggctatactcaaaacagaatcttcctcatcacttgtagccttcaaggttggtggtttctgagaagacactgtcctagttttttctccatccttttttcctctggctatattcaaaacagaatctttctcatcacttgtagccttcaagcctggn

SEQ ID NO: 18187 - DNA, 406 bp, Homo sapiens
tacatactatgttgacactctttcttataaagtttaaatagttgttggccatatacagaaaacatgacctgtagagaacttggcttagagagcgaaaacaagtaacacctctctctacccctacaaaagtatttttaacatcccactacagtgtaaacctagatcaagatttctcctacacaaaggacttcatgtctttgctttttgtgggtaacaaccaaagctgtcttcagcaaacaaattcttattgcacttaaaccctatggagaagtgtagccctcaacatactgaatttttttttttttttttttttggaaagggacttctgttttgtcccccaggttgaattgaggggggccaattttgcataattgaaagctttgcttacagggtaaagggcattctg

SEQ ID NO: 18188 - DNA, 361 bp, Homo sapiens
atccgaattcgcgtgccgcgtttacgaagttacaaacactgatcttattcctaatacccaaataaaagccctcaaccgggggcttttatttgggtattaggaataagatcagggtttgtaacttcctgatatctctctgtaacattgtggcaagaagtgcaataatatttgccttcatcagtaagaccccatgagacagcagcacactgagtacagcgttctttaaactcttccgactcctcgaggtccatcgcggcgccgcgggagcttccacagccgggacccgttacccgggtagcgagcgcagcttccgggaaaggctggagaagccttccggccggaaacgcggtcgacgcggccg

SEQ ID NO: 18189 - DNA, 355 bp, Homo sapiens
aaaattctgcatgacttttacattgagaaagaaaagccattactcatctttgaaatcttacaaagactttctgaactaaaaaggtttgatatggcagtgatgtttatgtcagaaacagagaaaaagattgcacgtgcattatttaatcacatagacaagtcaggattgaaggatagttctgtcgaagaactcaagaaaagatacggtggttgatttccatttttgctgaaataattgtttttgactttcatatgtaaatttttttctactgaaagtgttttgctttttaagaaaatgaaattatatagcaggaaaggactatctttgaacataagttaattaactataaggtgag

SEQ ID NO: 18190 - DNA, 354 bp, Homo sapiens
  misc_feature (1)...(354): n = A,T,C or G
ctgccctcaagcatttatagtcacattttggaagcagcgtgtgtgtatagagttggcagttggaaacaggaaaagtctgtgtgggtcagagacatgggggaagttttcaaagagaaagaggctgcactgggttcttgaagactgaacaggtggtttgtgcaggcaggatgggaacagcatattgtcctgcatggactctgcccccctcaaagctctggtcagggcctaaggtcacagtaaattgtcataattttctactaatgcccttttttttagataattctctgaaaccactatgtgcacttgttcttttaaagcacgagacctttttctttttttgttntatttctaaaa

SEQ ID NO: 18191 - DNA, 363 bp, Homo sapiens
  misc_feature (1)...(363): n = A,T,C or G
gggaaagcagtgcagaccacttattaagcccgctgaggactagctttctgtctttcatacatttgggaaagataggaatgactgtttcaaagaagagaggtgcacataatttatgcaggcaagtatgatacttatttcattggttttgtgagtcatatatatacatatatatatatacacatatatatatgacttgaaaattaagatttaatactttaatgttttaagtgtggggggtttgggaaggaaggaatgtaatattnatgatttagccttacgctttaagttttaggctggcaaaagaaatgttattcagtgggtttgaggtttggactactttcttcaaacttagagaattataac

SEQ ID NO: 18192 - DNA, 330 bp, Homo sapiens
cttctattcattgttgatctgctagcttacaaaaatgaatagaagtctatcaatgaagattatggaggataattcaacattaaaatgttaaaatttctaaatgcaattatgaaatgaaatatgaacatgttggtattttatttttaaaatcttgatatgcattgttttcatttttatggagaattctgggaacacagtttaggtgcaaatactgataccttaagttattatgctgtgaacagttttcaacaacccaagtcttaactgtcctataagaaatagtaagaaacatatctaacatatggaagtaaggttatgaaaaactgtacc

SEQ ID NO: 18193 - DNA, 405 bp, Homo sapiens
gtggccttgctcccgctgtgcgggaaaagaatccaggcccttccacgcgcgtgtgggtgcgggggccccgaagtgctcgtggttccccgctaggtctccgctggggcaggaaccggaatcatgggtgggaccaccagcacccgccgggtcaccttcgaggcggacgagaatgagaacatcaccgcggcgaacggcatccggggtggcagtataccaccactaacttcattaacacactctccgctgcgcctgaatttggagcctcacatttttggacgtatgatgcctgaacctagtaaataaagcaattttgacttgagaaagatttataataacttatatattgctttctgatatcaaccagcgtgaataaattacatctgggaactatatttaacaggtgat

SEQ ID NO: 18194 - DNA, 350 bp, Homo sapiens
cgcggccgcgtcgacaaacatgcttttatttttcttgggtagacacctagtagtggaatggctgggtcacatggtaggtctaattttcacttttaagaaactaccaaaccaggctgggcgcagtggctcacatctgtaattccagcactttgggagacagaggtgggaggatcacctgaggtcacgagttcaagaccatcctgagcagcatagcaagaccccatcatctttacaaaaaaataaaatgtctattgaatcaaatttacttaatattcacaaacttttctccaccggaaggatgtgaagaaggggagacagagactggtaaagctataggcagtctgcaggtg

SEQ ID NO: 18195 - DNA, 403 bp, Homo sapiens
gcgtagactttgtgtttctcgtagtctgctttgctcagcgtcagggtgctgctgaggctgtaggtgctgtccttgctgtcctgctctgtgacactctcctgggagttacccgattggagggcgttatccaccttccactgtactttggcctctctgggatagaagttattcagcaggcacacaacagaggcagttccagatttcaactgctcatcagatggcgggaagatgaagacagatggtgcggccaccaggtgtttgatgtccaccttggtccctccgccgaaaaccctacggttctgacagaaataaaatgcaaaatcttcaggctctaagctgctgatggtgagaaggaagtctgtcccagacccactgccactgaacctggttagatgtccgaagc

SEQ ID NO: 18196 - DNA, 344 bp, Homo sapiens
cccatgtgtcactacattagtttgaaattcaagtctcactcaagtttgcctcattgccgaaaccaaatctatctggaatccaagttgcaagagagtcaaggaaatgtatttttgttagctgtctagcctcttcggaagatgaagactcactagaaaaaggttgaaacagatgttaatggagccttgctatcacaaggactagtgaatgtttccctgatgcagctgagacataaaaaaagttaaagaattagctacgtgaaaacatgggaatatgcattctaggcagagaagaaacaaagaggcctggaagagagccttctttttctctcttgtgagagagatta

SEQ ID NO: 18197 - DNA, 343 bp, Homo sapiens
  misc_feature (1)...(343): n = A,T,C or G
aagagccaccactcaagaccctgcattatggtgacttccctggactgagctttcatattttttttagaagaagtatttagcctgagctacctagccaaaaacaattataagcctttggcctggagatagagcacaagtaatcattattcattgctattgtatatgtggttatttagttttaacatcgagataaaatgtcagttttgtcagtaagttaatttgtaagttgcttcttgatttctgcacattttaataatttaccccatttagtccaccaacgtggaacagtttgaatctccaaaataatggtactaggtctattttattccctgtaacgctgctn

SEQ ID NO: 18198 - DNA, 337 bp, Homo sapiens
  misc_feature (1)...(337): n = A,T,C or G
catttatttgagatgaggaaaggaaattgagcagaaggtacaggagtaatagcaattccctgtagctctcaaagcaaattttgagctcatttttctttttctgcaagctcagcagcagaatgcccagagtcttccctggtagatgcaggttccatagcgacgttctcctgcaatgcacgctggtattctgcaatagcaggccatgtttttccttgagcctggatgctttggagccaagctttcgtcccatgcaagggaaacaaccacttctgggatgtccgctgcaatctgctccggggctgcagcaacctcatcagctcttgcctggagtggctcn

SEQ ID NO: 18199 - DNA, 339 bp, Homo sapiens
ccgcggcttatggtgcagacatggccaagtccaagaaccacaccacacacaaccagtcccgaaaatggcacagaaatggtatcaagaaaccccgatcacaaagatacgaatctcttaagggggtggaccccaagttcctgaggaacatgcgctttgccaagaagcacaacaaaaagggcctaaagaagatgcaggccaacaatgccaaggccatgagtgcacgtgccgaggctatcaaggccctcgtaaagcccaaggaggttaagcccaagatcccaaagggtgtcatccgcaagctcgatcgacttgcctacattgcccaccccaagcttgggaagg

SEQ ID NO: 18200 - DNA, 377 bp, Homo sapiens
tgatacctcagctgggctttaggagctacagaagaagctgcatctccatgagctcagcgtgtttctagctttcctttttgttttctattcaacctttcacccaactcagcttctcaatccctaaatgacaaaggtttgggaaggaagacttggaccgatgcttgcatttgtttctgagaattaaacgttatgttttcttcaatccaaataggtttgcttgtacagccttgttcaatgggtcttttttttttttttctccaggaaaaaggactcccacctcttttccccccattaaatggctaaccacccacaagggcggggaagagaggccgtgggacctctgaattacatacatgcataaaggactagcctaattc

SEQ ID NO: 18201 - DNA, 289 bp, Homo sapiens
cagtggtgtggcattgcatcaacttctagaaggatttctcaatactttataacttcctcatgtttctggtcatgtttgtgttcagctatatctctagaacggttggccaattcatagcatgaaatgatttcatgagtggtgacaaagaaagggtgcaatcagcccttggggagtgggttagtggaatcccagtcctgaggccattagtgggtggcagagtttaggagaaaaggtaagaagtttcagtccttgggccctgtagtaaggagaaaaagggtcgacgcggccg

SEQ ID NO: 18202 - DNA, 348 bp, Homo sapiens
  misc_feature (1)...(348): n = A,T,C or G
gtgtccccttccccaccaccaagacctacttccggggcttggctctctggggtttgggtgcgctttcccacctccttttgcttggctcacttttcttttttctcagcgagttcctccgaacacaaagtccagaatcggagctgcaaatcatcctccatcggggccatgcccaagccttccccactcccccaggctgggcttgggctgggaggggctgtggcagctcactcgacagccctcttgccacacggggaggctgctggctcagagagggggggtcaaagttaataaattagaataaattaggggggaggaatgcaactttgtgctgggagggccccttctctn

SEQ ID NO: 18203 - DNA, 344 bp, Homo sapiens
tctcaagtagatccagacatttttggtggtgagtgtgatgcttactaatagttatgtttactcccaagcctattttattacagttgtacttatttctataaatacatgaattaagtattacataaataaattaaatatgagtgcaaacataaaagttgctacttctaagaaaactaggttgaatgctctagaaaggcaagttgctaaaaaaaaaaaaagttgtgtcaacttcagtaaggttgatgggaaaaatctgtaaaaatacaaaaatattctgcactcaaatttcttaggaagggtaagttcactgctccactgcaagaaaatcaaaactgaaagactgg

SEQ ID NO: 18204 - DNA, 348 bp, Homo sapiens
  misc_feature (1)...(348): n = A,T,C or G
aaccatctttcaccttgccaaagaccacatgcttgcaatccaaccactctgtcttggcatcttggcagggcagataaaaaactgggaaacgttcacgctgggtccagcatttgccatggacaagatgccaggacccgtatgctttacgatgaagttcttgtcatcaaatttctccctgcagatggacttgccaccaatgctgtatggcgtgtgaagtcaccactctgacacgtaaaccctggaataattctgtgaaagcaggaacccttataaccaaatcctttttctccagtgctcagagcatggaaattttctgctgtctttggaaccttgtctgcaaacagctcn

SEQ ID NO: 18205 - DNA, 344 bp, Homo sapiens
gctgatcaccaagtggaaatgccttggaatccagggctaaggcacctctctgagagctccaaattcttgaaaagattcctttgactttgttgttttcaggatggactggctgaggttcctactgacttttttgtttgaattgggagtacagtactgcttgcttactttaccactgctccatctcccgctggcttaaaataaacttgctgtatttagacagcctctaaccaattattccgtttattggccataaccaagacaccatacgttgtgctgctatgcattagacgcctgaaaaagccttatcggcagcatgacttcctttgctaaaaagcgttaaaagc

SEQ ID NO: 18206 - DNA, 366 bp, Homo sapiens
  misc_feature (1)...(366): n = A,T,C or G
ngcggtgcttttactgtatgtctgattatatcccgagtttatataagagatttcagaggtaacgcaaattacaggatataatatttagatcattaatcatggtacaaattatgtctccaccctcaaactaatggtcttaagacaaaattccctaaaattataggaactctaaaatcccttgcttaaaatatttctgctagttagtgggagagctaagagtagaacttaattttcttgacatctagttccccatttctccctcccatccccaaacttgaacatgaatagttgttttctttaggcacataaacactgaaatagcntactgttactatctctacttttgcnntagaanattcaaaaacg

SEQ ID NO: 18207 - DNA, 350 bp, Homo sapiens
caggctggtctcaaactcctgaccccgggtggatcccttgagcccaggagtacaagactagcctggggaagatggcgaaacccagtctctaccaaaaaaaataaaaaaacattagctgggcatggtgatgcgcacctgtggtcccagctacttgggaggctgaggtgggaggatggcttgaggttgcagtgagctgagatcatgccactgcactccagcctgggtaacagaaccagaccctgtctcaaaaaaaaaaaaaaaggttgtggcccggaaaccaaaattaaggggtgggggttggttaagaacataacctttactggacttgggggatttaaccggagccttta

SEQ ID NO: 18208 - DNA, 364 bp, Homo sapiens
tgttagacgtcaattctcactttactggtaagagctgtgttactggacaggaggccccgtctaaacccctttagagggtacttggagttggcgcattaaaggaaactatacgagtctatatagcaaagttgaccctggatcctttgaactgtaaaggatttcatgagtggatctttcgtgcagcatcgttctttggctcctggattcccattgttatggatatttcttggggatattctaaacctggggaggattattcattaattcctttttagaccatatagggagacttcctgacattcccatggcatttgtaaactgtcacagcgctggtgggagtgtagcagtgaagaccaccagaggt

SEQ ID NO: 18209 - DNA, 360 bp, Homo sapiens
ggtgaatagaggcttgagactttgctttgtgtggtaggacttggaggagaaatcccctggactttcactaaccctctgacatactccccacacccagttgatggcttttcgtaataaaaagattgggatttccttttgaacaaaaaaagatgtaaaaagactatggggagaaggccatatataatttgggcgccgcggccccgggatccaaaattattaaggggttattcggaaaaaccccccggggtttctctaagggggggagggccccccaacaaatttttttttttaaaacaggcgtgcgccttttttttaggaaaaaaccccccgaaggtcaaatttgggcccgaaacccttgtg

SEQ ID NO: 18210 - DNA, 362 bp, Homo sapiens
tcaacctttaatactgcagacatggcgcaggaagatgaagatgttcaagattcccctttgactgaagaacaaatggcgcatagggccgactttccgcctgtcactatgatgctctagtatttggatcataccgtgtatgcccagagagtataacgggagtacattactttgaaaccaccccatatgaagactgaacgtttcaatcttgtgatccctatctttaagggctctcctctaattttgggaccttcacaacatgaagatggatggtttgaaagcactcagttttgcagggttcagtggctcagtgagccgagattgcaccactgcaccccagcctgggtgacagagagaccccatct

SEQ ID NO: 18211 - DNA, 350 bp, Homo sapiens
tccctgtcaggggtttggaaaacatttgccttgacccatatcacaagtcagaaaccaaactctttaaacccatgaatcccactcgtaagaatacaccttatgaaaaaaacacacgagaagaaaaggtgatacacataatatctatgaaagtattacctgtaataacaaaatcttaaaatcaactaaatatccaaaagtagaggaattgcttagaaaattaccatttatgatttatcaaatgaatggaatattacccaacatgttttaaatgcagccttgagagagatacagaaatgtgggaaaatatttgggataatggtaaggaaacacaatcctattacaacttctaa

SEQ ID NO: 18212 - DNA, 104 bp, Homo sapiens
cagcttgagcctgcattccaagctttttttttaattgggcgttgtgtcccatcctttccctttaaccctcagtatcaagcacaaaaattgatggactgtaaaca

SEQ ID NO: 18213 - DNA, 266 bp, Homo sapiens
ttcagctcttgagagcattctgctcttctttagatggctgtaaatctattggccatctgggcttcacagcttgagttaaccttgcttttccgggaacaaaatgatgtcatgtcagctccgccccttgaacatgaccgtggccccaaatttgctattcccatgcattttgtttgtttcttcacttatcctgttctctgaagatgttttgtgaccaggtttgtgttttcttaaaataaaatgcagagacatgtttgtcgacgcggccg

SEQ ID NO: 18214 - DNA, 78 bp, Homo sapiens
  misc_feature (1)...(78): n = A,T,C or G
aatgcncacaagnnatctaaaaaacatgattacctctaaaatatgtgcatatatcacagagatggtagtgcagattaa

SEQ ID NO: 18215 - DNA, 112 bp, Homo sapiens
cagcttgagcctgcattccaagctttttttttaattgggggttttctcccatcctttccctttaaccctcagtatcaagcacaaaaattgatggactgataaaagatctatc

SEQ ID NO: 18216 - DNA, 367 bp, Homo sapiens
caaacttcaatggtttctataactatatgctgagctgacataacagacttcccagagttggttatagaaaacattgaagtttggaatggtcattctcaccaatcaagaaaaagacgatcacagcaatagtcccatagcagatacttccactacacctttttggttttgtgacattggcctttgtgttattgtcagcattttcttcttcatctacagcaagtttcatctccacatgactgttatcgccatctacttgccgagccaggctgaaccgggtatatgacaatggttctccaccaaacaagttagagaatgctgatctagcttgatccatcattctgaactgccacacagaagaacactagcg

SEQ ID NO: 18217 - DNA, 335 bp, Homo sapiens
gttagtattgaaaaagggtttcctacactgacatttcaattccgtagctggacagcagtgagaatattgaacataaaatttccaagaggttgaaaacattttcaataatgtaatgtcactactgcttaaatatgaaaataaaaagacacgcaaaattttaaaagagcatgtcaaaggcattttatgatgactttttaagaaattctgcaatccaaatatggctgatttaaatgcccactgaaataaaagatgactatgagcctgcagacaactcttctttctattattgaaaccagaaatttggattgataccgaaacaaaaactcatctttgat

SEQ ID NO: 18218 - DNA, 340 bp, Homo sapiens
caaaaggataatacttgaccaaactgaagttattccagaaacacaaagctgttaactagaaaaaaaaaatccatcaatatgccatgttaacagattaaaggaaaaaaaaatcattaatcatttcactatatacacaaaaaacaacattaaaagcttaacatccatgcacaataaaaaaaactaggaattaaagggaaattacttagtctgatagaggctatgtataaaaatcctaacagcaaacatgatacttaactatgaaatactgaaagttttcccacagaaaggaaacattatgttacaggaaacattataatggtggcctaaacagcacattata

SEQ ID NO: 18219 - DNA, 355 bp, Homo sapiens
cagggttcttgctcagtgcttctccaaggtgaggagggttaaggtacacgcaagggcaggtctcaatccctggccctgtccttaccacactcccttgctccagtcctcctctgggctgtcagatccaaggttgcgctcaagtggcttgtgcccagccctaccgtggaccccacctgtgggcctccctgcaggctgctgccaggaactaggggcagcaccagaaatgaaggcaaggccaccaatgctattgatctggccttacagtggggagtcatggctcaagtactaccactaagatttcagatctcatctgtagtccccacccccaacaaggagccaagggccagagagcacg

SEQ ID NO: 18220 - DNA, 333 bp, Homo sapiens
caggttgtcccaattttttaaaaaattgtgaataatgttgctgtgaacatttacatacaagactttggacatatatatgtgtgtgtgtgtatgtgtatatatatgtggtttttttttttttttttttgggggggaaaaccgaagggggaattttgggggcccaaaaaaagtttttggttgactttttgaaaaaaagccaaaaaggtttttaaaatttttgcccaaccttatttttaacgggtctaatttaaccaattttttggaaaatgggtggcttttttaaaaatatttgggcttataaagaaagggttttgaaatattaacaattttggg

SEQ ID NO: 18221 - DNA, 379 bp, Homo sapiens
cgttcatccactcccggaactggccatagaagcagccagcccaggagagtgaggagcacgcctggagcgaggtggctggtggcagagcagctggagcgggcggtggtcctcaccctgggccacagacttccccagcacaccccagcatttccaaaggcactccacctacaaaccaggaaagcttccaactccagggtcttcttgaccctggaagctgaagggcagtgaaacccatctgattaagatgctcaacttttctgaagaaaaagctgacaccaagacctgcctaaggtcacaccatcatgagtggctgagttgggctgtgatgagccacccggctggagagcttgtgccctggttacacgattgccagtgagat

SEQ ID NO: 18222 - DNA, 348 bp, Homo sapiens
cacgattgcttcagcgcggaacttcaagaccagccggggcaacatggcaagaaactttctctacaaaaaaacaaaaaaaaaaatttttttttgaaacggggtttcactctgtcaccaggctggaaagcactggcaggatctcaactcactgcaacctctgcctcctgggcttaagtgtttctgctgcctcagcctcccaggtagctgggattgtaggcacgtgccaccacgctcagctaatttttgtacttcttagtaaagactgtgtttcaccatgttagcctacgcaacatggcaagaaactttctctacaaaaaaacaaaaaaaaattttttttttgagacgggg

SEQ ID NO: 18223 - DNA, 329 bp, Homo sapiens
aggcactccaggtatggccttggttgcacaattgatttgtccaattacattctgataaaaaggaatatagattcttatcgaacccatgaaaattaccaatattgtcctgaaaagtaaaaatatgtaaaactatttgcttctgaattctgagtaaattattaagatcaaatatcattttaagtttataaaaacataatctaaattgagaattagatatagcttaagaaagaaaaaaggcttcctcatctattcattaaattttgaacattaaaaataataccaatcatattccaaacaaccacaattaaattttatttaattcagtttag

SEQ ID NO: 18224 - DNA, 340 bp, Homo sapiens
gaactcctgggctcaagagtaggctgggattacaggctcatgccaccacacccaactcactttggagttttaagcccatgataggcagatgatgttttttcttttttttttgaaaacgaattttactttttgtcccccagcttgaaggccatggccggggcttgggttaacggaaacctttgcttccggggttaaagcattttttttcctaaccctcccgagtaattgggataaagggcacttgccccccccccttaccaaattttggttttttaagaaaaaacggggcctcactgatttcaggggacccccgcctgggcctcccaaagggctgggatta

SEQ ID NO: 18225 - DNA, 393 bp, Homo sapiens
atcaaactaatatcaaccaatacttgggcaaatctccctttcccagttcaagaaccacatccccacaaaaaacgggaatcacaagagtcccagtccacagcctattttttcccttaaagttgtcgcgctcatctctccatgcccaaagatacagagcaaacctcatggagcaaacccattttcacagctgcataacattccactggttcaacccatcccctggtcatagaactttccactacaacaaacggggctacagatatccctagacatggaaccggtatgcacgtgttccagagacagaaccgctaggccacaggagacacatgtgtaacccatggcagacggccttccagaaaggctgcccagtttttattctggattactgttcct

SEQ ID NO: 18226 - DNA, 398 bp, Homo sapiens
aaatacagttggagtgtacagggagcagtttcggttatcctggtgacaggtgggatttttagaacagcaactttactaaaacatactgggtttttaaaaattctgtacttagttttataggtgtactctaaggaaatgcaacttatgggtgttcaattttatatgagtaaggagtgtgtgtttacctgagtgatcctcctgtatcttaggattgttttaggcattaaatttccttagtgaactgaaactattttgatttatacccatctcttaacacacatgcggcaaagaggcctccttgtttttgacattttcctagaattttctgacagtcttaccattgtttgtaatttaaaatgtttgtttgaattttttttttttttgagacagtctcacgc

SEQ ID NO: 18227 - DNA, 336 bp, Homo sapiens
  misc_feature (1)...(336): n = A,T,C or G
ctcgggtagtggtgccagggcagcgccctgcactctgcccagcatccagggactggccagatcccctccctgggctccctggccttggcatcagcctgggctcccaaactaggcccttcccaattcaaggccacgatgtgtgccttcaggacaccggggacactctgggcagcgtcctccggggcttcttcaccatccgcaagcgggagccaggcgggcgcctgcccacctcctccacctgcttcaacctgctcaagctgcccaactacagcaagaagagcgtcctccgcgagaagctgcgctacgccatcagcatgaacacgggctttgaactcn

SEQ ID NO: 18228 - DNA, 366 bp, Homo sapiens
  misc_feature (1)...(366): n = A,T,C or G
cacggacttacatcctcattactattctgcctagcaaactcaaactacgaacgcactcacagtcgcatcataatcctctctcaaggacttcaaactctactcccactaatagctttttgatgacttctagcaagcctcgctaacctcaccatatcccccacggctgcattggncnggnnnaannattnacacttgttttagaaaagaatatccctcctgaggcctagggggtggctaccaactaattctattgaggtccgttgcatggggcaccgaaacatgtggtgtgtcaaaaattatctcaccagggggcagcacgcgtgcccatcacttttgcctggagcgaatacaagaggcactcccgct

SEQ ID NO: 18229 - DNA, 395 bp, Homo sapiens
cctgtctctactaaaatacaaaaaattagccaggcgtggtggtgtgcgcctgtggtcccagctgcttgggagtctgaggcaggggaatcccttgaacccaggaggcagagattgcagtgagccaagatagcgccacttcactccagcctggccacagagcaagactctgtctcaaaaaaaatattctttgcaggcctggttgctgaaactgcctgctattacctgaaaccagttttatagttgctgaaatgatctgctgcaacttgaagactaattttacccacctccatcactcaccagtcaaaacttgccagctccccagaaacttactagtgccaatgaactttctcaaagagcaatatgtaacatttctgtctttttataaaacctccaac

SEQ ID NO: 18230 - DNA, 366 bp, Homo sapiens
gcaaaaccctgtctctactaaaactacaaaaattagccacttgtggtggcgggcacctgtagtcccagctactcgagaggcaggagaattgcttgaacccgggaggaggaggttgtagtgagctgagatcgtgccactgcactccagcctgagtgacggagttagactccatctcaaaaaaaaaaaggcttatatcgggcataggacatggaatttatgaacaataaaatcctgtgcaagtcctgattgttaaaactggccttcaaggggaatgttgtttgaaaaaagacattccttttacttaatttttgttttaaaggttagcgtgcaatttttttatgttgggatataggaagaatatgattc

SEQ ID NO: 18231 - DNA, 311 bp, Homo sapiens
  misc_feature (1)...(311): n = A,T,C or G
ctatatataaagagagagagaaagagagagaactttctcattgctcaaaagataagtatcttactgtgaaagtttagtgttctgaaactggaacagtttttcattttgttgtaatgataatactaaatccctaatgtctgtattatggacaatatgaaatataagcctttctttcattaattttaaaaaaaattgtttctttattatgaaatttaacttgttactccagccttttgagtaatagtatcccatttgaatcttcttcactggaaaattaaggtatcagtcagagntcagtcagggaagcagan

SEQ ID NO: 18232 - DNA, 384 bp, Homo sapiens
tgttagacgaaacttccgattatgcctataagttatattcttttgtgcacatgacgaaactttatgttgttgcttgtatgcatataatacactgcgttcatgtatctttctctcgatacaaatcttaacccttatgactctggcttttttgatctggcaaccatagatttggaagatggcacgtttcatcttggagaaccaaacctgaaggaatatgtaccacgaagactttttctgctcacgatgaacttattgtgcaaaaagtgaaacatctgactttgatagctaaattaaaccaaaccctattgaagaattgaatatatgctacttgaacaagctaaattgatctcgtagaattatcttaataaaataatggctatgatt

SEQ ID NO: 18233 - DNA, 327 bp, Homo sapiens
acttccgattatctccctggatcttatcacagatagttatcatttctctgtcatgggtttgcaaagcctgttatcctattgagatcacaatcacttattaaatcgttcacagattgactccctcagtaagtgatactaactttactccagaatagacctaatatttatatacccttgatctccctgcttctacttctcttgtcctcatagtctgattttcacacagcagccagagggatcctttcaaaacaggtcagttaatttttttgttaatggccagatatggtttttattgtaaccactcaactctgccattgtaatgcaaaa

SEQ ID NO: 18234 - DNA, 348 bp, Homo sapiens
atttaggaaatgagtagaagttcacaagcaacccagaataggtgccagcagtttgctccagtgggccacaccacagcagcagctcaggctctgcagaatcactgtgtccagcgcttcctgagatgttctttcagctgaggaatggaaggcagcagctgctggcactcatgacaacgaaggggcagcttcaagagctcaggcatcccatctcggacagttactctaccagcctcttgtaccatctcgatcacagcttgtgattctaggaagtattctgtattgaaagaattccaatgttttttgtttttaaggcaaggagaatcaaaatcctggctgatcacatgaagg

SEQ ID NO: 18235 - DNA, 324 bp, Homo sapiens
cttttgtttctttgggatagttagttacacttgtataccatacctacatgtttttcagtctccatatatacttgttaataaggtgagcaatattcaggaatatttcagtaggcaattaatgatcataaatttattcacatttcagtaaatatttttcacatgatcaaacaggatcttttgtttctttttaatttaaacatggcaaaataagctagagaatcttagtgtgaaaacactgatactgaacattctattaaaatagaataagttcgtgtagggacatggatgaaattagaaatcatcattctcagtaaactatcggag

SEQ ID NO: 18236 - DNA, 311 bp, Homo sapiens
  misc_feature (1)...(311): n = A,T,C or G
cgcggccgcgtcgacaacgaactgtggctgcaccatctgtcttcatcttcccgccatctgatgagcagttgaaatctggaactgcctctgttgtgtgcctgctgaataacttctatcccagagaggccaaagtacagtggaaggtggataacgccctccaatcgggtaactcccaggagagtgtcacagagcaggacagcaaggacagcacctacagcctcagcagcaccctgacgctgagcaaagcagactacgagaaacacaaagtctacgcctgcgaagtcacccatcagggcctgagctcgcccgtn

SEQ ID NO: 18237 - DNA, 326 bp, Homo sapiens
  misc_feature (1)...(326): n = A,T,C or G
tttatcttggcattgagtataaatttgacccacaacccaattttccttctccaaatgtctcttctactgtatctcaacccaaaacctttcattttcaaaatgacttgcctacctttggctctttttcaaacacttaaggcttttcattcttacttctcttcttattattttttttttttttttttttttttttttttttttncccccggggaaaccttttttttttgggaaggaaaaaaaaaaaaaaggggccccccctgaaaaaaaaaaagggggggggtttaaacccaagggggggggaaaagggggttttttaaaaaaaacaa

SEQ ID NO: 18238 - DNA, 383 bp, Homo sapiens
caaacctgtgttaattacaaaacgcagtttaaataaccactacttaacttaggtacactaatgtaaagttgtcacatgcatcaatgccctgttgaaacccatccttttagcctgatccactagtgaaatggaaaagctttggttccatgataggaaggaactataagcctcagacagttcaggattaaatgtcatcatctttctggtaatgctatagggtaaaatgagagacatgaatgttaagacagctgaatcactttttaaatgaaagagacattctgaaaactgtactggtccttctgaaatgttattaaatgaaaaaattaataatcaaacttttggaaaaaaaatcaagcacctctttgttaatgcacatgcaagtc

SEQ ID NO: 18239 - DNA, 389 bp, Homo sapiens
cagcaagggtggtggtaagcagtagtcagatctggagtatatttttaggcacaagctatggggaccagaagaaaatgaaagaatgaattcaacaaagaagcccaataatggggtagggcaggtggtaaactgtctaaaagaagaaaagagagatgataaaaagaaaaaaggatagaaaaataagggaaaacagaaagtacaaaaaaaattaagacaaaagaatgaaccaaagaaagaagggggaaaaaaatgaaagaaattattagaggcggtaaggaaatagaaaggcctccacaaattgagaaaatacaaaaatattatggaaacataagacaaaatcatacaacaaacttttactcatgctttaaaaccttcctcaggctgtactc

SEQ ID NO: 18240 - DNA, 318 bp, Homo sapiens
ctattccctggcagagctttgaacttgaattgtgatagaagcattcaacattattatcagggggagtgggtagggaaagtccaaatctctgccagtcccaaatccatacagttgtcatttcattcaagagaattaaatcgtttattgattacacatgataatggatacacaagcttcattcccatctataattttatctggtaccattattcaatttagatatattgcataggatgtgccaacaatcacttttataaccattccatgattttgcttgggtaatcccttttaatggtgaacttcaggtcgacgcggccg

SEQ ID NO: 18241 - DNA, 385 bp, Homo sapiens
cccgcctcggcctcccaactatgtgttattcttaagaccaaaaacattaggaataatgtttctcagacaattatattcatgataaattccaagggtattttattcatttattaaaattatttttatttatttttattcttttattattcatgtttataggataagaaaatggggttgtttttattttttgagatgtgcatatgattacagtaatcccttaaggtttgaatctgcagagagctgaaaacaaaaatagcttcttttcatgctttaaaagagctagagtttacttcatgatatgcctagatctgaattttagaagtctataattcctcataaggggttatgtatttgaaatctctttttcatctggtgaacccaattt

SEQ ID NO: 18242 - DNA, 288 bp, Homo sapiens
  misc_feature (1)...(288): n = A,T,C or G
gatttagcgatgactgcggtgtcagtgcggtangtcgctacgagcgctacgtactttaagtcgtgtgttcgtgcgngtctacttagcgcagtctatatananacgaggaggttttttnttttgagnngcccccaggcctgaatgtcagaggagagcaaaggcctttagttattttggctcttgttgctggagcccatccactgtctgacatcatagccatgggcaagaggatattgccttggctctgtctgagtgctggattgtgaccggccataaatagcctttgca

SEQ ID NO: 18243 - DNA, 330 bp, Homo sapiens
  misc_feature (1)...(330): n = A,T,C or G
cttgcttggtacacagtgagcttttggaaaaggagtgtacagaaaagcgaagagaactgaagtttgatggtcgtttatataaggaactttcagaatcctatgcatttctgatgggtgatcgagaccaggttcaaaccatatgtgataaaggattacatgtggggcaggccaaaataacaaaccttggcagtccttgcatgggtgactatctttctaggtatgctgatttattacaagcgaatcctttggacacgggggcaatgggtgatgttgtgatttttaaaatattgaagggtaaaataaagagtatatatgaccccatgggtgtan

SEQ ID NO: 18244 - DNA, 189 bp, Homo sapiens
atggaagcctctacttcttcctgggtcaactttgatgacgaggctccagaaaacctttgcaatgctgtgtggaatttttaaatcggtgagctcgtgctcttgccctatttatttgtccagcgtacatttctgaacattgtgaacgtcgaatgggccaacaaatctaaaaattaaatgtcgacgcggccg

SEQ ID NO: 18245 - DNA, 361 bp, Homo sapiens
ttttattttaatggctgatctatgtaatcacagaggccactatgtacagacaaagtgggaggttttatttcttggcctcttcctccttggataaagacttgatgatctcctccttcttggcctggaggcgctcttcacggcgcttgcgtgcttccttggacttagacctgcgggcctcagcctggtgagccaggagcttcttgcgggccttgtttgccttcatcttgtggatgtgttccatgagaatccgctttgttttgaacacattccccttcacctttaggtacaggctgtgatacatgtggcgatcgatcttcttatattcacggtatcttctgagcagccggcgcaaaatcctctg

SEQ ID NO: 18246 - DNA, 402 bp, Homo sapiens
  misc_feature (1)...(402): n = A,T,C or G
gaatcacttgaacctgggaggcgaagtttgcactgcagcctgggtgacagtctcaaaaaacaaacaaacaaacaaaaaaactactctgttgtccttgctgcttgtgtctaacattgagtgcaaaaaagaaacagcttaatttttttttttttttgaaacaaagtctttttgtgccccccaggctaaagggcaggggcataatttgggttaatttgcaacctttgccaccggggttccagccttcctcttacctaagcctcctgagtattgggaaaaattcagcnnnntttttttttttttttttttttttttttaaaaaaaaaacttttctttgcccccccttaaaggggggtggaaatttttttgttcccccccccccccccccccgggggaaaacccccn

SEQ ID NO: 18247 - DNA, 431 bp, Homo sapiens
  misc_feature (1)...(431): n = A,T,C or G
tccgaattcgcggtcgcgtcgaccaacctcaaacagacaccatggtgcacctgactcctgaggagaagtctgccgttactgccctgtggggcaaggtgaacgtggatgaagttggtggtgaggccctgggcaggctgctggtggtctacccttggacccagaggttctttgagtcctttggggatctgtccactcctgatgctgttatgggcaaccctaaggtgaaggctcatggcaagaaagtgctcggtgcctttagtgatggcctggctcacctggacaacctcaagggcacctttgccacactgagtgagctgcactgtgacaagctgcacgtggatcctgagaacttcaggctcctgggcaacgtgctggtctgtgtgctggcccatcactttggcaaagaattcaccccaccagtgcaggctgcn

SEQ ID NO: 18248 - DNA, 156 bp, Homo sapiens
  misc_feature (1)...(156): n = A,T,C or G
ctctgatgttcttgtgaggcaaggagattgagttcactatggagaagtcagcagcaggaggcccatcccttactcagttgccgggacatccccagtctggggggaagaagatgncttgcncttatacccaggctgtatacagctaacatctggaat

SEQ ID NO: 18249 - DNA, 361 bp, Homo sapiens
ctggagtacagtggtgcgatctcggctcactgcaacctcctcctcctgggttcaagcgattctcttgcctcagcctcccaagtagctgagattacaggtgcctgctaccacacctggctaatttttgtattttagtagagacagggtttcaccatgttggtcaggctggtctcgaactcctgacctcaggtgatccacccaccttggcctcccaaagtgctggaattacaggtgtgggccactgcacccagcgcgactatgtcttctaattctttttttaggaccttaaacattgtttacttgattaaaatttaaattttatattacatttgtaataaaactagaaagcatagataagctg

SEQ ID NO: 18250 - DNA, 405 bp, Homo sapiens
tggccgtaatgtttatttccttccagcctccatattcttgaaaccagtgctttagaagaatcacattgaaaagttggtctcaagtataaacagcaaaagtaaagtaacaaatatgcacacagattcaaaatctgtgctacctgtgttgacctcatctgaaaccttcaaaaaatattcaaaggaataaaagctttctcatctctcttatgtgataagaaatgaaacctgcctttctgtgacctgcctgtggccgaagcccttttagtcacctaacccaggcggggccttcgtgccaggctgtggggcttctgctttaagcccacgttgtggggccacagacttgcagtggaagcatttttacatcaccactggctcccgctgagaccaaaagttagtctgactctt

SEQ ID NO: 18251 - DNA, 411 bp, Homo sapiens
cgacgtgcagaaatggcacctcgaaaggggaaggaaaagaaggaagaacaggtcatcagcctcggacctcacgtggctgaaggagagaatgtatttggtgtctgccatatctttgcatccttcaatgacacttttgtccatgtcactgaaccttggcgcgccacgagatgctcacacaggattggctggacatcaaggtgaacatcatgcttacctgagacccaactggacccgaccttgggcgacaagcccagagccataaatcttatatactcctaaaccccgcaaggtctctttaaccaggctgtgggcaccatgctatattcccacattgagacgtcacagactcgtcgtggaagcatctatacatcaccacatgctcaccctgagcacagaaccatctatctatat

SEQ ID NO: 18252 - DNA, 237 bp, Homo sapiens
gctgcggttcatcatggagagtggggccaaaggctgcgaggttgtggtgtctgggaaactccgaggacagagggctaaatccatgaagtttgtggatggcctgatgatccacagcggagaccctgttaactactacgttgacactgctgtgcgccacgtgttgctcaaacagggtgtgctgggcatcaaggtgaagatcatgctgccctgggacccaactggagtcgaccgcggccg

SEQ ID NO: 18253 - DNA, 413 bp, Homo sapiens
taccctttcataacagcaccacttggatatgtagaaagagtttgttgtgagatcagatgttaaacaaataaaagttattcgtgaaatgatatggaagactgggattagaaactgtggcattcaagaagccagttaagctgattctcagaattgacagagattctagagatggtgtagtgcagatggtgtagtgcagggattctcagcctcactgcacatggtaatctcataggaaaattttaacaaggacagatgcagaaattcttattaaactgtcaggactgaagtccagaggtcactatattttaaaaaggtctgcaagtgattgtaacatgcatctatggaggaaaacatcagcgtaggagaaaaagggaaagacaccaactggagtaaaggctctgtcttgagcactg

SEQ ID NO: 18254 - DNA, 404 bp, Homo sapiens
tggagagaaaccctatgatcgattcttatgtactgggcctgcactagctttcatagattctgggacctggaaggataaaactgcgtgatagttccaagaaaatcatagaatgtaggcagacacttaatatgacctttttctttatggtctttgacttatttttgacaaaaatgaaaaatggtgaattcctaatcatattttcattatttaatttactttctacttaaaaaaaaaatccttcattggaaatggtctacttttaataagccattaattatgagatttttctgtggtccccacagagctcactctttggcctaaaatacttattgggatgataatagcaactctcactggatttattctcaggcttatctccacactggaatgggagtgagtgtggg

SEQ ID NO: 18255 - DNA, 412 bp, Homo sapiens
  misc_feature (1)...(412): n = A,T,C or G
atttctttttaaaatgaactcttaactctattctttcttactggtaaatgtaagagcttttagagattctgtgagctagaattttaaaactgctttatagttccaagaatatcatataatttagtcagatacttaatatttcctttttctttatgttctttgacttatttttgacaaaaatgaaaaatggtaaattcctaatcatattttcattatttaatttactttctacttaaaaaaaaaatccttcattggaaatgttctacttttaataagccattaattatgagatttttctgtggtccccaaagagttcactctttgtcctaatatacttattgggatgttaatagtaactctcacttgatttattctcaggcttatctccacactgtantggtagtgattgtgg

SEQ ID NO: 18256 - DNA, 300 bp, Homo sapiens
  misc_feature (1)...(300): n = A,T,C or G
acagctgcaagccaggagacgagatagagctgactggcatctatcacaacaactatgatggctccctcaacactgccaatggcttccctgtctttgccactgtcatcctagccaaccacgtggccaagaaggacaacaaggttgctgtaggggaactgaccgatgaagatgtgaagatgatcactagcctctccaaggatcagcagatcggagagaagatctttgccagcattgctccttccatctatggtcatgaagacatcaagagaaggcctgctggccctgttnggaggggagccc

SEQ ID NO: 18257 - DNA, 284 bp, Homo sapiens
ggcgaaaatgtggctccttgaattccaggcatgttgttctgaggggaataaagaggagactgttgcatatcttgttgatttatactggtctgcaaggcagacatggatgctggagataagaagagagttacttgctgctcttgagaactaggtgacccttgtaccaactgaatctgaggagagctatggaacaagggggtctgtgatgattccgactgggtaggacctgggttctgaagtgaggaaactgtggactgactctgaaattgcagtcgacgcggccg

SEQ ID NO: 18258 - DNA, 250 bp, Homo sapiens
caagcttccagtgcctgcttctcattaaatagctacttaatgtctgatcacccagctgtgactataagtagagagtaaagtaactataatttaggaggtaaaaaagaaattccactcctaccccaagtacagtagtcaaacagcttagaatagacatttccctacctcaaaccttcttaggcttatccaattttcagatctagaatttttagcatctcttaactctttcaatataagacagacgcgggcg

SEQ ID NO: 18259 - DNA, 409 bp, Homo sapiens
  misc_feature (1)...(409): n = A,T,C or G
actataacccttttgaccagaaactttatgtctataacgatggttaccttctgaattatgatctttctgtcttgcagaagccccagtaagctgtttaggagttagggtgaaagagaaaatgtttgttgaaaaaatagtcttctccacttacttagatatctgcaggggtgtctaaaagtgtgttcattttgcagcaatgtttaggtgcatagttctaccacactagagatctaggacatttgtcttgatttggtgagttctcttgggaatcatctgcctcttcaggcgcattttgcaataaagtctgtctagggtgggattgtcagaggtctaggggcactgtgggcctagtgaagcctactgtgaggaggcttcactagaagccttaaattangaattaaggaacttn

SEQ ID NO: 18260 - DNA, 441 bp, Homo sapiens
cgaagatccgttttcggttcgagtcacaaaaagcccaggctctgtgataagagatggctgggctcaaaacctgcctcatggactcacggaaaaagcccatgttctgtgatcagagatggctgggctcaaaacctgaccgaacactcacggaaaaagcccaggttctgtgatcagagatggctgggctcaaaacctgaccgaacactcacggaaaaagcccaggttctgtgatcagagatggctgggctcaaaacctgaccgaacactcacggaaaaagcccaggttctgtgatcagagatggctgggctcaaaacctgaccgaacactcacggaaaaagcccaggttctgtgatcagagatggctgggctcaaaacccgaccgaacactcatcggaaaaagccaggttctgtgatcaaagatgggtgggctcaaaaactgg

SEQ ID NO: 18261 - DNA, 362 bp, Homo sapiens
caaattcccttttcaccttgtcaggaaaataacttagactctattattcatgggtggatttatccttttgccttctggtatacttccttacttttaaggataaatcataaagtcagctgctcaaaaagaaatcaatagttgaattaccgagtatatgggggttccatgagttatcatgaattttagcgcatgcattattaaattgtaaaactccaaggagatgttgtacctcttttgcttgccaaagcacagaatttgaattatcaacgaagaaaaaaaaaaaagccggccaagctttaaattatgtgaccataatgtactgtttttactaagcctcatggggtaaaaaacaaagtccccac

SEQ ID NO: 18262 - DNA, 398 bp, Homo sapiens
tgcaggatcaacagcagctcatactcctattttaaaataatttggtcgtggcctcccttcagttttaatgtggcactggtaaatctacctggttctggcatgcttcactttgatttcctgctatcctctactgcttgcctctaaatcaaggtaaagagcagagcaggtatgtattaatgtcacattgtcttgattattttaaatacttaaaatatacatgttaaaccttggtattagtttcacaggcagtttacttttcagtacataatttaacaggagtgacttggtgggagtggggctttaaactgaaaattggaacaacagcatgatgtggagaaaagttgtgcagcattaagaagtacatgcaaaaattaagtaaccaagttttgtctacatag

SEQ ID NO: 18263 - DNA, 365 bp, Homo sapiens
ctctgtctttaaaactatgcctacaaacataattaaatattcataatctcattcagttgcaactctcaaatacatggaacatacaagctctttcaattataagtgactagacagtaactccatatgctaaacagagggaagctacagcccaagcttactatgtgacagtcaagaattttaacatgaggcagttctctgatgggcaaatttctctggttctaaagggaagatatactagacaggcggtgcatggcactgatatttacagatacttttatgtcaattacataaccactttttctagaaatgacattgataaacatctataactttgaggtatgtttctataaatgtcgacgcggcca

SEQ ID NO: 18264 - DNA, 365 bp, Homo sapiens
cttctccacaatccaggcactcaaggccctatggcctcactgctctgccatcctcagagtgtagcccttgcagtggctggagttccagcctcaagttctcatttgctggggcaggatcaaagaaaagatgatgaaggaagttcaaaatgcaccttcggtctcagaaactgctatgcgacacttctgcttacatcttattggccagatgtagttatcaagccatattcagttgcaggagaggttggaaccatcagctttattctacatgattctataccaggtaaaatttgggggtgtgattatgctgcagagacctgagaataagaatgctgttgcagaatttttgctccttagttcagctaaag

SEQ ID NO: 18265 - DNA, 407 bp, Homo sapiens
  misc_feature (1)...(407): n = A,T,C or G
aaaaaattttatttaatatttacatttatttttaaaataaaaattagaggaaagcccatgaactcattttccatgaacataatataatagtactcacctatctcctctacccaacttgtgttttagatgagtccttttggatctttttccccataatggcctctctccttttgctttacagngcaatcagggcagaataacagatatgttgagtagctaatttatatttctgaagatctccatagaactcttaagttctaagtcttcatagtctttgcaccttgccaagtttgctttcctttgggaattctgtcataaccacaaggttattccccagacatgcagtttggggaaattaacccggcagtagtaaacagactggattagaaaaggtggcagtcgtaatn

SEQ ID NO: 18266 - DNA, 408 bp, Homo sapiens
cattcatctaatacatatttaatatctacttcaagattaaaatgaactttgaattctaggtcgaggagtttagataggatatgacaagtatgtaataaacacttcaggtacacagataacatgataaaaactgtaaactgtatgtgaatgtgattatttcagtaactacacagaagatgacctagagtgaagaggaacttatgagtgatacacaaaagcagagatggcctgttacaaagtaggataaaatatgacctatgcaggtaagtctttcttctaatattttctctgctggcaagtcacaatttctgaaatccctgccatagaagtcactcttttggtttaaggcaatgtctttcaaaagcttttgtttgcatgtaagaatatgctactgaatgatggtaacat

SEQ ID NO: 18267 - DNA, 356 bp, Homo sapiens
ctaaaagttacggcaacaatggcacaaaggtagggaaaaggagatacaaggatacataaaatggtatattatttgaggatagactaataatttaaagtcatatattataaaacctagagcaacctctaattaaaagaactatagctaataagccaataaagaagataaacacaaccatcttaataatcacaataaatgtaaatggactaaatacactaactaaaagcagaggtggtcagattagatttttaaaaaccaagatccaactatgatttctaaaaaaaaaaccttgtaaatataaagacacaaatacattaaaaataaaaggatagaaaaacatatacgatgctaacatg

SEQ ID NO: 18268 - DNA, 247 bp, Homo sapiens
ttttattatagcttctttttatgacagacttttaggggactgtaccagcgctatactggagatatttttttaaacgaacttcacatatttttgtattctttcgcactgtctgctatatattaaagaatctcactgctaaatgctggaaggaaaaaaggaaacaaaagaaattcagaacttcccagaaatgtacagcttttacatttaaaaacggttctgaaatatacatacaaggtcgacgcggccg

SEQ ID NO: 18269 - DNA, 370 bp, Homo sapiens
  misc_feature (1)...(370): n = A,T,C or G
cacaggaattcctcctgatggccgagtctttgttctcctcggcccctcccctgttggacccacccacagtacctggtcctgacatctgggacagatccacatgcccttgggaattgttttcagaggggggtctaagcagtccaaatgatatacacgggaacatgtgtcgcacatcagtaactggccactttttctgcaaacgctgcaaaaatcctcatgaatatcaccctataaagttgagaggaaaggtaagaaaaaggacaaaaaaggtaaaattttaatgttaacatgcacattctagatgcatataaatgttttaggacaatcagctgcctcgttccaggagtactcaagagaagcaggaatcacn

SEQ ID NO: 18270 - DNA, 361 bp, Homo sapiens
  misc_feature (1)...(361): n = A,T,C or G
tacaaatccttcttaaggattttctattttgacatgcaagaggagcaggcattccaggtatttgaatactgagagattcaaattatcagcaaggttctttccagttccacgtttgttgtgttatcagtgtaaaattatttgaatagctttccactgatgagttattagctgaaaagtgtttattgtcatggttgaaagaaaataataatgaaagaagaaacgattacctttagtgataaagttggggccggatgggacgaagcagtgcaatttttttctttataattattcccctatttgaaaaatcaacttgtatatgaggcagcaaacaccttgcagagcagcattcccttttagttcn

SEQ ID NO: 18271 - DNA, 341 bp, Homo sapiens
cttcccaagtgcaccagatttgactgagcaactacaatgtgcaaatcactgtcctcaaagtgtgagatgcattatgacttattttgttagggcacttcaaaactgcttagcccctcttttggtttttgttctacaaaatcaattatatggaaagatgaagtcaccatccatctctggagtaatgagaagtggtcagtttcttagtattgaaggttatcaactagtcttaattacaaaagaaaagccaaagctccagggaaaagcaaaaatgtctaaggtcagcagctactgtggatttacatttcacagcttcgaaaagaagtgttcaagttcagaaggtc

SEQ ID NO: 18272 - DNA, 340 bp, Homo sapiens
  misc_feature (1)...(340): n = A,T,C or G
gtctgaactagggttgtgtttggaggcataacacagtggaagtacaaagaaatgagaaaactgagggtacaaagcaagatagcagatgaattagcagatgatgaggtccagagtggatcataaagaaaatcaaggaaagggctactaaaaaacagagaaaagacagattccactaacttttataggaaacagagtagtaaactgagggaactagaaggtgaaattgtgatcttaaaaaatggaaagcattgccaggcatggtgtttcatgcctggcatcccancactttgggaggccgtactcggggagtagacgactggttnttccaataccagatttg

SEQ ID NO: 18273 - DNA, 214 bp, Homo sapiens
tccgtataaataatggaagagtgtaaactatctacagcagtttggcatgtgcagaacacctggatatcccattcctcttaatgttcctttttagctctttttcttcataaaatcctcaaaactgctgcatggataacatgctgacataggcttaacagaaatacttttgtaagcagctgtttaaaacattatcaacttgaagtcgacgcggccg

SEQ ID NO: 18274 - DNA, 409 bp, Homo sapiens
  misc_feature (1)...(409): n = A,T,C or G
cttgaaactaagaagaaagaattagaacatgtgaatttaagtgtgaaaagcaaagaggaggagttaaaggcattggaagataggcttgagtcagaaagtgctgcaaaattagcagagttgaagagaaaagctgaacaaaaaattgctgccattaagaagcagttgttatctcaaatggaagagaaagaagaacagtataaaaaaggtacagaaagccatttgagtgagctaaatacaaaattgcaggaaagagaaagggaagttcacatcttggaagaaaaacttaagtcagtggaaagttcacagtcagaaacattaattgtacccagatcagcaaaaaatgtggcagcatatactgaacaagaagaagcagattcccaaggctgtgtgcagaagacatatgaagaan

SEQ ID NO: 18275 - DNA, 383 bp, Homo sapiens
  misc_feature (1)...(383): n = A,T,C or G
ctttgatccgcccctgtctgccctatcccttatttcacgtgttgcttctgtgctgggccctttggtcaatgtcaatttctattttcctatctgtctctggtgccatttacttaactttttcactgaccccctcaacttacctgctgatgggtctggctttttgtctcactctttttatgttggtctctgattcttgtggcttctgttcatgtgtgcgcatctatcaatccctgtacccctcttgcctgcatctctgtttcttttcctgcatcgtctccctctttttttttgagacagagtctcgttctgtcacccaggctggagtgcagtggcatgatctcggctcactgcaacctcagccacccagattcaagagattctcn

SEQ ID NO: 18276 - DNA, 376 bp, Homo sapiens
cttggacatttatcatttctatgtgttgggaacattcaaattattctcttctagcttctttgaaatatatattattgttaactatagtcaccctactatgctagaaaacattagaacttactccttttatttaattgtaagtttgtacccattaaactacctctcttcatccacccccacatgcaacattcccagcctctgataccattcttttctttacctttatgagatcaactttgttgtttttgtttttttgagacggagtttttgctcttgtttcccaggctggagtgtgatggcacgaaaaaaaaaaaaaaaaaaaaaattaatggtgtccggttgtccggttgtggtggtgcctccaacccgcccgcaa

SEQ ID NO: 18277 - DNA, 395 bp, Homo sapiens
gtttttaaagtatttattgactagtttttatgatattggtagacctatagttctcaaagataatttttaaaaaatcaaaataatccaattacagtaaggcaaaaatttatattatctgagcattaaaaataattaccagaacattaaaaataataatcagaccacctgtagtacatagtcacataaggtaatcagtttattggtcatatttgtcactaatgccatgtcacaggtattgttctgaataatatatttctcctcaatacaatcttagtattttaattacctacaatcctcttcatagttgcattttatagctaaccaatttgaaactacttcaattactcttacctatcaattgtattttttaactttttattatggagaattccaaa

SEQ ID NO: 18278 - DNA, 399 bp, Homo sapiens
gtcaaatatcatctcataaacattttatattggtagactaagtttaatatatgttgatattttcactatatgtgtctatttactatctttaaaactaaaatttcaggctttggtaaatgcatttttaaacaagatcacacattttaaaacttaggagtagccatcaagtaaatcagtgcagtctaggtgaagtaactttaaagtttgttctggctgggcatgatggctcagcctctaatcccagcattttgagtggccaagatgggcagattgcttgagcccacgagttcaagaccagcctgggcaacatagcgagattccatctctacttatttaaaaaatttaaaaaataagaacaacaaataaagtttgttttgagcaggagtaaggatgctctaa

SEQ ID NO: 18279 - DNA, 367 bp, Homo sapiens
cacacttcctttattaaacttccagactcattgtggaactgccataactaatcctccttcccaaccctacactttctattaatcacactccctcccatgcagtttcaaacatgtcttccaactgtcttaatattatttttacaaatcaaatatttgtcttttaaataaatgtatagaattccttttgctctgtgaaggactcatttactctcattgtccaaattagtatcaatctcattatggttatggcatacttatgtcccttggttcatcagaaagataaatagatatatgcattttagaaagaatagatttaggtggatgtgtataaatggtatatttacatttactatttggtcgacgcggc

SEQ ID NO: 18280 - DNA, 344 bp, Homo sapiens
  misc_feature (1)...(344): n = A,T,C or G
cttgagtgaggttttcgagtaagtcatttggactgcttgatgcactgaaaccttctgtttcagactttaagtctacccctgaaaagagaaaagcgaaagattacttgtattccctaaacactaaatatttcaaacttcattaatcatttagaagatctagtggcaaaaatagtaattcagaggatgcttacaaaaccttttccaatcttttcctataacacaacttttgacaatgatatggaaattttgaagattaatgagttcccttaaaagcaattttcatcttcaatagaactacaaattttacaaataagaatttttacagacatatgatagagatttan

SEQ ID NO: 18281 - DNA, 367 bp, Homo sapiens
aaatctacttattatgctgaaaatccttgttagctggaaagactaagagaattccccaaggtgcctaatatataaacttggagtagttttcctacttcaacttttatgcggcttattatttgcagtcaatttatatttggtcaatattagttaattcatttatcatctctgtaagattggttaatggaagcagattaaaatccaacagtggtaattttctggaagtcctccagagagactacaaaaagccaaaagtcaactttaatttttgagtacttttcctatttaaggttactgagataaattgtctttgctagaaaaaaataaacagtattgccaattaaaaactccatttactatagaaata

SEQ ID NO: 18282 - DNA, 312 bp, Homo sapiens
agaggaagcacctttctgcatgacaatgggtcttaaaatccacctggtttcggaagacgcccgacttccaggagacaactgatcggtgctttataccttccacggagaagcacagcccagtttcgttccgatcgttggcttcccataggtttttaaatgggaagtataatgagcctggatacattgccttcatcgggatgctgatctggggattcatgttcagcctcttagatatgctggtccctgtcccactcttttctgaagcgctggggctcctcttcctgcttacagcgtccttggtcgacacggccg

SEQ ID NO: 18283 - DNA, 144 bp, Homo sapiens
atttaatatacgttccttttctttggactagccatagacagacagacattaaataaatacatgagtatataattacaaattgtttaagtgctatgaaagagagcagagggtattacaagggagaataataggtcgacgcggccg

SEQ ID NO: 18284 - DNA, 341 bp, Homo sapiens
ctcactgaaccagccctacatttccagatgcagtactgctttttggcatcctaagcagagttgtttatataccctagattctagagcaagggggtttgtggagcaaattccgtacagcatggacaaagctgactactttgcctttctgactcagttgcaggtagagctggtaaaccctggccaggttgtactttactgcacaaggataggaaccagtagtagtgaaagtgtaattttacgtctttttaaaggacactctttcattttctttccctctttcagcgacatggtatgcttaagcaacaggatctaagtattgccatggtggtgacatcacgcga

SEQ ID NO: 18285 - DNA, 340 bp, Homo sapiens
gtccctctgcactttggatcttaagataacattagatttcatagtatccatgaaataacttagacctggtcttggaaatacgtttcaccatccaggtacccatcacatgtgttcgcaggtgaggctttcttagcagcactatgtaaggagacatagtaaagaaatatttattgaatactgaatattgattgagcctatgtcctgtgctaggtgttctaaatatagaaccttatctcatcccataactctttaattgtcattctttttgcttgtttgcttttgggacagggtctcgctctgtctccagagtgacacactgtactccaggctggagtgcagg

SEQ ID NO: 18286 - DNA, 328 bp, Homo sapiens
ctttggtggggcttgaaaatacataggtctaaaaaatattttaaattttagtggtttttttttgaggcggagtcttgctctcccatccgggctggagtgcagaggtgtgatctttgctcactgcgacctccagctcctgggttcaagcgattctcatgtctcagcctcccgagtagctggtagctgggactgaaggtgcacatcaccacgcccggctgatttttttttttttttttttttttttggagagggggtcccttttccccccgggggggggggggggaaaaaaattttaacttttgtgcccctcccttccggggttaagggg

SEQ ID NO: 18287 - DNA, 339 bp, Homo sapiens
caaaaattagctgggtgtggtggcacgcacctgcagtcccagccactcaggaggctgaggcaggagagtcgcttgaacccgggaggcagaggttgcagtgagccgagatcacgccactacactccagcctggcgacagagcgagacttcgtcccaaagaaagaaaaaaaaatctattgtgtagactatcctaactttataatcttattctatacctaatgctcaattgtttagagttgtacgtacgtgtaaacgttagcaaatgagaggtggggagagagagagagcgaaagtcttagagggatacatggcctcaatttaataattattctacattgtt

SEQ ID NO: 18288 - DNA, 398 bp, Homo sapiens
  misc_feature (1)...(398): n = A,T,C or G
gcctggctgattttttgtgaggacaggtcttgccatgttgcccaggttggttttgacctcctggactcaagtgatccacatacttaggcctcgcaagatgctgggattataggcatgagccatcacaccaggcctgaggctgctgtgatacagagttttagctgttgaagaaatagccaggtaaaaatggtccagaggcctctgaaaatggggagatctagaaccctttgggtgtgaatttgggagcctttcctacagacatgataattaaggaattattgaggtatagaagaaaagagtataagcacaggatctagagaatgccagagataaaagacagccgcagagaagaccaagaggccgaagaaaatgacaatagtgcaatgctatgctattcn

SEQ ID NO: 18289 - DNA, 407 bp, Homo sapiens
gttttctccacatggaaacttattggcgtttgcctcgcgagacagaaccgtgagactctggattcctgataagagaggaaaattctcataatttaaagctcatacagctccagttcgaagtggagacttttcacctgatggccagtttctagctacagcttctgaagacaaatccataatagtatggagcatgtatcgccagcgcttcctgtattccttggatcgacatacacactgtgtacgctgtgcccaattgtacccgatggaagactaattgtgtcatgtagtgaggataaaactattaaaatttgggataccacaaataagcaatgtgttaataacttctcagattccgttggatttgcaaattttgtggactttaaccctagtggacatgcatagcttca

SEQ ID NO: 18290 - DNA, 399 bp, Homo sapiens
  misc_feature (1)...(399): n = A,T,C or G
ttagcattgcccctaaactggcagctgtgaattaaaatttggtttggaaaagaattgctcatgaggtctgagttgcacacacactggcttcaacttttgttggcttgtttcaaaagagcacagaagctttttaagaaaagaagaaaaaaaaagcggggagagggggtttgtacaaagccagctctttgcttatcaaaccagtatgaaaaataaaatgaaagaacacatatgcaaagatgtatttccagttttcactccagcagtaggcttttggaagggcacaacccattgaatctaagcttccctaagcatttatattatataacagagccngaaatgagacaagtgtccctacagtcgccaggcatcctgtgtccaaaccccattcccaggtatccc

SEQ ID NO: 18291 - DNA, 380 bp, Homo sapiens
  misc_feature (1)...(380): n = A,T,C or G
cttaggggctctggggtcggtgacagaagttactctgtgtgtaactttctgtctgtgtttaaatgaacatcataaatatctttgaaagaaagtagaaggcaacaagaaattttgtaaggtctatgtaagaatagaattaagttccctaatcttactctagcaaatagtaaggatttttgccgatgtaaccttccagcttttctttttgcagcagctgctagagccattatcctctctctgccaggcttcctactcatgctagttgttaattgccagggtctacaacagtggggcccacaggctttatcctgcctcgcggtgacctaacattntgtcactctgctatttaanttttaaaagtgtctccagctgggtgcgag

SEQ ID NO: 18292 - DNA, 371 bp, Homo sapiens
  misc_feature (1)...(371): n = A,T,C or G
ttttttttttaagacgaatcctgattctttaggcccggcataatatcgcccagtttagtagttggacttacggaacagaggaacctttaatagaaaatggacagccctaaagcgagcttaatgatacttgtgggccagggcattagccacaccagccaccactttgtgataggcagccagaactggtggggtgaattctttgccaaagggatgggccatgtgagccaggtcatcactaaaggcaccgagcactttcttgccatgagccttcaccttagggttgcccataacagcatttggagtggacagatacccaaaggactcaaagaacctctgaggccaagggtagaccaccagcagcctgctcaggn

SEQ ID NO: 18293 - DNA, 357 bp, Homo sapiens
catactcatagagaacccaccatggtgctgactcctgccgacaagaccaacgtcaaggccgaccttaccccatggcctccatgactttttcacataaaaaaaaaaccataaaaaaaagaccaattaattaggaacctggcgcaagtctgaccttgtttgcacataatgaaaccagaatcccccccacggtgacttaacttggtagaggggcacaaaaacatttactttgttataattataacattgctttttttaaaggtaactaaccctagatcttacaagatggcgcagaggaacctctgccttctcttattttctaaacacaactttataccctgcaattttttctggaggcag

SEQ ID NO: 18294 - DNA, 354 bp, Homo sapiens
atttttttttaaattaccatgtagcttattttacttacttacttatttgtcttgcttattgactgtcccccctccttcccactagaacataagctccctgaagataaggatggaaatgtgctttatccattaatgtttctccagtacatcagtaaatatttgttgaacaaatgaataaaatggaggaagctcttgctttggggtttttccgactgttggaaaaatattctcaccactggagacggagaattctcctggcccagcaccaagcccgagcttttagctcattcaagagcacttcttcagtttggacccttattcccataggagaggagacattccgtcgacgcggcc

SEQ ID NO: 18295 - DNA, 414 bp, Homo sapiens
ctatatcttactcaaagcctgctatatacatggatttttcaactatactgggtttttctttttttttttttttggaaaaaccgctccattttgtgcccaaggtaacgggggaggggggaaacacgggttaatgggagcgggacctttcgggaaaaaaaatttttttcactttacccccccagccagggggaccaaaaggggggccccacagggccgaaaaaattttttttttttttttgaagagaaaaagggggtcccctgtggtacccaaggtgggtttaaaactccgggcttaaggggacccttttgcctaatcccccaaaggggggggaaaaacgcggaggacccccggccccaacccatatccatgttaaacccacaccccgggttaaacaggtaggagaataacgccat

SEQ ID NO: 18296 - DNA, 82 bp, Homo sapiens
  misc_feature (1)...(82): n = A,T,C or G
attccaaaagcagagaanagtccactgatgagtgaattccagacacagatcaggtctaaccctgagctggcgggtatctttg

SEQ ID NO: 18297 - DNA, 355 bp, Homo sapiens
ctcggtgacccacagcgctcagtgcccagttcagcgacaggcagccaggaaagctgagccatggagaggccagcaagccaaagggatttgctgccatgctgtgacatggaaggcagggtgcactcaccactgtattgatgacgttcttaagtctgaaggacttaatgcagattctggatgtgcctcctcatcaccacacctgttcaagggggaaactgggacccaccccaagagtcagctctatagaagtttttcctgacaatactctgtactcctggaggtagactgtgtttttctcctgtactctcctctaacacagaacttgcgtgttactatatgcaacttggttatctgc

SEQ ID NO: 18298 - DNA, 341 bp, Homo sapiens
taaatattaaccatatgcctagtgtctgaaactaaaaacttggacctcatcctcaattattttctcctttcaactctgttgaccctctgtctggtcttcctctagaaggttctaccgcagaaattgatgtgtgctccctgccctcgacactgcccaagcccgggcctgcacatactcactggactgttccagatttgacagctgccagtcttcctgcccctttcacactgaagctgaagttcattacctgaaggacgcctcatcatttcattccttggctccaaaccttctgctgcctctaagataaaagctcaacttcttaacagtgtacagtgtgcaac

SEQ ID NO: 18299 - DNA, 328 bp, Homo sapiens
tttatatacatgtcttatcttctccatcaaattgtaagcaaatgaaagacagaaacctgtttatttagattcagcacctgcatatgggagcatatggtgaagacaaagctacagaatcaagttgtacaaaaccaagtacatagtaggcactcaagtgtttgctgaatgatagagtaaaaatctgcttagtgactgagggaataaaccaggatttgctgtgcatataaaacattaggccgggcacagtggctcacgcctgtaatcccagcactttgggagcccaaagcaggcagatcacctgaggtcggaagtgcgagaccagcctggc

SEQ ID NO: 18300 - DNA, 336 bp, Homo sapiens
cgcctgcctcggcctcccaaagtgctaggattacaggtgtgggccactgcgcccggcccactacaactagtttttagaacacttccatcacccccaaaaggtttcctgtgactatatgtagtcagtcccactctcactcccagtggaggaagggtggagaattggatgctcatatttcctttggagcagcaataatgaacagatttggggttattgtacttccatttgttagtgaacatgcaacatcagttcctcctgtggctctgtttgtacaagtagcctcatctgtgggcttgcatttcttcgaaaacaaagacctttttatttagttttttc

SEQ ID NO: 18301 - DNA, 337 bp, Homo sapiens
cttgagcccaggaggtggacactggggtaagccaagatcatgccattgcactccagcctggcatgagagagggtgacagagccagaccctgtctcaaaaaataaaagataaaaactttaaaaagctaaaggagtctcttagaagcctcatttcctttcaaccctctgagatcttgcttcaaggtagggctgttgcactttaaaacccacctctgagacccatgtccttcttgggatgatggaacttatccaaatgaggagagagcccccagcctgtcaggcctgctgtagcaaaatcatgccccgcaatcttgtctgaataaacagcagtcaagacg

SEQ ID NO: 18302 - DNA, 306 bp, Homo sapiens
acatgataaaatggagacttgtttcaaagcggaaggtagatgaaccgcagatactcttacaagactggtattcggtcctctactctgttaaagccagagagaggatgccggccaagtcaagtgaccaaagctaaaggggaaggaagggctggctggacttagcagtgaccacagacagagttgaagccttcacggttggcgttggccttgttcactgctgtgtgccaagctgctgacagcatctggctatcgcaggttcgtaataagtgcttgctgagtgaatgaaagaatatgtcgacgcggccg

SEQ ID NO: 18303 - DNA, 306 bp, Homo sapiens
acatgagaaaatggagacttgtttcagatcgtaaggtagttggaccgcagctactcttccaagactggtattcgttcctctactctgttaaagccagagagaggatgcaggccaagtcaagtgaccaaagctaaaggggaaggaagggctggctggacttagcagtgaccacagacagagttgaagccttcacggttggcgttggccttgttcactgctgtgtgccaagctgctgacagcatctggctatcgcaggttcgtaataagtgtttgctgagtgaatgaaagaatatgtcgacgcggccg

SEQ ID NO: 18304 - DNA, 334 bp, Homo sapiens
aaaacagaggaaaaaagtagacaatcctaacccttaacagtctaaatggagactaataatattgctagtagagtagaagttaaaaacttggtatagtttaaattcaggttgtatctcctagccttaggaaggtttcttaacttctctgtgccttatattcctcatctgtaaaactgttataatataagtagagtctgttctgctataactttttttgaaaatgtggatttgtcctaatgcagttaatatactctggaaaaatttgagcataacatgaattttttgtttgtttatgtatgatttttgtcagcaaaacaaaatgtacccagctgaa

SEQ ID NO: 18305 - DNA, 354 bp, Homo sapiens
  misc_feature (1)...(354): n = A,T,C or G
ctttcagcagtggggggtagttttccttgtagaggtgaactcctttgttaggtatattcctaagtattttattttttttttggacctattgaaaaaaggggtggaatttttgatttgattctctgttgggccactgtgggggtataaaaaagctactgatttgggtacatgaatcttgtatccaaaaactttgctgaataatcagttctaggagctttctggaggagtccttagggttttcaagataaacaatcatattgttagcaaacagggacagtctgacttcctctttaccgatggggaggccctttatttctttctcttgtctgactgctctggctcggacttccagan

SEQ ID NO: 18306 - DNA, 376 bp, Homo sapiens
cttgaaccgggacctgggaggcggaggttgcagtgagctgagatcgtgccactgcactccagcctgggctacagagcgagtctccttctcaaaaaaaaaaaaggaaaaaaaaaaaaaaaaaaaaaaaggggggccggggccgaaattccaaaatttaaaaggggaaaatcggaaaaacccccgagggttcttttaaggggggctggggccccaataaaattttttttttttaaaacagggttggcctttttttaaggaaaaaaaccccctaaaagttaaatttgggcccgggacccctggaattaaaaaattttttaaaggaaaaaaaaaaaggccccttttttttttgggccaaaattttttaagaaaaaaaaag

SEQ ID NO: 18307 - DNA, 648 bp, Homo sapiens
  misc_feature (1)...(648): n = A,T,C or G
cttgaaccgggacctgggaggcggaggttgcagtgagctgagatcgtgccactgcactccagcctgggctacagagcgagtctccttctcaaaaaaaaaaaaggaaaaaaaaaaaaaaaaaaaaaagggggggccgggccgggaattccaaattttaaaaggggaaaatcggaaaaacccccggggggccttttaaggggggctggggcccccttaaaattttttttttttaaacccgggtgggcctttttttaggaaaaaaacccccctaaaggtaaaatttgggcccgggacccctgggtttaaaaaattttttaaaaaacaaaaaaaaaggccccttttttttttggacccaaattttttgggaaaaatttttaaggggggttttttaaaacctttgggtttttttcccagagggtgggnnnnnnnnnnnnnnnnnnnnnnntnnnnnnntntttttgaanataagggaaggggggttttttttttgacccttttttttaaaaaacntggttttttttttaaaaatattttctctcgccgggggggggggnnnnacagggaagcctttgaaataaaaaagactggttgggagacctttctccagaaagaaaccctcactccagatgcctctcttttatttcaccg

SEQ ID NO: 18308 - DNA, 683 bp, Homo sapiens
  misc_feature (1)...(683): n = A,T,C or G
caagccctgagctctgtgatcaagctatagccttttctgatcctttgtcatacttcacagatttatcatttagtgctgcattgaaagaggaacaaagattggatggcatgctattggatgacacaatctctccatttggaacagatcctctgctatctgccacttcccctgcagtttccaaagaaagcagtaggagaagtagctttagctcagatgatggtgatgaattataagaaataaacagacccaattcatcaactggaaagcaattctatgctggtgctatgcaattatgctctgtgtttcatatgttgctttggcttattttttttcttaaaggaatgtgttgttcatganaaactgatagaagcaacagaagaattcgcaggaagaanaatcatagtggtnatgaattattgagggccnnnnnnnnnnnnnnnnnnnnnnnnnnngaanannnnanngtgccccgggccgggattcccaaattttaaatgggaaaatcgggaaaaccccgggggttcttttaggggggctggggccacattaaattttttttttaaaacgggggcgctttttttggggaacacccccccaaagaaaaattggcccggcccccgggttaaaaaatttaaaggccaaaaaaggcccctttttttgccgcaaatttttaggaaaattaa

SEQ ID NO: 18309 - DNA, 261 bp, Homo sapiens
aacgcacccatgttaaagagcatgaaaaataaaaaccaaggcccaagtggtcgccagaggaaaaggacgtgtaatgggactcggaatcatgtttcaaaagcgaagataattttctaagttgaacagaactttgtccttttttctttcaggttatctgagttcattggagtgggtgcttgtgcatatatgctaggtatcttttgccatctttctctttagatcaggggaaatgtttaagctaaataaatgtcgacgcggccg

SEQ ID NO: 18310 - DNA, 355 bp, Homo sapiens
aatctacaaactcagggccttaaaaagaaaacaccttgggctttctatcacaaaaagcccatggtgaaaaagaataaaattaagtctatacaagttcttgacagtaattgagttgcctactaaaacgagaactaccgtcatcagaagaatattctagaatccagaatatacaacacattatctataatgtccagtgttcaattaaaaaaagaagacatacaaagatacaggaaactgtaatcttaatgaagaaaaagaaactatagacggaacctgagatgttggatgttgttgatcttagcaaacagactttaaagcaccttaaacactgaattagtgaaaaatgtggtttaaa

SEQ ID NO: 18311 - DNA, 345 bp, Homo sapiens
cttttctaagctttctgtgttacccccggttccgctgtcttttctgtctacagtttgcgatccccgcgtccaggatggagcagctgaacgaactggagctgctgatggagaagagtttttgggaggaggcggagctgccggcggagctatttcagaagaaagtggtagcttcctttccaagaacagttctgagcacaggaatggataaccggtacctggtgttggcagtcaatactgtacagaacaaagagggaaactgtgaaaagcgcctggtcatcactgcttcacagtcactagaaaataaagaactatgcatccttatgaatgactggtgtctgttccagt

SEQ ID NO: 18312 - DNA, 352 bp, Homo sapiens
cttgggacttactggccttccaaaaattaaagaggagaactgataatactgattattcattaattggaggaaggaacattagtattgaaatgccgttaacattttaaaaaataataattattatcatagccttgccctgaaaccctgattattgttagagagttatttccacgaagtgtttgtcagtttgttggacatttgagaccccaggaaatcccctttctcgtaacgttctccgcttggatctgatctcaacagggtgtcgtaggcattctttagcacaattcttaattggagaccaagaaccctgggcctttataggtggtctagcaggagagttccaggtatcaag

SEQ ID NO: 18313 - DNA, 298 bp, Homo sapiens
attagaagtttggaagagagatacaattctaatgatcttttcaaaagtatgtgcctgattttaatttgtaagggttattctcagatttttatattttattttattttattttattttattttattttttgagatggagtcttctgtcacccaggctggagtgcagtggctgtgttcatggctcactgcagccttgacttcctgggtttaagtgatcctcagcctcccgagtagctgggatacaggcagttgcgtgcaaccacacccagctaattttttgtattttgtcgacgcggccg

SEQ ID NO: 18314 - DNA, 364 bp, Homo sapiens
ccattctcccttatttcattaaagcacttcaggctctgcttcatggaaaatgtgaaggctgtcaggtggcaattcccttaacactttcctttctgtaaatgtatttttttttttggaaacggagtctatgtctatcacccaggccggagtgcagtggcacaatctctgctcactataacctccgcctcccggactcaagagattctcctcccttacctggagtacaggggcgccatctaagctcactgcaacctccgcctcccgggttcaagcatttcttctgcctctgcctcccgagtagctgggactacaggtgcatgccaccatgcccggctagtttttgtatttttagtaaaaatggggg

SEQ ID NO: 18315 - DNA, 672 bp, Homo sapiens
  misc_feature (1)...(672): n = A,T,C or G
gaagatgctatgagaatggcacagctggctctagacgtttcaccagaaaacgacaacagttgtattttggagtcattatctagggaagaatgttttcacattgtttgatattttatgataaaggttctttctagcatcttctctatggtccttgcctccttcaccattcaactctaaaccatgtgctgtataagttttaccaaggaagtctcagtgttgtctaaggaggcaagccaatccttggaaaatgaaaaactggtacattcataccaagatggaagacatgagccagtttacagaaagcaagtcaatgacaatctcccagttagtcaaagccttcaaaggctctgtgtcttccactctactatgatgtcaactttatgttttggtcaaagttaaagtattacctggagaagtgctgactaagcttcttgacctttagacatatcaatggtccttatgggaaaggcgcatttttaccaaagcagtttagccatgtgaaatggccctagctctagatctggagaccaggaanattcaatggtagtggttatttgaagtctcataaggccattacctncttcagtcattggccactttagaaggcatctgtcaggaaaagaaatcancatctgaaggccagcctttggcatcccacagtnctaaaatccn

SEQ ID NO: 18316 - DNA, 56 bp, Homo sapiens
caaaaatctgaaaaaacgctgaagttaactactgctgtgcgggggacaccaatttc

SEQ ID NO: 18317 - DNA, 346 bp, Homo sapiens
ctggcaagtgacagagccaagatgtaaacccatgtttctctgccttcaagcccaggcaggcacgtttttttcaagacactacattggctctaactttccaagcaggtgcattccaagagggagggaggacatcatcggccagcaaaccccaggcttatgccatctactctacttgccctatttacatgggacccactgcggtaataggggaaggggacaacctataaagcaaagcgaggatcgcctgctcttcccagagaggtaaacgtttaccaagttaatagcaaacacacttagctggctatggatagagatggaggggacagggtacagttaaaactgtagt

SEQ ID NO: 18318 - DNA, 284 bp, Homo sapiens
gtcgacgcggccgcggtttgtgcagcctccaggagaggctgtgggccatactgcaggccacatatattcactcctggaacctggcacggtttgggttcacctacaagggtctccgtgccctgcagccctacatacaaggcatgacctacccagcacacgcattcctggcgggcttcctcgggggtatcccggtgtttggagaaaacaataacattaacagggctggtttagaaactcccgagatggtggtacagaagggggcgtggttcaggtcgacgcggccg

SEQ ID NO: 18319 - DNA, 363 bp, Homo sapiens
tttccttttccttgtcattagaaagtacagaaatgaatgtcgggggctggcaggtaggagttctaaaactttttggtcttgggcccctgttatactcttaaattagtaaggaccccaaggagatttgtttatgggcttattatcaatatttatcatttctaatacaattagaaattaaaattgaataatcaaaaatggtaatttattaatttctttaaaaataatagtaaacccattacagattaaaataaataaaatttgtaccaaaaaaagaaaaaaaatactttccaaacattgtttacatgtttacaaatgtctttaatgtctagcttgacgtcgacgcgggcgcgaattccagatcta

SEQ ID NO: 18320 - DNA, 387 bp, Homo sapiens
aaaaaaacaaaaacaaaaacaaaaaaaagcctcttgaaaaagctatgcttctaggcttctattacctttattagaagaggcattttcaaaatactacctgggaatgtgacaaagtaacctattcgtatattagctgacttgttatcaccagttacataattttaatcgactgttctgctgctaatactgctgtcaaattctgcacatattaatctttctctgtgatgaatattcagaacaaaagaaaataaaaaacattaactttggtagaaatcctagagagcaagcgtttctccttccttttagagatgagaaatcaaaggttcatgaaggcgtattaactggctcaactgtattcagctagtcagcagtaaagccacgcctatt

SEQ ID NO: 18321 - DNA, 354 bp, Homo sapiens
  misc_feature (1)...(354): n = A,T,C or G
cataaatacatttccaataccttctgaaaagctttttaagttccacagaaaatcaaaacagaaataaaggaaagaagtataactgttcatgttaacacatgtttctgatcttcccagagctgttttactcccagagccctagccccattcacatcctgcctgagctatgtccactacagcaccaacctcagcggcatctgccttgcctcttcctttccctctggcatcacttcccatgttagagagagtggaacctacagacactttcccagcaaaagtcaagcaggagatgggaaccacaccaaccacctaacactgtattactcggccccagcttctgatccatgaggtacn

SEQ ID NO: 18322 - DNA, 265 bp, Homo sapiens
gacactggagcctaaaactaagccttaattaataaaacatcagatagggcacactcctgtcaaccagtgaccaggctaaaaatgtcatatagctacatcaagaggaccactactgacaaagaaacaatagagtggaaacattctttgagacataacacaaagggaagacttaaccttaaggtgacatttacgaaaaccagaaggcatcttacggtggcaaacaccttgcttgtgtcacagggaaaactgaggtcgacgcggtcgg

SEQ ID NO: 18323 - DNA, 353 bp, Homo sapiens
cccaggctgagccactccaggcaagagctgatgaggttgctgcagccccggagcagattgcagcggacatcccagaagtggttgtttcccttgcatgggacgaaagcttggctccaaagcatccaggctcaaggaaaaacatggactgctattgcagaataccagcgtgcattgcaggagaacgtcgctatggaacctgcatctaccagggaagactctgggcattctgctgctgagcttgcagaaaaagaaaaatgagctcaaaatttgctttgagagctacagggaattgctattactcctgtaccttctgctcaatttcctttcctcatctcaaataaatgccttgttac

SEQ ID NO: 18324 - DNA, 353 bp, Homo sapiens
  misc_feature (1)...(353): n = A,T,C or G
ggtgctgctacagccagagcttggggctggcctaagcttgtatacccgacccctgcataacaaccccccgtggcgcaggatagcagaataaagggggcctttatgcccttttgagggacacaccatggcatcccccaggggaggttccagtgttctggccttctccgctgaccactctcggagctgtcagcagctgtgagaccccactggcttttgccagcatcccaagctgcacagttatgactgacctgaaggatgcaaaggcttcacctggttgtctcaccccagagagaattccagaggtccatcacatttcccaagatcctctgcactacagcatcgcgtcagtctcn

SEQ ID NO: 18325 - DNA, 388 bp, Homo sapiens
aggagatatacctaatgttaaatgacgagttaatgggtgcagcacaccaacatggcacatgtatatatatgtaacagacctgcgtattgtgcacatgtaccataaaacttaaagtataataaaaaaaggaaaaaaaaaagaaatttaacatgcattcttgaatctaaaattaattaattttttatagctaatacagggaacttagcatatcagctttgatcaccatactttgacctatatatgctatggttggcatgtattttagttatattttttaatttcctaagactatagtattactgttttctacagaccttccaaggggaatcacattccttctgcctgaagcttattcttttaaatttccttcagcaagggctcttgatag

SEQ ID NO: 18326 - DNA, 336 bp, Homo sapiens
ggccaataagatggaacaatatagaaattatttgggaagattatgaaaagcagttgtttgtgtcaggcatgactgatagtttttttttaaaaaggggcagggggacttaaattgttgatggctaatgaaagtctctagttgcagttgggtgtggatggcacacaaagaccttaagtgtttaggtgatttgctgcaggcttctcggccgactggaagcagagcacatctagattgtagtttctctggtgccagggcagtcttagttgtcctgttatacctaagaaaagggagaaaaatttctattctttaaatgttctgtaaagcagactaattgtg

SEQ ID NO: 18327 - DNA, 388 bp, Homo sapiens
gggaggtgggcggccagggtcaccagcaggcagtggcttaggagcttgaagttgaccgggtccacccgaagcttgtgcgcgtgcaggtcgctcagggcggacagcgcgttgggcatgtcgtccacgtgcgccacggcgttggtcagcgcgtcggccaccttcttgccgtggcccttaacctgggcagagccgtggctcaggtcgaagtgcgggaagtaggtcttggtggtggggaaggacaggaacatcctctccagggcctccgcaccatactcgccagcgtgcgcgccgaccttaccccaggcggccttgacgttggtcttgtcggcaggagacagcaccatggtgggttctctctggtatgtccccatccctcctgtggacgacc

SEQ ID NO: 18328 - DNA, 382 bp, Homo sapiens
caaagagtcactgaacttaattctgggttaattccccttgtctgcattctcatggcactctacatccatggtagctccaattacattgcattgtaattgacaaaagtttcttgactttttcactttcctacataaggcagaaaaacctcttatccatcattaaattgtcattgtcccaaacaggaccttgaacatattaggcactcaaataacgaacaaatgaatgaattgctatttaaattattttttgcagttactttcaaaaaattccaacagaagccccacagctggaactcaaagcaaattatggtctcgtagagcctatacctttcgaatttcctcctacaagtgttcagtggacaccagaaacattggctgcatt

SEQ ID NO: 18329 - DNA, 387 bp, Homo sapiens
  misc_feature (1)...(387): n = A,T,C or G
ctcagactgtgctagagaatacgtaccatgaaatacatatatttcataaggttcagttacaaaatggattgtttcaaatggcaatttcttacactaacctgtgagtctaaactctagccagtccccgaattgtgagatagttttccttctaaaatatacttcgtacaagctggtcatttttccccttaattcttttgatgttatctgatatactgagaaggttttgtttggtgttcagttttgtgttactgattttgccataaaaacttttatttacatgatttttagtttttagttcttatagtctttgaattgaataagaaaagtaaatactgaaatgctttgaaagataacaaaatatttacttattgcttgaaacttagagtn

SEQ ID NO: 18330 - DNA, 170 bp, Homo sapiens
gcttataaaaacggctggattctaaccctctggactatttatccaaaggactgataaaatggggggaaaagcccaggaagtcaaataaaatatacaattggtttaacacacgacaacaaggagcacagggatacaaataaggtaaatcctaggactgcctcccataaccg

SEQ ID NO: 18331 - DNA, 383 bp, Homo sapiens
cccaaatccaatggccttttctcaaatcccttcccccagccccatatgctgacctctgatggaccatgctgtccctccatggcggcctgaactgtctgacactgctgcaattctccacctctccaacagcagcctcctttctcaatggcgtcctcaatgacccctggtcagtttccccaccccgagtcatgccccacctttcactagtccacctccatctcttcaactccctcaaaaagaactaagcacaggcctctgaagaagttacaagagaactgctcatttgtatgggcttcctttgctgtctgaccttatttttttagtcattctgtttctaggcttcttataaaagtaatgaggcagtcaggcttgcatatatttaa

SEQ ID NO: 18332 - DNA, 354 bp, Homo sapiens
gcaaatccagagctattcacttaagatcacctgagacctggagtatatctggcttctcgataaattgtatgatctgtgtttaacttggtattttgtccacaggctaaccatgactatatcttttagtttagaagtgctctgaagataaaatatttgatagcatagcttctctactgggttagtgtagtttaaaatgcaaaccatgtatgacttcatgcaatttaagtaaaaactctaatttgtaaaggaagattgcactgcttgtgagggcatgggttggaatactttaaaaatagtacatctaaaatatgcctttatattatttatacttaacagatttacttaaattacttg

SEQ ID NO: 18333 - DNA, 385 bp, Homo sapiens
cagtagcccatatgtgactagtgaaaaggagaatagtggttgcataacagagaggttatactggtttacatgggattttttccaagcacattaatgttttgtgccacaggtaactgcagctgaatacaaattatgttaagagctaaaattggctactatttttaacgcatgaatttgcacaacatgagggttttcaggaatatttatctgctgtagaaatgactgtccattcatctttgatgagctatattaaatttattaaataagcagacattatataagctactttattaaataagctacaattatgtgttaagatgaggaataaaggagaaacgaagtatcttacaattaccgatgatgactactttgatgggtatagtgt

SEQ ID NO: 18334 - DNA, 333 bp, Homo sapiens
ccgtgaacccaggaggtggagcttgcagtgagccgagattgcaccactgcactcccacctgggccacagagcgagactccgtctcttaaaaaaaaaaaaaaaaaaaaaaggccccccaaaaactttgggaaaaatttaaaaggaaatttttcccccttcccaatattaaaacgggatttttggataccccaaaaaatttttttttttgggtaaattccaaaaccccttgttaaaaaccttttttataacccaaagttttttcccctttttttttaaacccaaaaacggttttttccttaaaaaatttaagggggcttaaaaaattttttaaat

SEQ ID NO: 18335 - DNA, 361 bp, Homo sapiens
tcccacttgtctcatgaattttttttaaggttgccacgttgaaatcagaatccaacaaagccacacattactttttttttaaatgcctcgtaagtctcttttaatctataggattcacttcctctttattttttccttcctcttggtattttatttgtcgaaaaaatcgggtgagtagtttggtactgcaggcttgaacacctgggctcaagcaatacttctgccttggcctcccaaagtgttgggattacagaagtgagacactgcacagggtcaatacaacttttcacaatcaagattttgttgaggatttctttggggtcatttaacaatgttcctttagccctgaagttactataag

SEQ ID NO: 18336 - DNA, 357 bp, Homo sapiens
gctgattaagcagagaaactagtatctaaatccagcctccgattccaaaagtctaagcttttccattatgtgtgttgtcttttagcctttaataattgcagaaactatgagtgagatgttgggatcagtactacctcttcctaaactttcatccgtaggaaatccggattgggaagcctgctcctccagaggctatcagcgtgtggacacctgcctgtgcttaagaggtccaatcatttattatcgtaatctaattttgtagaacatcaaactagagaataatttcgggctaaattgcatttgtgttttaatcaagaggccgacgttattgattatgtaataaggcattctctctgt

SEQ ID NO: 18337 - DNA, 209 bp, Homo sapiens
gccagctgtgttcccggtgcagataaaggacagttccccaacctgtgtcgcctgtgtgcggggacaggggaaaacaaatgtgccttctcctcccaggaaccgtacttcagctactctggtgccttcaagtgtctgagagacggggctggagacgtggcttttatcatagagagcacagtgtttgaggacctgtcaggtcgacgcggccg

SEQ ID NO: 18338 - DNA, 383 bp, Homo sapiens
tgcactctacatttattcttgcacataatggcatttctcctctaccatctggtttatcacattcctcctatggccccagtatcttttgttttcgagacaaagtctcgctctgcggcccaggctggagtgcagtggcacgatcccggctcaccgcaacctctgcctcccaggttcaagcgattctcctgccatggcctcaatatcaaatttgcatttttttcccatctcaaagagcttcaccttgactcaggacactgttttatcttcatcaggttagtcaaaggggctgtgtgtcttattcatgtgcaaattagaattccttcagcagatgaagacataactattttgttctttatagtttctaaacatttcttagaatctgt

SEQ ID NO: 18339 - DNA, 182 bp, Homo sapiens
gggcgagtatctcttcgaaaggctcactctcaagcacgactaagagccttctgagcccagcgacttctgaagggccccttgcaaagtaatagggcttctgcctaagcctctccctccagccaataggcagctttcttaactatcctaacaagccttggaccaaatggaagtcgacgcggccg

SEQ ID NO: 18340 - DNA, 364 bp, Homo sapiens
tgaacctacacaataccaccagtaactggtatgtgaccttggtcagactactctctcaaatttcatttcctcatctgtaaaatggggatgatcttaatagcacccctctcaaaggtcctgtgtggagattaaaaaaaaaacgtttgaaaaggacttaccactgtgctcagtgcacaacaaaaggccacccaatggagaacagccccacataagcttagcatagcaaacacaatcacttaaaaaggctatattctgaaaatccacttacagaaaaggagagaattactatttgactacatgctaaaaaccaaattcacggtcaatttattcctaattatttaggggataaaagcattttgggggg

SEQ ID NO: 18341 - DNA, 319 bp, Homo sapiens
ccggtactcaaattgcacttccattataaatgctcaatggcaacaacatgtttggtggataaaacagcactagccaactaaagcaaaaagaaccttaggtccaataaaggcaggacttgagatgttaggacaagctaaaagtgtatttaacaacgacaaaaaaaaagaaaatcacaagaaaagtcaatatttaccagtctaaacagattaaaagaaatattctttcagaaggaaggtatgggttgggaagctacacaaaaagataatgacactattgttaagaaggtaaatcaactactcaactaacaaggagccatgc

SEQ ID NO: 18342 - DNA, 335 bp, Homo sapiens
ggaaagttttttcttaaccttcacatctgctctatttaattgccacaattctattatacaaactataatatatgtaggccagtgaaatgtattccagttagaatattcagaaaagaaacatctttcaaagtaatgtggtcagaagtcccaactatgcctctgcaaaatagaacatccccaattgaaaacatttaagttagtagatttaaaatattctcaactacagatgcactattataattaaagcatttccatttcaaattattttaacattaatcacttattatgtaagagatttagacaaattcaaataggtatttaaaatacttacatta

SEQ ID NO: 18343 - DNA, 355 bp, Homo sapiens
ctgatcagtgcaggctgggcccctctcagaggtccctgctttaatctttctctagaacttggggatccaagcagcagaaaataaagaactttccatacctattccagtccccacagctgtcctgactcaaaactaaaacccccatctatgcctcatagagaaatggctccagaaccaccaccatccctgattttgtcattcctggataccaccatactcccacccaccactggtagacagagctctaggcttccagaaagaccccctcttaccctgttcctgggtttggcctacccaagcccattcctgtccgattgccatgtgtcaccccacaggagacaggaggcagctgtcg

SEQ ID NO: 18344 - DNA, 334 bp, Homo sapiens
ctttcttactaagtaatattgaaatataaactattgacaaagcacaatttgccccctaaccttcttgcagatggtttagaattagtaggaatataagccaaagggaaatgtgtgtcttgccatctaaatattagacttgctctgaagttagtgagtcttcatggaactcaattactagttattccagcagtaaatgtaaaagccaagacatttctgaagaagcacttattctaccaattattccaacatattataaagctcagctcatgttccaggaaagttgctgttggcttctggccaggttttccccatgggtttactgtgtgactcaggg

SEQ ID NO: 18345 - DNA, 340 bp, Homo sapiens
aaaaaccccaatcttcctaccagaagttactgttatgaattttatggtttatttctttttactatccagttaaagtattattgaaaatgtaggtagctgaaaaggttccccaagtaaatagaaagaatctgaaagtatgagttgggttaaacatgtaatcttttctttccttttggctttttttttttttttttttcccaaaaaaaaagaagccccttttttttccccaggctggagggtggggaaaaaatttgggttaatggaaccttttgcttctgggtttaaggggttcccccaccctaccccccccgggtggggggaataacggccggtggttacc

SEQ ID NO: 18346 - DNA, 352 bp, Homo sapiens
gccgagatcatgccactgcattccagcctgggtgacagagcgagactctgtctcaaaaaaaataaataaataaaaagtaaaataaaataaaataaaataaatattaattacataataaaaagtttttttgcacaaaaacatttaaaatcttaaagctggctgcaatttcttccacagttggaatgtgtaccttcaattaagtggtaaaactgtatttaaaggcacattgggtaatggtgaaacctaaaatgcagaggagaataaaacaataacatactaaatgaagaaaaacatacaggaaaaaagcaaacattaagttttttttttaaggccaacaataaaaaccgtatct

SEQ ID NO: 18347 - DNA, 357 bp, Homo sapiens
  misc_feature (1)...(357): n = A,T,C or G
ccgaggtgggtggatcactggaggccaggagttcaagaccagcctggccaacataaggaaaccccgtctctattgaaaatacaaaaattagccaggcgtggtagcgtgtgcctgtaatcccagctactcagaaggctgaggcaggacaatcacttgaacttgggaggcaaaggctgcagtgagctgagaccacatatctgggctccaggctgggtgacagagagagactccatttcaaaaaagaaaaaaatgatctgggtgccaaaatagagggaaaaggaacttcactacaaaagggcttccggattttaaactttactgaaggaataattcttaattgcaaaaatttactatgan

SEQ ID NO: 18348 - DNA, 333 bp, Homo sapiens
tgaacattaaaactgggaatgacattgtcaaaaccagcttaaagagaaagtggtgtgattatacattttagaaggaataacttccttttacaatcatacctgtatagaatgcagtgctatacataatttttggagttttgttattgttcatgaaagcattttaaaaatgctttagtcattttcatttgtgataaagctaatctaattctctattctgatgcttcttgccaagctttagatcataacagcttaatttaagacaaaaattgctggctaatcccctttggtattttgaagctattttgggctccctttgttctatggtacgttccg

SEQ ID NO: 18349 - DNA, 334 bp, Homo sapiens
ggaatatgttccgcaaagaatgtctactgctcttgtccttggctgtgatccctatacatagtgtgaatttatatccaggtttcccaggatcaatattgacaagacgactttggcatctgaattgttttaatatctttactcaaaaaaacaaaaaaacaaaaacccatggaagcaacaaaagagttaaacatgagggatttatttttgtatgtttatatgtcacttgtgtgctatgtgaatagctatgtttgttatttaaatatatttatagaagttcaaattactagtgtttaaaagatgatatactattatatattgtgcttagtatgaaagg

SEQ ID NO: 18350 - DNA, 353 bp, Homo sapiens
tctctttatgtaacaaaaaagttatttaggtcctcattattcaggccatgttcaccaaaaaacaaaaaatccaacataatagaaagagtttatggtcttttagggttcaccataacaagccctgatctgtatgtttatttttgtttttttatttttagagacaaggtctcagtctgtcacccaggatagagtacaatggctcactgcagcctcaaactactaggctggagcaatcctcctacctcagcctctcctgtatgtttaccttaaatcacagagtatgagtggcaaacataacattgtaaaataatgcaaccatgagtctcatgcttgatcacaagggccatgatgta

SEQ ID NO: 18351 - DNA, 314 bp, Homo sapiens
tttgggcgcgccaaccattattacattatgccttggttccgtgttttttaaacattagatacattatttggttgaagataaaagggaaaaacatttttttctgaatcatatcacattatatttagcttaaagattattaactttttgaatatcaaaaattgaagctgctgggaatcacatttatttgtaggtcccaaaatagccctgaggtctgaataggaaaatatcttttataaactataacaaaactctcacctcaaaataaaacactatgaaatttacacagttatatctgtactcagtcgacgcggccg

SEQ ID NO: 18352 - DNA, 326 bp, Homo sapiens
  misc_feature (1)...(326): n = A,T,C or G
gctatctactattaaaatgatactgtataacccataaaaaatgcttatctaaaataattatcttcagtgcacattctctcttgaagacaaagataattttccagagaaaaatcttgaatattactaattttcctttcattctacatataactttaacatgcatggatacattaatatgttccaacagcaaacaatgtaaaaacttcccaaacacaaataactatgaataaattttgttggtttgaaagccaatacaacctgctttatagagctggattagtaaccttatttaatgacgctatatatttactaaatgattgcactgn

SEQ ID NO: 18353 - DNA, 376 bp, Homo sapiens
ctgagctgctggaacctattccctatgaattcatggcataataggtgttaaaaaaaaaaataaaggacctttgggctaccaaaaaaagctaacaaaaagcaaaaaaaaaaaaaaaaacacaatgaaaaaaaaaaagaataaataaatgtttggtttgcccgcccggaaactgcagagaaaataatgcttgtataaaaaccccccccggggcttatgtttgggggggcaaaccaccccatataaacttttttaaaacaaccgccgtccctttttttattaccaaatttatccacaaaaattatctggtcgggacggcccgcccttataataaaatttttttaagaggcaaaaagaggacccccttttgtttctcgca

SEQ ID NO: 18354 - DNA, 354 bp, Homo sapiens
  misc_feature (1)...(354): n = A,T,C or G
aaaaatctgataacgccaactgttgatgaagatgtagagcaccagtactcttctacactgctgttgggaacataaaatggtataaccactttggaaatcagtttggcagtgtcttacaaagttaaacatatgtctaccatacaacccaactatttcagtactagggcagtatttactatccaagagaaataaaaacatgttcacacaaagagttgtacatgaatgttatagcaaccttattctcaaaagccagaacctggaaacaacccaaatgttcatctgcaggtgaatagattttaaaaattgcagatattcatataatagaattctactagcattaccacagatgtaccn

SEQ ID NO: 18355 - DNA, 313 bp, Homo sapiens
tacaaaaacatggctagaccttaaaaacaatgctcagagaaagtaaacaaatcatataacagttggctgggcatggtggttcatacttgtaatcctagcattttgggaagcagaggcgggaggatctcttgaggccaggagtttgagaccagcctggccagggtggtgaaaccccgtctctactaaaaatacaaaaagtagctggttgcggtggcacacacctgtaattccagctactcgggaggttgacgtgaggcgggagacttgcttgaacctgggaggtgaaagttgctatgaggtcgacgcggccgcc

SEQ ID NO: 18356 - DNA, 327 bp, Homo sapiens
atcgaagcaacaataggcagagagaaaggaaaggagggcgaagcactctccaacacaaccaaccctgccgggggattctggggggcggggagggcacaggagtccccgggtcctgcacacacaccgttccagagccgaggccctggcagcaccctggaaaagggaggtctttcccgccagcccctctgcagcaccctgaagccagggaccaccaacagggcgcgtgaagataggagtcattagtctcttccctttcgagggagcgccgaagtttgccctttctcatcctggctcattcgtcgacgcggccgcgaattccagatctag

SEQ ID NO: 18357 - DNA, 353 bp, Homo sapiens
  misc_feature (1)...(353): n = A,T,C or G
aaaactgccaacacagtgaagttttattagtatatatttctttaaaaatttttttaaataataagcaatacatctcaataaacctctcaactatgtggttaaaataagaaataacatttaaaataagcctgattaaagccttcttgtaaattcattaactgaggtcttgtatggtagattactgaaagcaactgtcaaatttgctgcttctaaagcaacatgttccaaactatgttccttgaaatactagaaagaatttttcaaggttaaatacatttagaaaatgttcagtacttttagtttcacaggtttcatctactgtagataaaaaggtagtgaaaaatagccaggan

SEQ ID NO: 18358 - DNA, 327 bp, Homo sapiens
gtttgaacgactggtgaagacatctgattttctttatagccaagttaggataacaaaatgcaaacaagtcattaatatttactatatgcaagatacagaaagatgaaggaaggagtaagaagttatccttcgtggaactattcaaagcaaaaatgcaaaataccagggaaagctttgaagaaccaagatttgagcaggttcttagaatacagattggattggatttgatttcaagaaagatgaacgtgtaaagcagaagtgggaagccaaaaacttttttccaaattagaattaagcattctttcaatgaacatttggaaatcaagg

SEQ ID NO: 18359 - DNA, 326 bp, Homo sapiens
ttcacatatgtttctttgaccaagcctagctttataatacagtcttctctgtcagggattggttccaagaaccactccccaaacccctgcccacatcttactcccatgaacactaaaatccacagatgctcaagtccctgacttaagatgtcatagtatttgcatataaactatacacatcctcccatatatttttaattatcttcagattacttataatatctaatacaatataaatgttgtataaatatttgttataccatattgtttagggaataacaacaacaaaaaatctgtacatgttgagtacagatgaaaccctcctt

SEQ ID NO: 18360 - DNA, 203 bp, Homo sapiens
gtgggtgcctgaggcacaagaatcacttgaacccaggagtcagaggctgcagtgagctgagatcgtgccacagcactccagcctgggcagctctgtctcaaaaaaacaaaacaaaaaaacccccaaaaaaccagaaaacagaagaaggcctgaaaaggctgccaacagtggcaagaatcaaggtattttcgtcgacgcggccg

SEQ ID NO: 18361 - DNA, 382 bp, Homo sapiens
cgcgattgtagtcccagctattggggaggctgaggcaagagaatgacttgagcctgggaggtcgacactgcagtaagccatgatcacactccagcctgggtgacagagcgagactcttgtctcagaaaaagactaattttaagaaagggggctccgggggggggcaaacttggaaatcccaccctttgggggagacaattttgtaaaaaactttagggaatgggcatctaagacccgggcctaaaacggggaaaacccttttttaccccggccttatgggggggctcccgacttcttagccacaggggggcgtggcgggaaaaacctttgaacccgggggggggggggttggggggcccaaaaatactccttttgctttccc

SEQ ID NO: 18362 - DNA, 368 bp, Homo sapiens
tagaaacaagactggagagataacagcctcctccaacaaatccctcaacttgctaaaaatcaagcatggcgatttgttgttcctgtttccctcgagccttgctgggccctcatctgaaatggagacgtcagttccaccgggcttcaaagtctttggcgctcccaacgtggtggaggatgagattgatcagtacctcagcaaacaggacgggaagatttacagaagccgagacccacagctatgccgccacggccctttggggaaatgcgtgcactgcgtccctctagagccattcgatgaggactatctaaaccatctcgagcctcccgtgaagcacatgtccttccacgcctacatccggaagctga

SEQ ID NO: 18363 - DNA, 359 bp, Homo sapiens
  misc_feature (1)...(359): n = A,T,C or G
ttttaatttcagtgggtattttgaaatcctttcaaaaaccacaagtgtgtatgaaatagattctttagtcacatggattcaaaccatagcattcttcccaacccaccactcaagaaagcaaaggataatctagccaagccaatttgcatgtaggaaaactataatgtctactgcctaagaaccctcaaaatagcattgtacatgtatcttggtaataaaaaaccctttcactattgtgcaaaggagatagctatgaattaccaattacaaagagctcacaaaactttaatacatataaaactttaaagagtggctcatgtaatcctagcactttgggaggccaaggcaggtagatcacn

SEQ ID NO: 18364 - DNA, 328 bp, Homo sapiens
gcccttgataatctcccccagtttagtagttggattccagatattcctccacctcggccaccgaaaccacatccagctcatgaccgatctcctgtggaaacgtgtagtatcccacgcaccgcctcagacactgacagtagttactgtatccctacagcagggatgtcgccttcacgtagtaataccatttccactgtggatttaaacaaattgcgaaaaggtcagctctagttgacttcttctctattagaggttaatgatagaaaatcgatttttctgaatatttgttcttttaagcgtagttaaatatactatgctacaaaataca

SEQ ID NO: 18365 - DNA, 364 bp, Homo sapiens
ctgaaacattccatgttttaatctgagccttgcagactttcatttggagtttgaacccggattggttgcatttcatttttggagaacttacttaacgcgagattgtcaattgaaatgcaagagcagttttctgttaaagtcatgctgttgcttaggtaataagaaatattaaggacttggctttagattttgtaattcttttccctgaggtcctgctagatttcgtattctagtagtcaatgtattttcagtgaaatgcacaaatattcccattatctttgaccagtattacttcttgagatcttactgcttgacacttgaatcccgtgaaagcatacatgtctggataagcaacatttgcttt

SEQ ID NO: 18366 - DNA, 373 bp, Homo sapiens
tacaggtataagctactgtgccagggtgaggcataaagttttttgttgttgttgttgttttgtttttgttttttgagaccaagtttcactcttgttgcccaggctggagtgcaatggtatgatcttggctcaccgcaacctctgcgtcctgggttcaagtgattctcctgcctcagcctcctgagtagctgggattacaggcatgcgccaccatgcccagctaatctttttgtatctttagtagagatggggtttactgatgactaaagatatcttcattaagaattttttttttctaaaaaagaatggttgttacaaaataaggctcattgtttatcatacagtccagaaaaggagaattttcctgtctttg

SEQ ID NO: 18367 - DNA, 388 bp, Homo sapiens
  misc_feature (1)...(388): n = A,T,C or G
ttcctgtctttgtggggatgatggacccgagtaaagatgcccattcggggtcaaaggcagagccgcttctgcagcttctcaaagcgttgtttgttttttttctgagacggagtcttgctctgtcgcccaggctggagtgcagtgccgcgatcttggctcactgcagccttcacctcccgggttcaagcgattctcgtgcctcagcctccctgagtagctgaaaagctgaattcactttgatcctgtagngagcagagnngccataaaatggccacgaggccgagacctcccaagttattattcttacatactgaaggaccccgcatgttcactacagctgtgcaccgtgcaccgtctcaatatcctttaatatacagacgttcgcccg

SEQ ID NO: 18368 - DNA, 345 bp, Homo sapiens
cttacacaagtattttgttaacaataaaggtttacgttaattttcaaagaggaaaaaaaatgaaagcacctttatttatccaggcttatctactcatccagtcttactaaaactaaaaagtttgaaaaaacaaacaaacaaacaaaaactccaggtgcacatgaaaaaagatgtgcatatatgacatcaaagacctcaaaatgattacaatctcaaccaaatgttcacttcacatcctctcacatctttcaggaaaaattagtaagttccctttagttttctcttccccacatcccaacttacttgccactggatcatctctcttgaagcctcactaactcaatg

SEQ ID NO: 18369 - DNA, 220 bp, Homo sapiens
  misc_feature (1)...(220): n = A,T,C or G
cgcggcctgcggacgtgagagaagcgtccaaggtaagtgtgtggggatgtatctctaatctcatcctctacgaggagctagaaagtcggggggtttttnttagaaatcgatttagatatgcgtcgagacgggatcaaggcaaaagcccacctttgctttttatggaaagcattactttatttaaagagacagacaatgacgcattttaatctacctttgt

SEQ ID NO: 18370 - DNA, 364 bp, Homo sapiens
  misc_feature (1)...(364): n = A,T,C or G
ttatcttccctagttacccaggttcagctgacaacaaacaaagctgcagtaaaaccgggnnttttttttttttttttttttttttttttttttttttttttttttttttttttttttttttttttttttttttttttttnnaaacccgccccttttttttttaaatttttttttttttttatgaccaaaaaaaaagtttttttttttttttttaaaaaattttttttaaaaaatattttttttttttctaaaaaaaggtttaaaaaaaattttttttttttttttttcccaaaaaaaaaaaaaagaaatttttttttttttttttttttttggggagagggtggcctccccccccttttttttt

SEQ ID NO: 18371 - DNA, 92 bp, Homo sapiens
taagtgttgcattaaaaactatacaaccattgaaaataataacatatctaagccctttgactcatggagagctggatgacagggagaatagt

SEQ ID NO: 18372 - DNA, 367 bp, Homo sapiens
gccttggtgtgtgaatccccatccaaggacacatgattttctatccaagactataaagctgaatatcagagtcttttggaaacttcatataaatacttttctatataaagaaatgcatatatgaataactaaataattggtagatattaaaaaaaatgactgtccctttccttgcagtttctttgtagtgtttctttttgttatcagagtggtaagactttgaagatgaggattaaagtactttaggccttaggacataggttcaaaatgactcttcagggttcacatatggtcaaccccatcttgttacaagagaacatacctgtggcttgcctacattaccacttctgtgttcagcagtttagtt

SEQ ID NO: 18373 - DNA, 337 bp, Homo sapiens
  misc_feature (1)...(337): n = A,T,C or G
gtgccatcaacctcctgagtagcttggggtacaggtgcatgccaccatgaagttttcattttaattgttgtaattttgaactccagaatttatatatatttttttcttggaatttgatcatttctattgcttcgctggtgttctgtttggttggacatcattctcatgctttcctttggttctttggacatagtttcctttggttctctgagcatattttgaaataatggntnatgnnnccnnngcnnnnggtggacccccatcacccttattgctgggggggtgtcccgcntggctggacatcattctcatgctttcctttggttcttgggacatt

SEQ ID NO: 18374 - DNA, 325 bp, Homo sapiens
ggaggagctgcttttgttaaaaaacaaacaaataaaaaagattctaattcctattctctggaaattctgattcagtatatccaggggagggaaccaatacattttatatttttaaatgaggtcctcaagttcctaggtttggactattgtcctaaactatcatttttttttccaacaatacttttacttttatccacatttataatcagatatatttatccctataaacttggcagaaggtaaacacacatacacatgataattgatgcttatacgcaaagcactgtagggttgaagaatataaaagaaccacccctgcactaag

SEQ ID NO: 18375 - DNA, 338 bp, Homo sapiens
caataatctacttattttggttacaaaccagagttaagactaactgttacataacacttggcctgacttccaagaaagctatgttttgcttaagcaaatgaagtaatttaataagtactcgaaaatcttgctctaatttcatgtgggagggcagcttaatcttttttgccccatacttctgatggtgtttttgatgactacccaaaaatctaaccaaactcatttctgatctcttctacatgttgtgtaacttacgtgatgtcttatccttttaaatgccaacgaaactaagttgatttttgtccatcaaatatatctaatccattcactatgaaatg

SEQ ID NO: 18376 - DNA, 395 bp, Homo sapiens
tgtgcctgcactgggcttaatacgttaactaccagaatgtcagtacccatatttaccatcaatattattattattattagtctttttgagacagagtctcgctgtgttgcccaaactggactgcagtagtgtgatcttagctcactgaaaactccaacttccaggttgaagagtttctcctgcctcatcatccaaagtagctgggattacatgtgtgcgccactacagccggctaattttttgtatttttagtacagacagggtttcaccatgttggctaagctggtcgcaatctcccggcctaagtgttcctaacgactggactgcccaaatgctgggattacaggcatgagccaccgggcctggcaagtattattattactaatacagtaatt

SEQ ID NO: 18377 - DNA, 325 bp, Homo sapiens
  misc_feature (1)...(325): n = A,T,C or G
gagctttcagtctcagggtgttctctatttcttttgacattaaactgaacaatcagaaagtaaatcttaggagagccaatattatggaatattacagtgtgcgcttttgagtcagatagtttgacaagtttgaattttgacttttaaatttctagttgtgtgaccttggataaatgatctaactacatgaagccagtttcttcatctgtaaaatggtacctatgttatagcattnttttttttttttttttttttttggaaaagggggccccctttgggagggggggggggaaatttgggttattgggcaaaccggcccgaaatc

SEQ ID NO: 18378 - DNA, 324 bp, Homo sapiens
gaaatacattagtatggctgggtttctttttattttctgtgttcttagtgcttaaaaaagtagaagtatttataagcattataaaatataggtgactgatagctcagcatttgactgctttgagatttttgagataccatatgttttgttttgttttgttttgtttttttgagacaaggtctcactcttgcccaggccggagtgcagtggtgcaatcttggctcactgcaccctccacctccagggttcaaaggattctcctgccacagcctcctgagtagatgggatttcagacaggcgccatcacgcccagctaagttttgt

SEQ ID NO: 18379 - DNA, 354 bp, Homo sapiens
  misc_feature (1)...(354): n = A,T,C or G
tttcaatctacccattgaattatatttgaagtgagttttcttgtagacagcatagttgggtcatgtttctttatccactctgccaatatgtcttttaattggtatgtatagatcatttacattcagtgcaattgctgatacatttagaattaggtttaccatttttttttggcttctgcttttctctctctttttcattctctattttccttttcttgccttcttttgggttattagaacattttttagtatttcattttaatttatctgttgggatttttactttatgtctttgtgtagntttttagtgggtgctctagggattaccaaataaatatttagaattagtttttt

SEQ ID NO: 18380 - DNA, 232 bp, Homo sapiens
ccgcctggaagtcatatgggctcagcagaacctcggggagctggccgaataacccttttctgcactgaagtgcagccaagccggctgctagcaaaggtcaggcagtggaggtggcaggagtctcctggaagagcagcaggaggtcagtgtggggcacctgaaaaaaaattctttacatattttctgcttcttactttgtctacaaaagagagataaaatgtcgacgcggccg

SEQ ID NO: 18381 - DNA, 347 bp, Homo sapiens
caaggactcaaatagctggggggggctttttatggtggcttgcgttctagacaatgataaaaaaaagtctgtagcatctctaaatttaagtcaagctgaaaagtgagcatgcctctctatgtctttccagctgatcccaagattgactctcattggctttgactgggtcatgtgtctatctttaaaccaatctctttgacagggtgaattgaattactcaactgaccagctcttacccatgtgtatcactcctgaagccagatgattttcttcacagctgaactacagaaaatgttgggtttactaggtgctctcaggctctttacataaaaataccaggactttgg

SEQ ID NO: 18382 - DNA, 329 bp, Homo sapiens
taaaaatgtgaaattatccataaactacggcaaaattaagtgagttctcgtttttgtgtcaaaaaatagaatggctctttatacttcattgcatttcaaaatggttttgaagtggctttaaaaaagtttttaagatacatttaaatatggaagcaaagaaattgaaaaagaaaagctaaaaaattgggtccaaatttaactctgatcttcctaggatctgattcaaggatggaaacccaatctgttttgtgattcattgctagaacaaagagggagaagtgggagaaccacaggctgaggaaaatttttccagacagatagtgtcactt

SEQ ID NO: 18383 - DNA, 363 bp, Homo sapiens
ttttttcgcgtcgaccaccatgctcggctaatgggtgggtttttttaaaatagacgaggttccaccatgttggccaggctgtttttgaactcctgaccccaagtgatcacccacctctgcctcccaaagtgctaagattacgggcgtgagcaaccgcacatggccagcaactgtatttttaagaatattatccagtggcttttaccatatacataatattattctacaaacatcacctaattgcagactattttaaccaccttatatccgttaagcagtcattcgctattcctttctccccctagaccctagcaaccactcatctgctttctgtctttgtggattagcctattctagacattg

SEQ ID NO: 18384 - DNA, 351 bp, Homo sapiens
aagaccttctactcctcactttttctgattggaatagcttggtgaagagatggctgggaagaaatctttgaaaactggacttaagcgtatttttgaaaatttaaattttaaagtactctacaaacaacttggagtttttcacttcagtgtgacctaagcagatgtgtagatttagaggtcaaatgagaagtgtgttataaatacagcatgctagataattgccttgtcatgaatatccaaaattgggggtgataatacatttagaaaccagtttctgctgacaagcatgtatcagctcacttttggataacccatccacagctacttattttgaagagtgctggatagtgg

SEQ ID NO: 18385 - DNA, 358 bp, Homo sapiens
tgagaatagaagaaagtagaagaccacatgagtaccacatgagatcaactagtcatttcctgagactctggtttggattcacaaataataaaatgggaaataactggattttttcatttattggttatgataaagatatttgcataataagatattttatatgtatgtaccatctactaggaggttatttcttagtgaaagatgtgaaggttatcattgtcctgcatttcactcattgaaaattgactgtttcatttgctatatgttcattcattccatatttctgagatatacatcctgttcctaaacaaaattgaaaattttatatcagttcttaaagtgttatattgatattccc

SEQ ID NO: 18386 - DNA, 351 bp, Homo sapiens
cctcaagcccccaaggcccttcggcgggcccctgctgaaagaccggcatgccctattctgtgggcttccgcgaagccgatgctgctaccagctttctgagagcagcaagatcaggtaacttggacaaagctttggatcacctgcggaatggggtagatattaacacctgtaaccagaatgggttgaatggcttgcatctggcttctaaggaaggccatgtgaaaatggtggttgaacttctgcacaaagaaatcattctagaaacgacaaccaagaaggggaacacggccctgcacatcgctgctctagccgggcaggatgaggtggtccgggagcttgtcaactatggaa

SEQ ID NO: 18387 - DNA, 351 bp, Homo sapiens
ggcaatatgtattttctaaatgctaaataagtaagtgcattttcaatgaaacaagcattttaaacaaaacatagggtcagttccaagcaaaagtgttttaatttccctacaattgcatctcccactatactttatgagcaggctcattcttggtctattatttttctggttacaagaaagcaaaagattttatccatgaatttaggtatccagactcacagtaggactccagagtgtaccagctgcctgataagacttaatatgtcaatcagccttgagttattaatatcttaatagggacaaaagaatgcatgaaactgacaagggaactataggatttcaggcaccctc

SEQ ID NO: 18388 - DNA, 192 bp, Homo sapiens
cctctccctcctttgacaaggaactggaaactagggtttctttctcttatgtggagccctgacatgccacctgtgtagtacagaccgcaaacatcctgcagcctgcctcccggaagaccaagaatcagaataaaagggaacttggacgccgacaattctaggaaaggaaatgaacagaggtcgacgcggccg

SEQ ID NO: 18389 - DNA, 361 bp, Homo sapiens
gtctcccttatgctgtgttcaacagctcaaacccaaaaggaaacttcacagggaaaatgaacaaggtaagtcaaaatgtaatggtcacggataatacctactctaggtatctagtcaacaaggatgcaaaaagcctgcttttcacaggttggactgtgtgaatccatctttgtataatatgtcagggatatccacagacattcttaacatcaacattaaatgtgggctgggctggcacggtggctcacggctgtaatcccagcactttaagaggctgaggtgggaggatcacttgaggccaggagttcgagaccagcctggccaatgtggtgaaaccttgtctctattaaaaatacaaaaa

SEQ ID NO: 18390 - DNA, 384 bp, Homo sapiens
gagagaccgaagcagaagtccaaagaagtccaaagataaagaaaaatctaagtatagatgaaagatgaagaggcagaattgagaggctaacatatttactcttgtctaacttaagagtgccaggaaagcagatgcttagattttgtgtcaaagcttgttatttttttcatactaggattatggtctttagattaatactgattatatagagcacggaaagataaagaattgaacattttctttgtatacttttttacactaattttattgttatacataaatggtagtcttcatttttgaagtcttacattttcactctttttttaatgaagtatttcatactacaaaaatacataaacgtatatataaaggataataaatgtg

SEQ ID NO: 18391 - DNA, 403 bp, Homo sapiens
ttactcacttattttcttgggtgaaagaatagtctgcagctgatctttttcttattatagcttaatttttatatatcccatttattacctggtagtgaaggatgccgaagtttccggaaccccggattgtattgtctgtctgactaatccctgggggggggttcggatattttacagcttttggatcttttcatccagtgggataggccaacctaccttgctgactatggtcagcccaactgcttgtacctccgggtaaacccagtgactgctctgaccctgcttgagaagcgagtaccttgtccaatggtctgtgttgggaggtggggagacagggattgtgggttggcgtagaacataattttgccactgccaataccttgaaagatagcctcgttctgga

SEQ ID NO: 18392 - DNA, 378 bp, Homo sapiens
  misc_feature (1)...(378): n = A,T,C or G
gccatttccatagtcttttggattagaaggaaaagctttgcttcattctgggagcctcagtcccattggagttatggcatatatgtacaacacacccataagatattagggatagtgcttgtaccctggggactctacctgagtcattgccatgatatctgagatggcatgtttaaagcaaaccttgtttataatctagtaagtcttggaggttgggcctgttggtttttctgaaagccattaggactcagttcattgctctgtagccaaaggccatcctttcatttctgagcagtattcttataaacatagagtgttggtcctaagaggatctaggagagagtgtacctgactccatgaggtccatccctactgttn

SEQ ID NO: 18393 - DNA, 407 bp, Homo sapiens
  misc_feature (1)...(407): n = A,T,C or G
cccgtctctactaaaaatacaaaataaattagctgggcgtgggggcgggcgcctgtagtcccagctactcaagaggctgaggcaagacaatggcgtcaactcgggaggcaaagcttgcagcgagccgagatagcaccattgcactccagcctgggggacagagcaagactccatctgtaaataaataaataaataattaattaattaattaaaaaaaataaatgcgcaaaagaatggcgtgaactcgggaggcggagcttgcagtgagccaagatcgcgccaatgcactccatccagactgggccacagagctaaactcttgtctccgcaagataacattaactgtgngaaggaatggcctgacccaggtgctaacttgacatctgtccacaaagccctaatgaaan

SEQ ID NO: 18394 - DNA, 378 bp, Homo sapiens
  misc_feature (1)...(378): n = A,T,C or G
catggcctcagttccgaaaaccaacaaaagagaaccgcggtcctattccattattcctagctgcggtatccaggcggatcgggcctgctttgaacactctaattttttcaaagtaaacgcttcgggattttatttttggcctttttattattattctagcattttagggcttccactcttttatttttagatgggtaactcattgatgatacctatttgccatatagctgatcccaactgatgaaaaccattccaaaacatcaataattaattcacttaaagacgatggtccctctgtccctaagacagatcctatcaagagagggaaaagtctcttttctggaaacaaattgacagcaaaaagatgaaaaattagtn

SEQ ID NO: 18395 - DNA, 406 bp, Homo sapiens
  misc_feature (1)...(406): n = A,T,C or G
cttgagggcagtcagcagtctagtggtggggggctggatgggggcacctcatccacttgtaaaatgcatgcagattatatagcaccttcccccagtaacctccacatggcaaccctcatttcctaagaagctattgttacatgcatctaccatacactggtgctgtatggttcattgagtgtcccttgtgcctagcatgggactcaaaggctcctgtcaaaggacagtgaagcagggacctgccacactgagtttatgtctctgagctagttttggagccacagtagtggttaccccttcctagagctccccccagaagctctctctgcctccccatcacactccttcccacctctcagcactggtcacactgtctgggaattgttggtttgcttctcctgcccan

SEQ ID NO: 18396 - DNA, 379 bp, Homo sapiens
  misc_feature (1)...(379): n = A,T,C or G
gccgcctccgcctcccaggatgagctgaatcagcttgaacgggtctttttacgacttggccatgctgaaacagatgaacaattacagaatattatatctaaattccttcctcctgttttgctcaaactctctagcacccaagaaggagtacgtaaaatggtaatggaactgctggtccatctgaataaacgtataagaagccgccccaaaatacaacttccagtaaagacactgttggttcagtaccaggaccctgctgcagtttcctttgtcacaaattttactataatttatgttaaaatgggctatcctcgcctaccagtggaaaaacaatgtgaactggcccctacgcttcttactgccatggaagggaagcctn

SEQ ID NO: 18397 - DNA, 405 bp, Homo sapiens
ctcaaaacaatcttacttcctatctctgtcagaatgaaattcactctttaacataacttacaacaccctatttattccagaagcgctggaattatctggggatggttctggcggccagaaactggtggaaatccaggaaagatggtaaatcttagctacttcaagcccttcattttatacagactgaaggcaataattatgacaatgattatgaaaacattaattgagcagttactatgaggactatggccaagggactgaaatgctttaatacagaaataaaactgaatttttcttctctatggaaaatcaaatatttgggtccaggaaaattctcttaacaagagggttccccaagaacctatagtctataagaaccagaatagttataaatacaaagcttta

SEQ ID NO: 18398 - DNA, 378 bp, Homo sapiens
gcaagctccgcctcccgggttcacgccattctcctgcctcagccccccaagtagctgggactacaggcgcccgccactacgcccggctaattttttgtatttttagtagagacggggtttcaccgttttagccgggatggtctcgatctcctgacctcgtgatccgcccgcctcggcctcccaaagtgctgggattacaggcgtgagccaccgcgcccggcccggttgctattttttctcagttttcttatctgtacagtggcgggagttatttcatagaatcatactgaggactaaataagttatttcttgtaaattacttacatgagtacccagcataagtgttagctataataattattatgttattaatgatta

SEQ ID NO: 18399 - DNA, 398 bp, Homo sapiens
tacgatgtaggggatattggaggggaagtgcgagtctctcacttgcctgagagattcttctcgaatacagctctcacagatctctaacatctgcctctgctgtgtttatgaacaaaacaacgtgttatctgctgctgtctcaaaccgctttgtcagaacctcttcaccagaatttatccgacactccagcagtgcctgaaagttatctggagtaaagagaccttctgggattgcatctgcctcatgaccatccagagggatgttttgcttttccatcagaatcacgatttcaaatagagattttaggtattctttgttttccttctcttcaaggagcacaggtaaaaagtcctcatcttgcccttcaccctcttcttcgctggcgttctgagcattgg

SEQ ID NO: 18400 - DNA, 397 bp, Homo sapiens
gaaacaaaaaaggtattgagcacagtaatgccaaaacagaaaatataattagaaatgatgaaaacatcatataaccacagatatagaagagatgaagtattataggctaataatgcatgcaactgtagtattatatcttctaattcagaagcctggacaattaggctgattttgtacacagaatatatattaccaatgttgactcaaaattgaatagaacatttgaatcaatcactgaaagtaccacgtacatttttggaaagttgatgaaggagacatcgttaaagagagattcgttttgttactgaagtacaacttacgagtggattgttttatatggtaggatgttggacagctccctggttcattttatggcggcaaaacctaactatgggaa

SEQ ID NO: 18401 - DNA, 401 bp, Homo sapiens
ccattttcaggagaagatctgatgactcacaaatgacttgatgtcaaaccagctaatatcatgatacctgacaggagagagagacaaaatgtattatgaaacttgtcagatttcaagtatcaattacaaaattagcatttggttcccaatttgcatacgtacaagaaacaaatacaaactttttcattcagcaaataatcctggagcacccacaacatcctaggttttgaggctaagatgctgacccagccacactgggccctttcctgaaggagcttaatgtctgtatcggtgccaactaaagaacattctgctgggacagcgcagctctgaatctgtggagtaggtgtcacacagggcaactgagctttaaattttatttaaaattaatttgggcccgg

SEQ ID NO: 18402 - DNA, 339 bp, Homo sapiens
gtttcactcttgttgcccaggctgaagtgcaatggcgcgatctcggaaataaaaaattaaaaaaataaataaataaagtgactaagtaactcaatgaaatgggatagtgttttcaataaacagggctggaacaactgaatatctgtatttaaaaaagagctatatatcatagataaaatagtaaacttgaaatgcattacagaccacaaggcaaagcgaaaactataaaacttctggaagaaaacacagcataaaagatttgtgaccttgggtcgggtaggcaaagatttcttttttttttttttttttgttcgacggggccggaaattccaaatttat

SEQ ID NO: 18403 - DNA, 174 bp, Homo sapiens
ggactcaaagaacctctgggtccaagggtagaccaccagcagcctgcccagggcctcaccaccaacttcatccacgttcaccttgccccacagggcagtaacggcagacttctcctcaggagtcaggtgcaccatggtgtctgtttgaggttgctagtgaagtcgacgcggccg

SEQ ID NO: 18404 - DNA, 343 bp, Homo sapiens
cacaatcagaggccacgaaaggattttaagcacataagtctctctgttgggtaaagcataggttaggagaggaagagagaaaatggggacactattaaggagcctgtccatcctattctctattcaataaatcgtggtggcttgtgctagattggttgagtgggtatagatggaacaaaacaattaaaggacattgtcaatatagaactgaaaagagttgcagaggggttcgatgtaggtagaaagaaagtaggagtcttctgagagtcaagatggagaaactgggtggatgatagtgccaatcactgagacaggaagaaccaaatatcacagggatctggtg

SEQ ID NO: 18405 - DNA, 343 bp, Homo sapiens
gggtgactcgggagctcatgagacttcaggaagtccctgtacttggccaggaaagggttggccagagtgatcagctcttgccgaagctcctgcagagccttgtctcgctcttggggctcccctgtcacctgctgcctgtaatagttgatgtagaagttcatccagtcctccaccacagtcaccatgtcttcttcagagacgagaggatcattgaagacctgctgattcagcagaacgctgaactccttcaatcctgcggaaatgagatccttattggccttaagaagagccatctgccttcaggtctaacaggctgtatatgtctcacccacactcttggtcg

SEQ ID NO: 18406 - DNA, 327 bp, Homo sapiens
gttctctttggctttttttatccttcaatatcatcaaatcacatttttcaaaatgtctatcacttgttactaactatttgtgaatgatttggtcaccatttacttccctttgggaatcatgaacagttttttctcggggctctgaggcaccattctgtctctggaagacccctaaaggggtggtgcatgagttaccaaaaatgatgatgccttcttgagccctggctaagcttgtcctgtacctcccgaggcagttcacccctcgctccttgcatggcagacttcttgagttactttcttaactttactttttatttcttgtaaatg

SEQ ID NO: 18407 - DNA, 328 bp, Homo sapiens
  misc_feature (1)...(328): n = A,T,C or G
caccatgctgggctaatttttttgtatttttagtagagacgaggtttcaccatgttggccaggctggttttgaactcctgaccccaagtgatcacccacctctgcctcccaaagtgctaagagtacgggcgtgagcaaccgcacatggccagcaactgtatttttaagaatattatccagtggcttttagcatatacataatattattctacaaacatcacctaattgcagactattttaatcaccttatatcccgtaagcagtcattcgctattcctttctccccctagaccctagcaaccactcatctgctttctgtctttgtggn

SEQ ID NO: 18408 - DNA, 404 bp, Homo sapiens
  misc_feature (1)...(404): n = A,T,C or G
ggggctcccaggtgtacctaggctgaggcaggagaatcccttgaacccaggaggcagaggttgcagtgagctgaaattgcgccattgcactccaacctgggcaacaagagtgaaactctgtctcanaaaaaaaaaaaaaaaaaaaaggggggggcggggcccgaaattccaaaatttaaaatcggaaaatcggaaaaaccccggggggtttttttaagggggggtggggccccatttaaattttttttttttaaaacagggttggccttttttttaggaaaaaaacccctttaaggttaaatttgggccatggacccttggattttaaaaattttttaaaagaacaaaaataaggcccctttttttttgtacccaaaattttttagaaaaaatttttaaggggg

SEQ ID NO: 18409 - DNA, 404 bp, Homo sapiens
cttttctgtttacaaataacctatgatgattataaatttaccttcttacacagttttagcactagcaaccaatggccattaaggacaggaagcctaggatcaaggatggcacttttcacagtggtcaggaatacaggcttcagggaacagtagccagttcaggtgcaggctctatttttttaatgtctatacatttccaaaaattattccttaaggaaggttaccaaactttctcatgacttcataaaattatattatattcaagttcagttgaaagaaaataatgtatacttcaaacaccagaaactattattagagtaaaatatataattatagaaaacagaactgaaatttacatttcaattcaattcaacatattcaacattaaacacttctagcatgtg

SEQ ID NO: 18410 - DNA, 415 bp, Homo sapiens
cttgttctgtcatccaagctggagggcagtggtgtgggcacagctcactgcaaccttgaattcctggcatcaaccaatcctcctacctaagcttccctagtagctgggattacaggcatgctaccatgcccagctaatttttattttttatcgaaataaaaatgttacagtgaaccatgattggggcactgcactctagtctcgctatgctgccccagctggggcccctttccctctaccacttttttttactgaatatgcattgctctccatcaggaataaaataaaggaaaaaaaacaaaaacaacctccatgaaacctataaatgacaaagatttggggaaaacaggaaattcccctcaggaagccagaagattatccaaagaacttattaaataggggctcattattcttc

SEQ ID NO: 18411 - DNA, 357 bp, Homo sapiens
ccacctcctgcctgacgaccaggcaaaacaagcacatacacaaacaagcaaaaggggaggatgagagtggtcattcgggtttgctttggaggtccagagaaaatgcaagtccaacttccaggcacagaccagttgcccgcagcaggcttcctcccattggtctcagaccaaggtgagccactcccccgggcgggacagagaaagctcctctggaagccagacaagctcggccacctcgaagtcttctttggaatccagcaggtccaggcctgagccctggcgcctggttaaaccaaaagatgacaaccaagcagaaaaaaatagccccagagagtatctgctggagaggcagacagg

SEQ ID NO: 18412 - DNA, 360 bp, Homo sapiens
ctgatttattacaaaggatattttaaaggatacaaatgaacagccagatgaagagatacacagggtgaggtctggaagggtccttgtggagttggggtgcaccatcctcccggcacatggatgtgttcgccaacccagcagctctccatgtcctgtctttcaaggatttttctggaggctttgtcacgcaggcatgatcgagctccagctctgctccccaccccaaaggatggggaatggggctgaaagcactaaacttccaaccatagttaggtatttttggtgaccagtccccaaataaggagcccaccaagagtcacctcatgagaacaaaggacgctcctatcatgcagaaaattc

SEQ ID NO: 18413 - DNA, 417 bp, Homo sapiens
ggtgatcaaaatactctaagaagcactgggaaacattgaggggatggttcaaacatcagagctaaggcctaatttcccaacagtcattatttctgtggtattttgcatattagagacgtataggttcctcacctaatccttgttttttcattttatttttaatacatatgaaagtcataataacaaaaaaaattcatacatcagcagctcagctagaaataaaagtctcaatctactggaagcccctgtgaacttgtatcaaattcctttctctcttcatagaggaaataatgactcccaaaatgtggtaatgaacaaatatctctaattgtttaaaatttagtatatgtgcaagtctccacagacacaatcatgatcatatatttttagaagctaaaaacgtgtctatcatcaggg

SEQ ID NO: 18414 - DNA, 361 bp, Homo sapiens
cccagaaacacatctcagcacaggatggtgcacccaattcatgcaactatgtgtagggctggctgcaatatttgctaaatgacagatttactaaatcttaaaccctacctaaatgagaacatggtttcttaagaaaagacattatacccaacatgtagcacattggtcattggtctaagaaggctagtgattctataagatatggaaaaataatcaacatcattacatggagagcaaccttcttagcagagtgggtgataacctatattgacaaagggctggatgttgggtagctgacttggggatgtacatcagtgtctcttcttgacctagcagccagaataatccttttttttttttt

SEQ ID NO: 18415 - DNA, 417 bp, Homo sapiens
  misc_feature (1)...(417): n = A,T,C or G
ttcgcgtcgacgcctttttaaaaactggaataggctgggcgcggtggctcaagccggtaatcctaagactttggaaggccgaggcgggtggattacctgaggtcaggagttcaagaccagcctggccaacatggtgaaaccccatctctactaaaaatacaaaaaattanctgggtgcagtggtgcgtgcctataattccagctactccagatgttgaggcaggagagttgcttggacccgggaggtggagggtgcagtgagccaagatcgcgctactgtactccagcctgggcaacagagtgagactccgtctccaaaaaaaaaaaaagggggtaataaccctctgaaactgaaccctgctttttaccttctattgggaattcctagaggcgcgtccgagttttcaaaataatttt

SEQ ID NO: 18416 - DNA, 360 bp, Homo sapiens
cttcgtattactattgcaaagggcccatggaatacggggcttagcgctataagcttctgctggggataggaattctggagctcctgatcatcgtgattctgggggggcccttgattatcttcaccatcaaggcctacagcgaggcctgccgggacggccttcgagcagagatggaatgtcgcaatgtcacccatctcctgttacaggagctgaccgaggcccataagggctttcatgatgttgaggcccatgccgccacctgcaaccacactgcgatggccctaatggcttacctggatgcagagaatgcccaaggacccaacaaagtggatgagcttgatggagagatcacttcattat

SEQ ID NO: 18417 - DNA, 358 bp, Homo sapiens
  misc_feature (1)...(358): n = A,T,C or G
aagaatagttacaaaaccaggcactgttcttaatcactgaggttgtagcagtgaaaaaaggaaagtatgctcaggaaacttaacattttagtatggaggtaggagggctagggagacaaatacctgtatatcaggtgctgtgtgatgtaaagaaaaatggagcagaatcagggagctagagagtcatagaaggacagatcgttgcttgccacgtggtaaagattcattaaatggtaaaatatttcattcatctttagtttttgaaaaaaagaccccttacccttgtatagcttttattctcagcattattatgatagcataatagcaggaagattaacttttgctgttaggtgtaaan

SEQ ID NO: 18418 - DNA, 407 bp, Homo sapiens
caaaagtagatgaggtagcttataaaagaaaaggtaattatcaccaaatgtaaatatgactagaaaatatggaacaataaacaacagaaaatcaaaacaagaaagaaacaaaacacaaaattaataaaatgaggctgagagcctatgtaactgttatagtttagccagaaatgatttgttttttaatcatcacaaagaataggatatataatcaagagcttcattcacttatgaccacagatataaggacacaaaagagaaaagtgctataccttagaaataattatgaatatacatgggccttgaaagatctcaactggtcctaaaatgtcacataaacttaaggctggatttctctctcctgcaaaactggcacatagtgaggccaggagtataagaccagcctg

SEQ ID NO: 18419 - DNA, 362 bp, Homo sapiens
ggcgcatccctgtaattccagctacttgggaagctgaggcaggagaattgcttgaaccagggaggcggaggttgcagtgagccaacattgtgccactgcactccagcctgggcgacagagcaaggctctgtctcaaaacaacaacaacagcaacaacaacaagaaacaaaaaaccaaagagtcaagcaaaatatggcctcaactttttacccaaaatcaccagaatgggatgggcccctctgaaatgtatgttccacttggcaggttatatcaccacagttaactacaaagctagaccaccaaaggaataggtatgtaggtggctactaatgggccaacagtggcttatcttatactctctc

SEQ ID NO: 18420 - DNA, 356 bp, Homo sapiens
  misc_feature (1)...(356): n = A,T,C or G
ctgggattacaggtgcctgccaccaagcccagctaatctttgtatttttagtagagacgaggtttcgccatgttggccaggctggtctcgaacttttgacgtcaggtgatccgcccgccttggcctcccaaagtgctgggattacatgcgtgagccaccgtgcctggccacttctacttgtccacattacttatttctttctgtcctagggccacctagcctccttttgtggcactgtgtgaggaatgtgggttagatcagctgctcagaactccagggtccctcattgtagggcttcctgatggttgtttgaccatcagtaagctcctgacctttgagccttcctcatttgaaan

SEQ ID NO: 18421 - DNA, 225 bp, Homo sapiens
cctatgtgtgcctggacatgataatttattgctttaccatgactcacaagagaaacagcattatgagaatatttcaaatccgcacaatttccttcctcaacctcactactcttaacatttctttatcagacgccactggcttcctaaaatggaccactgactatgtatgtgtacccatttcattatgctgccttttctcttatgaggaaaacgtcgacgcggccg

SEQ ID NO: 18422 - DNA, 225 bp, Homo sapiens
tttttttttgcaatgagagcacttgttttttattaggcagaatccaaacgctcaaggcccttcttaatatgccccagtttagacgcgggacttagggaacaaaggaacctgtaatagaaattggacagcttgaaggcgagcttagtgacacttgcgggccggggcattagccacaccagcccccactttctgataggcagcctgcactgggggtcgacgcggccg

SEQ ID NO: 18423 - DNA, 390 bp, Homo sapiens
  misc_feature (1)...(390): n = A,T,C or G
caaagtcttgctatgttgcccaggctggtctcgaactcctgggctcaagtgatcctcttgctttggcttcccaaagtgctgggatcacaggcataagccaccgtgcctacctgtaattgaattttcaagtgaaaaacctgactatatcgcctgcctaatctaaggtgtgtcatattgtgaaattttaacaagctctctttcagtgtttaataaaattaaaaccctggacgtcatcacatattaaatattaaggagctggtctggcaaaacagaaatgtgtaaggcagatacctaatcttgagaagcttacagtcaagtgagggatgataaaccaactgccagcgataaggtgggcacttgaatgatggaaggagaattatgatagaggcn

SEQ ID NO: 18424 - DNA, 352 bp, Homo sapiens
gttcgcagcggggcttccgggctccttcgtgtgggcctgggctttgcatccgtgccacaggtagatgagggccttgttgacgttaagcaccaccatggaagttctggacctcaggctgctacagtgacaggccacttccagcaaattcccttccacgggcacctctccacgcacgcagtacagccgccactcactttgcacattttcttcttcctcttcccgcctccccgagtgcaccaccatccccccctggaaacactgcaggaaacaggggggctcctttccctggagaacctggacctgggcccccctttcctcgtccagctccaccgtcatcaacgccgacgtgccg

SEQ ID NO: 18425 - DNA, 358 bp, Homo sapiens
cgggacagctagactaagttggtcatgatgcaaaagctactcaaaagcaaccagcttgtcctggctcttgccctcatcctgggtctggaatcctcagctcacggttatcctacacagaaagccactgtccaaagggtgcgctgcaatccagacagaaattctgcagactgccttgaagaaaagggaccaatgttcgaactacttccaggcgaatacaacaagatcccccgtctgaggactgacctttgtccaaagacgagaatccaggacttgaatcgtatctgcccactttctgaggactactctggatcaggcttcagctccggcttcggctttggatcatgatctgggagtggct

SEQ ID NO: 18426 - DNA, 341 bp, Homo sapiens
ctttaaataaataaggagatccagaatatagcataaagtccctaacttaaaccaagatattatgttttatgtttctcaaataaaaagtttgagtttatggcaatttattataacaatgtttttgaaggacttcattgactaaactccatgctaagagtttgccagaaatgctgccttctgtagcaagtaaactttaaggatttaataacattttctagttacagagggtttctaatcttcataggaacaagttttattttaacaggggctaaaacaggtatctggtgataacagattagcactgaatgtgtttaatcattgagcccagagcactttatctt

SEQ ID NO: 18427 - DNA, 309 bp, Homo sapiens
gtgttgccagacttggaaccagagaagcgatcagggacccctgatggccgcttactgacatcataaattatgactttgggggctttgcctgggtactgttggtaccaggagacatagttataaccaccaacatcactgctggttccagtgcaggagatggtgactgactgtccaggagacccggacactgagcgaggctgagtcagggcagactgagtccaggatcctgtgccctgagtgaggaggctgaggaggagcaaagcccaggccatggtggagacgtcccgagagtgctggtcgacgcggccg

SEQ ID NO: 18428 - DNA, 342 bp, Homo sapiens
gcgcaatctcggctcactgcactccagcctgggcgacagagcgagactgtctcaaaaaaaaaaaaaaaaaaaaaaaaaaaagggggggggggggggaaatcccaaaattaaaaaggggaaaacgggaaaacccccggggggtcctttaaaggggggagggggcccccaaaaaatttttttaattaaaaaacggggggcccttttttaaagaaaaaaaacccccaaaaaaaaaaagtggggccagggaacccgggaataaaaaaatttttaaaaaaaaaaaaaaaaaggcccctttttttttgggaccaaaattttttaaaaaaaaaaaaaaagggggctttt

SEQ ID NO: 18429 - DNA, 309 bp, Homo sapiens
gtgttgccagacttggaaccagagaagcgatcatggacccctgatggccgcttactgacatcataaattatgactttgggggctttgcctgggtactgttggtaccaggagacatagttataaccaccaacatcactgctggttccagtgcaggagatggtgactgactgtccaggagacccggacactgagcgaggctgagtcagggcagactgagtccaggatcctgtgccctgagtgaggaggctgaggaggagcagagcccaggccatggtggagacgtcccgagagtgctggtcgacgcggccg

SEQ ID NO: 18430 - DNA, 413 bp, Homo sapiens
  misc_feature (1)...(413): n = A,T,C or G
agagtggccaaactataggctgctaggggtcacagaggtctgcctttggacttacggcactggaacttanatttaacatcatttaacgagatgtttcacctactttatataaagagagagagaaaaaaaagagaaggataaactttgaaactgtttgaattttgccatccaagtgactatggggtgcactgtaaactgggggtcaaaccacacaaaactgtatgcatttgtgataattcagagtcctcacctctaaaatatatcttattgatatactttgtactaatgttcctctgactctcagagaatctcattattaccctggctctaggcaggtggaagtggaaggctgcactgngtgacactcgggagatgtggtctgccacttatgtcttccttgcacaggaagggaa

SEQ ID NO: 18431 - DNA, 345 bp, Homo sapiens
ataacatagtgtcttccatagagttgttgtgagaatcaaaggagggtagtgggcatgggaacacttggaaaactagaaattgtcatacaaatgttagttaagatggacttactttcaggatcttactgcttacacattaaaaaaaaatctgattttccccttcttccttccttcattagaatgaagcccaaactgccaaggagtttattaaaatcatagagaatgcagaaaatgagtatcaggtaagaagatttggagttaattttcctagatctactatcttattatttcgctgttagcatattttgttaggccttgtgtcctttaatgtaaatatacatgctc

SEQ ID NO: 18432 - DNA, 365 bp, Homo sapiens
ttctcgaagtacagggcaaggacccctgagggtgctaagaccttttgaaaggtcttgtcttttccaattatgtattttcatgaggcaagatttctatttttacatattttgattaaaaacaaattgaatgcagaagtggctagaagagtcctgctgacttccattaagacattaaagaggcttaaaaatgcaaaacaaaggcaggggaaactgttacttttcagaaaaaaaatcattattatgtaacatttcattggtttattgatgtggcttttaaatgagataataaatattttaaaatttcttattcatttctaacatggtaaatatcagtagatataacccacataaacaacaggtctttg

SEQ ID NO: 18433 - DNA, 348 bp, Homo sapiens
  misc_feature (1)...(348): n = A,T,C or G
caaaaaggtcactagatcttctaatgaatagatactagtaattttaaatcagcacctcacttgttcaccgacaaagtacatgtgaattggatgtataagttatttgtatataaactgtaaaggactataaaagtatagtttgttatgattgatactaaagtaggtattaaaggacactttttttctgaatatatgaacactcatctacaagtatactttacctcatagtgacaggttatctgcaaggtgataaaagatagaaccaagatctttagtggaataactgttctccctgagaagttcttatttacattttgtcaatgaaaaaataacagcaaataaaggtan

SEQ ID NO: 18434 - DNA, 326 bp, Homo sapiens
atttctgtatgttaatatggatgaatgtatgctactcaggtcttttcaagtcaaaatgtatttctaaatataagatgaattaaggatatttgtcagtgatattcactagtgaattctagagcatatgttatcagtagatgggcagtccttgtaaaaattgaataatctagtgaaaggatgaccggaaataatatttaatggggtaagctaagccaggaatcattgtacataaacacattaggtgtgtcttacatcataaatatgcctactaaaactagttgaaggaagaatgtgtatagatgctgaaataatggtcgacgcggccg

SEQ ID NO: 18435 - DNA, 339 bp, Homo sapiens
gggaagggaggattctgtctggagctggaactgctcagggagcccctctctggattctgcactgacagctgcagacagaaaccacgtggcacctccgaaaggagaaagctctgaaatcatccaggtagcattctttgacttttcaatccttttcataataaagtatttaaaatgtacaaaaatgaataaagaataatacatctgacgtccatgtatccaacactcaatttaaaatctaaaaagctaacttggtttctgtatttcacctccctttgccgttttatagacctcttggttctaatgacttataaaaaaaaaaaaaaaaagtcgacgcggccg

SEQ ID NO: 18436 - DNA, 346 bp, Homo sapiens
cagatccagagcaaggcatttcaattgctttgaaaaatggctaagttccattacataccaccactaaagaagatacctcattgatggagcttttcaccatgatagagggcgtcttgcattggttcacaatggcctgttgctttttagccttcagttggtttagggggaaattgctcaacctatgagacctgctcaaattcatactgttctggttttgctttggaattctttgtccagtaaattagctcttcataacgcagttccaccatttcttatccagcatagattcattctgcccttgacagctggctaggtgtgtgtgtatgtgagtaggggtgctattgat

SEQ ID NO: 18437 - DNA, 348 bp, Homo sapiens
ggaaatttagcatagatcacaaatataaactttaatttaaagatgctggtaaaatttaaacacaggtatagagtgtgttaactttctcaacagagataatactttctaggttttaaactttaacaaaagtcatgcttgaaagtcctggtaaaccaaggtcacattaacatacaggcaaagtggacaaggtataaattactgtttacctaccaaaaaaaaaagacagtaatgacaattctcctaaaggttgaaagaaggactgacattcctaaacagaaagtatatcttatgcctaaatttgtctggagactagaagctgcagaaaatttatcaagatatttcaagttg

SEQ ID NO: 18438 - DNA, 363 bp, Homo sapiens
agcagcttcaagtactatttaaactgcctgaaaggcattctgttatcctggggttttgtgggcactagtgtcagcctgacatgaaagacacagaaggactcactgtgtttggatgtacccagattagggtattgtccacacaggccgtggtgtgtgaatccagtgtgtcattgagaggcttgttagaactaggtctgtgtttcttggcatgggacctggaactctaccactttctgcccttctccacgccccctctcccgcccccacagagaggggcagcagtcaggacattgcccccttttgcaggtggatgtttctctccatgcaagtgtttgtgtgggtctcaaaaatttgcttttcatt

SEQ ID NO: 18439 - DNA, 688 bp, Homo sapiens
  misc_feature (1)...(688): n = A,T,C or G
cttgaactgctgggctcaagcagtcctcccaccttggtctcccaaaaatggtaggattataggcatgagccactgcgcctggcccaatctacaattttatattctaaacccaaactattattcctgagtgaggaaaaataaaaaattttttcctgccagtgaaaaactataggacacacctcactaaaataaaaagtgaaccccaaagaaatgagatgcaagaaacaacagtgaattaaaaaaatgataaccatgttagtaaatttaaacaaggactatattaaaaagataataatttcatcaattttggggtggagtttgaaaaaacaaagtgaagctaaagtctaatagtgatactgtggaaaacaggatgggggaggaatcagagttaaagctttctaaccagggcctcaacatatgactatgtacaacgcangggatactatccatattngtagtcatgggcagttttgctatttaataagaaataatcttgccaatgtccagaaaagtatcttaaagaggcagctttttcaaaatgacactaaaatgatgtgtggctaaaatcttataatgttcagagcattggatggtctcttagccaaactttagggaatccttaaaggatngaatagattacttccaatcagtgaaggaaagaaattggagaaataaaaattcattccan

SEQ ID NO: 18440 - DNA, 347 bp, Homo sapiens
aaaacattaagaaagtgctgataagatttaaaatagatgaaaacatattggtaatcaaatacagcagagttgaggaatgcccagtatcatacaggttaaaaagagaatttaaaaaataaatgcgttttcctagaacagtataaattttcagttataaagggattttgataacttgagtaattcattttccctgccccagattttcttaatgatccagaccacctgactttagattaaattaagcttgctgagatccttttgtggatcataagcctgatgattgggttttcacactgtgtgagacaggcctctctcaaaccttgttgcattgtgcacacattacctgt

SEQ ID NO: 18441 - DNA, 357 bp, Homo sapiens
ctttggaaataaccataatagctaaaatatagaagaataatcaaaactgagcttttctaagaattgaaagcaaaactttttgttccttgaacgacattttaaaactcgtgtgtgtgtgtgtgtgtgtgtgtgtgtgcgcacgtgcgcgcatgtgtggtataaatacagccctcatggagaccataaagcaaatgggggtataaatctcacatctcacaaaaaaaaagaggaggctcctgtatactacaaaaaaagtaggaagagagtggatgtatttatctgcaacaaaacaacttgtgggagagcacttagagagggaagcacataaaaagagactaggactccttccaaaatctg

SEQ ID NO: 18442 - DNA, 362 bp, Homo sapiens
agatacgtggcatctccttgacagaggtggggagaagtatttttttacagtccctattttacagatgaggaaactgaggccctgagaattgactcattcagatcacttcccatgatcacgcagctgagcagtttccaatacagaattcagatttggggttccctacttccaatccaggtctctgtgctccacacttgtctttcgtgctccatgtttgaagaaattaatattgtggaagaacagttttaaggcttaaaggaacttgagttaggatccgtacttggcagatgaggaaattgattctcatggatgtaaattcactgtttgaggccacaacaagcaaggcatcatggtgggaggtg

SEQ ID NO: 18443 - DNA, 355 bp, Homo sapiens
cttgaactcctgacctcaggtgatccacccgtgtgggcctcctgaagggctgggattacaggtgtgagccacggcagccagccagggatgaatgattttctatgcaagtctccatgccaggcattggtttcagtcttggtacactcttattattcctgatctctcctagggagagggcaacctccacactcagcttattgcctcttattttaaaaatagttatggagcatctactaggtgcttgggagaggtcagtagagacaacgaagttccttgcccttcatggaacttatgttttaggaaggagagggagacaaggagtcaacagtaagctttgaaccatgaagtaaatgat

SEQ ID NO: 18444 - DNA, 354 bp, Homo sapiens
acctggagccccccagcagggggagccccctcctgagccagctgggtcagcccagcattttcgatacccagaaaggtcaggggccaggaggaggtaagactggagtccggggttgggggtggcacaggggccttctgagaggcttctggggcctttggcagcatccaggtagcccccagctctgtccaggatgctggcttttttttttttttttttttaaaaaaggtcacaattatttccccaaccttgaggactaggggggcaaaaaaaggaattggaaccttccccttcaggggaaagccattcttctggcctctcctttttaaaggggtgtaattgggagggcccaccccc

SEQ ID NO: 18445 - DNA, 362 bp, Homo sapiens
gtcgactgttgcttacactttcttctgacataacagcgttcactagcaacctcaaacagacaccatggtgcatctgactcctgagatcccgatggtgcagccgctattaaaggttcgtttgttcaacgattaaagtcctacgtgatctgagttcagaccggagtaatccaggtgggcttctatctacttcaaattcctccctgtacgaaaggacaagagaaataaggcctacttcacaaagcgccttcccccctttatgaataatcatagctcctcctgtaacctgttgaatatgtatgtttggtccacacattcaccataaatccctttttcctctttcctcccttacagagcctggcttg

SEQ ID NO: 18446 - DNA, 354 bp, Homo sapiens
tgcaggttccccaagcagctcagctgacctagataagctaagctccgagcaggattgatttccttttctcactcctgaattcatatcactgcgtctaagtggctgcaaaattaaaatatatatttcaacataaaatcaatgttttcattataaaaatcaaataactgtacagaaattaccaaaaaatcattgcatatatgtaattttaaattctacataaaattatttcataatactttttaatactagaaagcaaaaaacttttgaaaactaaaatgctttgggttaggttagaagttggggaaggtgagctatgatttgttagatgaactgggacaggggccaggttcctaa

SEQ ID NO: 18447 - DNA, 363 bp, Homo sapiens
ggcacggaggctcacgcctgtgatcttttaaaatcatgaggcaaaagagacatggaaaagccatcaccacaacagagaaagtacatcaaagcctaaaagaactggtgatgttgttctagtaatcaggcttgtaacacaaggaaaataaagtgtgaaataacttcaggatgacaaaccaaaccatgaaatgctttaaatcaaatgtttattttccaaaaccagcagagggtctagcatttcagagaaaatatcaccacataatacatacccttaatgaataaagaaatgcattgtaaaacggtcttgagaaatgatacatctcaacattaaaaatatttaaattgagtctggtgagactcctgg

SEQ ID NO: 18448 - DNA, 71 bp, Homo sapiens
gttaccgtttgacaggtgtcctaaggcgagctcacggaggacagaaacctcccgggggtcgacgcggccga

SEQ ID NO: 18449 - DNA, 353 bp, Homo sapiens
gtaaataccattgttagtgaaataaaagcattctggctgaaagtccaaaatctctcctttaagttctgatgccagaatctccaggttacttacttgacccaatataccaaataaggtagggccctttttcctcctggggcagcccggttcttctgaaaggaagtatttcccagcctcttttgagtcacggtacacgtaggagattgcagtatttttatggcacactgggaaaatcagttgcttatagctggagacattggagcccctaaggctggaggtcactttccaaccagagctgtgctggagtccagtaggtgggaagctgtgctttgagggactaaaggaagcctgtg

SEQ ID NO: 18450 - DNA, 409 bp, Homo sapiens
  misc_feature (1)...(409): n = A,T,C or G
tggaaacatgctactccttccatagttagtttttatatagatggtaggtttagataaagcaaattagagaaaagagtagttggcaccctttttattgcttgctttgttttgtggtgcttagtctctgctgagagaattttttaaaactttattaactttgtgtgtgcgtttgtgtgtattatataaatatattcttatctgttagaattaccaactcaaggggctcacacctgtatgctcagcactttggtaggccgaggtagaaaaatctcttgagcacaggtgttcaagaccagcctaggcaacatgggagactccatctctattttaaaaaaaagaaataccaactaatgtatctgttggtgaagtgatgtaaaatatggggtggagtttctgtaaaaaggaatan

SEQ ID NO: 18451 - DNA, 377 bp, Homo sapiens
gagctaaatataaaagtattttaatataattcatttgaaacatttttgcttctttaccacaaaattaaaatgctcaaaataatagctatttttaagagtagccttcaaatttaaacaatttttaaaaattctattggtattatagtgtgtcaatgttgccaaggtaaaacattccagggtaacaccgtcaatgaacccattcacccaccactgattacgtgcacagccttgagggatacaaaatgtaagacactaattcagcctgaatgatgagacaagaactttcccccctctctcttaccatttagaactttgaataaattaaaacgttactacccctctaataaaacatgttaacaatgaagtcgacgcggccg

SEQ ID NO: 18452 - DNA, 394 bp, Homo sapiens
  misc_feature (1)...(394): n = A,T,C or G
ggaaaacttcaacaatcattggctgtagcatttcttctgtgttccattcagtgcttgtctcctcaggaacatgacatagggtttgatttaattatgaaaggcgtatattttcagagttttatactccccatagaatgaatgttgaattctgttcttttcacttgaaattagatctcaggcatggatttcatgattatcactataatggctcttcagagtggacattgcatcttgtagggaaccaccctctccccagctgctggtgtggacgctcctccttgatggtgtgggtctgggcccctgaagggggtgtcctgagtaaagatgttacagtagccagtgcactccagcctgggcgacagagtgagaccctgtctcataaataaataaatan

SEQ ID NO: 18453 - DNA, 410 bp, Homo sapiens
ggaattggaacaccttgccaatgtagtcactatggcaagtcatttctagtaacctggggacatgccgtcctcctacagccctcccagagcccgttcgtacaatgttgcaggtatttgctgtgattacttttcccattttccagaagacctaggtgggatttggcctgaaggaacctggttctaagggcaggttgggggcaagaggggagacgtggggcagtagtcaaaagcgaggatggcagcagccaaggaagaggctttggtgaagagcggccgaagcgagaccataggacacgatcttgggcacgcgtgtctaggaggctgccccggcctgctcctccttcctgtggtgtgtgtgggtgccctggagtaaatcattgggcagttgctgccttgctgcattcccaccg

SEQ ID NO: 18454 - DNA, 397 bp, Homo sapiens
atcctaagtggatactgtcccttcaaacctcctcagaagactggaggcaatggtacagaaaagcgtaactgaataaattattaatctagtactcactacgacaagaaaggcactatcacaacagatcagcctccaagcattttccttgccatgggcatgggcgtttcaaccactccagaaatcacaacaaaatccagactgtggctttttcaacacttgaattcattggccagttgtctgactctcccaccggtcactgctgttggctctggccatacagaaccctgatctgcactgtgtacatgctgccctatgtttcaccagtgacctttgtttggttctaaatgatttagctcactctctttccatgaagtttctttctctccatcagtctcca

SEQ ID NO: 18455 - DNA, 328 bp, Homo sapiens
cagggactcagatagcttggctttgctttttatggtggcttcctttttagacaatgataaaaaaaagtctgtagcatctctaaatttaagtcaagctgaagagtgagcatgcctctctatgtctttccagctgatcccaagattgactctcattggctttgactgggtcatgtgtctatctttaaaccaatctctttgacagggtgaattgaattactcaactgaccagctcttagtcatgtgtatcactcctgaagccagatgattttcttcacagctgaactacagaaaatgttggttttactaggtgctctcaggctctttaaat

SEQ ID NO: 18456 - DNA, 344 bp, Homo sapiens
tttccagatgtcctatcccgggagtcgcacagtatggagccttttgtgacaggcttatttcacttattgatacgtacttatgcccctctgcatgttctatggctcgataacgcattgctttttactgtagacattgcattgtttaaatacaccaaactttatttccctgccgacctactgatgacatattggtagcctccgagcgttggctattatgactaatgctgcttatatatctgcgtgcccgtaattggtagacataagttttcaactcctttgggcaaacaccaacaagcatgacttgggaattttgtaaatatctgcgaagctgtcttccaaagtcg

SEQ ID NO: 18457 - DNA, 368 bp, Homo sapiens
cagattctaaaaatggcggccccaggctgatgttgtggtaatctaatcagctcgggtcctccacaccccatgcagtgcgtgtgtctgcagcatattacaggcttattatgtttacatgaaaagactgggctggttttccttccccgagccagttacaaaaatgtggtgattttttactgcaaattacagtgctgagttttagctgattaattcgattcgttcttcctgaaaggcaaataaaatgtgtccacttttgaaaaaaaaaaacagccttgcaaatttcaggggcgatgacggtggcgcttcaacaataaaaaaaaattatttggggaccaataatacttgttgttagcgttaatccaaccatg

SEQ ID NO: 18458 - DNA, 399 bp, Homo sapiens
gatgcccattctcagcccttatacattatattgcttagaaacaaacccaaccctgttttcttatggactgtatactgaacatcatatgtttatagtatgtggctaaacaagtgttttattactgcatttatataaattatttaaccaaaacacttaaccgcagaaagtgctttactgagagagagacaacgcctcttatctaagaacctctaatttttaaacctcccttattctcagccttatatttgataaaagctgtgtgttaacacacatgcacccatgttaggggctaattatagaaaccagcctctttatagattagctgaggcatatttaagttgctacgcaggcactgcacatgcgtgagaacaatctgattgtaagccacaaatcaatgaa

SEQ ID NO: 18459 - DNA, 376 bp, Homo sapiens
cttctgtgtctgtagcctgtgccacacctgttttacaaaggatgctcaaagcaggcttactgaatgtgcagagcggtccctgtgctgcaatgccccttaaatacagctgtcaagctacagttttaaagcagatccaggcagaaggaaacctgatttgtgggaggcagctgggtaggtggccattgtggaaccagccccttgcaaaaaaacgtgttgaaatggggaggcacagtgtgtgttctctgtgacaataatagaaccttgaggtagatggtgtgtctacagagggatttgaggtttgatatcaaattcaagattaagactgtggaacagaacaattgtctttcctaacattaaaaacaaaaaccaacagaaa

SEQ ID NO: 18460 - DNA, 383 bp, Homo sapiens
aaaagtcttccttggaggctaagggagaaaagtgaccttttgaagctcaaggtgagaaacagcatgatgggtagcacacagtaactcacacctgtaatcctaacactttgggaggccgaagagggaggatcacttgagctcaggagttcaaaaccagcctgggcaacatagtgggacctcatctctacaaaaacttaaaaaaaaaaaaaaaaaaaaagggggaaaaaaaacctggcgggggcttttcccctctttaatggggggataaacaaaagttttgttaaaagtggcagttcctttccagggctgttaaagtggccctgcaaaaccaagctgtccatagaaatttggcaaaggcaatttttttccaaaaacggaaaaaa

SEQ ID NO: 18461 - DNA, 380 bp, Homo sapiens
ccgctccccaaagttgaccagatagatgtatcatctttccggatgtgaattatttcggctgtgtgctatgagaactgggtatggtgggaagtaattgtttttctggctctcatcaggtcctggttcctggttgcttttctttacccgagagggccacaaaagataccactctcctgagacttccaagttccccttcagcaagaccctcattcctctggggagagagggagagttggccatgttatattcgaaagagcctgggtattggaattggccatatttagtggtgagagcctgtgatacttatttaacctttctgggccttgtttcactcactacatttttttttttttttttttttggaaagggagcctcgcttt

SEQ ID NO: 18462 - DNA, 404 bp, Homo sapiens
  misc_feature (1)...(404): n = A,T,C or G
cagcaaccccaaaactgttagaaattatagaaagtagctgctaaagaacctaaaagtatgtgtgccatctggctaccaaaaactataaatctgaatctcctctatgtacgagctgaggcatggcagttaactacatcatgttaaggggtgcagggcagggtggaatataacagaacagagaggggtaaatatcaaagcatggaagtaatgatgataaatatgctgtgtagtgaagaaagcattttttccaaaaattcactcagatgcactgtaagttacctttgcaactagggaaataatgaaaactgatttttattgaactttccttatatatgatagatattcagcctttcacatacattaactaaatatagtcttcacacaaccacctaagataagtcacn

SEQ ID NO: 18463 - DNA, 374 bp, Homo sapiens
tttttttttagtaaaaactagttgttctttgataacgggctcatttttatcatttatcaaaaactaaagggtagggaagaaaagtgcgatggattaaaaaatttcttttttaaggaaagataaaacttattttcacaaatttacaaaagttgttgctggtgcaggatttattctactaagcaatgagactggggatcaaatccactttcttatctcaggaatcagcattatttcagaaatatgggtttttgtgggaatgctaaaatcaagcaacagtctgtttccaccaaaagattttgatttggaagttagagtcaacagaagctgtgttgtgcacgaaccccaaggcatctccttttcattctagcccattt

SEQ ID NO: 18464 - DNA, 338 bp, Homo sapiens
  misc_feature (1)...(338): n = A,T,C or G
gaaactttggaacttattgtagttagaaattgtaactttgatattgaattctcttgccttcaacaagcacactgacagagaaaaaatgctactgtctgttggttccaatattctcccactgctagagcttcctgttaagcaagtgtgatctgcaacattttttcaacttttgctagcactgtatactattgcattcttaggctactgtgaggtctatgtttcttgtaccagaaattgtccttttgacttctagatccttcttccctaatgtgttttgtatgtggttataaaattgtagacttttgtgattttgccaaagttgtagctaaatatttatn

SEQ ID NO: 18465 - DNA, 346 bp, Homo sapiens
  misc_feature (1)...(346): n = A,T,C or G
tatcattccaccacacccaaatctcatgtcctcacatttcatgcctttccaacagtctccaaaagtcttagctcattccagcattaacctgaaagttgaagtccaaagtctcatctgagagagggcangnntntttnccttanaancctgnnnnntcnnnnncnntttnttttctttctatttaccctntnctttttctcttctcttnccttcctctccntttcttcttctccttttttttctttttctttttcctttctttttcctctctttctctttcttctttttttttttcttctttctttctcctttttttttttctttctcttctcctctcctcctcttn

SEQ ID NO: 18466 - DNA, 372 bp, Homo sapiens
tttcatcaaactattattttctgttttccttctttgggtttaatgtgctgtacattttctaacttcttgaaattgatgtttagattactaatttttttcaaccttcggttatttttctaacatgcattaaagtctacaaacttccctctatgcttataggttatagtagcatcatacaagttttgacaagttttgatattttctttttttttttttaaataatacttaaagttcgggaatacatgtccaaaacgtgcaggtttgttacatgggaaaacacgtcccatgggggtttgttgcacccataaacccatcatttactttaggtggacgcggccgcaaattccaaatttatgatttcgagatactgaa

SEQ ID NO: 18467 - DNA, 343 bp, Homo sapiens
gctaacagtagtcagttcatcatgcttattgttgctaatctacttagcttccttgtgctgaataggggattgaaccagatgactaataatggtccctttaatgctaaaatggctgtgattttacatttttaaaaaacccacaaaagaatgaacttaagatttaagaactgttttccttggtcataagaatttctcttaaataaaagcattgggatgataaaaatgtaatcaaaccaacaacatagattcctttcccagtcccagttttgtcagctggtgtttaaagggagtcaaagattgctaatatttttttttcctgtgcagatctgaaaaccatgagtgg

SEQ ID NO: 18468 - DNA, 416 bp, Homo sapiens
taagaaactatggcttacacagataacactaatttgtctgagttgcatttattttttacatcaattttccagttaggtattactagtttaattggttttaaaatacattgcctttcaactagcatacaacttcctcaattttcttttttgtagctactaacatcttaatggcagtattcatgttagagctcagcctataaagtcaggatttaaacaccattccactaccagttagctgtgtgattttgttctgtttaacatctcttgtgtctcggtttcctcatttgtgacatagtggtgcctctcagaaatgctcagaagttcagtgagagtatgtatgtaaagtgcctagcctgcgccttactttttgtatatccttcatacatagtgttcccctcaatctcttatatcctagg

SEQ ID NO: 18469 - DNA, 400 bp, Homo sapiens
cacgttggattgtgtggagcctttcaggctacagaaaggaatctggattttattcttggtggaaaagggagttatagtaaggttgcaagcttgtccaactggtggcgcacaggccacatgcggcccaggatggctttgaatgcagcctaagacaaattcataaattttcttaaaacattacgggatctttttgcaatttttttttttttagctcatcagctatcgttagggtattttaagtgtggcccaaaacaattctttttttccaatgtggaccaggggagccaaaacactggacacccctggagcaagggaatgacaggatctaatttaccttttttaaaacttcctctgggggtctgcggataacggactgtcagttcacaaaagtagacataga

SEQ ID NO: 18470 - DNA, 351 bp, Homo sapiens
gtcgacgcggccgcggcagagttgaggttcaaacccagactgcctggcgtccagcgtgactgcctggcctccagagtgattgcctggcctccagggtgtgctcttccattgtgtcctcctgcttcccatattcccatgttcttaagcactgtcctccatcttgtttttctctggacgtgtctttagaggcagaggcaggtggtttgactcatgtctgttgaattctaaagattcagaatttatttgttgaactgaatgtttgttacatacaatttcctaattaagtttgtgggagtgccttattaaagatttgaagatatgggaagaattgcatatcctggctatagtgat

SEQ ID NO: 18471 - DNA, 343 bp, Homo sapiens
gggagacatgcttgcaaataggcctcaaaaatggaggtctcccactttattggtatcagaattacttggagagttttttagaagggtagatccccaggccccgcccccacctccaaagtcctgagcagctggaggtacacagtcatttggagggggaggaaaactgatggattctacctgaggcaaaaagatgagggaaaggaacaaagaaaaagggctgaaaaaaggtctataaacacatgggtggaaatgagcaaaagcacagaagaaacataaaataacaaacgtggctcatggagctgagtggaacagcagcagccaggcatatgacctcggtgagaaa

SEQ ID NO: 18472 - DNA, 666 bp, Homo sapiens
ggggaaggtatgtcctgggtgggggcgctgatcagtaccaaggtgagggggcagcaccagccaggacgtggccgccccaggatagagagcacacctccctcctgtgcttgctctcaggtagggagcgttcgggtggtgccatgggagcactctccctcccccaggtaatgaaagagtggccaagtgagtgttctgtttctgttgtgccacaaaacgggggggatgtgccatcaccaggttggacatgccaggtgttctgcgtgttaaagacccttgtgccatgctccccaagctcggggagtaaaactgggctatcccccgtcagggcggtacccttggcaccaaccaaacctcagtatactccctcccctcctttcctgtctgaacgctaggatctgctcctgaagcttcaggatgcctgcactttcactgagaagctgcttgcggttgttgactataagaaagacaacgcacggtgggactgatgggctaactgggagatgtgccggccactgatctaactttatgtttagcccaaatttggccttagtagggggacacccgcaaacagagataagcaccttttggttgctttgtgagggttgcaagttcttctgagttggaacacgctaccgtggtttctgggcatatttgtattggccacaa

SEQ ID NO: 18473 - DNA, 330 bp, Homo sapiens
  misc_feature (1)...(330): n = A,T,C or G
tgtttgtaaggaaaaaggaagttcccgaccaggtgcagtggctcacgcatcccagcactttgggtggtcgaggcgggcggatcacttgaggtcaggagttcgagaccagcctggccaacatggtgaaactccgtttctactaaaaatacaaaaattanctgggtgtggtggcgggcgcctgtaatcccagctactcaggaggctgaggcatgagaattgcttgaacccaggaggcagatatcgcagtaagccgagatcacgccactgctctccagtctgggcgacagagcaagactccatctcaaaaaaagaaaaaaaaaaaaaaaaaaa

SEQ ID NO: 18474 - DNA, 267 bp, Homo sapiens
gatggacaccaacctcttgagcaatatccagaagctattctctgaacgtattgatgtgttcagccctgtggagttcaacaaggtgtcggtgctgaccggcatcatcaagatcagcctgaagacgctgctggagtgtgtgcggctgcgcacctttgggcgcttcgggctgcagcaggtgcaagtggactgccactttctgcagctctacctgtggcgttttgtggccgacgaagaactcgtgcacttgctgctgggtcgacgcggccg

SEQ ID NO: 18475 - DNA, 329 bp, Homo sapiens
ctgacatttatttgctcagagttcttgacattaaaagcccatgatcaagctgggggcaggattggcttctcctgaggcttctctttggcttgcagacggcccccttctcattgtgacttcatgaggcagtttctgtgtgagcactgagctcctggtgtctttatctcttccgatagggcacctgtcctatcaagttaggattctgcccttttgacctaattgaacctgaattacctccatatggcctctatctttaaatatagtcacattggggacttcagcatacgaatattggagcgacacaattcagtacataataggaaggtatg

SEQ ID NO: 18476 - DNA, 330 bp, Homo sapiens
tttcttttgaaaatggactgatgtccaggcccctaaaaaattcaagaaggagagaactttaacttttcacaaattttaccagaaacagcgttgagtggttggtttgtaggatggtgcagaaactagacctgatggaagatgtatactggtgagtggcaagatgctaagattggaaaattatggagataaaagattctgaatgtttgaatcccaggcagaatcatttatatagttttaatatgtaggtattgattcctgctttttaataaggggagagcatgataaagccagaatttcaggaatgttagtctggaatttactgaaggggag

SEQ ID NO: 18477 - DNA, 349 bp, Homo sapiens
  misc_feature (1)...(349): n = A,T,C or G
gcaatatccattgtatccattgagtggattgaaagttcattcctttnttttttttttttttttttttttaaaaagggttttttttttttccccccgggtgggggggggggggggaattttggttttttggaacccccccctttggggttaaccccttttttttgctttacccccccaagaaagggggaataagggggcttgcccccccccccattttttttttttttttttttaaaaaaaaggggttttccttgggttacccggggggggcccaaccccccccccttggagatggggggcccaacccccccaaaggggtggaattacgggggggggccccccccccccc

SEQ ID NO: 18478 - DNA, 344 bp, Homo sapiens
  misc_feature (1)...(344): n = A,T,C or G
tctcaatttttcccaagctaactctgcgctgataaaaatgtcctctctctgcactatccatgggtacccataagcaacatgtggctactaagcacatgaactgtgatgtgactgaggcctgaatttttcgtattatttcattttaattaaaatttcattatccccataagaagtggttctgtgtggacagctcagctgtagaccagaggttgcaacaccttttctgttaaggaccagggaacaaatatgtcaggctttgcagccacacggtctctatggtaatgactcaactgggctgctgcagtgtgaaaacagccatacatgacacctgaacaaatgagcan

SEQ ID NO: 18479 - DNA, 351 bp, Homo sapiens
cggagtctcactctgtcgccagactggagtgcaatggcacaatcttggctcatggtaccttttatgtatgctaaatgatgcttagagtatgaatgaaacaacagtaacaatgtaaatattaaactcagtgttgaacatggaagacatacttgcatatgaattggttaaaattgtgtggttaaccttatcattaaaagagtatttattctgataggtagaaatttaaaacataggttacagtgaaattgaagactgcccagatgaatgtgtaagactccccatgttttctactttggtaattgatgaaaatgttattcttgtaggccaaaacatttaatatatacttactct

SEQ ID NO: 18480 - DNA, 344 bp, Homo sapiens
  misc_feature (1)...(344): n = A,T,C or G
ctgctttacttagtgcaggcttgcacaactgcattctttgaacagtagtctccagatgttccagtagataacctcaaggagcatggcaccagggagtgactgccctcagcaaaccttctggtagcaggcacagatgtgagtttgcccacatcctgcattcatgataaacagtttgctgtttgatcatatagccttcagtgggatgctgagttggtcatgaccctcgggcctttagctccctgcagttaactcttatcacatataatttgcaaatatttttacttattttctacaaggcattgtcactctaatgtttttttgatgtgtggaaattttgtagtgan

SEQ ID NO: 18481 - DNA, 350 bp, Homo sapiens
  misc_feature (1)...(350): n = A,T,C or G
cttggtttctgaaacagaagtacttaaattcgtctttctaataaaaaaattatgacgcaggtttgtaagtcatggcataaagcaaacatgtactatggtataactgctgcccaaagaagtgatgatgtgagatgattatgcaaaatgtaggacatttctagtttgaatcacagctgcctaaagagaacagtgacaatgatcatgagggtgtcacattgtcacaatgatgatgaggcatcattctaagaacttcataagtattaattcatttttcctcacagttctgttaggaagttactgttatctccattttacagtgagcaaattaaggtagagagaaatcaagtaan

SEQ ID NO: 18482 - DNA, 349 bp, Homo sapiens
  misc_feature (1)...(349): n = A,T,C or G
ttttctcctgcctcancctcctgagtggctggaattacaggcacacaccaccacgcccagctaatttttgtatttttagtagagacggggtttcaccatgttggccgggatggtctcaaactcctgacctcaggtgattggcccgccttggcctcccaaagtgttgggattacaggcgtaagccaccatgcctggccggctatgacatcttaagaaagctgcatggaagagttggaatatgcattggatcttgcaagatgggtaggatttttacaggaaagagctccaaagagaggcaattcaggcagagcgggggctggaaatacagggaagtaggaatgtaaggaac

SEQ ID NO: 18483 - DNA, 344 bp, Homo sapiens
  misc_feature (1)...(344): n = A,T,C or G
agtaattgctttattcaatgtaccttctttagcgtttcactaaaaatgtaattaatttccttcagtttatactatgtcatagtatttatttttaagcccttgtaaagtataaactttcaacctgtgagacggcaaagatctctaccaattgaaagctagaaatcactgtgatcacaattgatttagaaaattaaatgcactagagaccaggggtgtgcacagagacacaggccccccaccgaggcttgcatgctaacagagactgttggcttttctttcccagtcatgtcccgtctgcaggtcgcgtgtggagcatgtccagcacgtctatctgccaacgcacn

SEQ ID NO: 18484 - DNA, 344 bp, Homo sapiens
  misc_feature (1)...(344): n = A,T,C or G
gggagtataggcgtgagccaccacacctggccacatttgctgaataattgaatgaatgtcttcacttccttcctctggaattcctcattgtctctcatctcctcctgtaccatatttatcccacatttttctagtggcccctgcaaatctctaaactcttctcccaaatcttcagttcttcctcttctttcaggggaagcaggattaaaacaaacaaaaaacatttttacagggtatacatgtctttctagttgagaaatggaaactagaatattcttagaaataagttaaaatgaaaaaacgtatggtaaatgcatagtgcattcaattcttatcaaattgcn

SEQ ID NO: 18485 - DNA, 409 bp, Homo sapiens
  misc_feature (1)...(409): n = A,T,C or G
gcgtggaggggggagatcaaagcagatgtatgaggatatgaacagtacatggcgtataatgaaagagtttcaggagaaacctgtctggttctgttggaaaaactccgtctcctggcgcaggacagccccaaacacctctccctgcaagtggctgtgcacgtggcccatggtgttgttatagatcccgtcacccacgaactccagcactgcactataaagaacccggaaaaaaaaggggatcagggtgtgttcagggaacagactgaaggtcccaggtatccccatataagtgcatttcggacagcagccccaacttccaactccctcatttgcagggtgccccattttcagcccccagacctggctatggtgagaatggacatgagagttaagtttcgagtgaaggtan

SEQ ID NO: 18486 - DNA, 397 bp, Homo sapiens
ccggcgtggtggcgggtgcctgtagtcccagctactctggaggctgacgcaggagaatggcgtgaacccgggaggcggagcttgcagtgagctgagatcgcgccactgcactccagcctgggggacagagcgagactctgcctcaaaaaaaaaaaaaaaaagaaccttaacccgggggcctcacccttatatccccactttttggggaggttaccgggggcccttcttttgatcccgggatttggaaaccaccctgggcaccggggaaaaactccgtttttacaaaatatacaaaatttacccggcctgggggaggggggcttgtacccccacttcctcaaaaggttggggcgggaggatcattaacccttgggggggtaagggttgcaggaactta

SEQ ID NO: 18487 - DNA, 409 bp, Homo sapiens
catgaacctaccatgtgcttccgactagtgagtctgacccaaagcccttttcaggcttcttctgggagtgttgcctctgccttacctacactcagagccatgcatgctgaaaaaaaaaacccaaagacccagagatgtcaacaacaacctgagagagaaagagaaacccagatttgatctgattttgaatcggcagagggacacatgttgcttagactgccaacgcacgccactctcacttacctgaaaggtttccattttagtggcattgtaataaaaagaacaaggaaaaaaatcccctgcaatggtttacaaagtgtaccgcaatagtaagaaataccattttctcatcactgctgctgcagcaccacaggatggggcccagcactaggcctgtctttgtaagcag

SEQ ID NO: 18488 - DNA, 275 bp, Homo sapiens
aaaggcacatactcagttttttaaatgtacaatcaacaagtaaaaataacctcatgtaagtaagccatttttatttgcctttctagatattttattttattgtggaaaactgtaaacatggtcagatttggctttttttttcattaactgagcaagactttcaggatattgtagatgcacagatggtaggttgtcctgaattctacattattagattactttaattgagatttgttaaaacggttaggactgttttgtccaggtcgacgcggccg

SEQ ID NO: 18489 - DNA, 349 bp, Homo sapiens
gcaatgtgaaaaaatttaatcataagtaaatacattttatctacatttatgacaagaaaaatctcaacagaccatagaaatagaaaaaaaagtcttggtgatgagtggatgttgatgcttacagtaagtcctcacttaatgttgtcagtagattcttggaaactatgactttaaaggaaatgatgtataatgaaaccacttttaccgtaggctaatggacagaaacaagaattaagtccttatggcatatttctggttataaaaacatcaccagacttctagataaagaccaaaaaacttgtaatattaaacactgaaacaactgtgagctggacgtaaatttaagaaa

SEQ ID NO: 18490 - DNA, 302 bp, Homo sapiens
ctaaaatcagcctcacctcacaggcaatgatttggaaatctgctctctgggcaaagtctcctgtgcaaccttctcacactcattctcaaccccctgacaaaacacatagcctaccccttccttgtactatccctatgaggcataattataacaagctccatctgcctacgacaaacagacctaaaatcgctcattgcatactcttcaatcagccacatagccctcgtagtaacagccattctcatccaaaccccctgaagcttcaccggcgcagtcattctcataatcggtcgacgcggccg

SEQ ID NO: 18491 - DNA, 349 bp, Homo sapiens
gtcagtatcagctctggccttggcctacagagcttccaatgaagagactgtaatagaagaagccagaaggaaaaaacaaacaaggcaacatgggggtatttcaagactgtcggaggtgttcctgaatcggtggcattaatctagaggccatgttctgcagtgggagagcaatgggcttgacatcacagggaccaagattcagttgccggctctgagggttcctttctaggtgatctcaggcaaggaagcttcttgcactctgagcatgtttcctcaagtttcaaatgcagagataattctgacctcacaggaattgagacgatgtgtatgaaagcagtcgacgcggccg

SEQ ID NO: 18492 - DNA, 379 bp, Homo sapiens
  misc_feature (1)...(379): n = A,T,C or G
ctttccattcctacccctgatcccaacccagaggtccagaatgcctaggagagtgggagaagggtgtcaggaggtgggagcagttgtcccaggccccagcagaagcctggaaaatagctccaagcggaaggaacacagtggcctcaactcattccagggagaagacatggctctgactcagatcataggagtatggggacctagaggtgagagccaggtggcctgccccatccaggtcaatctccatgggctgggcttggagtgggaaaagtgagtanaagaggagagcaggttggggtgggaaaggggttcccagtttgcaggccatggccagtttccccagtagcacccagacagcagcaggaacagggtgggggct

SEQ ID NO: 18493 - DNA, 406 bp, Homo sapiens
  misc_feature (1)...(406): n = A,T,C or G
ctaacagtcttgacctgtagcttatgttgtattggagagagaaacagaagtaaatacaaaaaattacatgtaaaagcatttcagttattattactatgaataaaatgtaagagtaatgttgaaggaatggattgctagaaaaaaaatgtagaataatagagctgatgcacatctcctctagataaggaggttggagaagagggcctctttgagattatatttgagttgaggcttgaatgatcagaagaaagtagccaaataaagatctgtgagaagcgtgtttcaggtagaagaagcaccagcaaagcatagactgaaattgtgacagtctcattttgtttgaaggacagaaaggagactattgtgactgtagcatagtacatagagggtcgacgcggccgcgaan

SEQ ID NO: 18494 - DNA, 328 bp, Homo sapiens
ctcaactaagataacttttagcacatgcttaaatatcaaagcagttgtcatttggaagtcacttgtgaatagatggataacattctgagtatattggattagtcacagcagaatttactttagttagatgagttctacaaatttaaagctttgaaaagctactacttttacttctaatacatccagatgaacacgatgtagcaatatcagcttgtattccagagaaatctcattagtttttctggtgatggaaccacttatccacgtctgttggtactgtgcaggcagattcacagggtggtggtaaagcatccacaatggctctggc

SEQ ID NO: 18495 - DNA, 370 bp, Homo sapiens
ggaatattatttttaaactacagaaaatcttagattgagaagaaaaaccttgaaagaatccagaagaaaaatatatatatctttcctagcaaagaacaaaaaattatatctgacttctcccttagtactgatgcaagaaaagagtggagtgacatgtttacagtgttgagagaaatagaacaccaaactagaattctgtaccctgtaaaaatatccttcaaaagtggaagagaaataaaaactttctcaaacaaaaaattgaggaaatttgtcgccagtagacttgccttgcaagaaatgctaaaagaagtctttcagagagaaggaaaataacataggtcagaaacttgaacctatgtaaagaaaagaa

SEQ ID NO: 18496 - DNA, 286 bp, Homo sapiens
cacggacagggtgacttaagtatataaaaagtcaaaagaatggaggtttttcaacacaccgaagtgcttctacctccttatatgatattgcttttaacttaaaattgtttatgctaagtaacataaaatggtatataccaatctttaaatgtagtaaaactttatgcctctaaatggtatacatataaatagctctcctctgtggagcccattgagaaccagaacataagcaaagctgcttcttcaaatgaaacgataagttaccgaggccaggtcgacgcggccg

SEQ ID NO: 18497 - DNA, 396 bp, Homo sapiens
  misc_feature (1)...(396): n = A,T,C or G
gcagagtcagctcaatgcatcccaggcagttcttattgtggagcagcgaactgtgagtggttccttttacttggggatcatgcagagagcttcgcgtctgaagagagagctgcacatgttagccacagagccacccccaggcatcacatgttggcaagataaagaccaaatggatgacctgcgagctcaaatattaggtggagccaacacaccttatgagaaaggtgtttttaagctagaagttatcattcctgagagggacccatttgaacctcctcagatccgatttctcactccaatttatcatccaaacattgattctgctggaaggatttgtctggatgttctcaaattgccaccaaaaggtgcttggagaccatccctcaacatcgcaan

SEQ ID NO: 18498 - DNA, 401 bp, Homo sapiens
  misc_feature (1)...(401): n = A,T,C or G
caaaaaggtgaagcagctaacatttactgtaaggacaatactaacagctttacattaattatttcatttaattttcacaattactcaaggaaataggtaatggtattacccctaatttacacattagaaaatgaactcagacaggttgagtaacatgccaaacattgcacagctaataaatgaaaaggctggactatataagttgaaacaaatgggttgaaaaaattttgaaagagagaaaataaaggcagttgtcttttggctaaaattacaaatgctacccgtgaataaaatacattaaaagcactgattatcaaagacacaatcctcttttaaattattattttctgaccacagttcatttttgctgaaggtattgtatgagtgtatagcataccaan

SEQ ID NO: 18499 - DNA, 335 bp, Homo sapiens
gagggcttgagatttcaaattacctgcaaaattctactctaaaaacttgatcctacatgcttatttattttgtgataaatattggaaattttaaacctaagcaagaaaatgaactttgaactttcttaatttgggtatctattatgaataccttcacttaagtatttatgaatttagatatgaaaggtaaaactaaccactgtccaaattaatatacagttcatttccagaaccctagtttcttccatgtgctcactcgcattcagtattacaacccccaaagataaacaccttactgactgccttctccataaatttgcctgttcttgaacgtt

SEQ ID NO: 18500 - DNA, 337 bp, Homo sapiens
ctgaaaccatccccatgcccctggtccatggaaaaattgtcttccatgaaaccggtctctggtgccaaaatagttggggactgctgccctaacacatgtagggtaagtgggatttcacatacaggtataaagataacattttcattttaggaatatttttccatataataataggaaaattgtgtatcaatgaagttttggaatggtttgagactctctatgtaagacagtgagtccaactgaaaggaagcatggtgtccgttgaatgaattttgcttcttatcaattcctgcaaagttctgatgatatcacatttgtagaaatgtcgacgcggccg

SEQ ID NO: 18501 - DNA, 380 bp, Homo sapiens
cttttaagtccattcttaacagggtgcaaatggatttcaataatttatacaaacaagtaggttatgctcaatcactgcaattttaagctactgtacacaggaatgaaaaggttatagaaaagtgccatagcaacagtgccttaagaaaggagataaagaggagccttaaaaaaatggataaaatcagaatttcagaaggaaatggaaacacacgggaaatgaaaaacatttctctgcaaaacaaatggagaagcactgctcttgatcaggtgcaagtgtggaaacagttgtttcatattttgtacactgcccatatggttcaaaatcgtatccttagacacaaatcgcctggcgcttgcactgaatttttgaaaatgcaa

SEQ ID NO: 18502 - DNA, 396 bp, Homo sapiens
ggaattgcttgaggctaggagtcagagaccagcatgggcaacatagcaagactctgtctctacagaaaacttaaaaaattagctgggtgtggtgacacatacctgtagcccctgcttctcaggagaatcccttgtgcccaggagtttgaggctgcagtgagtcatgatcgtgccactgcactccatcctgggtggtaaagcaagaacctatctcttagaaaaaaaaaaaaaaaaggccaaaaatttattttgaaaacacaggggttggtatgagggagaactaactcgggggctttggttgtgcccccaacctataaaggatttcagcggttcccaaacataaagggacccaggtggagaagggggagggagattttttcaatggtggcatttaaa

SEQ ID NO: 18503 - DNA, 340 bp, Homo sapiens
caattccaaagattattagaggttttcattctgtagccccaggaactctgccagtaacttcggacctgccactagagaacagagtaaggtagtcagaagcacagagtgatggatctgagcaacgataggataatcttataggtgttttatgtttaggaaagttttggagcctcttttcatttattgaaagatttaataaaaagtagacataaggggaatggattaagtgatgatgccttttatggaaatgtagatggtccatttgacttttgtggttctttcaacacttgtggttcattcttctccatttacattggatcattgggtaaagtaagcaact

SEQ ID NO: 18504 - DNA, 347 bp, Homo sapiens
  misc_feature (1)...(347): n = A,T,C or G
gacggaggctgcttaacctgatggaaattttaatcacatgttgtaaagtanaagcccaaaaaaaaaaaaaaaaaaaaaaaaaaaagggttttaaaagggcccaaacggtggaatcttttttttgaaaataaaaaaaattttggggggggttttccaatttccaaaaatttaaaaatttaaggggggttttaatttttttggccaattaaaaccccaaaaatttttggaaaaaaaaaaaaccctttttgggcaaaaaaaaaaaaataaaaaaagctttttttttaaaaaccaaggggaaaaaatccaaatcccaaaaaatggttttttcttgggcattaaaaataaaa

SEQ ID NO: 18505 - DNA, 330 bp, Homo sapiens
cagcactttgggaggccgagatgggtggatcacctgaggtccacctgaggaatttgagaccagcctgaccaacatggtgaaaccccgtccctactaaaaaattaaaaaattagctgggcatggtggcgggcgcctgcaattccagccactcgggaggctaaggcaggagaatcacctgaacctaaaagatggaggctgcagcgagccaagacagcgccactgcactccagcctgggcgacagagcaagactccgtctcaaaaaaaaaaaaaaaaaaaaggcaagggctttaagacccaaactggtaagttaacagggttttgggagggga

SEQ ID NO: 18506 - DNA, 396 bp, Homo sapiens
ggaagagagtggctcagcctgcaggtaaataggctagaaaagccaaggccaaaggctggaggggagaggacagtcagcatgtccagcctggggtctgggtgtagggttatagtgagggaatggtcactaaagtatcctgacaagttcctaggaaaaaaggaataaagtttttttccttaaaaaaaaaaaaaaattgctcttggctgtgaaaagaggtactaaatgcgattcagttcaccgctaaggaaagtgatgacatagcagttacagagggtgataaatctctccagctaattcaggtcattttgtgaatactatgtatcaagccctgaaaatatggtaaataaaacgtgacagggaaacctttttttgattgaatattgttacatacgtaaa

SEQ ID NO: 18507 - DNA, 335 bp, Homo sapiens
gtcagcacagtgccttttcctctcctgctctgagccagggtggggcattccctctagattcaggtttgggcaggggtcctatagtccctgccatggggctgcttccctgtcccttccctcccctttgctggcctactctggcataattcaagtgtcttcttgccttggggatccttagtggcatcaaatggcaacatggaatattgtcctccatgcccctccagaaggacctaggagagtaggtgagctttccaaagtgagagacgaatctttctttctttttttttttaaagggcaggatgggtatgctttgggctttctccttctgtggcccg

SEQ ID NO: 18508 - DNA, 329 bp, Homo sapiens
tttttttttttgaaaataaaggttttttattaggcaaaatccaaatgctcaaggcccttcataatatcccccagtttagtagtgggacttagggaacaaaggaacctttaataaaaattggacagcaagaaagcgagcttagggatacttgggggccagggcattagccacaccagccaccactttttgataggcagcctgcactgggggggggaattctttgccaaagggatgggccagcacacagaccagcacgttgcccaggagcctgaagttctcaggatccacgtgcagcttgtcacagggcagctcactcaggggggcaaagg

SEQ ID NO: 18509 - DNA, 147 bp, Homo sapiens
gctcctttttctgtttcttaactcaacagctaaaaaatggctccaggtagtgagtcaatgaagttcagacatgttggtgtaaagtttctcctctgctcctgaaaacttcatcttcttggtgtctcatgtcctcagtcgacgcggccg

SEQ ID NO: 18510 - DNA, 398 bp, Homo sapiens
gctggagtgcaatggctcgatcttgactcattgcaacctccgcctcctgggttcaagcgattctcctgcttcagcctcctgagtagctgagattacaggcgcgcgccaccacgcccagctaattttttgtatttttagtagagacaggtttcaccatgttggccatgctggtctctaactcccgacttcgtgatcctcccgcctgggcctcccaaagtcctgggattaccggcgtgagccactgtgccaggccagaagttcaatgttttaaactttcgttgtagtttgcattggaatgtgggcaagtgattctggaggaatttctatagattcttgaacattctttggataatcttatatgacatagcttacacttggatttggaaagacttctttgg

SEQ ID NO: 18511 - DNA, 396 bp, Homo sapiens
gaatccagtggcataatgacagaaaggtatagaatcacagttgtgaataacggggaaaaaataaagtagttatacagtagttagactatcttgagaagttacagtaaaatgaatgagattgtgggagcaaaattgttactaccaagtttactaaataagcacagaggtaatttgaggcttattttacctatgaaccatgttccgggtataccatacagaaggaaaagattccttcaggagagatgtataattacggtttaaatcccgtccagctaaggaacagcgataatttcccacaatcacaccatctggattcagcatgggtaccaccttgaagacaaaagtgtcccgaagcaactgtgcatcacttgagtttcctaaaatataatctatgaa

SEQ ID NO: 18512 - DNA, 377 bp, Homo sapiens
  misc_feature (1)...(377): n = A,T,C or G
ctgatcaacaggaattagattattctcctccttatgagagaaacacagtcactcaagaaaatctgatgagaaataattgcatacttaacaaattcaaagagaccaacaggattatacctaattaaatatgcctagaacagcaaacacgtaagttgattccatcataattattttattataaaaagttttttaaaaactggttaagcctcagttgagaaaacttggatttttgccattttccatgtgccatcttccatttgaagagcaatatcaaaagtagctcaaggtttcgtaaattcccaacattaaaaaggaattttccatttaaatgtgtaaattactgatattaaacaagaattttggaagagatacgtaan

SEQ ID NO: 18513 - DNA, 377 bp, Homo sapiens
ctgggatgcgttagaatggagttgctcaccaggcagttatagccaagagccaagagaggtgatctgagctgaccccagatgtatgagcagcagtatgggaacaaggaaacctcagttagggacaaaatgacccctcagaagaataaagagagaagagagctcagggactgcctgagcatggtagaactctaacagatgaaggtcaggatgaagcaggaggtgaggtgaagacaagtactcatgggaaaacaagtgatgtgtcatagggtccatagaaatatagttttgcccaaaaagaggatgctggatacagcttagagataaaggatgatgccttttgaaactagcgatgtgctggtcaccagggaaaataatat

SEQ ID NO: 18514 - DNA, 148 bp, Homo sapiens
ttccaaaagttaccatgcaaggatccctgctttaaaatctgtaagtcaagtctttttatgtctaattgtcctgtatgtgcctaaattttaagaatcactctaactgtaaaaaggtttgcagaagatacgctccattaaaataagatag

SEQ ID NO: 18515 - DNA, 321 bp, Homo sapiens
gaaaataacactcgagatcagcaccccaaggagttgacatctgtagtttagaaacaaaaacaaatggagctccagaaatgaaattacaaatcaatcacatgaatgacagccggccatcagttggccgacccctgctgggtctaaagggaaatctgtcattggggccgcctcgccctggcaagatggggttaggtcctggaagtgggccaactggatcaaagcgtggtctcagtggaggaaactggctgggcgtctccccaggaccaggaatgagtgaactgattgggtcttcaacatagggaagtgttgtcgacgcggccg

SEQ ID NO: 18516 - DNA, 378 bp, Homo sapiens
  misc_feature (1)...(378): n = A,T,C or G
attgaaagtaagacatttaagagaaatgaataacttttttaaagtaattgaaataatttttctctaaaatattttgattttgaaagatattagccttagattcagaataaaagttatatttgtaatgttttcatgtatttctcaaatatataaattctacgttattgaattatggttatgtttgaaatgacatgttattcactgctttgatttctctctttcaatagttaaaagatgttgatactcggaaaatcataaaagcaatgctttcttatgtgtggcccaaagacaggccagatctacgagctagagttgccatttcgctgggatttttgggtggtgcaaaggtaagaaattatgcattggttgggtgctctn

SEQ ID NO: 18517 - DNA, 384 bp, Homo sapiens
  misc_feature (1)...(384): n = A,T,C or G
cttccttcctcctcatatttctgtttctcatttgtgttcagttttgtgcagcattgctagcactgcttttgtgaccagaaaaggccataacatggtccaggatcatcattcttctgactctagatgggacacttgacagtgacttgaaacatttgcatattcaggaatgcatgagatttcaagagagcctacagtatgaaatcattttcacaaaataagcagcttgcttctgaaatgctgtctttcccagtagctactcacctgcctctggtggctgggattcagatgccacaaaactgtcagtatctatagaccaggtctgtgccacctcctctctcctctgtgctcagtgaggaggcagtaaatgaagttacaggctatccn

SEQ ID NO: 18518 - DNA, 355 bp, Homo sapiens
  misc_feature (1)...(355): n = A,T,C or G
attcgagtaaccagtgccattcacctcattgatccaaacaccctacaagtggcagatattgatgggagcactttctggagtcaccctttcaatagtttatgtcatcccaaacagctagaggagtttattgtgatggaatgcagcatagtccaagatataaaacgtgctgcaggtgctggaatgatatcaaaaaagcataccctcggggaagtctgggtacagaagacatctgaaatgaatacagataaacagtatttttgtcgtactcatttgggacatcttctaaatcccggagacctggtgttagggtttgatttggccaactgtaacttaaatgatgagcatgtcaacaaan

SEQ ID NO: 18519 - DNA, 360 bp, Homo sapiens
ttccagttaaaatttagcatcagaagatttgttgtatatataaagtacatacctgattacaaaggcttattacagaaaaaagtatgtaaaatatctcattaataattttcatattgattacatgttgaaatgataaaattttaaatatagtagactaattaaattatattatcaaaataaattgcatgcatttactttttaaaatgtggctactagaaaatttaaaattgcatatgtagctcacattgtatttctactgacagtgctgttttagaaagaccatataaattttcccacactcgaaaccaagtaatacacaactacattccattaaattcattttcttccatgggtatttag

SEQ ID NO: 18520 - DNA, 360 bp, Homo sapiens
  misc_feature (1)...(360): n = A,T,C or G
ggaaactctttgcctcttcagagagcccataaccagctgagggcccaggcctgactggtaacccctcagggagggagcatgtccataaatcagcaatatagcagagatggggcttcttatccttggcagccattttccctgcctccccttcctcccctaggacatcccctctctgccctggtatgcatcttggacactggatgtctcaactcagtttagaacttactaaaacaaggtttaataacctcatattaaaattttcaagactggctgggcacggtggctcacacctgtaatcccagcactttatgaggctgaggcaggcagatcacgaggtcaagagatcgaccccatcctggn

SEQ ID NO: 18521 - DNA, 368 bp, Homo sapiens
tcccaggttgttttttgaaggtaattctaacaaatctgcttatataataaaataaaatgactagtacttctggccgcaggttttgcaacattcagctccacctcaaatctagtcaatcaaaatctctaggggttgggctgctgaatatttttttttttaaacaaacactccagtgattcacaagaatctaaagaaactcaaatttgagtctcccacaggaagaggtcttccttctgtttttctctagagctattgagaatctaatccccttccttccccaatccttccccaaatcctctacaactttgctccttacctccccttctcttgtatttaacctttcaacctcaagtctctcctatcttaaa

SEQ ID NO: 18522 - DNA, 358 bp, Homo sapiens
ttttttttgaagaaggtagataaatttattgccacttgaaaactaaatataactcagatgagtcagacaaaaaaaatcattgacattaaaattattattatttgaccaggtttgtcttttgaagatttctctcacaggcacttctgcaacaaatttgtataatttaatataaatattttgtgattattcttaaaggccaagcaatgggcatttatgatggctaatcataaatacacaataatatatattacatagtatatattaattgacaggttgcattttttctttgagcttatacacttttggaaaaagtctaccttttataaatatcaagttggatattcttgtctgttgcatt

SEQ ID NO: 18523 - DNA, 392 bp, Homo sapiens
  misc_feature (1)...(392): n = A,T,C or G
cccacctccagcctctccagagagacaagatggtgaaggaactgagcctgatgaagagtcaggaaatggagcacctgttcctgtacctccaaagagaacagttaaaagaaatatacccaagctggatgctcagagattaatttcagagagaggacttccagccttaaggcatgtatttgataaggcaaaattcaaaggtaaaggtcatgaggctgaagacttgaagatgctaatcagacacatggagcactggggacataggctattccctaaactgcagtttgaggattttattgacagagttgaatacctgggaagtaaaaggaagttagacctgttaaaacgaattcgacttgatctccctattttacatgaggaatttgtagcantat

SEQ ID NO: 18524 - DNA, 404 bp, Homo sapiens
  misc_feature (1)...(404): n = A,T,C or G
gctccctgttgagccacatagatttagagaatggctgttaacacagcataatgcagcccatcctgactaatctgatattaacatgtataataaagaattctatcaatgctgagggaagatgattagttaaggtcctaggttgcaagtctcaaaacctcttctaaggattgtagacaggaaattaaatgacttctagtccctagagttcccaatctcctaccatcccatcctaatatgacagaagtaattcctgagttgcttctgaaaccagagcttccctcagaacccttatcctgccaaatggcttcttggagagccctcactcacttttctccttctgctattgctgctcattcattccagcttttaaaaattcatctttatccaggaacctcgcttctagn

SEQ ID NO: 18525 - DNA, 346 bp, Homo sapiens
gaaaagttagctacatgcttgctcgggcattggaagacaaagacactgcttcaaacgagaataaagaaaaaaatcctataaaagagaatttccctttcaacaacccctggcgtaagacttcagaattctctgttttgggtgatcctatacattcaagtgtctgcattttaaattctgtgggctgcatttgttcaatccagcactctcaaatagatccaaactatagaactcttaaaagatcccattctttgccatcaagtaagatattttaaagacaagccagttgaaattggaactgagagttgtttatatcgagatactttgaaaaatgattttgtaaattttg

SEQ ID NO: 18526 - DNA, 345 bp, Homo sapiens
atctctgcaaatgtcaatattattttggtctgtcttactttatacctaaagtttaataaatgtaagctcattttgttgaaatgcaatattcatagatattcttccttgattgattttattccttgattatgcagtgtgattttcatcagttacaatagttatcctttggcattatctcttacaaatgaagaaatcttatcttttaactgtggcttttaaaaaggctatcttaggcctggtgcagtggctcacacctgtaattctagcgttttgggaggccgaggcaggcaggtcacttgaggccaggagttcaagaccagcctggccaacatggcgagacaccag

SEQ ID NO: 18527 - DNA, 346 bp, Homo sapiens
gttgcccaaggtccccatagattaagagataaagcaagacttcaaatccaggccagtgtgaccctggagtgtgtggactcacccctgcagtacactacctctcaccatccttgtaaaaagaagctgtaagttgtcagggcaagagcactgatgcaggagtcaggaactctgagagctggtcccagctttgccactcacttgttacatgacctttagcaaaattgcttcaaggggaaaggagttagcattgtgtgtgcacctactatgtgtcagttgctgggctatgggcttagaatacaattgattatgaaatcctcaccccattaccacaagggaaatgggatgg

SEQ ID NO: 18528 - DNA, 336 bp, Homo sapiens
gcagtatgtttacatgtcagaagttttgtttaattctatggtatttctaaattgacttgtttaaataaattcagcaaatggatagcattgttttttatttgcttcaatatgggggtagataatagctaaagagccaaggatgaatttcttcaaatgactttattctgttagctttacataggtgttggaggattcctaaggtgtcagcattttgtaaaggtaccacaaaggagaagttgatagggaatctaattttagaatgtgccaaatggtctgtgctcaacaatataattgaactctctcaactctacctcaccatttctttatctcaaaatt

SEQ ID NO: 18529 - DNA, 346 bp, Homo sapiens
  misc_feature (1)...(346): n = A,T,C or G
ctggagcacagcatccaatattctggagaagtgcggagattcaacactgccaatgatgataacgttactcaggtgcgggcattctatgtgaacgtgctgaatgaggaacagaggaaacgtctgtgtgagaacattgccggccacctgaaggatgcacaaattttcatccagaagaaagcggtcaagaacttcactgaggtccaccctgactacgggagccacatccaggctcttctggacaagtacaatgctgagaagcctaagaatgcgattcacacctttgtgcagtccggatctcacttggcggcaagggagaaggcaaatctgtgaggccggngccctgcat

SEQ ID NO: 18530 - DNA, 336 bp, Homo sapiens
acacgctccaccctgaaggtggagcgtgtgataggctgcaggtgcactgacaactccaacttgggaaacagatggacatatttgtggatggtcttccccatctttggcatgcggataagctccccaatctcattatgattcaggtcgtacagacgctcaaaggggaaattcttcttctcaatcttcttcactacttcctcagggagtttccggaactggcgcagaggacacatggactgccacatgcgtttgtcgatcatcttgcagaggttcagggtcttgtctgtaagctgtgcccaacctcggttcaggacaatttcaaatatcgctcgcatc

SEQ ID NO: 18531 - DNA, 263 bp, Homo sapiens
ctcccaaaaactaaaacactgccaactgattttgtttttgtcctttacaaacacataattaaaacttaagggtgggggctgctaattctttgcaaaaatccaaatattgttaagggaccagggagatgcccctaccccttgattttccatctaaaaaaatacatgtttatgtaaacaaacctttccatatccatagggacttttcaaggatttaagcctaaaaattttgatctcacatttctttacctgtttaaattgctcag

SEQ ID NO: 18532 - DNA, 355 bp, Homo sapiens
ctttattcccagtaattaactaacttaattggcctgaacatgtcaagataaattgaaaccaatgatttggatttgctcactaaatatacctttgaatgtctaaattccacaagaggccctctttcttagtgttgaagctggtggaggcaaaaggaaccatataaattaatgatcaggtttctcctggcttctagaaacttcttcgcttccctgtctttattaaatacatattctaataataaaagaaagcaatggtctgttctattcccttaagagaagttaattgctgctatcatgtttaaatcaataagagtaaaaacaagtataacaagtaactaacatttattgatgaatg

SEQ ID NO: 18533 - DNA, 341 bp, Homo sapiens
ggttttaccatattggtcaggttggtcttgaactcctgacctcaggtgatccacccgtctcagcctcccaaagtgctgggattacaggcgtgagccactgcacctgacaaatagcaagtttttgtttgggccttgtagtaatgctgggaggtcagcatcgctctcagtggaggctctaagctcacagaggggaagggacgtgcaagacctcctaagccaccaccgcacccttgaacaaaccgagttcacttcaggcatgtcatgtgcaccccacacaaggcatgggtcaggtggcatgactgttcccattttacagatgaggaaactgaggctgcgatggg

SEQ ID NO: 18534 - DNA, 353 bp, Homo sapiens
cctagatttttctctctgttgcctaatgtacatatttcatattcagactttgtcatttttcatatgctggtcatatgtcttgattttgaaagttttgagtgctgttaacatggttaatgtatgttttcctattaaataacatgtgactctgctaatatatgaattgttttaattctgggttgccttaccactctatataatatcattggtggtttaatatatgttttgaagtgatttatttgtttctatctgactaggtaaaatgttcaggaatggctatgaattgagatccgtgaaatgacccagagaaggctgatgaagtgtttgtctatagctgtgctgttcttggggaa

SEQ ID NO: 18535 - DNA, 360 bp, Homo sapiens
  misc_feature (1)...(360): n = A,T,C or G
cagagcctaagagtgtgtatttcttacaagctgccaggagattctcttgttgctgattcgtgggccacacttaaagtagtgaggatccagtacatgaggtcagagttcagccagagtttaaactcaaatctcccactcctaggcatgtaaaccacgtgctctcacctcagaagtatttcctatatgtgagagttataccagaataaaacttggggagattttgctcaaaacatgacttttattattttggtatggtgattatttttgaaatatcatttagactgcttgagaaaaataacagaaattcaaaacactaaaagtgttcaagcaagaaagcacttccaaaccacaaaccaagcn

SEQ ID NO: 18536 - DNA, 339 bp, Homo sapiens
  misc_feature (1)...(339): n = A,T,C or G
ataattttcagttggttctctggttggaaatttctagagaagaattaaatgacaagggaacctatggtggtgttttacatagctgtttttgaggctttggacacagaatcatataggtagaagttactcgcaactggttaaatgttctaaaggaaaaagaaaacatctttactttgactaggcgtcagctgacagataacgtggagaattgaaattagcctgttaattctggcagaatttatgctttgtaggcagccagttccgaattgtttgagttcccctggccaacttaaatcttactttggncttgctgttgntggtattattattattattttg

SEQ ID NO: 18537 - DNA, 387 bp, Homo sapiens
  misc_feature (1)...(387): n = A,T,C or G
atttaatacataaaaaaagcacaattaaaaagtattaaaagcattacatagtgcaaacaccaaaaagacagagctattaacttagtggtgcttataaggaaaactaggcaagaatgcagaaaatgccttcctctttcctcatctagtgagctggccacattcaataagttggtattattattattattattattattattagcgaaagactgaagttttattattactcaattcagtctcccaaaaagttattttaaattgctgctttcttcccacttgatgaaaccacatttgctgctcttgtgattctctgatcggaaatatttggaaaatttcatgttttctatatattgacagtgcattttatgccacctactcaagtgatgn

SEQ ID NO: 18538 - DNA, 387 bp, Homo sapiens
ctaaagtggggtaaggtggcaggatcacagctctctgagggcccagttttgtcttcattggctcactaatataaactcagcaaagaatgctgtggctggcacgcaggaaaagcccaaatatgtgatcaaagcatgagaaaatgaagagtgtggtcacttggattgcctacttcaagtcctggccataacacacacaggaaggatgtgacctgggcatgctgggtgaatggctggccccctctctgtgcctgcgggaaacagtagcccctacataacccagagaaaccagatttttctgaagtttcaatgaagttatacataaaggcattaagcagggcctgacacacagcaaacgttcaataattagctactgtcatcaatagcttt

SEQ ID NO: 18539 - DNA, 358 bp, Homo sapiens
  misc_feature (1)...(358): n = A,T,C or G
caagttctcacttagatgagcgtgtgaccaaaacttggggctttagcactactctcgattatcaccattttgaatttctggtcttagtacatcattcgtagcttatggtgtccatatgattatgcattttgagtttttgttgatcctgtgaaagagatatttgatattctataggtgactgcatgcatgcattttaaaatttgagcgaatgcatgcaccaccagactactattatgactatcacaagaataacaacaaaagtttgaagtatgttccctagccagggtccccatgaaccaccctaattaaaatcaaatatgtcaacaaatgaaccagacaaatagtctattcattttan

SEQ ID NO: 18540 - DNA, 380 bp, Homo sapiens
  misc_feature (1)...(380): n = A,T,C or G
gtcgtgtggcccaggctggtctcaaacctccgggctcaagcgattctcccacctctgcctccgaaaggcgtgagtcaccagggccagactagattgagtttaataagatttggttgtgcagccgagccgggtggctcacgcccgtaatcccagcactttgggagacagagatgggcagatcacctgaggtcaggagttcaagaccagcctggccaacatggtgaaacccagtcactactannaatacccannaaaaaaaaaaaaaaaattttgttggggggggggggagggcttttgaatccccacttccttaaaacctgaaacgggaaaatcctttgaccccataaaccaaagttggcggggagctgaaacccaccctc

SEQ ID NO: 18541 - DNA, 95 bp, Homo sapiens
  misc_feature (1)...(95): n = A,T,C or G
aataggtggnnaganaatggtactaacaaggtacctctgttctgtcctggcccacatcatgggcctagcttgtctctcttgaacctcttccttta

SEQ ID NO: 18542 - DNA, 386 bp, Homo sapiens
cgaacaccacatcttattccttctaactgtatttgcatccccatcaattaactcctctccatccccgtctccccactaccctttccagcctctggtaaccactcttcttttcattaccttcatgagatcaaatattttagcttgcacatatgattaaaaacaggcaggctggcatggtggctcatgcctaggattttattctttattatggctttataatattccattgtgtatataaaaccacattttccttatccatgtgtccactgatgggcacttatgtggactccttatcttggctattaacagtgctgtaacaaacatgggagtacaaatatctcttcaatatgctcatgtccttccttggagaaatgtgtgtccaataa

SEQ ID NO: 18543 - DNA, 342 bp, Homo sapiens
caggatcttaatgaagtcaaagctcgagttgaagaactggacagaaaatactacgaagtaaaaaatatgaaagatgaactaccaagtgaaagaaactacttgtggagagaagagaatgccgaacagctagcacttgctgctaaaagagaagatcttgaaaagaagcaacaacttcttagagcagcaacaggaaaggccattttaaatggaatagacagcatagacaaagtgctagaccacttccgtcgaaaaggaaaaaccagcatgttcaaaatggctatcatggtattgtaatgaataactttgaatgtgaaccagctttctacacatgcgtggaagtcc

SEQ ID NO: 18544 - DNA, 276 bp, Homo sapiens
ggctttttaattttttgtatagacgggatcttgctatactgcccaggctagtcttgaactgctgggctcaagcagtctgcccacctcagcctcacagagtgctgggattacaggcatgagccatcgtgcctggctggggtagattattttttattcaaccttccacctttctactacttggaatttctacactcttttgctactcttcagtgggtaccctagagagtatcacatacatctttatcaaaattttctacgcaaaggtcgacgcggccg

SEQ ID NO: 18545 - DNA, 245 bp, Homo sapiens
ataaaattaagaccatgtaagggtatgtttttagagaaatggaagtttgagtaacccacagaacatctgtgatctttctacagcagcttcagttttgtgccaacattccatgtattttgaatatgagcaaaaactgatcttaagagcagacttaaagtagctttgtacgccttaatgttcattttgatttattttaaatctttacattcagaaatgagatactgtattatcagtcgacgcggccg

SEQ ID NO: 18546 - DNA, 354 bp, Homo sapiens
ctactaccaacccgtcgcagctgctgccgttagagcttgtggacaaatgtataggatcaagaattcacatcgtgatgaagagtgataaggaaattgttggtactcttctaggatttgatgactttgtcaatatggtactggaagatgtcactgagttgtgagtagtgttaaagaattggggggaatctcttcttaattaaagacagttttactacttttgagtaaaattatttatgagaaaacattacctcttggtggaataacgttaaagatagacgttttatctgtttgcttgtaaaattggatcagagtgttattaccttaatgtaattattagtaaacgcctagaatatt

SEQ ID NO: 18547 - DNA, 93 bp, Homo sapiens
aatacacaatcacaattaggataagtgctaaaagagcatataacaaggcacataacctaatttagagggtcagggataaacctttaaaaagtt

SEQ ID NO: 18548 - DNA, 362 bp, Homo sapiens
ttttgcctctgcgggccaaggataaagtgtcaaactgcattacacaagaaccctattaatcttttacaaggaaactacaatgtgtttttttaaataggaaaagcattttaaagtctaggaatatagacagacaatttctaccctatatttcaacttggagcttaatgatattactttattaaaactactttgaaggatagcgagaaattctctcacgactttgaatttcctgaacaattttttataggcaataagtgagttattaagtgataattttgtactttctgagatatttttaaaagctaatgagcataacgtttgtaaaaaaattttaggtggaaaatctgggccaaatcaatgga

SEQ ID NO: 18549 - DNA, 382 bp, Homo sapiens
ctttttcttacggtacttcgctaggaatttaagcgcctggatgaactatttcgagcatactcagctgcaattctcgggaaagtctcatggctctctgtctttgaagttgcaattgtaatttgaggtcctcttcttccttctgcctatttatctccagcaacatctttgatcgtttggatctgaaactcctctgcaaagcaatcacagcagatggaagcttctttaatctctttcttgtctgaaaacccttccaataggcttgaatcaagcatgctgcttgatgtagtttctgctcttctacttcctgatagaccattgggcttaaaaggccaacaagctgtctaagttcttgactgaattcagtcccagtttcctgtttacc

SEQ ID NO: 18550 - DNA, 410 bp, Homo sapiens
cgcccctgttgacagatggagattgggcagcagggccttgctgcattgctatctgctgttccgacttggtttgtcttgtccaagggtgacgaaagagccaggcaccagggtctcatgggatgaggcacagggtgggagatgggggaggggctgggggctgaagggagcaagaaagctgtagctgtgtggggctggcaggatgttgaagaccgcctctgctgctctcacatggggactgggcccagatcctgcttggtcacacccagcccagaagacgggtcctccagttccagtgactcactgcagttatggtgcccgcggcttctggtgttggggacctccgtgccgttggggaagacacaccagcagtagccgatgctcccatagcactggagtggcagatagttgcc

SEQ ID NO: 18551 - DNA, 226 bp, Homo sapiens
tggagttttgctctatttgcccaggctggtcttgaattcctgacctcaggtgatccgcctgcctcggcctccctaagtgctgggattacaggcatgagccaccatgcccagcctgctgtatctttaaatagcattttttcagccagcaccttttgtgctacttctagctattgtgcaaaaatggaattaaaggaattgaaatttatgttgattgtcgacgcggccg

SEQ ID NO: 18552 - DNA, 407 bp, Homo sapiens
gataaaattgactgtgtcccaatgcttatttgattctaagcttttttattctgtttctgagatattttaatagctttgcaaaatatgctgaccagtttttggaaaataatggtttttatagcaagcaaagactttatggcacattttcaaaatagcactcatacatacttacattttgacagaaatgtgaattctcacattgatgagatatttttttcccacctgccctaccctttaaaaaaggtcacctttctaatgtgtagtagattcatttacgcctttccctttgagtcataccatgtttggagaactgtgtgaattgtaggtagagaaattaactagggaagccagaagcttgaactaaagttttaaatttgtaggcagatgagaacttttatactatggtt

SEQ ID NO: 18553 - DNA, 346 bp, Homo sapiens
ctggtctcgaactcctgacctcaggtggcctgcccaccttggtctcccaaagttctgggattacaggcataagccaccatgcctggcctcttttcttttttttgaggcagtcttactctgtagcccaggctggagtgcagtggtgcgatcttggctcactacgtcctctacttcccgggttcaagcgattcttgtgcctcagcctcctgagtagctaggattgcatgccaccatacctggctatttttattttattttattttattttattttatttatttatttatttatttggagaaggaaatcctattgtatttattcacataaataaatgtcgacgcggccg

SEQ ID NO: 18554 - DNA, 407 bp, Homo sapiens
aatgaagttacctgatcaagaacacttagctaggagttcaggacaagaactagaagtctgacttatagtctggtgtctttctagcacatgatgcatcattgattacaaagttttacattgtcctttactagaaagctacgcacattatctctagctttgtgttgtatgttaatgttaagtaatctgagatcctaaaaggaaaattaaaattaatataaattccacttttacatgatcacatgtaagccatgatattacagcttaataaaagccataatatcacacaccaactattctgaaccactaaatttctgaagttaaatgctacattttccttaaaaagttaatacatagattcaggatttaattataattcaaaatgacattagcataaaatagttaatatg

SEQ ID NO: 18555 - DNA, 205 bp, Homo sapiens
  misc_feature (1)...(205): n = A,T,C or G
cgcaccttctcttcctcctgctactctggctcccagacaccaccggagacactgtgttgacgcagtctccagccaccctgtctttgtctccaggggagagagccaccctctcctgccgggccagtgaaagtttgccgacaacctgcttatcctggtntnacgagacacctggccaggctaagcagttgtcgcgtcgacgcggccg

SEQ ID NO: 18556 - DNA, 414 bp, Homo sapiens
ggatgacattttctgtgtgtgtgatgttttattttgtttggattttttttttttaattttacttttagagcttgctgtgttgcccaccttttttccaacctccaccctcactccttttaaacccatcttttccgagatgaaggaaaaaaaaaataaaaaaaaaggggcgccccggccggaattcccaaatttttaatgggaaaacccggaaaacccccgaggggccctttaacgggggcttgggccccctttcaattttttttatttaaaccctggtttggcctttttttatgaaactatcccccttaaagttaaaacttggcccatgaacccttggatttaaaaaatttttaaaaggacaaaaataaaggcccatttttttttggacccaaaatttttaaaaaaaaaatataa

SEQ ID NO: 18557 - DNA, 392 bp, Homo sapiens
cagaaataaaatttagtacaaggaacaacaaaataacaaagaaatgcacttctgctattggtattttaaaaaataccttatattgttaataagaattagatgatttttatagaaacatgcttagaaagttttcttaagcaacaaatactgagaggaaaactcacatacccttctgtagatactttgtggcaaaacagtagaatcctgatatgattttgatttagtctgaactcttgctagtttggcatcaaactgaatcaaattgaaaagaaagttattgaaactctagacaattagaaacaattgtttctataattataatccatgttatcctttgacatgtaatctgtaattcaggtgtaaattacagtatagacaatagaaaaatcttt

SEQ ID NO: 18558 - DNA, 391 bp, Homo sapiens
gcccgggattcccaggtatttccattcagtgaccagcactgaagacagaagactcatcatggagttctggctgagctgggttctccttgttgccattttaaaagatgtccagtgtgaggtccagctggtggagtctgggggaggcttggtccagcctggggggtccctgagagtctcctgttcagtctctggattcaccttcaacagtaatattatgttctgggtccgccaggctccagggaagggactggaatgtgtttcaggtattagttataaagggggtagcacatactacacagactccgtgaagggcagattcactatctccagagacaattccaagaacacactgtatcttcaaatgagcagtctgagaactgaggacacggcc

SEQ ID NO: 18559 - DNA, 393 bp, Homo sapiens
caaatgtctatcattagtctttccttgtaggaaatcaaacaaaaaacagcaacaacaaaaagcttctgcaaaagataactactcttgactaacaggcaaaacttaaatcataactacacattttgagactactataaattgctgatgatactatggcaggtatcttggtatcagaaccccgtgataatctcccaaagcaaaccatatgaattgcataggaggaatttaacaaagagtagctagtggaaaaaaaaaaaaaaacccccagggtttcaaaagggtcttactaggccacggtaggaggatcacttcaccccaggagttccaaacgggccagcatagggaaaccctgtctctacgtaaaaataaaaaataaggcgtggtgtgggggtc

SEQ ID NO: 18560 - DNA, 408 bp, Homo sapiens
gacaaaatggcgaagatcgccaagactcacgaagatattgaagcacagattcgagaaattcaaggcaagaaggcagctcttgatgaagctcaaggagtgggcctcgattctacaggttattatgaccaggaaatttatggtggaagtgacagcagatttgctggatacgtgacatcaattgctgcaactgaacttgaagatgatgacgatgactattcatcatctacgagtttgcttggtcagaagaagccaggatatcatgcccctgtggcattgcttaatgatataccacagtcaacagaacagtatgatccatttgctgagcacagacctccaaagattgcagaccgggaagatgaatacaaaaagcataggcggaccatgataatttccccagagcgtcttgat

SEQ ID NO: 18561 - DNA, 393 bp, Homo sapiens
  misc_feature (1)...(393): n = A,T,C or G
cttgagtccaggagtttgaggttgcagtgagctatgatctcaccactgcactacagctcagatgacagagccagaccctgtctcanaaaaaaaaaaaaaaaaaaaaaaaaccttcccccttttttttgtttttggggggggaacaaaaaaaaaaacccagggttggaaatttgcaccttttttttaaacctttgggaaaccccaaaaaagccgaaaatttttcccggataaaaacccgggggagagaaaaacccccggggggggcttttaaaaaccttttttgggggggaattttttttaaaaaaaatttggccaaattctatttgggaaaaaatttttttttctgaatctttcacaaattttaattccttttggatataggccctttttttt

SEQ ID NO: 18562 - DNA, 156 bp, Homo sapiens
ctcaatattagtggcaaatattaatactattaaaatggattttggtgctatattcttgtagctaaagcctagtagaattctcaagaataggtgaaatacactttcaaagttgcctgtcatttaaaagaccaaataagcattttgtcgacgcggccg

SEQ ID NO: 18563 - DNA, 356 bp, Homo sapiens
cataattatctgttctcctgagtaaactgtataaacagcaatggtgctaccatatggtacaaaaacaaattctgaactgcagccacaggagacagtgaatttcaatccttttttactgttattacaaacttttccatagttcacaagagtgttttctccattggaactattccagagcctcattcgattatctgtaccaacagtgaggaggtgaagtccatcacttgtaaaacataagccattaactttcccattatgagcagtgtttgctgattcaacagcttgtgactttttcccattatgttgatcaagagtaatcaaacatcctgatgctcttctcacatcccataatttta

SEQ ID NO: 18564 - DNA, 356 bp, Homo sapiens
ctcctacttgcgacaaggtggacttgggaggaaagccgtctgccaaagcctgaagcctccaagccataaacaaccccaatggcctcccacgaagttgataatgcagagctggggtcagcctctgcccatggtaccccaggcagtgaggcgggaccagaagagctgaatacttctgtctaccagcccatagatggatcaccagattatcagaaagcaaaattacaagttcttggggtaagtcagccttagtttaaacactgatttaagagggaagaaaataaatacagttgacctgtgaataacgtgcgtttgaactgtgaggattcccttacatgtggatttcttccacctctgtt

SEQ ID NO: 18565 - DNA, 354 bp, Homo sapiens
gcactatctaaaaaagtaatgtaggcctggcttggtggcacctgcctgtaatcccagcactttgggaggctgaggtgggaggattgcttgagcccagaagttcaagaccaacctgggcagcatagtgagaccctatctttacaaaacaacttaaattaaatttaaaaggtaatatgggtgatttgtgagctatgaccatttactgttgttatctgtcacaagtgatcaggagtttaccttttctgcacactttaatgtgttcagggttcttcaggtgaaaatataattttcgtagctagttctaggagtgaaatatggcaatggtaattctgtgacctttacaaagacattgaa

SEQ ID NO: 18566 - DNA, 352 bp, Homo sapiens
  misc_feature (1)...(352): n = A,T,C or G
aacgggtcaccctggaggcctccgcaaaagctgatctaaaagctggcaactcctgtccagagcttgtgcccagcaaaagaagcaagctgagaaagcccaagcctgtccccctgaggaagaaagcaattggaggagagttctcagacaccaacgctgctgtggagggcacacctctccccaaggcatcctatcacttcagtcctgaagagttggatgagaacacaagccctttgctaggagatgccaggttccagaaagtaacccctgaccttaaagaaactcccggcactctcagtagtgacaccaacgactcangggttgagctgggggaggagtcgaggagctcacctct

SEQ ID NO: 18567 - DNA, 330 bp, Homo sapiens
gacatttctaatttggggttttctatacctgtgggcttagaaaagattaagaagctgtttacaagcaagggtgcacactgaaacactatacctgggtacagaataaaggtgttgctaagaaaagctgttacactatgaactattttactataagaagaaaaggggttaaaacattttttaatttgtcagaaactgaacggcctaaaagccatgtattcaagtttaaaaaaaaaaaaaagagggatagaccctcatactcttttgattagggtttataaaccaggggggtcttgggccgttaaaaaaataattaggagaaaaaacccccca

SEQ ID NO: 18568 - DNA, 329 bp, Homo sapiens
aacagaatctgttcttaccattttagtttttctgcttctttgaataataaaagtatccctttttctatgcagttccaagccccttacctcctcaggactttgctttagcatctctctcctttcccttctctgccacctctatcttaagtagataaagatttttttttttttttttactaagttgggttcttagtaaaacaaaccaaaagcaaccaccattaggaaaacctctccctttgacaaggaagcacaaatctctattgaataattaccatgggccagtaagtttgggctaaaaatctttttttttttttttaaaaaaaaaaaag

SEQ ID NO: 18569 - DNA, 348 bp, Homo sapiens
gtcgactcctgtgaggtatggtgctgggtgcagatgcagtgtggctctggatagcaccttatggacagttgtgtccccaaggaaggatgagaatagctactgaagtcctaaagagcaagcctaactcaagccattggcacacaggcattagacagaaagctggaagttgaaatggtggagtccaacttgcctggaccagcttaatggttctgctcctggtaacgtttttatccatggatgacttgcttgggtaaggacatgaagatagttcctgtcataccttttaaaggtatggagagtcggcttgactacactgtgtggagcaagttttaaaggtcgacgcggccg

SEQ ID NO: 18570 - DNA, 341 bp, Homo sapiens
ttttttttgacggaatcttgctctgttgcccattgcactccagcttgggtgacagagcaagactctgtctcaaaaaacaaaacaaaacaaaacaaacacaaaaaaaacgctgcttctagataaatccattgagtttggtgtagcaaaaaattgttcccctttaattttctgctggccgatataaaatgaagacatttaattattcaagatcttttagatattagttgttactcatttgtgagaaaactcacatcgatacatggtagtcactacatacacttgccaaaactgcttttgtttttgttctattatggctaaaagagatgggtctacctgtagtg

SEQ ID NO: 18571 - DNA, 397 bp, Homo sapiens
cataaaataaccaaaccagatagatgacttcaggtggtggtaagagctttgaaagaataagcaaggtaactaactggtcagaggaagggagatgggtgcagcaaaccaccatggcacgtgtatacctatgtaacaaacctgcacgttttgcacatgtatcccagaacttaaagtataataataataaaaaaaatgggagtaaaaggcttatggagctataaaacgaacaaacaaaaccccaaatctaaacttttcttgaggactattctcactgaatagtaacttaagtacacactcattagttaggtaagttagtgctgttaatgcatttgatcatggaattaaggggagggtaaggagtatcagtgaagctttaaagttttatgtggatccagcg

SEQ ID NO: 18572 - DNA, 395 bp, Homo sapiens
  misc_feature (1)...(395): n = A,T,C or G
ctcctgattaagttttatagaatatatttcaatggtttttatggtctatttggtatcatatgcttatgtctcttatctcccccacttggtgtatgaatattaaaaaggataaatttaggatgggctggtggcagtttcataggactagtcattttttcaaaacaaacataacccgaaactctttttcacaatatctgcaatagaactagcctggctgaatagcacaattcccatttaaatgcctctaatgagatgcataatctttttttgtttttttcagacaagtctcactctgtggcccacgctgtagtgcagtggagcaatcacagctcattgtagcctggaattcctgggctcaagtgaccttcctgcctcagcctcctgagtagctgaan

SEQ ID NO: 18573 - DNA, 211 bp, Homo sapiens
cttggcagagtcagtaaccaaccactaataaaatcaaagttgtagtaaagactttataacacatatgcctccttctgagttgttggttttgttttgttttgttttggtttgttttgtttttgagatggagtttcactcttgttgcccaagctggagagcaatggatctgacttcggtttgggcaacctgagtgaaagtaaaaccagccgct

SEQ ID NO: 18574 - DNA, 348 bp, Homo sapiens
  misc_feature (1)...(348): n = A,T,C or G
gcggagcgggcgccggatgtgacgtttccggaacctccgggtgtcatccgcggggaaagaacttggtcctgatgtctgaccatggagatgtgagcctcccgcccgaagaccgggtgagggctctctcccagctgggtagtgcggtagaggtgaatgaagacattccaccccgtcggtacttccgctctggagttgagattatccgaatggcatccatttactctgaggaaggcaacattgaacatgccttcatcctctataacaagtatatcacgctctttattgagaaactaccaaaacatcgagattacaaatctgctgtcattcctgaaaagaaagacacagtan

SEQ ID NO: 18575 - DNA, 255 bp, Homo sapiens
cacacatgtgcacaagtcatacaaaatatataaaaaaataaatggccagatggttgacacttttatacccatcttgaaattacagaaataacgggagacctttgctagccaagtctctcctctccccttcccctaatctgtcttgctgcaggtgacatctcacagctggtactctgcggagcctgtggtaggcaagtccttcagacccttaaaggggtccgcctctcagtttgtctttcctagtcgacgcggccg

SEQ ID NO: 18576 - DNA, 348 bp, Homo sapiens
cctcacttgccccagtgagaaggaacagcaggaatggctggaaagtttgcggggtgtcctgtccagccccttgacgcccctcaaccggcttactgcatcaacatagagtggccgcagcagcaggtgacccattaactgaggaactggctgccactgaacacctggaactccttgtgggaagaagtttgcacctcggccctggctgcccaccatcagtgccccgcagtcagcagccattcctggcagtgaactctgccaggactgaagctgcggctttatccatcagctccctgggccttccccgcaacccacctcggggatctgaggatctggtgcatagatgaacat

SEQ ID NO: 18577 - DNA, 391 bp, Homo sapiens
gtttctttggaaggcagtggatttttgctggtgtccttcaacaagcatgaaggtgataaatgtgtttccatggctttagactcatttttgaagtcttggattgtgtgaacattcttagaaacaataaaatgttttaattaaaagccctcgactaccagctgaattcagtgtctactaggaaaatgggtagatttgttacattgtccctttgctctctatgactttgttccagttgtcaaggaacttaaatgggtattcaggaaaaagaattcttgtttccctttcctcaccttgccagttaaataactcctggtgacacttcaggtggtagaattgaaacacaaacctgacttctgaccacatgggtcaaaggcaaaaggcaaatggcttc

SEQ ID NO: 18578 - DNA, 399 bp, Homo sapiens
  misc_feature (1)...(399): n = A,T,C or G
aaaattagaaatggtgaagtgagaagatcctgagttgggttcctggaccaattctgccattcattagctatataaccttaagaatgacatttcagatgtttctctgggcctcagtgtctttacctataaataaaaaagttgagctggaaaatcactaaggtggtttctaaatgcagaagtctaggatatagctcatgatgtgggaataagatgtattagcgaactgtattagcgaaaactgatatttaaagaaatcctatgataaattattggagaaagtgaagaattactttataatataactaaccaccccaacctatatgctttatacttcctgattttgtttgcttgtcttanagtggagaatacctgtatggattataatatatatatattttn

SEQ ID NO: 18579 - DNA, 369 bp, Homo sapiens
  misc_feature (1)...(369): n = A,T,C or G
gtattttagaaaatgacatagaatcaacggctttggaaaatgtcagaatatgttgcacatggtaagagtagttactgtttcattaaacttgtctcaatgacaaagtaagaaaatttactttgacacccagttaaaatggaaacgaggccaggcgtggtggctcacacctgtaatcccagcactttgggaggctgaggcaggtggattgtttgaggtcaggagttcgagaccagcctggccaacgtggtgaaacccccgtctctactaaaaatacaataattagctggcttggtggcccatgcctgtaatcccagctactcaaaggccaaggtgggagaattgcttgaacccaggaggcagaggttgcan

SEQ ID NO: 18580 - DNA, 368 bp, Homo sapiens
tttctttataaagtatccagactcagctattctgttatagcaacataaagctaagatagttacattcacctttgttgtctacccagcctttttctccatcctgcaaagaggacaatcagaaatatgtgaatttcttttcttttttctttcttttttttgtttttttgagatagagacttgctctgtcgcccaggctggagtgcagtggtacaatctcagctcactgcaacctccacctcctgggttcaagtgattctcatgcctcagccttccgagtagctgggattacaggcgcatgctaccacacctagccaatttttgtatttttaggagacacacggtttcaccatgtttgtcaagatggtctg

SEQ ID NO: 18581 - DNA, 379 bp, Homo sapiens
  misc_feature (1)...(379): n = A,T,C or G
taaaaatacaaaaattagctaggcttggtggtgggcacctgtagtcccagctacttgggaggccgagagagaagaatcgcttgaacctgggagacagaggttgcagtgagctgagatcgcaccactgcactccagcctgggcaacagagcgagactctgtctctnattaaaaaaaaggaaaaaaaaaaacggaggccgggggggggggttattgcctgtacccccacccttttgggaggcccaaacgggcccttcccgtgaggtcaaaagttcaaaaccaccctggccaaaagggcaaccccccttttttattaaaatggcaaaatttacccaggggtgggggctcacccctgtattcccacctactggggaggttggg

SEQ ID NO: 18582 - DNA, 378 bp, Homo sapiens
gggcacctgtgatcccagctatttgggaggatgaggcaggagaatcacttgaacccaggaggtggaggttgcagtgaaccgagatcgcaccactgcactctagcctgggtgacggagcaagactctgtctcaaaaaaaaaaaaaaaaaattggcctttccccccttccgggtggggggggctttccaaattcccaaaggggggaaaacccccccgttgggacttccagggataaaaaaatttttaacttggccaaagaaagaaaggacttccttttattaggggcctttccaacccttaaggtaactcgagccggagttttaagttcattggttttcaaaacatgaaaacggtttttgccgaacaaaaattgttgttt

SEQ ID NO: 18583 - DNA, 346 bp, Homo sapiens
ccggggtctggtcacaatgagacacaccagtgtggccttgttggcttgaagctcctcagaggagggtgggaacagagtgaccgagggggcagccttgggctgaccaaggacggtcagcttggtccctccgccgaacacccacccagagccactgcccatgaacagcacacagtaataatcagattcatcatcttcctgggcccccgtgatggtaagggcagctttgttcccaaggatggagccagagaagcgatcagggaccccagaagagcgactgttcgtgctgtaaacgagcgagcgtggagcctggcctggggtctgcaggaaccagctggggtagttgtag

SEQ ID NO: 18584 - DNA, 371 bp, Homo sapiens
cccagtacgatcctgaagacaaaacacaatcagagcaatggttaccaacaggtagaagtggtccagtcaaagcaaaagaggtccagtcaagagcaaaggtcatggcaggggttttttgggatgctcaaggcaatatgcctgctgactttctcgagggccaaagaacaataacatctgcttattatgagatgacttggagaaaactagcaaaagattttagcagaaaaacacccaggaaagcttctccaaagagtccctctaaaccatgacaatgttcttgctcattattctcatcaaacaagggcaatttttcgagagttttgacagagaatcatttagcgtacaccttacagtcctctgacttctttttg

SEQ ID NO: 18585 - DNA, 377 bp, Homo sapiens
  misc_feature (1)...(377): n = A,T,C or G
gatgttttgacttttagatctttaagttaagatgacaaataatagtaacatttttggaccttaaaattctcaaaaactttctttggtaattcaatcaacaaaattctttttcttttaagtttagttgatattgtattaaaggtacagaccagatattcacttatttttttatttttattttttaaagaagtaaatttcttagttgcccaggctggaatacaatggcatgatctctgttcactgcaaccttcacctcctgggttcaagcgattcttgcgcctcagcttcccaagtagctgggattgcatgcatgtgccaccacagcctggctaattttgtacttttagtanaatgggtntcactatgttggccaggct

SEQ ID NO: 18586 - DNA, 352 bp, Homo sapiens
aaaagatatatgagcaatgaagtttaaacacagctttattcaatattgtcctcttgcctttctagaatttacaaaagcacaggtcccttttcactacctcattcaatctgaatcaacataagaaatgctggatctaattagctttcacaactcaaccatagctgagtgtcttctcctgtcttatctgctgcacacctgttgctattagttacattaatacactgctacaccttccagccagatggcagggatttagtaggtctttatttttgttaggtatagtcagaccccttgcaagggactaagtgttaaaggaaaataatggcggaagaaagaagcaaatgatatatat

SEQ ID NO: 18587 - DNA, 342 bp, Homo sapiens
gttgacttaccgtagtggtaggatacctggtgaggcttgtggcctgcattgggcattctgggtcacaactctgaatgaggttggagcagaggtccagctgtggtgaggattggcacagtcgtgcttgtgggactcctccttggtccaactctaatgctcaacctacaccatcacccctgtgcttgctcctctaatgcctaagcactgtcattcctttatcactagtagttgcctgttgggtttgctccatttgtcctcacagtttagctgccctggaaggaaactccaccctgctcagagacacactgaggctgagacccaagggaggcccctctctgattg

SEQ ID NO: 18588 - DNA, 344 bp, Homo sapiens
  misc_feature (1)...(344): n = A,T,C or G
tgcagttggtagatctagcgatctagttgggagataatggtgtttaccccatatgaagtattcaatagttctacttgtgaatttgtatttattttgagttatacttgacacagaattccttttttaaaaaaatatgtgtgtattttggaaaaaaaattcatagatgttaaaatttctgcatggttaccagtttttctcacaacactgaatttggtagcttttcccgaaaaaatcttcacagtaattttttgtctgtatatatttgagggcctttttttaaaaaanaaaaaaggaaaggaaaantttacttgttggatttttgggattaaaacaaacgtcgagcg

SEQ ID NO: 18589 - DNA, 361 bp, Homo sapiens
  misc_feature (1)...(361): n = A,T,C or G
tgcagttggtagatctagcgatctagttgggagataatggtgtttaccccatatgaagtattcaatagttctacttgtgaatttgtatttattttgagttatacttgacacagaattccttttttaaaaaaatatgtgtgtattttggaaaaaaaattcatagatgttaaaatttctgcatggttaccagtttttctcacaacactgaatttggtagcttttcccgaaaaaatcttcacagtaattttttgtctgtatatatttgagggcctttttttaanaaaaaaaaaaggaaaggaaaactttaatggtttgatttttgaaattaaaacaaacgtcgacgcggccggaaattccagan

SEQ ID NO: 18590 - DNA, 346 bp, Homo sapiens
cttcaaaggaggagggccgtgcccagctaatttttggatctttaataaagatggggtttcactacgttggtcaggctggtcttgaacgcctgacctcaaatgatccacctgcctcggcctcccaaagtgctgggattacaggcgtgagccaccacgtctggctgaaacctgtcactcttacacatcagagaaatcctaatccccatgtgaatagtgtgggtggccataatttatatggctcatatcaaatgtccttatgaatgcttataattacataaaatttattctttcatttttatagtctgttcggcacttgaagtacttcttgtttaagaaatcactactg

SEQ ID NO: 18591 - DNA, 368 bp, Homo sapiens
  misc_feature (1)...(368): n = A,T,C or G
tgttagacccgcctgctttctcacatgagaagaatggttgtactggacaaatctgacccatatacataatctaattaattgctcagaaagacttaatgcctgatcatattcgactataaaaaatactcttctacaccatctatttactacccaacaagccagggttggaacagatttatagccttttttttgaaatcacgtaactgattgttctgtggctagaacaaagccgtatatggactgtgtgccacaaaagcccatcactattgagctgaactatacaaccagatattcccctccccagtatgacctgcatattctcatctcctttcctctgctgtggnttccccacctcgaagttctcattt

SEQ ID NO: 18592 - DNA, 360 bp, Homo sapiens
ttctttaattccgccaacaaacagcttcttcacagttacatgagcccctggttttccagattcctctcttgctacagcacgttttggctcaactactctcccatcaattgaatgaggtcttgcagccatggcagcatcaacctcagccatggatgaaaaagttacaaaaccaaatcctcttgatcttttgcttgcaggatccctcattaccacacagtctgtaagctttccccattgttcgtagtagttcctcaaactttcttctgtggtttcaaagcttaagccaccaataaagagcttacggaactgttccttttctctctacatcgcggactcagtcgcttcagcccgatttcccgc

SEQ ID NO: 18593 - DNA, 360 bp, Homo sapiens
agaaaacatttcaggaaaacttgaaggaatggcatcatactgtagggaaactatgactgcttggtaagagcaaaaggggaggcacattttgtttctatgtaaaagaactttgtaacacccagagctccaaattgggatgtactacttggaacagttccgcttcactgaagaaattaagtaaactgaacaaatcacttatttttgagaaaatgtacgtgttgggtcaagagttcagttaaatttcttacaagggctcttctagttctaattttttaaaaaatgttatgacctctgcccagattttttgtctcactggaattttatgaaatcaaatagtttgtaagtggaccattataggac

SEQ ID NO: 18594 - DNA, 382 bp, Homo sapiens
aaaactaaatgtaactacaaagtttagaagtaactaaagtagctgtttgagatttgtctaaatgagaaccatttgaaaacaaaacaaaacattttagaagctccctctgcagaacaataacttattaatttacatgatttaagggcaaaacacacagaacccaagtcactatcctatcaacccaagctaagaaaggctggctgaaagactcacatttaatattgcatgtgctctctgtcaacacaggtctaagtttcagaggcagacttgaaaaaaatcccagacacaggatcaaactcgagaaatgtctctaacctttgtttctttcttttgtttgatacagcaccaatgcacatgaagaataatttgttttcttccaccc

SEQ ID NO: 18595 - DNA, 401 bp, Homo sapiens
aaacataaggcttggcattaccatcaggtaagaagaggtaggcaccacttttgtctcttttaattgtggttccataccatgaaaattgcacatttacttcatggtgtttaccatcttctttagtcatcatttgcttcataagtccagtttgatcaaaccgaagtaaaacaaaggagctctctagtgctataccttcttcagtatttatcatattctttatggtgaaaattccgctatcttctactttattcttatacaagacataatcagctaaatgtgaatttgaacttgctgattccaaaatcttatacactttcagtcccaatggcggtatatgtgctcgaaaagagatctcataggctggttctgaaatagtatttgctgtatcccaaactgcgctg

SEQ ID NO: 18596 - DNA, 381 bp, Homo sapiens
caaaaatttcttacgttcttgcagtttgagaggtactgtgtaccaggcaatgtttttcaaatacttgcttccttctgtcagggtgcagcctttgtagaatttgacgtacacctttcaaaggactttgtgcccgtggtatatcatgatcttacctgtggtttgactatgaaaaaggtacgttgaaatttcttcatttcaaactcttaatgttaagtaaaaggtttaaaaactaggaagcttttttatatttttaattacttattaaatagaattggttaattcattttcttggagaattactgccagtccttccctctcatgctcttgcaacattgagacagtgatgagttgggaatactgccttcctagagtagggtctct

SEQ ID NO: 18597 - DNA, 403 bp, Homo sapiens
agaatctgttttaaatttgatcacttaaggaaggaggcaactgatccaagaccctgtgaagtagaaaatgcagctgaatcatggagaacttcagtagaaactgctctgagagcttacgtaaaagaacattacccgaatggagtctgcactgtaagtcatcagtagcagctttgtgtgtgagttttgagcaaacgcgagtctttagcgttttttaaaatttacaagaacttacagaattgacattgcataattgggcatttttttccttaaatatttctaagaatgtttactatttattgaagaaattctggataataaatagatatactaggatggcttataatagagaaatggctgtaccttgatttagatccatgtagaaattctaatacattgattaaag

SEQ ID NO: 18598 - DNA, 381 bp, Homo sapiens
ttcttaatttctgtgatactcacccattaacccctaggccagtcagtatccagagacaatgtctccctctggtggaggctggaatacggtggcgtgctctcatctcaccgcagcttcatccccctaccatagcctcctgagtagctgggactataagcacgcagcaccacacccagctaatttttttttttttttttttaaaaaagggagtctaaccatgtttcccaggccgggcggttcttaaatttttatttatttacttatttatttggaaagggagtcttacgggttgcccaggctggagggcaggggcccaatttcaactcagggcaacctttgtctcccaggtttaagcaattctcctacctcagcctcctgagg

SEQ ID NO: 18599 - DNA, 345 bp, Homo sapiens
  misc_feature (1)...(345): n = A,T,C or G
ctcaagtatttcaaatataatctccttctcagttacgcatctcccctgccagggatttccagatttaatatttgttacaaactccaaatatacaacaccctgaaaacacatttctatttggtttttttttttttttttgggaaaagggattttctttttgcccccaaaatgggaccaaaggggccaattttgggttatttgaaccccccccccccagggtaaaagcttttttctggcttaaccctccaaaaaggggggaataaaaggggggggcccccacccccaataattttttttgttttttaaaaaagaagggggggnnnncncnnnccccngcgccgcccc

SEQ ID NO: 18600 - DNA, 385 bp, Homo sapiens
  misc_feature (1)...(385): n = A,T,C or G
agatgtttttatgaagtctctttctgatcacgaacaatagcttgcgctctactctgtagttatgtggattgccgagcaatgacccttttcaatttcttatttctgtgttactgaggaccctaatcacttagggatgtaattttatagtataaactttctgtacagtttttcttatagtctaataagtaaaaagtgtccttcaaattatgataattgcctatgtacatggataaattaaaacactgcacacgcggaaaaaaaaaaaannnnntagaaaaaaacaagaaaattatttaaaaaaaaaaaaaaaaanttanaaannnttnnnnaaannnnaaaaatgaaaaaatttgggccccccaggatcttttttttttttttttta

SEQ ID NO: 18601 - DNA, 215 bp, Homo sapiens
gacacggatgtgcacgacgcctctgaggagtacaagcaccgtatgcacaatctctgctgtgacaactgccactcgcacgtggcattgaccctgaatctgatgcgctacaacaacagcaccaactggaatatggtgacgctctgcttcttctgcctgctctacgggaagtacgtcatcgttggggccttcgagaacacctggcgtcgacacgggcg

SEQ ID NO: 18602 - DNA, 399 bp, Homo sapiens
ctcccgagtagctgggattacaggcatgctccactatgcccagctaatttttgtatttttagtagagacggggtttcactactactactcgaactacttgagtactcgaactactgccctcaggtgatccacccacctcggcctcccaaagtcctgggattataggtgtgagccaccgcacccagccacttgtccttttttttttttttttaaaaacagggtcttgttatgttgcccaggtgggcctaaaattcctgagctaaggcgatcctcccacctttgcctttaaagaagctgggacgtgttgccccaccacagcggggtgatggcttttcatttggtttccagttttcaataggattttctctttctaaaggccaaatttatcaaaagtttatt

SEQ ID NO: 18603 - DNA, 339 bp, Homo sapiens
  misc_feature (1)...(339): n = A,T,C or G
ttttttttttgtaaaagcaaactaactttatttgaataatctaaataaaaaacaagggtaggtgaatgtgtacccaaagggaaaatatcctatgtcaagtttcaaaacataacaagcaaaaataagtttatttctaaaaaaaatttcagtgaaagaaaaaggatgtttattatgacataatatattgattcctaatgggggatctattaactgtttgtctaatctagccaaaatatttaagctgtttctgcatatgtaaataaggcttaaaaattaaagaacaaaatctgttctctaattttacctagtaaaataatggtaaagcaataaactaaattn

SEQ ID NO: 18604 - DNA, 347 bp, Homo sapiens
cacgcctgtggtcccagctacttgagaagttgaggcaggagaatcgctcgaacccaggaggcggaggttgcagtgagccaagattacgccactgcactccagcctggtgacagagcaagactccgtctaaaaactatgatatataaaaattttggagggggctcaaagggaatcccccgtggtttttttagacgggggtgaaaaatgagaaaattttacttggggggttttggaataatttgaactaaatagccgggctttttttttaagggggccaactaaaaaaagggaacctttggtatttccggccccagggggggcccttggtgaaaaaaaaacctccttgg

SEQ ID NO: 18605 - DNA, 337 bp, Homo sapiens
cccgtatctactaaaatacaaaaaattagccaggcttggtggcacacgcctgtagtcccagctactcgggaggccgaggcaagagaatcgcttgaatccaggaggtggaggttgcagtgagctgagatcacgccacacgccactgcactccagcctggcaacagagcaagactccatcttataaaaaaaaaaaaaaaaccggaaaattccggcggaattttatttttttgcagcttttcaggcaaaaattccaaaatcaaagggttagcagggctgtaaaccctttggagactttaagggagaatttgttccaggcttctttcctagcttgtgatag

SEQ ID NO: 18606 - DNA, 339 bp, Homo sapiens
tgaggatctttaaaaacttaatcgtcatgatttgaagggcttattatcccttaaaactattatattatgctgaccttcattgaagatttttgtgtctttatatatatctccctagattttctaatcgtggatctttggtagtattgacatttttagtcatcttcatattagaagatttcagtattgggccttggtctagataacttataaaaatattaggcgggttgatactgtagccatcttggaatgggaattggggagtacttttggagtagtttattattcagaccaacggctagtccattcttgcatgacttaaaaaggaatacctgagactga

SEQ ID NO: 18607 - DNA, 346 bp, Homo sapiens
cttccatgagatcctaaatatgcaggaaaaaccagacattaggagacctgggaacagggaagaacggtataatttggtgcattcctttctccagaatccagcccttgtgaacagctggcttctttaccctgacaccctaactggctgttctactggtatcataaggcagactttaaaatatggagaaataacgtggggacaataatatctcatccaaatgagctggggtgtgagagagaaccgcactgcataaataggctaacagcatcacaggcaattggctctaggaggggctgagagaccatccactgggctggaatgtctttttcaacattgtgacctcaag

SEQ ID NO: 18608 - DNA, 141 bp, Homo sapiens
  misc_feature (1)...(141): n = A,T,C or G
aaagtggaangcaatgccacacaacttagaaattcaagctcctggaataaaagatacttctaaaaactggcccagagctcacatcagaaacacagaacatttcatgatgttaaagtaattgtttacgtaacctttactgcg

SEQ ID NO: 18609 - DNA, 207 bp, Homo sapiens
ctcagacggacgccatcggtcccaaggccttaggtggaggaagcaaagcaggccaggcctgtcctgtccgtggacctctaccttctggactccctacgggtgcagagcacttgggtttctctacagccatcgcaaccctaaaacaaccctgctgctcctcttcatcctttcccttttgtcctgaaagggaggaggtcgacgcggccg

SEQ ID NO: 18610 - DNA, 394 bp, Homo sapiens
tgcactttgtattttcaaatgaaagagttgttcctcccccctcctctgattatcaaaatgttttaaattactacgtaagccttcttaatataagaaagtgtaaacctagagctttccgttggcattctggtaaactctgcattcctaccactagatggcagactgtacagaggaacaacaggaccctggcaagaacacagatgcattcaggctcatctgtaaaccacattcttaaatctgagattgtttaggattccattctagtactctaaagtggtgattttcaaacctagataccttaggcccatcctagattccaaataaggattactgtaagggatgaggaaaatcatattttggtaagcaccatctcaaagatttattatttctatgt

SEQ ID NO: 18611 - DNA, 402 bp, Homo sapiens
tggcctccaactcctgacctcaagtgatccaccggcctcggcctcccaaagtgctgggattgcaggcatgagtcactgcacccagccgcaagtacacctgatgccttctctttaccatttcagattcctgcaggtagacaccaaggatctcctcagagccagcgctgatctcatccacagagggatcacatgacctcatctgggaaaatataaaccctacccacctgcctgcccatttggaaatgcagactggaggacgctaagttcattcttacctatgtactaacaagtacacaagaagatgctcaatatcattagtccttggggaaatgcaaattagattataatgagattccagtgtacacccactagaaggctattaaaaaggacaataccaactgg

SEQ ID NO: 18612 - DNA, 338 bp, Homo sapiens
aaaagaagttttcctggtctctaaagttactggaagatttgctgtagttttagaaggagccaatgagtttgatttctaaagttttgacaacattgttttttaaaggttaaaatggaatttaaaggaagagtggcttgggttggcttaagggctgagtgaggtggagtgagagaaatccatggggagtgctgacagtggagatttccaggactggtgcttgaggctaatttggggtttaaatttagaaaagagaatgcacatgaaatactttaatttgctagtggtacaaatctctgtatgtagcataatgtaaagctaatgaaaatatattttcagac

SEQ ID NO: 18613 - DNA, 354 bp, Homo sapiens
cgcaatctggggtagagaggactctagacagctggggcagcctgagggcactgtatacctgagggggtgtcagaggatggaagcagatggtacccatcagtaccaaagattccaagaaagcatgcgattacaagtacatatttcttttctttaactcaggttttcttaattttgttttagcatggagaactttcatccatataatagctgataaggtattgtaaaactgctgtttcatgaagttcagctagagaaatttcctaatgtacatgtaagcattttggcaatacttggaaactctgcagatgttgacactttctagtagatctgtaatttgaagtaacaactgagctg

SEQ ID NO: 18614 - DNA, 261 bp, Homo sapiens
gtttgaaaaaattcatgctttttctgtcattcagtaatacagaaaaagcatgaattttttcaaacagcaagtgatcaaatatacttttatacttaaaatacattacagattttgggtcagcagatagtacttctaaagaggtttgtcttgagcaaacataaaaatgaatttttcattcccaaatacaagaattaaaaagaagaaaactggcccaaatggagggaggatttcaaaggtattaaaccgttgtcgacgcggccg

SEQ ID NO: 18615 - DNA, 246 bp, Homo sapiens
ccgagatacaggcatcttccttgacttgatgcacctgaagaaacctgggggctttgacatatccttgttctacagagatatcatcagcatagcagaggatgaggacctcagggttcactttgaggaatccagcaagctagaagacctgttgcggaaggttcgcgccaaggagaccaggaagcgagcactcagcaggttaaagctgaagctcaacaaagatatagtgatctctggtcgacgcggccg

SEQ ID NO: 18616 - DNA, 348 bp, Homo sapiens
ctgctctatgtaattaaatcagtcaacagtggcagggcacatctggaaaaagcatatttctaccaaagcacattactgggaaggaaaagaagcacaagtacattagttaaatgattcacgtatgtataagcatctctgcagttcaacctaatccaatttttactcatcagaactctgccctgccatgctataaaactggtgtgcttcgtgaactccgaactatttcccttctcctgacacacacatatctatacatttttctacaaccccttcccttaaaaagtttgctttccttgaagaggatccattttatgaatggaccctgcccttactgccaatactcccaga

SEQ ID NO: 18617 - DNA, 65 bp, Homo sapiens
attttgaaaacacatttgacgtggaaactttaatacgttcttgaacaggcaagataaacattatt

SEQ ID NO: 18618 - DNA, 346 bp, Homo sapiens
ttttaatgtgattcatctgttccagtttgcctgggaccctggcagttttagcactcaaagtctagtgtcctggggaacacctcccagttccaggcaaatcagaaagattggtaacctgatcgcaaaactattaatttctgaatattttatcttgtgtctggctcccttactgaagtcttgtaagtgctagtcatttttcagctgatagcctatctggaaactccaagagaatcatttcatcaacaaataacacttttgtcttttcctttacatgatttgcattttttctttctctggtttttgtgcactggctaaagccttcagaacatggaataattgtagagac

SEQ ID NO: 18619 - DNA, 347 bp, Homo sapiens
cgcggccgcgtcgacgccacccttgttgagtgtccctttcttcgatgcatcatccgttttagtgctgagtaagtacacagtacactcatgctcggagggtgtgtggcactgagcacgtcctttcctcaactcttcctcttcctccatggcaagcccagccacctcccatattgtcaaagctaagttttttccccctctgacactggtgggagcagagccagcaggttcagtgagggattcaccaaaggtagtcagtgtcattaggtgtttctcaatttgagaatataaccagagctggcagggataatcgggttgggttgtggggaagggcaggaggaatctgaagg

SEQ ID NO: 18620 - DNA, 170 bp, Homo sapiens
aagccgcggagctggtggtggctacagttggtgttgggggcttaggcgagggacgttaccgggaagttgcaggcgggaggactcttccccatccagtcacctgacaggtcacaaacatgtcagacaaaagtgaattaaaggctgagttggaacgtaagtcgacgcggccg

SEQ ID NO: 18621 - DNA, 408 bp, Homo sapiens
  misc_feature (1)...(408): n = A,T,C or G
ctttttgtgaaggccggacccatttgggatctacgtcttatgatggatccactgtccggtcagaatagagggtatgcatttatcaccttctgtggaaaggaagctgcacaggaagccgtgaaactgtgtgacagctatgaaattcgccctggtaaacaccttggagtgtgcatttctgtggcaaacaacagactttttgttggatccattccgaagaataagactaaagaaaacattttggaagaattcagtaaagtcacagagggtttggtggacgttattctctatcatcaacccgatgacaaaaagaagaatcgggggttctgcttccttgaatatgaggatcacaagtcagcagcacaagccagacgccggctgatgattggaaaagtaaaagtgtggggaaan

SEQ ID NO: 18622 - DNA, 212 bp, Homo sapiens
tcctgtgcttattttaagtcctttgctgttgggtctaagaggtgctgaggggccactgtaaaatactaaagacaatgataaccaacagttgtatataagtgtatataagtgttaaaacccacacatcctaatagtcttacaatgtgatcatgctgggaagatggaattctgtcaaagcggtggtcacaataccagtttggtcgacgcggccg

SEQ ID NO: 18623 - DNA, 344 bp, Homo sapiens
ctctgaggggcttcactctcctcagacacgaagtcatggaaccagagcttatctcctaagtccctcatagttctaaacttttttgacaattaagttaacgtcctccattgacattttcttaaaacctgggtggtttgcgtaattctacatgtataagatatctgtgcataatgtgacttagaataatataaaaaaggataaaccaaaaaataggcttagatgaaagactggaaagatacacgtcaaaacattaattctgacttgtctttggttattattgttttgggaattactacttaaatttgcttacctatattttctaaatactgtgcaatgggtgggaa

SEQ ID NO: 18624 - DNA, 347 bp, Homo sapiens
agcgccgctgggcctgcaggtctctgtcgagcagcggacgccggtctctgttccgcaggatggggtttgttaaagttgttaagaataaggcctactttaagagataccaagtgaaatttagaagacgacgagagggtaaaactgattattatgctcggaaacgcttggtgatacaagataaaaataaatacaacacacccaaatacaggatgatagttcgtgtgacaaacagagatatcatttgtcagattgcttatgcccgtatagagggggatatgatagtctgcgcagcgtatgcacacgaactgccaaaatatggtgtgaaggttggccctgacaatattgct

SEQ ID NO: 18625 - DNA, 394 bp, Homo sapiens
tagccaagttgcttttaacctcaacacaggctagccagatttgttaaacaagtgttagtttttggaatttagaaatcatgcagatactatcactcccctaagttggcatctaacccagcacttacggtgtgacttgtcttttctagccaaggccaggaggacacttaaaactttgacaatgttttcaatctatggcatatcacattgcggctagaaatggccttaaaatgccagtggttaattttaagtttggtataatacctccctggcatggttgaaagatggttacaaagggtttggctgattatgtcatggtgtgaccacttaagagctatcagaagtagtttataagttatgctccaaacagaagtcctgtgaatgtattggtcttgcc

SEQ ID NO: 18626 - DNA, 399 bp, Homo sapiens
ggcactttcgatacaaggaattcatggcttggatgtatggtcccaacaacatatcaatcctgtgttaatataaaaatattatcttgacctctaaataagctaccttacctttcatgctcacaaaccacaagtttgtagccatactgaggcatggaacacaccactgtatttggtttgaatgaaaacacatttgcctttatcataccacagttgccttccagggtaaagtcaggcactgactgttagcatggccctgaaaggcaagggaaccttcacatacctgacatttggttttatctgtggcccgaagcagtagttctcaactgggggtggatttgtaccctctctccccacgggacatttggcaatgtgtagatatttttgggtggcacatctacg

SEQ ID NO: 18627 - DNA, 396 bp, Homo sapiens
gaaattctagaaatgtaaagaatgtgataaaggctttacatggttgtcacacttgattgtaggtaagataatttacattggagtaaacttctacaagtgtgaagaatgtggcaaaacttttaattaatgctcataccttattgcacaggaaagaatttttacttggaaaaaggtatatacacaaagaatgtggaaaagccattaatatgtgctcatatcttactcaacatcagagagtctgtacttaataaaaccattatagatgcaactagtgtcaaaagatctttcagaaaataaaagcctttaaagtgaagaagataattcattctgaagacaaacattacaaatattaagagggttgtagtaccattacttgcatcacagatcttattgtac

SEQ ID NO: 18628 - DNA, 236 bp, Homo sapiens
atccaatgttctcatttaaacattacccaacatcattgtttataatcaaaaactctggcccttctgtctggtggcacttaaagtcttttgtgccataatgcatcactatggagggaggattttatggagaaatggggatagtcttcatgaccacgaataaatataggaaaactacgctgcattgagggttttgaaaagggtattatacttcttaacaattcgtagacgcggacgca

SEQ ID NO: 18629 - DNA, 339 bp, Homo sapiens
caaatataaaatagccgggtgaggcagggaattgcttgaacccgggaggtggaagttgcagcgagccgagatcacgccactgcactccagcctgggcaacagagcgaaactccgtctcaaaaaaaaaaaaaaaaaaaaaaaaaaaaaaaaaaattccccgggggcgggggttacccccggtatcccaccctttttggaaggcagggggggccgattggtttgacctagggaccttagaaccaccgtggccaaccggggaaaccccggtttttaaaaaaaaaaaaaaattaactgggggggggggggccccccttgtggccccaacctggggggggggtg

SEQ ID NO: 18630 - DNA, 384 bp, Homo sapiens
caggaattaagtcctgcgtttcttctacttcaaaactacagagggaatgtagtgttttccttctcattaaaatcaggtatccctttaattattggcgtatttctcattgcatacagtcattcaaagtttgcattttatacaaagtcttgtcctaaatcttctattcagcttcactttcagcttaggatgtttaggaagaccaagtagccaaatttgatgccaacaagatttccgggatccctgtactaggtgtgatccttatcattcttatgtgaccatcatatctaatcaatgacacatcatcagtactataagcaagccataacacttggagttgtggttatcatgtgagcatttgctttcaatgataggtaatatttttag

SEQ ID NO: 18631 - DNA, 393 bp, Homo sapiens
  misc_feature (1)...(393): n = A,T,C or G
gtgatgaccaaaaatatcttcagacgctgcagaatattccttggagcagaaaatcaccagtttagaaccactgctttagccagttccagaaagtaaacacaaaatgactcaaagtgaattgcattaaaactctgagggtttagaacaaatgagtagccagaagaattggaaagactttagactatgaagatgaaaggttcaattaaggcgttcatatatcaatcatgttattatatagtccagagcaacatggaagatgtaagcttcttcttggtaataagtaacaacatacttacagatttttctggttaaaccatgtcatcctataaatagggaaatcttgtcactttcccaaattaaaggtaaccgttcaacanataattagccacttga

SEQ ID NO: 18632 - DNA, 356 bp, Homo sapiens
  misc_feature (1)...(356): n = A,T,C or G
tgccatttcaaccatttattctgctccaataatgcagtattgaatacactgaagcacggaaaaattaactaaactacttttatgcactttcaaaagaagcaacagaaaaacttggcaaagtaataatagtgaaattttattgcttctcaatagattaatatacttaataatatcctagaaaatgctgcactttgaaattttaacatgtaacagtgtatatcttaaattaaaaataactgtatagtccagggtggttatttatactttatatagnctatattctttgtgagatttgggtttaaacacatcacagtttaaattctgcgaagactgcagagtaaagaagattaagatgg

SEQ ID NO: 18633 - DNA, 385 bp, Homo sapiens
gtcactatggccaacctggattcaagggaaagggaattaaacatgtcctctcaacgagatgaaagcaaagaatgtatggctatctttatttaatgtgccacaggggaataaaagattcttctttcagattaaaacgaagaaaggaacaagctgtatgaaccaagcttgctccctggatgtgctctgtgttggcacaaggatattcgggaggaaaaatatggtctatctaggaaaaaaaaaatatcacaaacatggggctttctgccctcaccaggttgtcatgtcctaagaacccccactgggcccaagggtcaggctgatgtggacatctagccaataatgaacatgcctccctcccatttcttggcacccagtgagactccaa

SEQ ID NO: 18634 - DNA, 204 bp, Homo sapiens
ctccctctgaggccttgatcattactggatatccaacttcctcagctgactgtagcccatcatccacatctttcacataacctttttcatatagctcctggggaacatttaagatacgttttgaaaaatcattttcctgccagtccacacgaagacctgcaacagacaatagcaacttagggcaattacaagtcgacgcggccg

SEQ ID NO: 18635 - DNA, 355 bp, Homo sapiens
  misc_feature (1)...(355): n = A,T,C or G
cgggtagccactggactgacgacttgagtgctcagtagtcagactggatagtccgtctctgcttatccgttagccgtggtgatttagcaggaagctgtgagagcagtttggtttctagcatgaagacagagccccaccctcagatgcacatgagctggcgggattgaaggatgctgtcttcgtactgggaaagggattttcagccctcagaatcgctccaccttgcaggctcggcgccggcttgcccagttccccggttaaccacactctgtccagccccgtagacgtgcacgcacactgtttgcccccgttcccgggtagccactggactgacgacttgagtgctcagtagtcn

SEQ ID NO: 18636 - DNA, 400 bp, Homo sapiens
  misc_feature (1)...(400): n = A,T,C or G
ggctggccttgaactcctgacttcaggagattcacccgcctcagcctcccaaagtgcttgggattacgggtgtgtcactgcacttggatttaatgggatatttcactacagacttcggtaaacagaatattagcatttttggtgttctttttattttactcatactgtttttctttggactcaatcacaataacagaattaaagatcaaagtgtaaaagttaaagaccagtacagattcaataattattcttttctacatactgtgtttaaatgatatccctttttcttttttttcttatagctcgagctgtaaaagccaaaggtccggtgatgatcccatacccttttttccagtctcatgttgaagattnttatgtagaaggccttcccaaaggaatt

SEQ ID NO: 18637 - DNA, 341 bp, Homo sapiens
aattattatcattttctttcaagatctgtttgtggacccttgtaattatttttatttctataaggttggtggtgatattccctttttcatttgggtcttctttctttttttcttggtcagtctagccaactgtttgttaattttgttgatcttttcaaagagcaatttctcgcttcattgattttctctgttggttttctattctgtttcatttattttttctatgtttgttatcttttttttctaagtttgctatttggttttcttttttcttttctttgctttttcttttctttccttttttttttttttttttttagaaacaaatttttgcttttgtc

SEQ ID NO: 18638 - DNA, 387 bp, Homo sapiens
tattgttagacacactggaacaagagatttcaaaatttaaagaatgtcattctatgttggatattaatgctttgtttgctgaggctaaacactatcatgccaagttggtgaatataagaaaagagatgctgatgcttcatgaaaaaacatcaaagttaaaaaaaagagcacttaaactgcagcagaagaggcaaaaagaagagttggaaagggagcagcaacgagagaaggagtttgaaagagaaaagcagttaactgccagaccagccaaaggatgtgaaaagttgtgtttgtgtgttttcttctcctgtcccatatttgggttatgatgactcaagtgtagactgaagttgaggtagtgccttatgccattatgtcatatgttga

SEQ ID NO: 18639 - DNA, 382 bp, Homo sapiens
tttttttggaaaaagaaatttttttttaattagaaaccaagtttacatacggttaaatggttactaaaagctcagttgtaaccactcctaacaccactagcagaacctcaagggagccaagagctcttcccttttcccctgttaatttccagtataatgtagcagcacaattatttcatgtcacatttaagaagaacaagaaccaatttatataaagtacaattgtatatccttaaacattccacataaacacactgtcaaaactcactggatatgctggaattggaggacttaaatttctacatattatttattgcacccagagtactggttaaaatgcactttctgtgaagatcaaatgcaataacggtcgacgcggccg

SEQ ID NO: 18640 - DNA, 388 bp, Homo sapiens
gaaactgcaatggaagtagatactccagctgaacaatttcttcagccttgtacatcctctacaatgtcaggtcaggctcattcgacatcatttcccacagaaagccctcattctactcctttgctatgttctccagatagtgaacaagggcactctgttgaggcatctggacaccacacacatcatcagtctgattctccttcttctgtgggtaacaaacagctcggatccatgtcacttgacgagcaacaggataacaataatgaaaagctgagccccaaaccatggacaggtgaaccagttttaagtttgcactactgcacagatggaacaactacaaacacaataaaactgaactttacagatgaatggagcagtatagcatcag

SEQ ID NO: 18641 - DNA, 386 bp, Homo sapiens
cacacacacacacacacactctctctctctctctctctctctctctgtgtgggtctctctctgggtctctctctatgtctggctcggggtggatatcgcgagcccgggggggcgctcgcgcgggggttggggtgggggtgtgtaaggagcgggggccgcggggagtgggggtgcgttctaggtgttgaaagagagggctcattggcgcgcgtgtgcgaccgtgagagaggaatgataaaggggtttcggggcgggtttgtgtgttttggggcggagggggagctccctctgtgcataatgaatgaaaagttggggggggggggggtgtgtgttagtgagagaaaaattaagctgccccgtggggccgtgagctatagagacacagg

SEQ ID NO: 18642 - DNA, 388 bp, Homo sapiens
gtttgccgccagaacacaggtgtcgtgaaaactacccctaaaagccaaaatgggaaaggaaaagactcatatcaacattgtcgtcattggacacgtagattcgggcaagtccaccactactggccatccagtcttttagttcaaagtactcaccatgccaaagtgccatgcttcgggatattgttttttgagccccaacagtcccattagtagtcatcaatactttcaagtccctttagttcagagctttccaagaggtgccatttttcaaggtctgtctgtaccatgaagtgagagaggttgggaagcactgccttattaaattgtagtcatagtctgagattcaggacttcagtaagaagtctacgtggtaagttctttggtaatg

SEQ ID NO: 18643 - DNA, 406 bp, Homo sapiens
  misc_feature (1)...(406): n = A,T,C or G
ttttttttgaaattctccatgataaaaagctaaaaagaatacacaggaaattttccactgcaaactgtgtgttgggagttctctgagaggggagcatgttttcatgttaaaatggtagcacctgggcttatcagccaccctactaaaagaaaaccttttggggctggcacccagaaatactcattttcaacaagcttcctcagtgattcttatgttcatgaaaattggaaaaacacattaaaatgaagtgattactttcttaaacaatcattcttgaattaatctgttttgtaaatttacattttagagtgttaatttccttgatgcgatccaaagtttctaacactctcttatcattgaaagaatgttttaagtattcctgtacaattcattgtatgggaactan

SEQ ID NO: 18644 - DNA, 387 bp, Homo sapiens
cggaggtgaagctgcatgcgagcggctacggttgggcggttctggcacgtggtggttaccggctctgctcgatgtatgtggagatgtcgatttactctggaagttctgccacattaacttctaaccggtcctggacgtcattgaggattttggcatcattctcgtcagacacaaaagcgatggctaggcctttggtgccaaagcgacccgcccgggccacccggtgcaaagaggtgtccgagtcctcacgcatgtcgtatttaaagacgatgttagactcgctcgatgaccatcccccggccaaacagattgatggccaccaggatccgccgctggaaatgctctgactgctgatagcgtgacaagcgctcctcctgggccatgccc

SEQ ID NO: 18645 - DNA, 345 bp, Homo sapiens
aattaaaaatattcttgtactaggtgaaagtttgtgagcatctggtttctataaaaaaaatctagtgaaagtttctaataatcaagtatttaattatctaggtatattgataatatacttaaatgtacaatgtgttcttcaacatttgagatcaactttgcccttaccagtgtgatcttcaagaacaagggtctctggaagaccatcaatgctttccttactagctggtggattggccacctcaacatccactgcaagagactctaaatgggccagagcagtctgaaaaacaaaaggtacagttctttgttagaaatactttaaaacagtaacagaaaactattt

SEQ ID NO: 18646 - DNA, 365 bp, Homo sapiens
ggctggagtgcagtgatgagattatagctcactgcagcctcaacctcctgagtagctgggactacaggtgtgcaccaccgtgcctggctaatttatttatttgtaggtatagaggcttactacaggctgttcttgaacttgtgggttcaagtgatcctcccaccttggcctctcaaagtgctgggattacaagcgtgaaccactgtgcctggcctctctagtttaaaagattgtcatctgaggttcaaaataagcccttcatccattatccacccagcagacatccagcacccagtctgagctggcagtgtgctaggccctatggagacaagggtgagcaaaagagaacgtggtcgacgcggccg

SEQ ID NO: 18647 - DNA, 309 bp, Homo sapiens
  misc_feature (1)...(309): n = A,T,C or G
ccggctcaggcagagacgcggcaccatggctagcaagaaagtctgcattgtaggctccgggaactggggctcagccatcgccaagatcgtgggtggcaatgcagcccagctggcacagtttgacccacgggtgaccatgtgggtatttgaggaagacattggaggcaaaaagctgactgagatcatcaacacgcagcatgagaatgtcaaatacctgccagggcacaagttgcccccaaatgtggtggctgtcccagatgtggtccaggctgcagaggatgctgacatcctgatctttgtggtgccccn

SEQ ID NO: 18648 - DNA, 339 bp, Homo sapiens
  misc_feature (1)...(339): n = A,T,C or G
ttcggaaattaaagaagtaatcacatgttgatggaggatatctgcttcacttcaagcagaagcaaatcaagtggacttcccttgaagacagaaacttctctattgatagagctaagggtgcttcatgatgctgaattctttgtggctccttttcacataaaagtaggaagccattttccctggagtggaagggaggatgacttcccaggaatatgagctttgagccaaagaggcaggaactgggaggctctcagttacacttgagaaagaattatttctctcaatattggtcttcttttcctccagagccccagtgtgagcctgggtgcaagctctgan

SEQ ID NO: 18649 - DNA, 348 bp, Homo sapiens
gacaactgcagaggtatcttccttataacgatgctttttgaggttgctgctcccatcaatctgctcagtaaaaatagctcatcttggtaagttgtttcgacttcaccaggacctgaagaagaagcagaaaaacctgtgaaaactaagactgtttcttccagtaatggaggggaaagttccagtcgcagcgctgagaagcgatcagctgaagaagaagctgccgacctcccaacaaagcctacaaagatctccaagtttggatttgccataggtagtcagacgacaaagaaagcatcagccatatccatcaaacttggatcaagtgtgagttgttatttcatatatgat

SEQ ID NO: 18650 - DNA, 339 bp, Homo sapiens
ttaccccagctactcgggaggctgaggcaggagaaccgactggacccgggaggcggaggttgcagtgaaccgagattgcaccactgcactccggcttgggccacaaaagcgaaactccgtctcaaaaaaaaaaaccaaaaaagaaaaagaaaaaaattggggggcttacccctagggaaaaaagacaaggaacttcgggtttttatttcattaacttcctaaattattggaaacttctacaataaaaagggattcatggccgggcgcaggggcccatgtctgtaatcccagcactttgtgagggcaaggcagggggatcacctgaagtcgggagttcga

SEQ ID NO: 18651 - DNA, 333 bp, Homo sapiens
caatggcaatcttggtataagttgattgaagagggtatttattaaggttctggcatctagggcaaagtatgagctcatcttttacagaaagacattgttccttctactgttcattctaatcagagactctactagtctgtgtttgggaactgtagttcccatgatttctttaaatgtgtaggttagtattctttttaattttaaaaaattatttactgttttggtttataggaactttgcttacataccaagctgttagccccagttaattgtcccattgctgattttcttatgaaagctcctgaacctccaccagctttaattgtaagaaat

SEQ ID NO: 18652 - DNA, 197 bp, Homo sapiens
gtgaagcctttcaggaactcttctgcaagaattattttcagagccagcttgtcaacgacatgattggtctttttacttcataagtcttattttgtttcaccaaaagcttcacagtgtaacaaaccaaactcagcacagaaaacatatgacaatatattttagattctctaagacaaggtctcatgtcgacgcggccg

SEQ ID NO: 18653 - DNA, 327 bp, Homo sapiens
  misc_feature (1)...(327): n = A,T,C or G
gctgtataccaaaaagcagtgattttccaccttctaaaaactcatatcccaccccttttgatacacttcaagagagtcttctaccctttctcactaaaagtaaccagggctgctttgagaaatggctgattgcaagtctggagtagatgtacatgataagctagaacatcttgtcatatcagaaagcagagaagctttgaaaaactactggattcatgtcgtataccgaggagccaacttgaagctgttcccagtaacttgaagaggggacataatgaccaaaactgattgaaacacatcaaaatattaaagacacatgagtttatn

SEQ ID NO: 18654 - DNA, 345 bp, Homo sapiens
ttcactagcaacctcaaacagacaccatggtgcacctgactcctgaggagaagtctgccgttactgccctgtggggcaaggtgaacgtggatgaagttggtggtgaggccctgggcaggctgctggtggtctacccttggacccagaggttctttgagtcctttggggatctgtccactcctgatgctgttatgggcaaccctaaggtgaaggctcatggcaagaaagtgctcggtgcctttagtgatggcctggctcacctggacaacctcaagggcacctttgccacactgagtgagctgcactgtgacaagctgcacgtggatcctgagaactttaggctcg

SEQ ID NO: 18655 - DNA, 336 bp, Homo sapiens
cttttttacaaacttgacgatcatcatttagaaatataatgaattgaaaactggtatatccaaaatagtgtacttttactgattatgtttttcatagctatttgaacaacacttttaagccacatgtagatttcaaagtctctaaattttttcattagatcattatatcagagaacatagtatttacaaaaaacatgtagctgttttggttagtggcgactggaaatattgcttgacggtggtttaatagtgcccatactgcttggaaatattagcatttattagatagattcattttcaaatggtaataatagtactcatatagtactaatattg

SEQ ID NO: 18656 - DNA, 102 bp, Homo sapiens
ttcaatttaatcacataccctgtgtatttgctcaggtccaagcagctcagtctgaggctaaggttgtatctcagtatcatgagctgccggtcgacgcggccg

SEQ ID NO: 18657 - DNA, 385 bp, Homo sapiens
ctgcatcctgcctccccagctacactgcagaattcagagagtagacattattgtcacctccttgtgactcagcacccagcattcattacacatacacagcatgtgttcaaataatatttttgccaataataaatggagtgctaccaacaagaaggttttaagcttttcacagaacttctctccaaaaagcaaattctttagacctaattctgtacaaaaataaatgcaggaatgttcttctggcattccacctgattcactgtgaccactcaggcataatttagctccataaagatgactgttggatgtgttgtttttcacctgtagattgatgactaccacatcctttttgcaataaaggcatttttcctttcgaaactgacag

SEQ ID NO: 18658 - DNA, 394 bp, Homo sapiens
  misc_feature (1)...(394): n = A,T,C or G
catccacataccctgacctggccccctcagtgttgtcaccagatctgatttgtaacccactgagaggacagagagaaataagtgccctctcccaccctcttcctactggtctctctatgcctctctacagtctcgtctcttttaccctggcccctctcccttgggctctgatgaaaaattgctgactgtagctttggaagtttagctctgagaaccgtagatgatttcagttctaggaaaataaaacccgttgattactaaaaaaaaaaaaaaaanaaaaaaaaaaaaagagnannataaaaaaaaaaaaaaaaaaaaaacnnnnnntttaannnnggggggggtgtttaaaaaaaaaggagaagaccttattatttttttttttttttttttt

SEQ ID NO: 18659 - DNA, 393 bp, Homo sapiens
tctaagtcggataggcctaaaaacctgactgcttctaggctaacacattctacatttatcctttatgtggtgcgataagttcacttggtcaatgacttgatttctcttaatgcctccagctctttcagaatcacttaagttttaagaacagcactacagggtcatcttcaggcccgtccacccctttaaggttggctcatctaaatcttttcctacaaagacaggaaaagaggcgaccctctctactgccatttacattcaaaaaggagttcatgctttgtttatgaagaagtgagaaatcaaaattattgattcatgttataccagtagtgagacactggagaagttacttcactcttgagctgctttctatatttgtaaaattagaataaa

SEQ ID NO: 18660 - DNA, 350 bp, Homo sapiens
  misc_feature (1)...(350): n = A,T,C or G
cacggacttacatcctcattactattctgcctagcaaactcaaactacgaacgcactcacagtcgcatcataatcctctctcaaggacttcaaactctactcccactaatagctttttgatgacttctagcaagcctcgctaacctcaccatatcccccacggctgcattggnctgggccaagcactccctcatgtttttggtcattctgtcctacctgggattatggaactatctcggcatctataatgatgacgtgcgttactcaggaaacgccacttcttcgtctccaatttgttcaaaagagcagtttggctcgcgatccttcctgcatatatcgcgcataatggc

SEQ ID NO: 18661 - DNA, 394 bp, Homo sapiens
tgagagtgagcctttctaatagatactcgcccagcccagcctccgggccacccagcctgtggaggttggtcaggtggtcacccatcttcttgataagcttcacttcctcatctaggaagtgagtctccaggaagtcacagagatgggggtccgtgcgggcagaacccagggcatgaagatccaaaagggcctggttcagctttttctccagggccatggcagctttcatggcgtctggggttttaccccactcatcttcagctggcttcttgatgtcctggaagagagcgcggccgccacgctggttttgcatcttcaggagacgctcgtagccctcgcgcttctcctcggccaattcgcggaagaagtggctcacgccttccagagccacatc

SEQ ID NO: 18662 - DNA, 287 bp, Homo sapiens
gtgcagaagagatgaaaaaaggaatcaaaaggaaagtaggtttgaggcataagaaaatctaggaaaagtctgaaggaaagaaatgttcaggcaaagattataacataaaaccaaaataagatgctgggttatgacaaaaaggagaaatttggtttaaaaagaaggaagctttggaaagaataataaaggtatgaaaagtagggataaaagaaatgttgctgttcatatgaaaaatacagtatgacttgtatcttagacatcagctatttgagaggtcgacgcggccg

SEQ ID NO: 18663 - DNA, 359 bp, Homo sapiens
gtgagttccagaggctggtttacttaacaaccacccagcaagaccattcttatgctgagttgacggaacattgagtaaacgtagggatattactgggactttgaaattctgaaaaggttctttcttaactttcgcattaaaagcacgtttattttataaaataatgacaacagtatgtgatagatgctttattcatgcctttgtttgaaaagcagagaccagattaccctagggctctctacaaaatttctttttttaaaaatgtattggggaaaaatatactgggcgtacaaaatatgcctgtatacttggtgacatatggacagggtttgattgcggctaatactgatcaagaaatt

SEQ ID NO: 18664 - DNA, 358 bp, Homo sapiens
cttcttatcacttggcattcattttaactactgtctggtcaccacggagtcaaaactttcaaaattaagattgacttactttttttttttttttttggaaacggagtttcctttttgttccccggcctaaaggccatgggcccaatttgggttaattgaaattcccccctccggggtcaagggaaacccccgccctaaccctgccaagaacctggaataataggagggcccccccacatccagctaattttggttttttaagaaaaaacggggtttaattttttggaccaggtgggtttaaaactcttgacctagggggacccacccgcttgtggttccaaaagggcgggaataacgg

SEQ ID NO: 18665 - DNA, 360 bp, Homo sapiens
gtgaaaataaacagttaaaattgcttttattctaagtatttattttcacaatgtgaatttgagtatgagaagcataaagaattttgatgttataacaccaagttaacagacactaattctgaaagtttacctccgcatgatcactgatggttccattatttgcatacatctgataaaaatgttaggcaaggcctcagaatgactcttaatctaaatgccaatgttaaatggagtaaatataaggaaaattatattcagtttggtttttaagccaaagagaattcacacctgcaacgtgttctttgaagagaacgcttgcaagtggcaggctaacttctctctagtctcatcatttaggaa

SEQ ID NO: 18666 - DNA, 360 bp, Homo sapiens
  misc_feature (1)...(360): n = A,T,C or G
tttcctctctcctcctggaaaatgcctgtctatccttgtgtgagggttcagaggctcagaaaccccttctctgggagggactctcctatctgccaccccttaaccagctcccactgtgcctcttccctcatctggcacattaaattattacttgcaaaataggcacagtggttcatgcctgtagtctcagaactttgggaggccaaggtgggagaactgcttgagggtcagaagttcaagaccaccctgggcaatgtagtgagacccccatctctacnannnaaaaaaaaaaaaaaaaaaaattttttccccggggggggggggggggcgctggggcccaatttcctggggggggggggg

SEQ ID NO: 18667 - DNA, 360 bp, Homo sapiens
  misc_feature (1)...(360): n = A,T,C or G
atcagggcctcaccattatgatcttaattacttcctcggaagccccatattcaagtacagctgcactgggcatggggtagggggcggtcagggtttcaacacgtgacttttagggggacatgaacattcaattcataactgtaccttctttcaaaagctctcaaacaccctgagcctatgtatctctgtatcatctctccacaaagtgattatcctgtttcccacccacttgactgtggcctcttcaaagtaagggtctatatgctagtcacttgtttacttctgacacttagttgaatgccttataacaaagatattattcaagatccctgctaatgagtaactgagtgtagtttctcn

SEQ ID NO: 18668 - DNA, 357 bp, Homo sapiens
aaaaatacatgaaaccatttgccctattaccaatttttttcaacttgaatttacacaatctaaaataattggcttaattcaatgtggcagattaaaaaccacatgattagtactcatggcatgcctataccaaaatatctcacataccccataaatatatatacttactatgcacccacaaaaatatgaaacaaaaaccacaaattatttgctagtcctcatattgaggtaatggctaattcctctcctttgaatctgggctgacctttgtgacatgcatggtgaataaaatgcagcagaaaggggctaggtgataagaaatcttacagctttcaaataagcatgttgacaatactt

SEQ ID NO: 18669 - DNA, 349 bp, Homo sapiens
  misc_feature (1)...(349): n = A,T,C or G
cggaattccagcactgccccccagacatgcccattcactgaccccctgagctagttccctttcttcctcttgggttgcttccctaataggatgcacttcatggcttttgcatctcccctcccagccacaagatctttgaatctctgagggttttcttcaaggcattttattcctacttaccacaggaaaaattaacagccattaacaaaattatagaacatggtgagnnnanncnnnggnacttttgncagaggtttggnnnngggggnnnttttggngtgtttggggttttgtggggggttggtggtggtgttnggtgtttttgtttttttttggntttttttgtttg

SEQ ID NO: 18670 - DNA, 356 bp, Homo sapiens
acaccatcttcagtgccagtcttgggcaaaattgtgcaagaggtgaagtttatatttgaatatccattctcgttttaggactcttcttccatattagtgtcatcttgcctccctaccttccactgcacccagccctatatgaatgtttttatatagtctggaagttattgtttattcttcttttttgctattaaaaatgtacagtctcttctaaaaagaagtcatccatcccaaagacatcagtattcctagaagcatagttttatttttactaattcagatactgtatgttttatattagtttgctaaattattttgtctaggcaaagcttaaggcagctacttagaaatgtgag

SEQ ID NO: 18671 - DNA, 192 bp, Homo sapiens
  misc_feature (1)...(192): n = A,T,C or G
gactgctcctgtaatcccagctacttaggaggctgnggcccggggattgcttttatatttttagcttacatgtgtcttgattgttgtcttggtgagagttatcttttcttgaatgattcttatgttctaagctgtatactcggtcgtatatacttgatttattaattggagatactggctttttttttgtgg

SEQ ID NO: 18672 - DNA, 359 bp, Homo sapiens
aaaaaatattttaaaaattagccgggcatggtggggcgcacttgtagtcccagctactctggaggctgaggcaggagaaccgcttgaacccaggaggaggaggttacagtgagccgagatcgtgcaacactgcacaccatcctgggcaacatagtgagactctgtctcaaaaaaaagaacaaggagggaaaatgaaaaaatatttataaggtggttttcccaagggttcctaaatctttgaaaaattttgccaaaatttttcctggtaaaaacccctaaatgaaaaaaccttctaaattttttatttttttttaggacaaaaggctgccttcacccaaggaaaattacctttaataccg

SEQ ID NO: 18673 - DNA, 327 bp, Homo sapiens
ctttcccatgttgcctcccttcctgatgctgccccaccagcccccattcctcccacacagcctgcccctgttccaggcctagcttgtcacagggcctgcgttgcagattgggtctgtggggcattgacccgtttgcaaggcgctagaggctcctgtgctgttggccccttcttggggggcctgaccatggtcctggcgcatccagcttctgcccatgtgggtggagtcttgacccacaccctttccctcaggacaacctggtcttcatcgtgggcaaactggacgggctgatggtcactggagttcgcagacacaatgcagatgacg

SEQ ID NO: 18674 - DNA, 354 bp, Homo sapiens
tggcgctattcctagcagtatcgtaccaccataagacgcaaagtaagaggtggccagggctgaccccaccccacagctctctgctgtgtagaccacttcagctttcatttctcgtcattcagtcagtgaggatgagagcatgtggctgtgacagcggccactgcaggattcttggcaggtacagcttactagggtggagtcagggacatagggcaagaggcagaggtggtgttagtctgagagacaacaccttctttcaggaagccagtgagggccagggacagtggctcatgcctgtaatcccagcattttaggaggctgagacaggtagatcacttgaggtcaggtgttcga

SEQ ID NO: 18675 - DNA, 345 bp, Homo sapiens
cttatctctttttttcccacattatctgttgcgtatctactacagtaggctgcaaaacatacagcaaaaaggattggcttgaaggcatttgatgtttgtaaataaatccacaattggatccaagctgaagaggtgatacatagtcagcctagtagacaattctgagcatgtgcatacgcaggtaaagtccaggctatattaaataaaaaaaaatgtcagtgcgttttttcatgttaaagttttttcaaagctttgttttgttccttgttgtgctgaccacaaacaagttttaagagtatcaagagtctggccaaaatagaaaaaaaaaaaaaaaaacaataggaa

SEQ ID NO: 18676 - DNA, 339 bp, Homo sapiens
atttagttcccctctaatgttatggaagagtatctaactgtgtcttagtttttattgggttggaagaccttgctgtcttggtgattatacttgctgaaaagttcacgggattttcatttgagaaaatcatcccagcaaatttaatgggtttggtgtaaaaattaaattctagaatgatagtcaaccacaggtctgaaataaacaatgtggtgtttttatctttcgtttaatctttctgggtttttttttttttggttttccgtttttggttttggaaagggagtttggttgcaacttccaggctggagggcaagggcctgacctttggttcattgcacc

SEQ ID NO: 18677 - DNA, 336 bp, Homo sapiens
gaactattcagattgtcagtagtaaatttaaagacaaatgcccgttttcctccagtccatgaaacggttaaatcatcatatgtattataaagctaattaaatgttatccatagaacctatcatttttcaagaggcaatacaacctgtttatgttaaagaaacttatgaatcaaagcggctttaaaatactgctctacttaacatatcacatcccaagctttcactcaggttttcacatagggaaatttgcttgatctattcaggccaaaaacaaaaaggctgaatttgaatacaattaacaactacaaatgtttaatcttttgttattggcatata

SEQ ID NO: 18678 - DNA, 347 bp, Homo sapiens
tacggtaagtccattagctttagaatcagtacagaacgggttgaattgcagctgtatccgacacttccagttgtaggaggttggcaagatacatggcttctagatttggtttatttataataaataaatttatctggagctaatgaccacctcataggggtgtgaggattaaatggtacaatgcttgtgaagactccatcataatgccaggtacctgcaaacgtgcaataaatggtagcaatgtttatgatgacttgagggcagccccaatagatgattaattaattaatgtagacaaagtctcactatgttgctcaggctcgtcttgaactcctgaactcaggtga

SEQ ID NO: 18679 - DNA, 400 bp, Homo sapiens
ggcaacaaccccagaaataaagccagaaacaaagtactccagtgcctcctgaagcagcgtggagagccacgtacatgatggaatgcgttttgagtttaacagattggtggagttaaggtgacatcatatgatgaggcagtgcaaggcgggaaggaccctcaggagtcgtcagggggttgagtcccaggctctaccatgtgtaagttgtgtgaccttatgtgactttggctctctgggtctccatagggataataacaatacctgttttgtagtcaggattggcgataatgtagataaaatatctggcgcctgcctggcatattacagatgttcaacacgtgttagaagctatttttaatattactattatattaacttatattactattttgagcaagaa

SEQ ID NO: 18680 - DNA, 342 bp, Homo sapiens
tgtgtactgtgtattgtgagggaaattcctgtgaaatttgctatccaacttattgtaggtaagtccactaaggattctgcccctttggcaacaaaatggacatttaatgaagagcttctatcccaagaaaagttatgtttctgttttgtctttggtcactgtgattttatttttgctatggctcttaggaagctttcagccaaatataagaccctcgcttaccaaccatgcaggacctttgtgatgtgaattttctgtattttgattttactatggtacttttattttcccatggcctttaatctttatttttatcctacttactatatacattttgatgtg

SEQ ID NO: 18681 - DNA, 336 bp, Homo sapiens
ggtttattaaccgcttgttaccttaggtacttgctccagatctgtcctggatttatcatgagtatgtaaaagagtcctttcgaaggtatctttaggaggacaaatattcttgcatctctcatgaatcttctctctctaataaaaagacaaataacatcatcaatgtatgtgtaaacatgagtattcaaagcatgaaagtgttttgcaacagaatatcagaatatgccaaattagtcctacgacttttaatatgaaatcactagcctcctgaacttaaatacaagtaacaagcgggtaataaaccaaatacctctatgagatctatgcacatctata

SEQ ID NO: 18682 - DNA, 344 bp, Homo sapiens
cgaataagagctttcccgcattagcgaaggcctcaagaccttgggttcttgccgcccaccatgccccccaccttgtttcaacgacctcacagcccgcctcacaagcgtcttccattcaagactcgggaacagccgccattttgctgcgctccccccaacccccagttcagggcaaccttgctcgcggacccagactacagcccttggcggtctctccacacgcttccgtcccaccgagcggcccggcggccacgaaagccccggccagcccagcagcccgctactcaccaagtgacgatcacagcgatccacaaacaagaaccgcggtcgacgcggccgcgaat

SEQ ID NO: 18683 - DNA, 336 bp, Homo sapiens
ctctggacgactccttgcctggtccattatcaagatatttgaagctaaacaaatccaggaaatgcttcagagatggacatatcagtacaacttatatagcatttcaattaccacataactggcccattttgatgtgaaagtctaagtgaattactgaaaccttaaaggtaatgtcagtcctcctatcaatatgactaggctcttttatgtaagaacacattctacccttttctttaaaaataaacagttccttgagttacacatgtgtcaaaacaaagtagttactaatctgtcctatgtcaaaatgagtactcatacctttgctcgagtccatag

SEQ ID NO: 18684 - DNA, 343 bp, Homo sapiens
ttccatctcttcacttgaacagcattagttaagtccagatgtgggaacccttctcttggaagaagttcctaattgtgtctcagaccggtgtaaacaaaccagccagccgccaccttgctaaacctataagctttttaaaatccaatatattctgccaagaatatgccttgatagttagccctcagcccataggtgttttttgttttttaacagaattatatatgtctgggggtgaaaaaacccttgcattccaaaggtccatactggttacttggtttcattgccaccacttagtggatgttcagtttagaaccattttgtctgctccctctggaagccttgc

SEQ ID NO: 18685 - DNA, 343 bp, Homo sapiens
tccctctcaatgatctgaaaatgtgcttctctcccccttgagtgctggctgtaggtcatggcttggcactcctaggctgcccactgcagctctggggcaatctcagtgtttatatttctttcctaactttgaggcagaagaggaagggacattagtagtggttgtagccaagggtcttttgtttgtctcctcagagttccaccacccctggagaatacagcaactgtttactgcaatcagcaatcaggatggagaattcgtgctgtgggggccaatccaggggttccctgtcatgagcagtggggagtgtgtagaacccatgagagatgggctttggtcaatt

SEQ ID NO: 18686 - DNA, 362 bp, Homo sapiens
caacagtgaaaagcataaacgactaacgtagccattgagttccatgaacgaaaaatgttcaacgatttccagatgtgaacttcattcacttgtcaaactttcaacaaatgaagctacctaagagtagctaataatatctaattatatacattaatttcaatttttcatttgtccaagaaatgacattttctatcactattattcattatttaaagggcattattttttttgtgagacagagtctcactctgtcactcaggccggagtgcagtggcaccatgtcagctcaccgcaacctccacctcttaaaaggcttttgatggcaaaatgtgagtctcaatgcaggccctagaataacagcc

SEQ ID NO: 18687 - DNA, 366 bp, Homo sapiens
  misc_feature (1)...(366): n = A,T,C or G
attagaccaaaaaactgtatacccccgtttgtaggcttcaactgtgcatagtgcaccctaaaattgtgaacattgtttacttggccaggccctctttaatgattcaattcgacatataagaattcagtggtcgttcatagaacgatgcgagatatagaccttaccttatgactaaaactatagcagatcttttttttcgacctagaaacctggctactttattgtacaaccggttatgaacaaacctatgactgagtatccttagctatgtagnagcaaaaagagtcaataatcctttcaagaaagatactatttcatttcctcccaacttggattcaccataaacacgatccacaaatgatattg

SEQ ID NO: 18688 - DNA, 398 bp, Homo sapiens
ctgcttgcagaagctgccctttcacccatcttgacaagatccagccacccaggactcacccatgcctggtgttccagcttcagggggtgtgcgtggttcctaggtcctgtggacatcacagcttcaggcctgaagagcagagaagccctgttctctgcatgtaggaggtcagcaggggtgggcaggcccagctggaggcagctgggtgagggtcctggttccagcagagcactggggcccatccaagtttgttctgccaccactggatggaaaattggaaatggactgggcgtggtggctcacgcctataatcccagcagtttgggaggctgagttgggcagatcacctgagatcaggagttcgggaccagcctgggcaacatggtgaaaccctgtct

SEQ ID NO: 18689 - DNA, 354 bp, Homo sapiens
cataattcctccactgaagtcctgaacccctcaaaatcatccttgagaactggaatctatttcttccaaactccagttaatgttgccattttgatctcctcctgtgaattatgaatgccattaattgcatctagaagagaatcctttccagaaggttttcaatttattttgcccagatccatcacaggaatcaccacctattatggctataactttatgaaatgtatttcttaaatactaagttaaaagtaaaagcgactccttgatccatgggctgcagaatgaatactagcatgaaaacaataaatctccttgacatttcttttttcatcattcaacttgactccttgacat

SEQ ID NO: 18690 - DNA, 390 bp, Homo sapiens
aaaatataccattttaaggcatgtggcgacaatgctatttgccttagctcattcgttgttgactttgcaaaaattgtgacttttatgtactaacacatttgattgaatgtgtattgaatcggaattattattactaaactcagcattagagtccttaattgacgattgtcttttaaagaaattagtttatttaacagcaagatagcctgggttgggagttagtgcatatcatcagccctccatctaatgcgattgctaagatgtgcacgatatgacacgcttagaatgagtgccttgacacctacataaggctgcgttacatacctcagtgaagaagccgaaagatgctgactcaccgagatgtggagggcattccggagaaacttttgt

SEQ ID NO: 18691 - DNA, 382 bp, Homo sapiens
gcaagacagatttatctgttgaatactcttgggcaggaaaaccatgtaaaacctctggaagcagcatcaggacagcagagcagagcccccgtcctcactgctcacttgcacagaaactccatctggactcggatgcttttactgaagacccatctagcttcaatcatctttagagtccatccattctggagagacctggcgtttgcagttgcctcctgtggccgagattttctgtcattctgttcccaggccttctattcacgcggttgaagggtgtggactttggaatggggtttgctgttcttcaggaacatgattcctttccctggctggagctgtcaagaaggaccatctgaaggctgcaatttgctcttagggaggc

SEQ ID NO: 18692 - DNA, 318 bp, Homo sapiens
tctcataccatgagacgggagtccaagaaattaccatttcctggctatccttctgaattcagatatattagggtttgtagcccaggtaggtgtgtttcttaaaaccttcacacatacaaaggaatactactttgcaacaaaaatacactactgatacatggaggaataacatgcatagaggaatgtcaaaggcatttatactaagtgaaagaacctgatacaaaaggctacacaatgtatgatatcatttataagacattctggaaaaggccaaactgtagggataaaaatcacatcagttcttggtcgacgcggccg

SEQ ID NO: 18693 - DNA, 223 bp, Homo sapiens
aaaacacaaaccttcccaaattaaggagggcagaataattttgagatgcaattagacaaatctctatgaaaaaaaaaattaaggctcctataattaacagtctgtttatggagtaaaattaatttgtatcttaattcttcaggacccagaaacattaaaaagtgcacttgggatatactgtgttagggtcctctatacctaagatctggcgtcgacgcggccg

SEQ ID NO: 18694 - DNA, 348 bp, Homo sapiens
tccctgccaagctgcctttcagactcctgtttggctcttccagaaagaaagagtctagataacaagcagtgtttggcacatgcctgaattttaaagtgggtgatggtaaactctgtaggggaaaatggaagctatattggaaaaatttgtcctcagaagctgtataaagctttatggataaaattccattatccaattctgtcagtttatgtggactatgagaaataaactttgtagctggtttattgctgccaaaaaatgtcaagccaagtatatgttctactaaggcttggaaaatgatagagctagacttgctttataatatgatgctattttaaatctataatt

SEQ ID NO: 18695 - DNA, 366 bp, Homo sapiens
  misc_feature (1)...(366): n = A,T,C or G
attaacggttgtccttttctagtaatttctacctctacaaataactataagacaaaaattgcattaaatattttcaggccacacttaaaaatatttactttacaattttgtactccatttttcctctaaagatttccaattctcaaaatgaatctcttatctaaaattggtatttttcctttcataaataaaatttaaatgcaggttaacagcactaatggtcagnnnnnnnnntnccttncattntgtgggcaattttggtgatagacgacgaaggtggcttgactatcctgaccaaaacgagaacccccccgtgtataaaattaaacaaaancgcccaaaccttaacggcctgttataacattg

SEQ ID NO: 18696 - DNA, 347 bp, Homo sapiens
cttgatttgcttaccgctgcatagcacagcttctgctttctttgagatgaccaactcctggaactcctctctaccctacatcttccctcctctgtaaatcttttctgactgtacccccccaggagctcctccctctgcaccttctatatacttgcaataggaactaaacttactcctcttttgtgtcctcaggcccacaaacacagcaggccctccactgattagtgaatgaataaattaatgaactcactgtgctcagtaaagtgttttctggatgcgcctactcactggtgtcaccagcttctcatggccacattcgtccatgaaacaccaaagttaccctctga

SEQ ID NO: 18697 - DNA, 340 bp, Homo sapiens
  misc_feature (1)...(340): n = A,T,C or G
gcactacagcctgggcaacagagcgaaactccatctaataaataaatacataaataagatttacattatctcaattgattttcacaacaactctgagatagatgctgttactggccccacttcacaggtaagaagaccggagctcagagatgaaagttcatttgctaaatatcacatagcccgggaagaatggaagaatttcagactgaagaatttaggtggggagtggcttttgagttaggaagtggcagggtcaccgtgggggagctgcaaggcttcagggaggtgaatttgactgggttcagttgctaaggcagaggaaatggatgcaggaggaaan

SEQ ID NO: 18698 - DNA, 641 bp, Homo sapiens
  misc_feature (1)...(641): n = A,T,C or G
ccacaaccagttgtaagatgccaaaacaatgtctaaagtaggggcagcacatagtccagagagtctttaagcaaaccctatgtgaaacatggacagatgagagcagcatgggcccgtaagtaaggagggaatcgtaggcagtctttgcaataatcccatccagagcctggtacctggaggtagaattcaagaggaaggagtagacttgaaatgccaacctataaggtcagagacagaagagaaaacaatatagtgacagatatgtcaagcacaggagaggccacccactacagaaaagtaaaggcaaccatcccatactgaaggggagatacagctcaacaaggagaggacaggcagaagaggacgctggtgcacacgcacccacatgtgcatacagaaccttgcagcccttcatcctcttcgtttggcaactcataaaaatattcctgggcctttgtccttgataccgaatcgaatgctggagggcatctgctaaccttggactggnggatgaggactgaatccgacaacagattattgccaagcactgcctatgctataagactacgctgatactggcctgtggctagcttgccaacgctgcctcaaactcatgatgggtgcttacatttaaagtaccc

SEQ ID NO: 18699 - DNA, 323 bp, Homo sapiens
attttattacagtcattgaggccctcctgagaccttttctgatttatttttaaagaaaatacatttcctgatcacagacttcaaaagtacaatgaacaaaaatactctgttgtacttagtaataaaggtttcaaaattcctctggctaaagaaaatctccctttgcatcagaaatgtctcctcttgtcctaactatgacaaaataagctaacaaaccaaaaccaaagtataaatcgccataaacacttccatgctctggtgacatatgtaaagtcattttggatggacgacattgagggagcagaagcaggtcgacgcggccg

SEQ ID NO: 18700 - DNA, 339 bp, Homo sapiens
tgatttttgttttttcccctcagtctattgtgaaatgttgtgatagaactgagcagaagagaagggagagaaggagtgtgcaaaaatctgaaagagtgactttaaaggttttctacatttctctgaagcgaatagttgtcaggtatttatgagaaattgcatagattgcagctgatatattatcagtgaacaagacacagtatctgtcttcaaggcacctacagtctaatagagaaagactatcaagtaaacaggtactgtttcagaactgctttgatgggaaatgtaggctgctatgagaacatctaagggagttcatcaggggtatctgaggatagt

SEQ ID NO: 18701 - DNA, 219 bp, Homo sapiens
ggagaagtcaccataaagccatacacaaattttagaatcaagggcaaatacacaattgttttagccactatgttttggagtgctttattatgcagcaatagataaccaaaacaatacaaataaaccaattagaactgttcctgtttggcagtaagcaacaacaacaaaaaatgtcagtggtaaccattgttatagttaataatcacgtcgacgcggccg

SEQ ID NO: 18702 - DNA, 343 bp, Homo sapiens
  misc_feature (1)...(343): n = A,T,C or G
ttcttgcctggttttggttttgctttgtgtggagtatctttttccatacctacactttcagtccatatgtgtgtttacgggtgaagtgagttttttgcaggcagcatacagttgggtaatggggttttttgtttttttgtttattttaatccattcagtctttctataacttttaggtggggaatttaatccgtttacattcaaggctgttattgacaggtgaagacttgctcttgtcattttgtgagttgctttctgattgctttgtatatcctttgttttttcctctcttaatgcttatcactgtgattttgngattttctgtggagataagttttcttta

SEQ ID NO: 18703 - DNA, 364 bp, Homo sapiens
tgtaaatctaaacatcctgaaatagctgggtatgcgggctcactaaaagttttgcctccagagcaccttatcataagaataaatgttctcttgcaataaatgaaaactgtcagctggttctgacttctaagaaatacagattctgctgagaatgcacatttcttttcttttccccctaattcttgaggcgagcagggcatctcccacatgctaagcctttggctgggtgcatttactgctgctactgcagcaatcatctttgtgtgtgtacatatattcatggggtacaagtgcaattttctacatccatacattgcattgtggtgaagtcagggccttcagtgcctcgatcgctgaaacaatg

SEQ ID NO: 18704 - DNA, 338 bp, Homo sapiens
tccaatttcacacaggtagttagcagtagtacaaaaaccagagcccagatctcctgatacccaatctggtagttttgctaaacatacctcatctgtaagatgaaaaaatttaaatagttcccacctcactgatgtaaagtattcagaacagtgccaggcaagtaataagtattcaacaaatgttaactactcgtattggtaataagagtagttgcttatattattattcacatttcattcaataaagattggctattttataccatgctgtcatccaatttacctcaatcaagtctccatggagtagagctttattttgttcaaattcccaaagcagc

SEQ ID NO: 18705 - DNA, 339 bp, Homo sapiens
aaatagtagagaattctgaatcaaaagtaaaactcaactttagggaaaacactagatgcatttcaaaaccttttctctaaaagcaaagtttaaaaagtagaatttgtctccttttaaaggtaggtatgcgtgtgtagtagaaagaaaatgataagtttaaaagaaaggtgttatgaatggctctccaaattatgtaataaaacagaaagttctgtttcaggcaatgtagaaaaccaaagcatttgtaccaatttcataactaacaacaactaaaaatgcaaggcaaaatacaaaaacatcttgacaggatccaagagttgagaagaaactaccaatcca

SEQ ID NO: 18706 - DNA, 249 bp, Homo sapiens
ccagtctgggattctgcaaacttctaaagcacctggtagtggcctcctggaggtgtgttgtgaacggttctgcagctgcctctgggctcaacaggaaagagtggtgattgattattgatgtctgccagggcacacagttctgagaagtagcagaacggatgctacaggaatctcctgcccaactctctgaagcaggatatttctctgaatctttctgctccttagcttctccttgcgtcgacgcggccg

SEQ ID NO: 18707 - DNA, 339 bp, Homo sapiens
  misc_feature (1)...(339): n = A,T,C or G
ggcccaagtacagtcttaatgcgataaatccactagctaagacgtcgagtgccaagaccagccttccagccgaggtttggacaaagtctcaggttcccgtgactcagggtaaggtgctggggctgccagaggacctgccccagcaagatttttgtcaagagcgagactccatcagcccaggcagacgggagcaggttcttggccagcgtagacagcagcaaacagcagcagggaagccattctcactgcatcctccctgcagtagccacggccaggcccttaggaggagcagtgaccgggggtgtccagaaatatcctgtccctggatggaaactaggn

SEQ ID NO: 18708 - DNA, 108 bp, Homo sapiens
gtcactctgagctccccctcagtctgagtggcaaacatccgatggtgaagtggaagcccgcggatcccgcggaggagaggcgctgccgcggccgggtcgacgcggccg

SEQ ID NO: 18709 - DNA, 341 bp, Homo sapiens
taaaactctagagtgctatgtaagctaggaagaagaattttaaacatgtgtcggtaggaaacaggatgtcactgacgtttctgaaaatctgagagctggcaggaaggcagaacagaatgtgaattatgaacccagggtcagcatcaaagtgcataggtgtgaaggttgatgttagctcttgcatgcttcgtggcctaggcatgcgcttcaactcctcatgctttagttgccatgtatgtaaaatgagaataacagtacctcatagaattgttgtgaagattaagtgagaggatgaatggaaatcatttagcacagtgctaagtggcttggaacaagtgctc

SEQ ID NO: 18710 - DNA, 376 bp, Homo sapiens
atggctgccccgtgtttgctgcggcaaggacgagccggggcgctgaagactatgctccaggaagcccaggtgtttcgaggacttgcttctacggtttctttgtctgcggaatcagggaagagtgaaaagggtcagccacagaattccaagaagcaaagtccaccaaaaagtgtccctacaccacaccgaagatactcaccttgtggagattggaaggatgccagctctttaaagccagccccagtgcctgctgagccgtttgacaacactacctacaagaacctgcagcatcatgactacagcacgtacaccttcttagacctcaacctcgaactctcaaaattcaggatgcctcagccctcctcaggccgggagg

SEQ ID NO: 18711 - DNA, 93 bp, Homo sapiens
cttatttttaaaagcaaaacatttcaaagagtccacatgacagtagcgttcattttggcatctgttgatttaacaaatacgtcgacgcggccg

SEQ ID NO: 18712 - DNA, 361 bp, Homo sapiens
  misc_feature (1)...(361): n = A,T,C or G
ctgagtcttcgggtggccttgggactccattggcaaaacgggtagccctttgaaagcaaaagtaaaacatgcccaaagcacctgagatagggcttttcacgcagtgcctggaagagttcaggagaccctgaaagtgattcatttcaaatcaggagtagctcagcaaaactaaggtcagtgttttttcaacccctgcccttcagaacacctctatactcaccctgggctaggtcacagggtgcagggaaagaaaacatggccctttttgttgtgtatgcagcacaaaggggacacagccatggacagaatcagacttcccgtcctgtggaatacctactgagagcaatgaaacctgtttaan

SEQ ID NO: 18713 - DNA, 399 bp, Homo sapiens
  misc_feature (1)...(399): n = A,T,C or G
gggccgactgaggggctcagaggccaggctctgaggcccacgcagggcctagggtgggaagatggcaggtgggggcggcgacctgagcaccaggaggctgaatgaatgtatttcaccagtagcaaatgagatgaaccatcttcctgcacacagccacgatttgcaaaggatgttcacggaagaccagggtgtagatgacaggctgctctatgacattgtattcaagcacttcaaaagaaataaggtggagatttcaaatgcaataaaaaagacatttccattcctcgagggcctccgtgatcgtgatctcatcacaaataaaatgtttgaagattctcaagattcttgtagaaacttcctaacatgcaggcacaccgtgactgatcanaacagctctgc

SEQ ID NO: 18714 - DNA, 398 bp, Homo sapiens
  misc_feature (1)...(398): n = A,T,C or G
cacaagcgtgtgcaagagacagagagagaggggaaagatacacgttatgacccaggaggaaatagcttatacactaaaataattcactttgctgatataaactagcagaaacctgggggatagatgcaagagtagattctaaggatagcataccaaagtggacagaatataaaaagagatgagattagaccgggtgcagtagctcatgcctgtagtcccagcactttatgaggcagaggctggaggatcatcacttgagcccaggagtttgttatcagtttgggcaacatagttgaaacataaaatacaacaaaatagcggngnttgttnantcttattcctgcatgtgaggactcattaatgtcctatacagctgctatctctgggatgagaaacgt

SEQ ID NO: 18715 - DNA, 403 bp, Homo sapiens
  misc_feature (1)...(403): n = A,T,C or G
cttgcaagttttttttaactaaaatatttttgaccgtccactactcacctaactctatatatgctaccatagtcctaattaaggaagttctgcttttatttttaagaaaaattcataagcttcagaatataatttaaaatattttagagtgaaaaatgagcactgaaaattatacatggtcatgatttttaaataaatttttatccatgtttaaggataatgtgtcaggcacattgatctaaaatgtaattacgatggtaaatgttcaaatctagatcagtgtgtaatgtggtacattagtttgtaaaatgctttcacagcattaactcattgttaattcttataccgccaaatgagatatcatttctttcctatccatctgttntacaaatgaggagacagc

SEQ ID NO: 18716 - DNA, 265 bp, Homo sapiens
ccacctactactttaatcaagttattcatgaggtaagtttcagcttaaaaaaaaaaatcatccacaaagataaccatttcaagagtacacaaaatcataatgccggccgggtgcagtggatcacacctgtaatcccagcactttgggaagctgaggtgggctgatcacttgaggtcaggggttcgagaccagcctggccaacatggtgaaaccccgtctctactaaaaatacaaaaaaattatctgggcggtcgacgcggccgcg

SEQ ID NO: 18717 - DNA, 403 bp, Homo sapiens
  misc_feature (1)...(403): n = A,T,C or G
ggcactttcgatacaaggaattcatggcttggttgtatggtcccaagaacatatcaatcctgtgttaatataagaatattatcttgtcctctagataagctaccttaccttccaggctcacaaaccacaagtatgtagccatactgaggcatggaacagaaaactgtatttgttttgaatgagaacacatttgcctttatcagaccacagctgccttccagggtaaagtcaggcactgactgttagcatggccctgaaaggcaagggaaccttcacatacctgacatttggttntagctgtggcccgaagcagtagttctcaactggaggtggttntgtaccctctctccccaggggacatttggcaatgtgtagatatttttgggtgcacatctaggggaaa

SEQ ID NO: 18718 - DNA, 213 bp, Homo sapiens
ttacttgtaacaaggcatttatttgggatgaggaaaggaaattgagcagaaggtacaggagtaatagcaattccctgtagctctcaaagcaaattttgagctcatttttctttttctgcaagctcagcagcagaatgcccagagtcttccctggtagatgcaggttccatagcgacgttctcctgcaatgcacgctggtagtcgacgcggccg

SEQ ID NO: 18719 - DNA, 399 bp, Homo sapiens
ctgggctttcccagctccgaagtcaatactgagatcccagatgtgtccagagacattctgaataggctaggaggtggaggagccttattgtgtccacaaagggactcctgaaactgactgagagccagtggatttgccagcagtctgagcttctaccgagtcttcccccacctcaatccctgttgctatggagactaccaatggaacggagacctggtatgagagcctgcatgccgtgctgaaggctctaaatgccactcttcacatgaatttgctctgacggccatgtccagggctggggccagacaaccagactgaagagaggcgggccagcctacctggccgtgatgacaactcctacatgtacattctctatagcatgtgtctatttgcagaacc

SEQ ID NO: 18720 - DNA, 348 bp, Homo sapiens
  misc_feature (1)...(348): n = A,T,C or G
gtttgtgtgtctgtgcccttgggaggggcattctgcctgaggaaagcaactttcttggaggactgtaatttaagtgatcgttgctttatcttcccagtcacctttggctccctgatcccttcggcttttacagctggctgactgctatcctggaagctggaggaagcttgggtctttgtgacagaaggcacagtggacaattctgagtctgcccctttggagatgccattcagcttctggaaggaggccttcttgggatgttgctgcttctgcagctgctgctttgactttgcagcccacttggctctcttggctggctggctgctgtctcaaacttgnggatgacct

SEQ ID NO: 18721 - DNA, 349 bp, Homo sapiens
atttattataacccaggcgttgatggggctaaaagcagagtttccatgacattaacacttaattcagggcaaaaatacatttaaaaaacctaaatcttaaggcagaagtaaaacattataaaaacagtatgtctaatacagactgtaaaatgtcagatttttaagagattcacatagtattttatagcactaaaatattaatacagtcagaaatattatcaattggtccaagatttctgtttataaaatgtctaaactgctaattgaagaaatgttgctgtataagtaatagctacaatacaaccaaccaagtgattgtttttatgacaaaagaactaaggcaggtaat

SEQ ID NO: 18722 - DNA, 312 bp, Homo sapiens
  misc_feature (1)...(312): n = A,T,C or G
ccagattaggaagctatggattcccagagggtcctttggaagtatctagaaatgtccaggtaagtcagagaagggctgaactttcttagaaaaatcactttagtctctcatacatgaagaacattttccttaaaggattctggttcttttccctgatggtcttgtgcaacggtctgagggtcacctgggcttcgcccaccactgcttctactgctgctgggtcactttcaaaacgcagaaataaccttttccggcgtgngtnntggaaagaatttgcgtaacttgacattccatgtgccgtcgacgcggccg

SEQ ID NO: 18723 - DNA, 339 bp, Homo sapiens
ttttcattttttgtagagacagggtcttgctatggtacccaggctggtctcttaactctttggctcaggcaatccttccaccccaacatcccaaaatgctgaggtcagaggcataagccactgtgctcagcctgtcttactagactttaatgacctaagtcagttagcaaattacagagcttagaccagatccagcctgctgcttgttgctgtaaatgaagttgtatttgtaacacaaccatgcccatttgttacataaaattgacgactattttgtaaaggtttttatacaagttaatgggactcaatacgccagggacatcataataaatgtgttat

SEQ ID NO: 18724 - DNA, 347 bp, Homo sapiens
ccagggcctgacgcattgtgccggaggctgcgcaccgggctcattttcggcggctacatatccctgatcgacgccgccttctatcccatctacttccggcccctaatgagattggaggagtaccagaaggaacaagctatacatcggcctggaaaagttcaagaggatgtgcagccaccagggttaagagcgtgggctgatccatttggcatgaaatgagagggctgtcatcagctctgattattaaaggagagttcttcatgctttcgattctgcatgggggacagccagtcacctcaccagaaaatgacggctggagaagaaaactctgtaataccataaataag

SEQ ID NO: 18725 - DNA, 341 bp, Homo sapiens
taagaatgcatccccctcaggtatcaggggaggtgtagtagggaacctgattctaccccagtaatcaggatgaaccagcaataataacacagtctccccattcccttctgggagtggtaacagaggaaggcaactaaaatagaaagtttaagtaagatccaaagtctcataacataatacccaaaatgtccaggtttcaatgaaaaaaaaaatcacttgtgataccaaaaaccaggaagatctcacactgaatgaagaaaaaaaaaagcagtcaacagaggccagcaccaaaatgacagggatgttagaattgtctgctaaggattttaaaacagccatcg

SEQ ID NO: 18726 - DNA, 295 bp, Homo sapiens
ttttcaatcagttaactcctttcctcctttagagttcattcaaacattatttccagctgggtatggtggctcatgcctgcaatcccaacactttgggaggcagaggcgggcagatcatgaggtcaggagagaccatcctggctaacatggtgaaaccccgtctctaaaaaaaaaaaattaaaaatcacctgggaatgggggcatgcgcctgtagtcccagctacttgggaagctgaaactgggaggactgcttgagcccaaaaggtttcggatgcagtaaccgtcaacgcggccg

SEQ ID NO: 18727 - DNA, 296 bp, Homo sapiens
aaacaatcagagaaatcagaatgtggagcgttctttaaaacccttggtctggattcttaaaaaagacgctgaagtatttatttaggggtgaagtcaagatgtctgcaacttactttcaaatggtttcacaaaacacagagatacagcaaatgtagcaaaacgttaactattgatgaacctaaatgaagagtacacaagtgttaattttaatagtcttttaattttcctgttttcaaagtgtagatttttaacagttaattgataataaaatatgactctgaaggtcgacgcggccg

SEQ ID NO: 18728 - DNA, 359 bp, Homo sapiens
gttgcggtgggtgtcatcaaagcagtggacaagaaggctgctggagctggcaaggtcaccaagtctgcccagaaagctcagaaggctaaatgaatattatccctaatacctgccaccccactcttaatcagtggtggaagaacggtctcagaactgtttgtttcaattggccatttaagtttagtagtaaaagactggttaatgataacaatgcatcgtaaaaccttcagaaggaaaggagaatgttttgtggaccctttggttttcttttttgcgtgtggcaggtttaagttattagtttttaaaatcagtactttttaatggaaacaacttgaccaaaaatttgtcacagaattttg

SEQ ID NO: 18729 - DNA, 359 bp, Homo sapiens
gaagcttctctaagggcaaaggggttgagggaaatttgcattatttatatctgtgaaattagtaaggttgactatagttaaaattaatttaaaaaaatcaaaatgtttcaggatgaacaactaaatgttaaactgttggtatattcatagctataacagagtttgcaattaagttctgttaagacaggttttattcactgctgactccccagtgccaagaacagtgcctgggatgcagtaggtatttaataattatttgttgattaataggttgtgcagatgagtgatgtgatagtttttttctttctaggtgcagattttaatttcagtgactgaattaaaaggtgtcaagaagctca

SEQ ID NO: 18730 - DNA, 204 bp, Homo sapiens
caagactacattcaaatttagaaaacaaataactggtgtgtgtgtgagtgtgtgctttcttcgcataagactttgtctttttatccagttagcttctcagaatccccactagccagaactgtgtcacatagtcattccagttgtcagggaggctcagaaagcaggtatcaaactctctggccactattcttgtcgacgcggccg

SEQ ID NO: 18731 - DNA, 345 bp, Homo sapiens
ctttaatgctcttccttttttaaatagagatctatatcattttccttctctctataaaacttcttttaacattgcttgcaaggcaggtctgctggcaacaaattccctcaatttttgtgtctgagaaagtcttcacttttcaagaataattttgcaagggatatgattctaggttgttggggttgcttttttcctctcaacactttaaatattttactccactgccttctacctggcatagtttctgaggaaaaagtcaggcttttttcattatctttttttttttttggaagttggaaagggaataacccccgggaaatttttttttttttttttttaggcaag

SEQ ID NO: 18732 - DNA, 285 bp, Homo sapiens
ggaaacttagacatcctagggatggatggttcttttaaacatgaaagcatatactgacctacttgattgatcctcttaaataacttttggaataaagcaaaacgctaacgatacatactctatataataactatggctgatagaaataatcatactcaatactagattgaaacccttggagttttttgaaccgagtgagttcgatccttaaaatctaactttctgaaagataaggttattgattgatttgagaaactacatttttttctttggtcgacgcggccg

SEQ ID NO: 18733 - DNA, 327 bp, Homo sapiens
catccttccacctcagcctccctagtagctgggactgggactacaggtgcataccatcatgcccagctagtttttgtatttattttaatagagacggggttcaccatgctgcctaggctggtcttgaactcctgagctcaagcagtccacctgcctaggcctcccagagtgctgggattacaggcacaagccactatgtccggcctgtccctaaacagattagtgagattaacatgttttaaaaggtagagctgttaaaaattatttcagaaaatttgcaggtgcatttgcgtgtcttatgtagtgcatgtatagtcgacgcggtcg

SEQ ID NO: 18734 - DNA, 348 bp, Homo sapiens
ggtaaacattactttttctagttaatagatacatttagagaagttattttccagcatcacacaggttataaatggaaaagtcaggatttatagtttgtcttaactcctaataattgcgttttcacatttggaaccttgagtcaagcatgaagttcaaatggtgcccctcttctctgtcaactctttacaccatcagccctgtatcactatctagtcagtcttctatttaaattctgatactcacccgtatccagttagtttgttgtactccctgcaaattttccttccctatttgtttttaaaaatcatctcgggtaataaaactccctttgctactttgaaggcacc

SEQ ID NO: 18735 - DNA, 333 bp, Homo sapiens
caagcccataatttttttatgtgtttatcattttgccaaaattttggataaaaataaaattatatgtattaataatgttaagaacacatgaattaatattatttttaggtttttatttacaactgctgttttaacaatgacatacatttttaaaattaataattattttttcccatgttgtctaaacagctttaaatatattttaatgggatgtctcaaagcttagataagaatgctcagcaaacatatccaatttttaaaatgatattcattttatttttgtatgattattgcaacatcacctcttctgtattatgtggccatgtggaagag

SEQ ID NO: 18736 - DNA, 403 bp, Homo sapiens
gtcattaagctatgacagatgaatgtacccatcttcacagcaggagcagtggacttatgaaagcaaacacaggaaacaggggaagatgcacatgtattaagtcacgattaacagctgggcgcggtggctcaggcttgtaatcccagcactttgggaggccgaggcaggtggatcacttaagcccaggagttgggtaatggccgacacagcatggtgaaagcccatctctacaaaaaaaaaaaaaaaaaaatttaaccggcctggggggggaccccccgcagtctccccatttggaaacccaaggcggaaggagggcccaacccccggaggccaaggttgcagggacctgtaattggccaacccgcccgcaaattccaaatttatgaatcggaaatcctgaaaa

SEQ ID NO: 18737 - DNA, 395 bp, Homo sapiens
caaacctttactgaattcattttacagtgctaacaattttttggtggggtctttataggattttctatatatagaattatgtcattagcaaacaaaattttacttcttttagattttgttgccttttaattttaattaacttatttatttacttattgcctaattgcactggctatgacttccagtagtaagttgaacaaaagtgtcaagagtaggcatccttgtcttattcctcaggatttcatcattgcatatgatgttacctgtgtgcttgtcatatatggcctttattatattgagtatatttttatttacctatatgttgagaatttttattatgaaatgatgttgaattttgttaatgttctttctgtacatattaatatgatcatgat

SEQ ID NO: 18738 - DNA, 375 bp, Homo sapiens
cttgtcaccatgctcagctcatttttgtatttttagtagagacagggttttaccatgttgggcaggttggtctcaaactcctgacctcaagtgatctgcccacctcggcctcccaaagtgctgggattacaggcatgcaccactgtgcccagccatgaaaaagtattataattctaagaatgtatgaaacctaaatttaaggaacacagactacagtaattttttttttaattacatattttgctcaggctggcctttaattcctgggctcaagtgatactcctgcctcagcctcctgcatagctcggactacatacatgcaccactatgcctggcttactggagtactttttacagtttcttctttcatcactg

SEQ ID NO: 18739 - DNA, 383 bp, Homo sapiens
cttggatcagatcctggaacagaaaaagatcagtaatgaaaaaactgatgaagtctgaatagaatctggagtatttttaacagtagtgttgatttcttaatcttgacaaatatagcagggtaatgtaagatgataacgttagagaaactgaaactgggtgagggctatctaggaattctctgtactatcttaccaaattttcggtaagtctaagaaagcaatgcaaaataaaaagtatctcaaaaaaaaaaaaaaaaaaaggtccccggggccgaaattcccaaatttttaaagggtaaatccggaaaaccccggagggttactttaactgtggcatggggccccattcaattttttttatttaaaccaagggttgccttttt

SEQ ID NO: 18740 - DNA, 342 bp, Homo sapiens
ggccattgcctcctctgctcctctggcttaaagttccacaggcacaatacagtttccttttgtgagctccaagacagtggcagcaattccaagaatctcttgattagttgtctctcattttgtgggcctgattggaatgatcggtctgggagaaatgtaggggtataggaacccgttctcttcttccctccttgtaatacgatgttgcctggcatggttttgccgtttcctccctttcctatgcctactgaaaggggaagcccattatgttacatgtttagatagttgtatttctttaataggtagatgtttttattagttgatttttagatcaattcttaa

SEQ ID NO: 18741 - DNA, 350 bp, Homo sapiens
  misc_feature (1)...(350): n = A,T,C or G
cttgatagctctgaattatacacttacatgtggctaaaatgataaacattatgttatatgtattttaccacaataaaaaaaatgtggaagaaaaagtgggggcaatactacacatagttaaaaagaaaaaagaaatgaaaaaatccaaaagtgccagcagctgccatttgagaaaagaaatctttgggtgggctcttctttcttttaactacttttctctattttccaaggtttctttcagttactctttggacagaaaaaaaatacatttaatgttttgaacactcttttggttttgataggtacatggntcaccagtccacattnttcctttatagacagaaagtttg

SEQ ID NO: 18742 - DNA, 348 bp, Homo sapiens
tgaaaaggtggagccctcatatgttgctggtgggaatgtaaaataatgcagttgctttggagaagtttgatagtttctcaaaatgttaaacatagaattgccatatggtctagaaattctcttaagtatctacctcaaagaaaagaaaacatatgttcacactctcctgcaaatgttcatgtcagcattatttaatagtcaaaaagtagaaatgacccaaaatgtctgtcagttgatggattgataaagtatggtatgtcattctgtatatgacatgtccagtatagccaaatctatataaacagaaactagagcagtagttgcttgtggcttggagtgagaatgggg

SEQ ID NO: 18743 - DNA, 412 bp, Homo sapiens
  misc_feature (1)...(412): n = A,T,C or G
ggcagatttaccaccaccaacagaaagtcaagaaacagatgcagtcagacccacataagctggactttggactgaaacctgagttcctgagccgccctccaggccccagtctttttggagccatccaccacccccatgacctggcacggccttcaactttgttctctgccgctggtgctgcacacccaactgggaccccttttgggccacctcctcatcacagcaacttcctcaaccctgctgcccacctagagccttttaatcggccgtctacattcacaggcctagcagcagttggtggcaatgccttcgggggacttggaaatccttccgttacacccaactcaatgttcggccacaaggatggccccagtgtgcagaacananaaaaaaaaaanaannaaaannnnna

SEQ ID NO: 18744 - DNA, 134 bp, Homo sapiens
ctcggctcgtgcgtcgatgaagaacgcagctagctgcgagaattaatgtgaattgcagctaaggaacaatggaaagagctgaaggcctcctacagctaactcgtagaggccttcagctcttgtcgacgcggccg

SEQ ID NO: 18745 - DNA, 191 bp, Homo sapiens
cgtggtggtgaagctgtagccgcgctcggtgaggatcttcatgaggtaatcagtcaggtcccggccagccaggtccagacgcaggatggcatgggggagggcatacccctcgtagatgggcacagtgtgggtgaccccgtcaccggagtccatcacgatgccagtggtacggccagaggtcgacgcggccg

SEQ ID NO: 18746 - DNA, 342 bp, Homo sapiens
tttggatcaaaatccttccaaatttgaaaactcaataaaaataacacttattaaattctagttagtgtagcactcatgctgaagtaaacatgatcgtaggcagaagcaaaattttattataaaatctaaaacaaaactttatagagttgaatctattccatctgacttcaatatttgccaaacgtttattttacctcctagattgatgttggtatagtatccttaatacagtgtagtatattaatgtccttaatacaatcaggaggtttttacctttaagcaaataaattatgtcattattgaaaaagacttaagggatgattagacttggcaatctgtaag

SEQ ID NO: 18747 - DNA, 389 bp, Homo sapiens
gttcactatcaacctcaaacagacaccatggtgcacctgactcctgaggagaagtctgccgttactgccctgcggggcaaggtgaacgtggatgaagctggtggtgaggccctgggcaggctgctggtggtctacccttggacccaaaggttctttgagacctttggggatctgtccactcctgatgctggcccatcactttggcaaagaattcaccccaccagtgcaggctgcctatcacaaagtggtggctggtgtggctaatgccctggcccacaagtatcactaagctcgctttcttgctgtccaatttctattaaaggttcctttgttccctaagtccaactactaaactgggggatattatgaagggccttgagcatctggat

SEQ ID NO: 18748 - DNA, 347 bp, Homo sapiens
attttgagatggacattgcctcttcattgtatttctcatcaattcattatttttgtggttatagcttgacaagcaattaactttaaaatggtagattccgtaactttaaattggcagctttcatttgcttaaaattttttggcatatgcagataatgttctcatcagtagtaagaatctcacggttatgcttattccccaatggaggtatgacatataatcttttctgcctttacttatcaattcaccaaggagctgttttctctgcatctaggccatcatactgccaggctggttatgactcagaagatgttatctgaacaaagtctatagaaaaaaaaaaagttt

SEQ ID NO: 18749 - DNA, 239 bp, Homo sapiens
gttttctcttgatcctcccgaaatcttccagatccgcgtagtgaggaatcgtctccaccgtcatggggggcggagacctgaatctgaagaagagctggcacccgcagaccctcaggaatgtggagaaagtgtggaaggccgagcagaagcatgaggctgagcggaagaagattgaggagcttcagcgggagctgcgagaagagagagcccgggaagagatgcagcggtcgacgcggccg

SEQ ID NO: 18750 - DNA, 412 bp, Homo sapiens
tagtgaactcatctttcccttttgccctcatgatttcctttataaatacccctgccatgacttttcagtactctccttttcatggacgtaatagtccaagtggcattttaagttatctggtaatggactcagagagcccactgactgtaatgatgaagtcttatttttttattttttattttttttttgagacagtctcacactgttgcccagcctggagtgcagtggcatgacctcagctcactgcaacctctgcctcccgggttcaagcaattctcctgcctcagcctccccagaagctgggactacaggcgcgtaccaccactcggataattttttgtattttttttagtggagacggggtttcaccatgttggccagggtggtctcgaactcctgacctcaagtgatc

SEQ ID NO: 18751 - DNA, 404 bp, Homo sapiens
  misc_feature (1)...(404): n = A,T,C or G
agccatcgtaaaaccacaaccagctgtacatcaacatagctcaagttcatcagtttcctctgggcatttgggagccctcaaccattcccctcaatcactttttgttcctactcaagtacctactaaagatgatgatgaattctgcaacatttggcagtccttacagggatctggaaagatgcaatactttcagccaactatacaagagaagggtgcagttctacctcaagaaataagccaagtaaatcaacatcataaatctggctttaatgacaacagtgttaaatatcagcaaagaaaacatgaccctcacagaaaatttaaagaagagtgtaagagtcctaaagctgagtgttggtcccaaaaaatgtccaataagcagcctaactctgganatgagaact

SEQ ID NO: 18752 - DNA, 400 bp, Homo sapiens
acccagggtcctgttaaaacctccagtccatggctcagaatccttccctcttacctggaagccccagagaggggctgtggtcctaggcaaagagaacagaatcaggtggagaatgctgaccctggctagggaagggtctagttatggggacgtgacatgaaatgaccaggcatgagcatggccagtatgcagccacatgcaagaaggtatgggggaaagacatggtaggcagtgacggtcaggaaggcttgctggaggaggcgggccttgcctgtggtggaggatggtaggggaaagaaaggaagcgagaggtcctctgtgtgcagagcccatggtgggctgaagccagcatacaggaaaaggtcccataccttgtgcaggtacaaaaatgcatggttgg

SEQ ID NO: 18753 - DNA, 399 bp, Homo sapiens
  misc_feature (1)...(399): n = A,T,C or G
gaatcagaggagcagattgcagaaaggaaaaggaagatgacaagagaagaaagaaaaatggaagcaattttgcaagcttttgccagacttgaaaagagagagaaaagaagagaacaagctttggaaaggatcagcacagccaaaactgaagttaaaactgaatgtaaagatacacagattgtcagtgatgctgaagttattcaggaacaagcaaaagaagaaaatgctttcaagccaaccccatggcctccatgactttttcaaaanaaaaaaaaaaaaaaaaaaaaaaaaccccaaaaaaaaaaaaaaaangggggggggggggccgaatcccaaattttaaaatgggaaaatgggaaaaccccccggggtgttttttaaggggggcgcgggcccctt

SEQ ID NO: 18754 - DNA, 395 bp, Homo sapiens
  misc_feature (1)...(395): n = A,T,C or G
ggtggctgtaatcgatcagtaaaattagacaaattttaaatgtccctgtccccttccccccaattaaagtagattgggggaaagcgagtagggacatttaaaatttgttgtccttactgtatgcgggacacttcatttagggcgtggcttcagaaaacagtcaacccctttttcttaactaggtagcgactagaacgctgcgttctgggatactaccaagatttaggggagataaagcccatgccatcgttggccaaattgtgaccttgttttctgtctgctgcctttgtaggttagatttctccgaatgctatttaaggaagaaagaacaaaacagcgggtgggttctctttttctccccctccctagtagcatggaagtctgttttcacatgn

SEQ ID NO: 18755 - DNA, 400 bp, Homo sapiens
  misc_feature (1)...(400): n = A,T,C or G
caaacaaatactgggcaacaggggtttgttgggagagttagaaataaaaaattaaccaaattttgtccctgtgttaattcaatgccagcaaggaggcaagtactgaagaagaaaagggacaattttcatactaaaaaagaattcctctaatcatgtcaccatctcatataatgaatccagggaatcccagaaatagaaaattagtttcaggggacccctgaggcactttaaagccttttaaaaaattacagtaataataaattagatattgctcttcagaggctaacagagcagcagaagcatcaagatcaggtccaaagagttatgcccacattacaggcttcctgagctgctcagccctctttaaagcttagttgaatctttanatacctttaaaaag

SEQ ID NO: 18756 - DNA, 393 bp, Homo sapiens
caaatatcagaacaactatgaggcttatatttgtgaaatatatattggtttctgaatgggttcattattattaaacttcaacatccttttaaagtatttgttgtttctatttaatgatagacagtgatctctaaatctgtgattctcagtcaaggacagttttacatttgtcaatatgtggagatatttttggttatcacagcttgggtacaagacgaatgctaacccacaatgctgacccaaaatgtctgtatggccgaagttgagaaaccttggtctaaatgcacctctctgtattagtaccttgcgaaaattaaccatattttaagctagttacagtctgcatgtgtgattcatagagatatgtgtcctcctgcataaacatgtctcttt

SEQ ID NO: 18757 - DNA, 350 bp, Homo sapiens
aacttctgtaagtctgggacctttaataagtagtacataatgagatgaactagcgtcactttcctgagatagtccttgagtggccttatcttcccatatgatattgaaatgatatatcctacctttttgccttatttctaaatctcagataattttcccaacaatttaatgtgatggatgttagtggcaccaaacaatgctacaaggatatatttttttaagcaaacaaatacttataaaatgcaaaaataatacaagacatagtagaattgaaaatatataatgaaacattaagaacatagaagtgccaaaacagtgttgaaaaagaacaaagttggtcgacgcggccg

SEQ ID NO: 18758 - DNA, 296 bp, Homo sapiens
tttaaatcaacggtttccagtcactcgacaatgtttggccactacatcaaatcataaccagctttctcaaagtctgaaaaactacaagaagttgtggttcaaataaataaatagggataaatttttctcaattatcaagctttctcccataaaactttgttaaacagctgacacagctgtgcttgaatcataaacacagatatacatatataaacatagatagtactaatatctcaacaaatattagtatgtcatgaagacttccagatatctgccacctggcgtcgacgcggccg

SEQ ID NO: 18759 - DNA, 370 bp, Homo sapiens
  misc_feature (1)...(370): n = A,T,C or G
agaagcaaaaaagttggttttaaaaattctttttattagaagtgtgtttaaaaacatgtctttttttcccttgagcgacagnggcctcactacattgcccaggctagtcttgaactcctgggttcaagcagtcttcctgccttggcctcctaagtagcagggattacaggcatgcacccacatgccaatttttattgcttaaaatggcgaggtctatggatattatctagccccaagcccatatctgtacacttttgttcattttataataccagaaagaatgttctatcagtaaaagaaggttttaagtatgaatctccatttttggtggagttttctaccctggtaaaataacctttgtgtttccaga

SEQ ID NO: 18760 - DNA, 345 bp, Homo sapiens
ccaggaagcccccccctcccccacgctcaccacctcttttattgacactagtcctaaaatatggaggaaaagaggcagttacgtatatttcctactgttaaaacagtctttaaaagctgaagctgattttttttcatcttctattagtctcttcctgcccctggtcttgttttaggaggagaggagtatagccgaagtagtcgatttgtagatagtggtagtttccttgataattttttcaggtgtatgaaacttttttattggctgtacatgtatcttcattaaacgtgtttagtgaataaacaatatggtttaaaaatagtggaggccaccagaaaactattg

SEQ ID NO: 18761 - DNA, 346 bp, Homo sapiens
  misc_feature (1)...(346): n = A,T,C or G
gaaatccatatcttaaagaaacagctttcaagtgcctttctgcagttttttggagtgccncannnnntngnantangaatangctctagctcttaacaaccgacactcctacaagatttagaaaaaagcttacaacataatctagtttacagaaaaatcttgggctagaatactttttaaaaggtattttgaataccattaaaactgcttttttttttccagcaagtatccaaccaacttggttttggttaaataaatctttgggaaaacggggaaaaaaaaactcttaatgggggtgcggggcgggaatttcttattttaaaaagggtgattcgggaaaaccccg

SEQ ID NO: 18762 - DNA, 342 bp, Homo sapiens
tgatgcaaaaataattcttatgtgtaagagattagatcattactggccttaatttctgaactcttggaaaaattaaacacctcacaataaatgaagcatcaaaacagtatttccctgtgttaccattgaacagtagcaagagcttactgctgcagttagaaaaaggattcatagaaacagtgaaaggtatagattgaccagctatctaaagtaattctatagcaaggattacagtgaagaaacatggagcaattagatgttttttctgttatatttactccagttgattgtttaagtctcataatcttatgtgccagatggaggagtattggctgaatagaa

SEQ ID NO: 18763 - DNA, 337 bp, Homo sapiens
agtaaaatgaacgccaacccccagggcctggtgtccttcttaaagaggaaaaaataataaggaaacatctttcatagccacattaaataaaataaactgatatacattatttttttctttttaaagatgacttataagaaccctgaaatttatataggtgagacaatagaaataaaaagatcttgatccaggcctttctgaaggaggtattctgctaaaaatgggcctagttgtctgaaaagacagctcttgaacctcttcacaacagtatcaacactggcttctcccggttcattatatgcgtgcgagaagtcataggtaactgctgcagggcttg

SEQ ID NO: 18764 - DNA, 351 bp, Homo sapiens
gctggcttggctgcctccttcttaggctcaggcttcttgggagccatgttgtcttcgtaaaataataacacccccacttactcctgatattaccatatcgtcatctttggtgggttaactaaagagaaaggaaatgaatcataagaatggttaatgtcactggattaatgcaaaactttgtatctttttctttttttaaaaaaacattttacctcctttacctttttgtctcttcctggaccaactggagataaaaatcaatctttggcatctattgaattaaactgaacactctcctttacttaataagaatgtattttagaggatctgggtttgcttttaattttttag

SEQ ID NO: 18765 - DNA, 340 bp, Homo sapiens
gccaggcatggtggctcacgccagtaatctcaacactttgggaggctaaggtgggtggatcacctgaggtcaggagttcaagaccagcctggccaacatggtgaaaccccgtctctactaaaaatatacaaattagctgggcgtggtggcagatgcctgtagtcccagctactcgggaggctgaggcaggtaatggagtcggttagacaactacaaatggagagagataaatatgcggagaatctcaaaggagagagcgccatgtggcggcagaggatgcagcagatgtcagagcaggtgcacacattgagagaggagaaggaatgtagcatttttataa

SEQ ID NO: 18766 - DNA, 338 bp, Homo sapiens
cgagaacatgcctctcgcaaaggacatctttcattcatctccataataggtgaataggactctcttgatgatacgcctggtgcacacccccacttcctacttcatggatgagaaatcgcccaggatgctataaaatcaccacgagctttagccatgctcagacggcagatttgtgggtcggctggtccactgatctctgtcagcctacaggaggaaaagcatggcttacttaaggatgttccttcaggaggaagcagcactaaaagcactctgagtcaagatgagtgggaaaccatctcaataaacacattttggataaaaaaaagtcgacgcggccg

SEQ ID NO: 18767 - DNA, 360 bp, Homo sapiens
cttgccccttgggcctccccccagcccctcctccccttcctgcacttcagcctgggtggcagagtgagaccctgtctcaaaataaataaataaatagagtcccgaagtgaaactgggcaggacaaagtagcgagtagaggacagattggccaagttgcctttggtcagtgtccacccctgctttgatggctgcagaagcttctcaggggactcacttgccttctacccccaacccaggtgaatgcacaagttagtggctggggcttttaagagaaatggttgaatgcccatgagtagttgacatatcccccacctccctctgacatgcatgtttcctagtgaagggtgaatagacagcgg

SEQ ID NO: 18768 - DNA, 172 bp, Homo sapiens
caagtcagtaccgccatttctgcgcacccatggctttgatgggctggaccttgcctggctctaccctggacggagagacaaacagcattttaccaccctaatcaaggtgctggtcaggtcagggacagggagggaggtgggcaggcatgagggaatggggtcgacgcggccg

SEQ ID NO: 18769 - DNA, 267 bp, Homo sapiens
gtcctacccagctggcccagccagctccagcccctgcagccttctgacctcacccacctgccaaaaggcagtggacccatcgcagatcccaggtctcccacaaaggcccagagcaagggtggggcaggtgcccaatgggatgggtcagcatacccctcctgggaatgcgggctgccttgcaagggctggggagggggtcaagaaagcagactgcagcatggccctcctctgcccagctggtcaggcatggccgggtcgacgcggccg

SEQ ID NO: 18770 - DNA, 341 bp, Homo sapiens
tgtaatttatttgaagtttctatgtataatatatcaactgagatctgaaaacaatgaaaatgggtttcatgctttaaaagagaaaggaaggagcccattttaggaagattctcatccagaatgaaagaaacagaagggaccagatttttttaaaaactaaaatactgtgaaagattgataaatttaattaaataagatgtgcaacctctgcttggaaaaaaatacttttggccaagtcaaaggacaaagaacggactgggaaaatatgaccagacaaaaggctaatctaccttatgtgaaaaacgtcttagaaactgaccaaaaagaacaaaaacccaaaa

SEQ ID NO: 18771 - DNA, 309 bp, Homo sapiens
gtcagggctgcattgggcggtggtggcgccactgcactccggcctgggtgacagagcgagattctgtctcaaagtaaaataataaaataaaataaaaaatagtgccatgtgcataagaagcatttgataaatgccagccatcacccattcattcagtgtattcttaggtgtgagagtgtagtacgtacctcgccttcaagctgctcacagcctgtcagagagagagacacaacttgaaacaaacatcagtgttattcaaaatgtggttcatggaccacctgtcctactagttaaaagtcgacgcggccg

SEQ ID NO: 18772 - DNA, 341 bp, Homo sapiens
  misc_feature (1)...(341): n = A,T,C or G
atttggaagaagtataaaacccgccatgaaaacacggcatagaatagagaaaatcaagctagtaatagaaataaatttgataataaataaattccccaaatttggaaatcttgccaagcttagcacctctgaaaaacagatgcaacatttgtaatatgatattaggaggagggaagcagtctgtttatctttggacatgatttcaaatacaatcattttctgtgacagtgagtaaccatactgagtggtagtatttaacttcttaagaacatgtacttcaaaggtaaaacttgatgtggataagaacaatggttatgataattatgcctttaggnnnnnnn

SEQ ID NO: 18773 - DNA, 346 bp, Homo sapiens
tttttttgcaatgaaaataaatgttttttattaggcagaatccagatgctcaaggcccttcataatatcccccagtttagtagttggacttagggaacaaaggaacctttaatagaaattggacagcaagaaagcgagcttagtgatacttgtgggccagggcattagccacaccagccaccactttctgataggcagcctgcactggtggggtgaattctttgccaaagtgatgggccagcacacagaccagcacgttgcccaggagcctgaagttctcaggatccacgtgcagcttgtcacagtgcagctcactcagtgtggcaaaggtgcccttgaggttgtc

SEQ ID NO: 18774 - DNA, 342 bp, Homo sapiens
gcggtcgcgtcgacgttttttattaggcagaatccagatgctcaaggcccttcataatatcccccagtttagtagttggacttagggaacaaaggaacctttaatagaaattggacagcaagaaagcgagcttactgatacttgtgggccagggcattagccacaccagccaccactttctgataggcagcctgcactggtggggtgaattctttgccaaagtgatgggccagcacacagaccagcacgttgcccaggagcctgaagttctcaggatccacgtgcagcttgtcacagtgcagctcactcagtgtggcgaaggtgcccttgaggttgtccagg

SEQ ID NO: 18775 - DNA, 343 bp, Homo sapiens
atttattgttttattagtaaatgtttcttcgtgttgttaactctctataaattaggcctgtcttttgtccaactgtttgaagatttttctaattattttatttgtaagtcaattataaatgtgcatggtactcacataaccccttggcattaagtaaaaataagccctctatcatccagtggatccctgaaaccctctctctgtagcatcattcctcctcactcatggttcctgacactcacaactattggcttctgcctacaattacttcctattgcaagtatgtgggcagcaagaagagctatttactaaatagttgcatggccagctaactcctcctact

SEQ ID NO: 18776 - DNA, 345 bp, Homo sapiens
cggggccagggctgcagatcctctgccacccctccctcttttcttggacttgatgagtccccgaggctcaaagccatgggggtgctaggaggactgtcacagaccgaggcgctgcaggagctgctctgcctggacaaaccttcaagcaggaccagggcaggtatgaaatgtcttctgaagagtgtgaaatgagcaatgtacagtccattccctcttggggaaagcatgcacgtgtggagcctggtggtgtgctgtctcctgggccaccatccgcccccagctcttcatatgggcttgtataacaaggtggtgacgtacttcttcttgtaccggtgggttgcgctg

SEQ ID NO: 18777 - DNA, 356 bp, Homo sapiens
  misc_feature (1)...(356): n = A,T,C or G
tggaatcagaaaatggtaggggaagaaactaagcaagaatggcctcagctataatttagcttgagctaaattacagggagctctagagcataaactgcaccataacgttggtcctgaaatcactctaaggcaagggagctgccatttgctgcttacccctaaatcagtcagtcgttgattgcaaactatagaggagaatacagctctcattcaatcaaagataattctccagaaaaggaaggggttctaagttgtttaatcaatagtaccagcagctaaaggatggatacaacagcccagaaaaggagagctagaaagggcaccaagaagttccatcagtagcatgtgactcatcn

SEQ ID NO: 18778 - DNA, 355 bp, Homo sapiens
gtcagttttctcctctagggcttttattacaaagccagtctttgattactcacttactcaaagtgcagtcttttagtatcaacttcttattaacagtctatttttcaagtccaacagagcttaaaggaaaaaaagtcttttattttatttatttttaaatgcaagcattcccatatttatttcagaccttgataattaatacactgagatcacaaatcttattttaagatagaatacttttctatgaaggacatcagatcaattatttattttatttatcttttttcattttttaaaaacagcatctggtttcttaagttttcatgatccagataaaaagctcttctttccaccg

SEQ ID NO: 18779 - DNA, 228 bp, Homo sapiens
tcaggctggaactgaggagcaggtgggggcacttctccctctaacactctcccctgttgaagctctttgtgacgggcgagctcaggccctgatgggtgacttcgcaggcgtagactttgtgtttctcgtagtctgctttgctcagcgtcagggtgctgctgaggctgtaggaactgcctctgttgtgtgcctgctgaataacttctatcccagaggtcgacgcggccg

SEQ ID NO: 18780 - DNA, 398 bp, Homo sapiens
  misc_feature (1)...(398): n = A,T,C or G
tacgtaaaacattatttctgggtgtgtctgtgaaggtgtttccagaagagatcagcacttaagtcagtggattgaataaagaagaccagccctcacagtgtgggtgagcatcgttcagtccattgagggctcatcagatagaagacgggtagtacctgaagtggttccacttcctttatttggggttgtttcatgaaaatgcttggttgtcctggaaacaggtgtactccgtgttgcttgagcatttcggtgtggtggtttttgtggtggattataaaaatttgctcagactcctgcagttggaacatttactgcgccctgttttttatctggtgttgggaccttttgagntaatagattttctatgccctctagaagtgggccattccagttttctg

SEQ ID NO: 18781 - DNA, 346 bp, Homo sapiens
tgaaaactggagggccggcaaggctgggatcgctgctcagtacagcggggctcaagtccgcgtgctctccgcaccaccccacttacattttggccaaaccaaccgcacccctgaatttctccgcaaatttcctgccggcaaggtcccagcatttgagggtgatgatggattctgcgtgtttgagagcaacgccattgcctactatgtgagcaatgaggagctgcggggaagtactccagaggcagcagcccaggtggtgcagtgggtgagctttgctgattccgatatagtgcccccagccagtacctgggtgttccccaccttgtgcatcatgcaccacaacaat

SEQ ID NO: 18782 - DNA, 352 bp, Homo sapiens
  misc_feature (1)...(352): n = A,T,C or G
aaggacttcccttttgagtagatgcctggaaagtgganggtttttttntgttggtttgtttgtttggttttgtgtttntttttnagatnnggggtcttgcttcttgtcgcccaggcctgtgagtgcaggggacaggattctcggctcacttgaatctaggtgggaggtctttttaaataancctcatgttancttcaggcaaattctggtaccaggagaagcccaagctaactgagctgggtgaaggcttgtgcatcacctggcttgagttccttgctgtcacagatgataggttcatgtacacaacattaatgtttgataaggtcgacgcggccgcgaattccagatctag

SEQ ID NO: 18783 - DNA, 201 bp, Homo sapiens
ccgggagtcacttcctgcagacctctgagtacctggtggggaaacccatttcccatcctgtgtcttggatttaaagaaaacctgttgcagataatgagttgtaaattcaaggagggtggctgttttgctgttctttctctgcagtaaactcttatggggagtgtgccttggttataaggcaacgcaaagtcgacgcggccg

SEQ ID NO: 18784 - DNA, 356 bp, Homo sapiens
ctcagctcctgggactcctgctgctctggctcccagacaccagatgagacatccagatgacccagtctccatcgtccctgtctgcatctgtaggagacagagtcaccatcacttgccgggcgagtcagggcattaagagtcatgtagcctggtatcagcataaaccagggaaagttcctaaactcctgatctatgaggcgtccactttgcaatcaggagtcccatctcggttcagcggcagtggatctgggacagatttcactctcaccatcagcagcctgcagcctgaagatgttgcaactttttattggcaagagtacaactattgccctgcggacgttcgggcaagggaccag

SEQ ID NO: 18785 - DNA, 255 bp, Homo sapiens
cagcaaaataaaattgctgtttattgtaggacaacattgattcacacatacattaaacaggccaaaaaaaataaacaggagcttcatagacgaaaaaggaaaaaaactgaaaccttttatctttggcctttttaaccatctcatacaaaccaactacttatattacaggtaagtacatgcacgaaaaagttactggaatgctcggaataaaatagtttttctggagtgatttttgcttttttgacgacgcggccg

SEQ ID NO: 18786 - DNA, 405 bp, Homo sapiens
ttttcacatgaagttgctgctgcttattatacatcaaagttcacgtcaatgtggcatgaagtcaagaggattccaagcaaactccatcaaaaccttggggctcacagcatctcccagtgtgtagattttcacatctaagttctgaagacatgatctaagcgtggaagaacttctgaagttgaccactgatcttctgagtgcaagtcacatattgtcatattcatatagtgacttagagttttcaaagcactaggtacatggtcctcaaaaatggttggctttatatgacccaaactaaggacatttcacaggtttcaatgttaacgcgtattgtgagggttgtgcataattatcttcacaccagtaaaggtattcactacaatacataaattcattacacaaacc

SEQ ID NO: 18787 - DNA, 372 bp, Homo sapiens
cccagatacacctttgtaccttagtctggctaccgagggaaaattagaatagattattagaatatggtttgtatttataaaagaatacacattcagcacgggttttctgttcccagtctgccacactgatcttgctttttttgtttgtttgtctaatagatttgctagatggtagattgggaggtgctgtaagcatagaagtatttcttgattttaggaaaatatcccaaatagttaaacaaattattctagcatcattaaataatcctttgatttctcctatccaattgcgttttttttttttttaaacggagtttttttttgtcccccaggttggagggcaggggcgcgattttggttcattggcacttt

SEQ ID NO: 18788 - DNA, 343 bp, Homo sapiens
ctttcttgtaacaaggcatttatttgggatgaggaaaggaaattgagcagaaggtacaggagtaatagcaattccctgtagctctcaaagcaaattttgagctcatttttctttttctgcaagctcagcagcagaatgcccagagtcttccctggtagatgcaggttccatagcgacgttctcctgcaatgcacgctggtattctgcaaaacaggccatgtttttccttaaatatgaatgctttatactcaaactccccgcaagacatcgcgaactagcggcttggccataacaacttctttattgaaaaactttcttactcttttaaaaaaaaatactcttt

SEQ ID NO: 18789 - DNA, 373 bp, Homo sapiens
aaagaattcaccccaccagtgcaggctgcctatcaaaaagtggtggctggtgtggctaatgccctggcccacaagtatcactaagctcgctttcttgctgtccaatttctattaaaggttcctttgttccctaagtccaactactaaactgggggatattatgaagggccttgagcatctggattctgcctaataaaaaacatttattttcattgcaaaaaaaaaaaaaaaaggccgacgcggccggaattcccaaatttataattggtaaatcctgaaaacccccgaaggtccatttaaagtgggcatggggcaccttctaaatttctttctttaatacatggtttggccttcttttatgaaacaatacccc

SEQ ID NO: 18790 - DNA, 359 bp, Homo sapiens
aggagttcaagaccagcctggctaatatggtgaaaccccgcctctgctaaaaataagaaaattagctgggtatggtgtcgggtgcctgtgatcccagctactcaaaaggctgaggcaggagaatcgcttggatgcgggaggcggaggttgcagtgagccgagattgcaccactgcactccaatctgggcaacaagagtgaaacttcgtctcaaaaaaaaaaaaaaaagggttttttccggggttttttcccagggtgattcttttaaactcaaagaagaagggattttttaaaaatttggggccccaaaaggacccctttatttaaaaaaggatccataggtttttttaatttaaccgg

SEQ ID NO: 18791 - DNA, 357 bp, Homo sapiens
tccctgtctctactaaaaatacaaaaaattagccaggcatggtggcatgtgcctataatcccagctactcgggaggctgaggtgggagaatcacctgagcccgagaggtccaggctgcagtgagctgagatagtgccactgcactccagcctgggcaacctgagaccctgtttcagaagaaaaaaagatggtcaatctaaaaagattactaacttgggctttcttcaaagggcaatgttaatatgaagctcacaaagggctttatgtagtagtggagagggaaaaagtttcattatttggaaatggctatgttcagtctgtccagtttatttacctatctcttacagaccaccattt

SEQ ID NO: 18792 - DNA, 339 bp, Homo sapiens
gttaaaaaacaaaccagcaaatgaactctctttcttaagatgtaagcaaaagcctgctgaggatttctggaaaggttttaccttctgagacagttgtcacctctgcttttctgttacatctttctttctacctggaatgtgagtgcaattcgtggagtaatggcagccatgatgtgaccgtaaggacaaaagcaatatgggggagaagaaacataggaggctagtcttctgtgacaccagtgacactaaggaacatttgtaccaacccctagttacctctagaatttttggccttttacttgtagtcaaagtgattctcactaggatcgcgtataacga

SEQ ID NO: 18793 - DNA, 374 bp, Homo sapiens
attttttgatacaaaccgggtttgggcatgtttcccaggctgggtgggaactcctgagatgaggcaatctgcccgctttggccttccaaagtgctgggattactggcatgagctacctgtgtgtggcagaatctctatatttattacctcccttcctgaagatcctttgcagctccctcctaaccctgagcccctatgacacatggaaagttgctctattgtgctcctacacagtgtaatatcggccgatgggatgtttggctgttttaagggacaggatcaattcaattggagctttcctttgccttcccagaaggtgtcactagaggatgaaaattaaatgatttttaatgtcgagaaaaacatggccaatt

SEQ ID NO: 18794 - DNA, 369 bp, Homo sapiens
cttgattattattagatggaataattcttgttctagttcaggatctttgactttattggaagatttaaaattgttcatgtaacagtacattaagacctatgattataaatttaaagtcgtgcctagaaaagtttgcccatattgaagatgggcatcagaggtgaaactgacagctagtcttgagtcaccctgcaccaggcttcccagggtttttacgtctgtggtgccatgagctatagctttaaaataggcaggtcaattcagggtgttggttcaaaccctattggagccacgttgcttgaatttacatggtatctgtttaaaagagaatatctgaatttttcttagacaaactatatgaggcaagtt

SEQ ID NO: 18795 - DNA, 360 bp, Homo sapiens
tgtgtctctgcccaatcaactcttaattattcaggcattaattcaacaaatgtttgagtgttaagtgtcatctaatttagcatgctggcatctctatttttcttcactttcctttcagtagacagcctttaactatctgcactttgaaaaataccttctgacacctggaatgccccactttcctctccccacccactcacttgctctacaaatagggagtgaaagagaagggttgataatttcccagagctaccctccaaatcccctcaggccattttacagagtagcctttctcaaagttgagagcacataaatatcacctggaggtgggtgagttaaaattcatatttccaagccaag

SEQ ID NO: 18796 - DNA, 117 bp, Homo sapiens
aacaggcggaatgagacaacaaaacacagaattgaaggtggagcctcagccacagatagaaaaggaaatagtggagaaagcactggcacctatagagaaaaaaactgagccacctgg

SEQ ID NO: 18797 - DNA, 374 bp, Homo sapiens
aaagaattcaccccaccagtgcaggctgcctatcataaagtggtggctggtgtggctaatgccctggcccacaagtatcactaagctcgctttcttgctgtccaatttctattaaaggttcctttgttccctaagtccaactactaaactgggggatattatgaagggccttgagcatctggattctgcctaataaaaaacatttattttcattgcaaaaaaaaaaaaaaaaagcctcggcgcccggaattccagattttataattggaaaatcctgaaaacccccgaaggtccatttaaatggggcttggggcacattctaattttttttattttaaacatggtttggccttcttttatgaaactataccccc

SEQ ID NO: 18798 - DNA, 320 bp, Homo sapiens
ccaggttagaaagcctggtccacttccagtttttgaggctcgagatatgtatatatatttttttaaataaagacatgccaaaacaccattatgaaaattctgggccaggcagggtggctcacgcctgtaatcccagcactttgggaggctgcggatcacctgaggtcaggagtttgagaccagcctgaccaacatggagaaatcctgtctctactaaaaatacaaaattagccgggcgtggtggcacacgcctgtgatcccagctactcgggaggctgaggcaggagaatcacttgaacccacgaggcggaggttgcgac

SEQ ID NO: 18799 - DNA, 355 bp, Homo sapiens
atcatttggcttttcatatgctcatgttgccaaaaaggagtaagtagtaaattattcctttatcttagtggagacatagttcatcatgttcaaattatcagtattataacatttaaaaaatctggaaattatcctgtcatcggaagacaaaacaatcttagaattgttacttatatttaagacatatgtttcacactggcaggttctagttataaaattagggcttgtttttccagttgaacaatgtatttgtttaagggaggactcccaaaacaattaagtcactcagagtgcttctggaatctggctttatgaactttgatccaaatcataacaatgctagttaagatgccct

SEQ ID NO: 18800 - DNA, 321 bp, Homo sapiens
cacctactaagttgacagactactgttcaaacaccgcaaagaaagcatgaactagatagaaacaagaaaaacctcaatttttttttgttgacctttttgtttgtttttacatgagaaaagaaacaaaactgaggaaaaaaaataaagtactccaatgaatatcagagcttttcgtgtaaatcggaggaagtccaaaacacgtgccaggacaaattgccgaaacagaaaagggggtttgtcttctggcagctaaaaagttaagcctggtggtcttgcagattgctagaacaggaagaaatctaagtcttatgttacctaact

SEQ ID NO: 18801 - DNA, 350 bp, Homo sapiens
tcacttagcggcctcaaacggacaccatggtgcatctgactcctgaggataaaactgctgtcaatgccctgtagggcaaagtgaacgaggatgcagttgatggtgaggccctgggcagattactggaggcctacccttggacccaaaggttcttcgaggcctatggggatctgccctctcctgatgctggcatgcgcaaccctaaggttaaggctcatagcaagaaggtgctctttgcctttagtcatggtcagactgacctgcacaagggcaccgtcacttttcttcagctgattgagctgcactgggacaagctggacgtggatactgagaacttcatgctcttgggg

SEQ ID NO: 18802 - DNA, 355 bp, Homo sapiens
atctgacacttgagttttcacttacaggtaacaccaagttagttagttgttccagcactggagctaattcattttcctcattatttactgctgtttctgccttaagcagacagtaactctggaaggctgatgcttttctctgcttgcttgttttagtcagttgtatactaactgcaacatatgattgacgctcaggccttaacatcaggagctgaaggaaagatgcaatctgaattctctgaagcaatttcttctagctcctcttctgttgtctctggaaaaccaatctttggctttgccagctcaccactatcttcttctgtaaaaagaaaagcaatgacgattatatgactta

SEQ ID NO: 18803 - DNA, 470 bp, Homo sapiens
  misc_feature (1)...(470): n = A,T,C or G
ggcgtcnnnncctgaatacttgagtccgtaaaacttcanattttacaagaaccccgcaaccctaaaaaagatctctcgaggacctttttcctttcttttcgacctcaagctcaaaaaggggagggacactattagaggtacttgttgaaatatcctggncctaanngngcttttaacaaaagaattactgttaaatctagataaatctagaagccttgctacaggttttcagaaaccagacctagggtatgggcacctgttcttacatttcagtgatgagaatttcaaaagacatggaacccacggcaagagcgtgaatgccaccagctgccggtgggtttatcttaccaattcttagagaacttagtgggggtgtcagttaccttataaatgcagtttctgacctttcagcttcatggtctcacctgttttaaaatagtagggtttgtcatcattaaaaatgatgttag

SEQ ID NO: 18804 - DNA, 360 bp, Homo sapiens
aagccttctcccgatggcacaggttggttgatcagatgagctggatcttgagccatgagattcaggcaaggaagtttccaggggagtggtgggtggaggaagaggatgatggtggggtatttgatatgtgtgtagaggggtcattaggcaatatgtggactctgtgttgtggccatgtgagatatatcgtagtggttgccatggacagcccaaacacacttggacctattttacttattatagagttgccccagaaagagactctgataaaggagctgaatgctggacttatttgggagggaagatcaggaaactcttgtctaggaatggggaagccacacctgaatctaatgatccctg

SEQ ID NO: 18805 - DNA, 388 bp, Homo sapiens
  misc_feature (1)...(388): n = A,T,C or G
attttatatgaagcggtatcaagatactgactactacaatagaacgatacgtaaatattgtaattatattaaacatgtaaaaaaacaaaaatataattatcaatttttgtaaagaagagagagagaaagggaaagtagtgtcaataaactaaaccctcttctttcatatgataaagtcaactgatgctaaataaattccataaacagaatttcagtacaggttaagtatcccttatctgaaacgcttgggaccattagtgtttcagatttcagattttttcagatttcagaatatttacatagatataaagagatatcttggggctggaacccaagtctaaacacaaaattcanttacgtttcatacatactttatgcatacaggctn

SEQ ID NO: 18806 - DNA, 403 bp, Homo sapiens
tgtcttttgagctacttattacttctccctcttcctgcatggccccattgctttatgtctgattacctcggaaagtcatcttggcagcagctgaaactacacagaccataccttttattagagttcccaccctcctggaaacataaaaatgcattgaacacgtgggtttcacctctagactacctcttttctgtgccaaccctctcacctctgcaggagaagctccagggattgatcatgtcccaggaagctaatctttttttttttttttttgggaaccaattctccttttgttgcccaggcgggaccacagggggggaatctgggttaacgtgaggctttgcctccggggttaaccccattttcttgcctgggcctccaaaggggttggacactgagggcc

SEQ ID NO: 18807 - DNA, 344 bp, Homo sapiens
gtaatcccagctactcaggaggccaaggcaggagaatcgcttgaacccaggaggcggaggttgcagtgagctgagatcgcgccactgcattccagcttgggcaacagagcgagactctgtctcaaaagaaaaaagaaaaagaaaatgacttggaataccaatagcctaggcaaaggatatgaacagattatcctcagaataagaaaaacattgtcttggctgggtgcggtgtttcacgcctgtaatcccagcactttgggagactgaggcaggtggatcacgaggtcaggagttcgagtttgagaccagcctggccaacatggtgaaaccccgtctctgctaaa

SEQ ID NO: 18808 - DNA, 353 bp, Homo sapiens
  misc_feature (1)...(353): n = A,T,C or G
atggaaaggaatccgggctgtgtgatctgactccgggcatctgccangcagttgtgggggttcagtagcagggatttcatctgatcttttacagagaaagtaaaaactttcattgcaatgtgctgtcttccagtagccatcaagatccagataaacacatgctgatttcaatttgggctcatcagcagcccagttagtgtacctcaccctccacttatcagtccaagtgtattgattatcagtcaagttactgttcagggcgatccacacacgttcattagatgtttccatctgcagccacgcaaatgcattactgtagggatccagaatgctggctataaaggaattgtgaa

SEQ ID NO: 18809 - DNA, 364 bp, Homo sapiens
  misc_feature (1)...(364): n = A,T,C or G
ttgttttgaccacanaccnactaatgacaaaggagaaaagagagaggtgcccaggagccacccctgncagctgcaccttatttggatgatcaaagtgaacatcatcagccacggcacaaatggaaatcgcgtcctgagatatgacaaaaacagcatcatttctctgatattcttgccaaaaatgcatattagtccaatcataagggaacatagcccactctcacactcctataaagaatacctgagactatgtaatttatggagaaaagaggtttaattgactcccacttccacaggcttaccaagcagcatgactgagaggcctcacgaaacttacagtcacggctgaaggcacagaggaatc

SEQ ID NO: 18810 - DNA, 358 bp, Homo sapiens
attaaacccctattctaatataccccatgtgctcactcagggaggacataggactccaaaactcatcctcaaatttactacatttcaatgaaaactttttattacaaaaacttattctccaaacactttcaaaacttattcgtggacaaagagctgggaggaaacaacttataataaggcccaccactttatacttccgatcccatcttccaaaagatgttactcataacccttaaaaacacgtcagactttttcaccgaaaaaggagagctgccctgctggagaatctgagatggaattaaaggaatttcaaacacaaaactatctttccctattgtcagaatttgatatatcacta

SEQ ID NO: 18811 - DNA, 110 bp, Homo sapiens
  misc_feature (1)...(110): n = A,T,C or G
aaagtgannaactttgcaattttctggggatatgttttttacctttttccccccttttttttaaatggagtgtgctggatggctctataattttattcagatgactgcan

SEQ ID NO: 18812 - DNA, 359 bp, Homo sapiens
gcacatcctgtcttcctgagtgggattctttgaggcagctgagtagcaaaactgaggctattaatgttcgcttagcaactgagcagctactgtgtatcaggggctctgcctgtgaccagggagtacacggtcttgtagaagagaaaaccgggtactcagctaactgtggtaccatgtgctaggtgccaaaggaggaacagagggccctgcgtgatctgctcaggaccgtgagggagaggtaagaagaggtcaaaggagaggtcatatttcaaacagaccttgaagctgttcaaggcagagaaaaaaaggatggtgttccacgaatgggctgaactaaggcaagtggaaacacgaggttt

SEQ ID NO: 18813 - DNA, 367 bp, Homo sapiens
cgcggccgcgtcgacgcatattcaacgtgtatggttttgcaccattgtcaagctgaaaaatccttaattgaaccattgtaagttgaggactgtctgcaatattcagccagggctaagaatcactgacctaccatttgaaccatctaaaaacctaaacagctaatttaatttgattgcggttttcactttgaaactgatgcctggcatccttggttcggccttagaaccaagataataccaacagttaacattagaaaataccaacaggtaacattccaaaaacaccaacacgtaacattcagttggattattttagaaaataccaacagttaacattcagttggattatcgcctgattcaagctatg

SEQ ID NO: 18814 - DNA, 353 bp, Homo sapiens
  misc_feature (1)...(353): n = A,T,C or G
ctggaccccgagggatggggcaccgttggggtcttaggcatggaggcggagtgtgaggagccctccatgtgagggcagagtctatgtggaggcaatggggccaggctgcggacgaggagagaagcatgggaggccatgtgtggttggcctggggagccaaagtgatgggatgacaggcgtgagccaccgcgcctggcgattattatttaactttattatgacatatctttagattttagagaagtttgacaaaatttaagagatttcacatatacccttcatctagctntctctgatgttaacaatttaaatacgcgttatgcatttatccaaaccaggaaattaacattggt

SEQ ID NO: 18815 - DNA, 367 bp, Homo sapiens
caaggctccctctcaagaattcagaaaaaagaaagaaagaaatggagcatgtgagaactgctttctgttttgctttattttgtttgctttgaaacagaaacacgtttattcttaatgtttttgaccattttgattccacccacttttttctttctcttttaaattactagccattccttccagaaaaattccatcctccagatattgaagttagatgctgtacaagccaatgtacagtccagctttgctcaagctgtctcccttccatggctgaaagtctatgattctgctctgttagttagcacttgaggaatcacctgtagctacagcttaaggaaggaaggaagaaaggaaagaaggaagggag

SEQ ID NO: 18816 - DNA, 361 bp, Homo sapiens
gtaatcccagcactttgggaggccgaaatgggcggatcacaaggtcaggagattgagaccattctggccaacacggggaaaccccgtctccactaaaaatacaaaaattaactgggcgtggtggagcacgtatgtaggcccagctacttggcaggccgaggcaggagaatcggctgaacccaggaggcggaggttgtattgagccgagattgcgcctgggtgacagtgagattccgtctcagaaaaaaaacaaaaaatttttcaaaagatccccatataggctgttagattaaactgataaaggtctgttttttttaaggaggcactttttattcaaatttgtgtctaatttatttttcag

SEQ ID NO: 18817 - DNA, 354 bp, Homo sapiens
caaaaatagcattatttatttaactctcagaggctgattatttactttgttaatcaattagattatttgtttttcttttctataatctgcacgctgttattgctcaataaatagttattggttaattggttcattgtcttgggtaattttttttttttaccattaggcaatttcatcagatgttggatgaagcaaacataaaactgcatttagttatgaacatatagctatatgaacatactgtatttttagggaacatttattctctgaagactctaatccacatacaattgccttgtgtagggatgatttgggaaaatcgttgtgaaaggaaatatggaaatatggtctttt

SEQ ID NO: 18818 - DNA, 361 bp, Homo sapiens
  misc_feature (1)...(361): n = A,T,C or G
tacatttacactgcttaggacaataaagcccaactctttatcttttgtaactaatgaatgacgaatcagctaattcgtctctttatctcattctataataaaaagannagagnngngggnnngggcatgtggccattgaactctagaactgtcaaaatgactaaaaataaagcccaactgcacatcggacctttggtcttaatgaaacatactctaagagggcttattggcatgtttggacttattcacctaatgtttggaaggatcagacttattgcccactttttctttcgacctgaacccttcatgaataaacacgatccaggaccaattcagaaattgcgcactttttttcgcgaat

SEQ ID NO: 18819 - DNA, 353 bp, Homo sapiens
ctaaaagatagatgggtgtttcattaatgtggtatccatttgggtttgtgagttcttggatgatgccagtagtatgtaagttaggtaaaatatttcctattttcctcactttggagtttgttttccttatttaaaagggactttgaaatttaagtatgtactgtagctttaaaactgcatttctgcaaaagcacgtgcatttttaaacaatgtaatctttatctttgcagttatgatatgactctgacaaatgcttgtattgccttaagtcaaagatggattactgccaaagaagatgatttaaattcattcaatgccacagacctgaaggatctctcttctcatcaattgaa

SEQ ID NO: 18820 - DNA, 345 bp, Homo sapiens
  misc_feature (1)...(345): n = A,T,C or G
gttaattttcacctgtttggtagggatttactttgctgttttctatgcaattttgtattatatttcataatctttttctgttgcttactttcacgtgaaatgcattttcctgtacttattgggagagacacgacagaatagcttttctagcctcaaggctcatgaagttctattattttcagaaagtgactaaaatagcctaatactttgagatgtttcctctgcttctctctcacttctgtctataccttttctttcttttacctcttattgncactgtcctgctcaatttggaatctacaacctcagaggggttttgttttggaatgaagctcanatttcgta

SEQ ID NO: 18821 - DNA, 365 bp, Homo sapiens
  misc_feature (1)...(365): n = A,T,C or G
agtttttatgcctcaaaggccttcacccttgatcttctggtgttattcctgtccttgtattctcccagaatcattacctcatcccatgaatggtacagcnnnnnntttgntnnnnttttgttcacattcttactttaaaaaccgaccatatctctagtattagttttatagacttcttatattgagtgaaaacactcttcttgaccatatgtttttcatccacttttattttctaatgctatatactccagtcgactgtctctcttttactccagatttatagtagtgtctagtccctattctcctatagatccattggcgtttcaacggttccatttcttattttttcatttttgattcctttg

SEQ ID NO: 18822 - DNA, 268 bp, Homo sapiens
gggagagccacaggtcactgccgggccagggccacgtggccataggcccactcagaaccatgtctggttgcttaggctttctagaggaaaaggcctagtgaagagaacgtgtcttagggcaacaatattcagccacccttaagtcagagcccgtggcatccagaggcctgccatttgggcctctgcattttgccagaaatcttgccagaaatcatctggataacaaaccctgcttaggcatcaaaaaaagcccaggtcgacgcgggcg

SEQ ID NO: 18823 - DNA, 351 bp, Homo sapiens
ccacacccagctaattttcgtattttcagtagagatggcgtttcgccatgttggccaggctggtctcaaactcctgacctcaggtgatccacctgccttggcctcccaaagtgctgggattacaagcatgagccaccatgccctgccaccataccacttcttgagaacaaacaagactaggttgacagtactcagacttcacgcacagtagacagaacagctggggagaaccctcatttgtctgatttcctgccaaccctgaactggcagcatcatcctcctcaaggtcagggtgtggtatatttctttagcaacagtgattttaattatctactggtcacttatgctctt

SEQ ID NO: 18824 - DNA, 311 bp, Homo sapiens
cgtacccccgtggtctttgaattagtccgagtggagagagcgagctgagtggttgtgtggtcgcgtctcggaaaccggtagcgcttgcagcatggctgaccaactgactgaagagcagattgcagaattcaaagaagctttttcactatttgacaaagatggtgatggaactataacaacaaaggaattgggaactgtaatgagatctcttgggcagaatcccacagaagcagagttacaggacatgattaatgaagtagatgctgatggtaatggcacaattgacttccttgatttcggcgacgcggccg

SEQ ID NO: 18825 - DNA, 308 bp, Homo sapiens
ctgattttggattctgaaggaattgaaaaatttcattatacattatagtgggctataatgatgtggccagttctcttcattaattttttaaatgactttaaaaaaaatgagacagtactgattgtttccctaaatgaatctaattaacagctacttaaggtatcttaatgctttttcatatatgttatctgctttgattctcatatcacgccagtgaggtgagtatgggtgttacttcctcattttacaattgagaaaactgagagtcagatgaaaagtgattttagaagttgcggtcgacgcggccg

SEQ ID NO: 18826 - DNA, 347 bp, Homo sapiens
ctggcagttaaaatttttggaggctgacaacttccaaggcagaataaaaaatggcaagattgcactgccctatacgttctgtgaatacaaagttacttggggaagcaaatggtacccactgttggcagatcagggccatctgttacttttgttgttctggaactagagtatttccacatgctccacagggcttatacaggccaacaactcaagaagtacaatgtgtagaggtattccctaaaaatttacatctgagattgcctcgtgcttctcttactagacggtggaatcattgtaacttgggtgtagaagagtgttcatctgcgtgtgttcatgtgcacagaaat

SEQ ID NO: 18827 - DNA, 193 bp, Homo sapiens
ttacctctgagcctcagtgtcctgctctgataaggagtgacaagtgggcacaactatactgctgtgattcgcaactgggtacagtcctacctccggggacacttggggaatgtctggggacatttttggttgcccctgccggggggggggtgagtatgggtccaccctatcggcattatcggacctgggagtg

SEQ ID NO: 18828 - DNA, 132 bp, Homo sapiens
ctccctctggcaggggatgtgactagggactcattgggccagcaacaaccacaaaagaatctaggcattagaatgaactactggaacctgagtcaaagacctgttagtgataatttgccgtcgacgcggccg

SEQ ID NO: 18829 - DNA, 337 bp, Homo sapiens
  misc_feature (1)...(337): n = A,T,C or G
cgcggccgcgtcgacctcccctctgaccctcaggctttcccagcttcctccccttgctacagcctctgccctggtttgggctatgtcagatccaaaaacatcctgaacctctgtctgtgnaaaaaaaaaaaaaaaaaaaaagggcgccccggccggaaatcccaaatttaaaaatcgaaaatcctgaaaacccccccgggtccatttaaagggggcgtggggccccatttaaatttttttatttaaaccaccgtttgccctttttttaggaaacaaaacccctttaagttaaaatttgggccatgaacccttggatttataaaatttttaaaaggat

SEQ ID NO: 18830 - DNA, 167 bp, Homo sapiens
ttttgttttattttgaatgatgagccttcgtgcccccccttcccccttttttgtcccccaacttgagatgtatgaaggcttttggtctccctgggagtgggtggaggcagccagggcttacctgtacactgacttgagaccagttgaataaaaggtcgacgcggccg

SEQ ID NO: 18831 - DNA, 331 bp, Homo sapiens
  misc_feature (1)...(331): n = A,T,C or G
gtaaaatctttgattaccagtaaggtttcttgttcaatatgcattggaagtatttccttccccacaccattgctactcaaactcacatgcctagagcagctccgtctcactgttggaccgagggggctttcatattttcagttgaaaggatgttaactgatgtagcgatgatttaccattatttaaattttaagtcttcagtggctaaatgtgaccaaacagcacatcataagtaggaaaaacttaccagggtgcttgtctatctaaaaagcaatctttgatagtccactctgtatgcccagccgctttcataatctggaacgagataaan

SEQ ID NO: 18832 - DNA, 359 bp, Homo sapiens
acatatctgactcaattgacagtatgttgcaaacattatgacacatcaccccctaaatgcttcaggcaatatttttaatttgtctattggtacatttggagggggagttgtttttcaaaatatatgtcgggataggtgattctgatggccattccaagttaacagtcactgtgctgggaggtctgttatttgtgaatgcctgaaaacatcttattatttcctacttaggttttagtttaactcatctccctttttcagcactgaagaaattgctgagtaactgattctggcaataatgtacacttttatggtatggataatagtacaacttatatagtgctttttacccagtatggtgt

SEQ ID NO: 18833 - DNA, 355 bp, Homo sapiens
agaagattgtgggtgaattcagttcacctaatgttgccaaaaaatttcatgttggacatttgcgttctaccatcataggtaagtgtttagtttcacataaaatgctaaacgttcctttgaggaagtatttgatagttcaatttaatgttttaatgcttaaataacaaaatagcaaaaaacaaaaagtttaaatttatatgagcctcctgccaattcaagaaatggatgacattggttacactgttttgtggaaacacaaaattgatttcaaaaccaaaagattcactgagaaactaattttaactgctatatatgttatgatttttaactttctaaaaataagtataaatatggg

SEQ ID NO: 18834 - DNA, 353 bp, Homo sapiens
cgcggccgcgtcgacgtcgacgcggccgcgcaacattatcttttattttaatctaaaaataaaaataaaccaaatacctcatgcattgagtcaaaaaatgagaatgagatcctaaaaatgaagtttatatggtaataggtaacgtttgtatttaaaatttaaatttcaggtccaataaatgcatattgattactaatatgtacgggatacatcattgtttttctaattacagtgatttgagaagaataagaaaaagatggtgacaaagaagagaaggaaggctgagaataataatggacatcataaaatttattaacaggcaggctgttcctctagtcaaaaaaaaaaaaaaa

SEQ ID NO: 18835 - DNA, 374 bp, Homo sapiens
ttcgaacgcttagacgccgagaccgtagactaccgccatttcagtttaacgaccaagccggctccatgtggagatggtaaccatactctatgccatgaccctcatgaggatacacttccaactggctacgaagatgagtacagagaatctgggccacttcccgggcaccaggggccacaaaactgggtcggtccgttactctgcccatggaccataaagagaatatgggaccttaggctcaccttctttacttggactaaatgaagacaaggatgctggtctcccatccctttgcttgtggcaggagatggcttaaataaataacttaaacttaaaaaaataaaaaaaaaaaaaaaaagggacctggaccagcc

SEQ ID NO: 18836 - DNA, 354 bp, Homo sapiens
  misc_feature (1)...(354): n = A,T,C or G
aaggcagacgacatggacacctcagcatgctgctgcggttcatgggggcccatcccaccgcttttggggagaggaatcggggtgggggcgcccgcagcaggggagagacactacacaggcctgggaccgccaagcacaccagctgcgagctcctgaagggcagacacatgggcacacggacactgaaaccacgagcacggcacagccacagggaggaatggtggagctggggacagacatcggcagctactgcccactgctgccctcttctgccacgagttccttggcgaggagccttgtccgtgttactaaagagccacgtgactttatctgatggcagaacgtctcgctttn

SEQ ID NO: 18837 - DNA, 354 bp, Homo sapiens
gttgtatatgctgagaaaatggtggtgatttttcttcacattgttaatgcagcgcctcagtgggttagaattgggccttcaaatctacgctggggcactgtcttggtgtgctagggctgccgccacagagtcacacagtctgggtggcttagcacaaatgcgctgtgtcacagctctggagaccaggtccaggcagccacagcatgggcctttgtgtcctcatggggccttcctgcgttccttctgtctgtgtgaccaaatcttctctttacacaagtcagttggattagggcccatcctgaagacctcattttaactaagctaccttatcaactttgaagaccttatctgcat

SEQ ID NO: 18838 - DNA, 359 bp, Homo sapiens
ccaatggccacactctgaaccctggttgtgtcattgactggttgtgtgtaaggctgaagacaaatgaacttctctgagcctcagttttctcatgtgtagaacaggaataacaggtagaatagctaatgaatctaggtccactccacttctgcccagctgggtttctcctgatgatatcattcgctaaaaaatcatataagctctttgtgcctcaccttctctaatcactgaaatagaaacgatagtaactcaccttcatagggttgctggagagttaaatgaatcaatatatgtgaaatggcacaaagcaaatggttagcacgtgtgagctattattattaactcacagggccaagcat

SEQ ID NO: 18839 - DNA, 354 bp, Homo sapiens
acgacttttacttcctctagatagacaagttcgacttccaaatctactgtttatgcataagctttattctccaaggcttgcaagaataggattttaaagttgaaaggcctagatttttgcaacctaaagctttttctttaaaaaatactgttttttcttacggcggacatgagaaaattaggagctcaaaaattgagagtcgccatcttggttgcttgccttctctgggggcatccctttcctggggtagtaagcctcagctgccacctcttactcagtctccagcactcctaactgactccatttcttctacccagaggacctgacctgacaccatcgatgctggaagtggcc

SEQ ID NO: 18840 - DNA, 370 bp, Homo sapiens
tgtaaatagcactacccagctttttaggaatccagtttgaaaaattttgtccacgctgggcacagcgggtcacgcctgtaatcccagaactttgggaggcccaggtggacggatcacctgaggtcaggagttcgagaccagactggccaacatggtggaaccccatctgtaccaaaaatactaaaattaaccgggcaaggcgggtaagtgcctgtgatgcctgctactacggagactgaggctggagaatcacttgaacctggtatgtggaggttgcagtgagccaaaattgtgccattgcactccagcctgggtgaaaagagcaaaactctatcttgatggaaaatatggaacataattactgcctcgt

SEQ ID NO: 18841 - DNA, 400 bp, Homo sapiens
  misc_feature (1)...(400): n = A,T,C or G
cgacgtgcagaaatggcacctcgaaaggggaaggaaaagaaggaagaacaggtcatcagcctcggacctcaggtggctgaaggagagaatgtatttggtgtctgccatatctttgcatccttcaatgacacttttgtccatgtcactgaatccttggaaaggaaancatntgacgtgtgattggtgggatgaaggttaaggcagatggttttgttgggtgataattttatgatgtgttaggtggacatgatgaaaggtttggttataaggaagttgggggaaatgaagagttttttgttgtgtagagatatgattattgttgtttatttattaaatagttggttnaggtttatgattttgttttattaaaatttattgnntttgaggaggtgttttttag

SEQ ID NO: 18842 - DNA, 415 bp, Homo sapiens
cagccctgaccatctcctctctcacttgtgggagtctcatttagggatcgtttccacctggatgtttgaggttgtgtagatgtggccggcacccttgagagtggagctagggggtgcagactgagcagtgaacagaaggagccttggacagggctgggccagcctcccgagttccaggagcgaattgcaaacccaccgggaaaatgagcgaagagacggtccccgaggctgcctcgccgccgcccccgcaggggcagccttactttgaccgcttctcagaggacgaccccgagtacatgcgccttcgcaaccgggcggcggacctgcggcaggacttcaacctgatggagcagaagaagcgcgtcaccatgatcctgcagagtccctctttcagggaggagctggaaggcctcat

SEQ ID NO: 18843 - DNA, 403 bp, Homo sapiens
  misc_feature (1)...(403): n = A,T,C or G
atcctaagtggatactgtcccttcaaacctcctcagaagactggaggcaatggtacagaaaagcgtaactgaataaattattaatctagtactcactacgacaagaaaggcactatcacaacagatcagcctccaagcattttccttgccatgggcatgggcgtttcaaccactccagaaatcacaacaaaatccagactgtggctttttcaacacttgaattcattggccagttgtctgactctcccaccggtcactgctgttggctctggccatacagaaccctgatctgcactgtgtacatgctgccctatgtttcaccagagacctttgtttggttctaaatgatttagctcactctcttccatggaagtttctttctctgcatcagtctccaggtcan

SEQ ID NO: 18844 - DNA, 398 bp, Homo sapiens
tcacctgctgccttatttaacttcttcaatcccctttttccttcccacccctcctctctacattccacattctgcattcccacatccatgtgacaaaattaagtacacttggaagcttcacctccaagatgtaaatgctgatctctacagataaggggatgaacagaggaagagagactcttttcctttagaatgcctttctatcaagtttctactcatatactttttaaaaagatgctcattaaaaaaaaacctcagactctctaattcatgcaaatccatctcctctcatctcattctatgttaaccaaaagaaattttttttttcagtttcacagaattgctatttctcatttcaaacatgtagctacccttgtgatactgttaagttggttgct

SEQ ID NO: 18845 - DNA, 378 bp, Homo sapiens
  misc_feature (1)...(378): n = A,T,C or G
gtgaaatcagtgctgaattaacattaatgtaactccagtgaaaaaaatgaatttgatcaattattatcaggaataaacattaagccatgacggtgctcaagttatcttctgatgacactgctgtattaaatgtacttttcctatgagaaccttagaaaaataaaaatttctgagtagatcatctttatcttttctttttatatatttatagccatattttaatataataggccatgaggtgatatgtaaacatacataatttcaacaaattttgtcaaataaaatcatatttctagctagaaacttgccttctaatcattttaaatgaataatccaatcatccgtcaaaacaaattttttttttaaatgactgttaan

SEQ ID NO: 18846 - DNA, 332 bp, Homo sapiens
aactcctctatttttgctcttgatgatgtaaaagacaaatgtataaaacagcaattataaatctatgttaatgggcatacagtatataaagttgtcatttgtgacaatgacataaaggaggagggacagagctgtttatgggcaaagtttttgactgctattgagtcaaataatatcaattcaaaatagtttaccaattcaaaatagtcaatcccattaatatctgatttcatatttgtaacattgtctacttgctaaaatttatttgtaacccccaaataatcataacaaaatcacccccaaatcaagttattataagcatttataataag

SEQ ID NO: 18847 - DNA, 210 bp, Homo sapiens
gcaaaatgttggctaccagggtatttagcctagttggcaagcgagcaatttccacctctgtgtgtgtacgagctcatgaaagtgttgtgaagagcgaagacttttcgctcccagcttatatggatcggcgtgaccaccccttgccggaggtggcccatgtcaagcacctgtctgccagccagaaggcactgaaggaggtcgacgcggccg

SEQ ID NO: 18848 - DNA, 399 bp, Homo sapiens
gcggctttcaaaatcagtagaaatagggatgaacttttaaaataaatgctaatggaacaactgagtagccatctgtaaaaacatacacttcacaccaggataaactccaaatggatcaaaaacttaaatgcagcaaacaaaaccattaaaggtctagaaaaaaaatccatgaaataattcctttatgttatgtggagataacctttctcaccgtgacttaaaatctggacgtcataaaagaacaggttgataattacgactacctaaaaattagaaacttttcatgacaaaaaaaaatcatcataagcaatgtcaaaggccaaataattaggaaaaaaatatttgaaattcattatcacacaggatccatctcccaaatttataaaaagtctctcaacg

SEQ ID NO: 18849 - DNA, 379 bp, Homo sapiens
tattgttagacacactggaacaagagatttcaaaatttaaagaatgtcattctatgttggatattaatgctttgtttgctgaggctaaacactatcatgccaagttggtgaatataagaaaagagatgctgatgcttcatgaaaaaacatcaaagttaaaaaaaagagcacttaaactgcagcagaagaggcaaaaagaagagttggaaagggagcagcaacgagagaaggagtttgaaagagaaaagcagttaactgccagaccagccaaaaggatgtgaaaagttgtgtttgtgtgttttcttctcctgtcccatatttgggttatgatgactcaagtgtaaactgaagttgaggtagtgccttatgccattatgtc

SEQ ID NO: 18850 - DNA, 379 bp, Homo sapiens
  misc_feature (1)...(379): n = A,T,C or G
ggaattcttagtcttgaatcccaagcaggattgtggtgaaaccgcagatcaccaaagataaaaacaaaaaaaaattttaaagcaatatgagagagagagagagaaccctctaaataaatgacagcctgaagcagactacaccttatcaattacacaaatcaaaaggtaatgaaataatatactcaaatgctgagggaagatatctatgtaaaattctatacctagaaaaattattattcaagaccaagagtgaattaaagatactttcagtcagagactgagatgctttaatattcccaaatccttaatgaaatagctattcaaggatgtacttcagtaagaaggaatttgaactgggactacaggtgcatgccatgcn

SEQ ID NO: 18851 - DNA, 381 bp, Homo sapiens
gttgcccaggctggagtgcagtggtgcaatcttggctctctgctacctccacctcccaggttcaggcaattctcctgcctcagcctcccgagtagctgggattacagtcacgcgccaccacacccagctaattttgtatatttttggtagagacggggtttcaccatgctggccagactggtctcaaactcctgacctcaagtgatccactggccttggcctcccaaagtgctgggattacaggcctgagccacctcacccagcctaccatcttatttttagatggagacttctggacattggtataaaatctggatggttccagtcctgaccttttcttcatgtttaatctcaccttcctaacacttccaccacgttgaa

SEQ ID NO: 18852 - DNA, 380 bp, Homo sapiens
caaacctgctgcagttgtgtgtccctttgagttcagacaccagcttggaggagggggctggctataaggaattgtccatccatcctctgaattgatttcccttccatttggaggagaattgaatactattggctttcaattctgttctctcatgctgcagatattgttagacatcaacacatttgtttctctttatagaaatggaaacagctctccctgtcttagggagacagacattttcaggaaagccctactctaattgagctaagtctcagcaggcaggactctgacattctgttccactttttactaaagctgacagctacgaccatctacaaattaaggattggcagtggttgtaaatttttaagagttcttat

SEQ ID NO: 18853 - DNA, 377 bp, Homo sapiens
tttaaaaacagcattatgtgctaataaaaaatagtaaaagcgagataaaaatcaagaaaactgaataacttttcttttttttgagagggaatctcgctctgtcgcccaggctacagtgcagtggtgccatttcggctcactgcagcctccagctcccgggtccaagcgattctcctgcctcagccttccaagtagctgggattactggctaataccaccacgcccagctaatttttgttttgttttgatttgttggagatggagtcttgctctgtcacccggctggagtgcaatggctggatctcaactcactgcaacctccgcctcccaggtccaagcgactctcctgcctcagcctcccaagcagctgggaccag

SEQ ID NO: 18854 - DNA, 376 bp, Homo sapiens
atttccaaaggttagtctacatcactgaggcatcagtaaagtcctgtgaaatatctatactaataagcagggtgcaacatttggtatggtatctggtgtgatctttcagggtaaaagtaggtaaattaattgctgtccttatttggcccttactacacacaacacacaaatctcttccaccattgcaaaatgttagaagatgtatgtgctgtggccggacgcggtggctgacacctgtaatcccagcactctgagaagctgaggcaggcggatcacttgagtttaggagttcgaaaccagcctggccaacatggtgaagtcccgtctccactaaaaacacaaaatcagccgggcgtgatggtgcacacttgtagtg

SEQ ID NO: 18855 - DNA, 352 bp, Homo sapiens
  misc_feature (1)...(352): n = A,T,C or G
attttattataaattcctgatatattccacccctgcctgttcttaatctaaatgtaatttagcactgcaaaccatttatgaaaataaatttattttaaaaggcataaaagttattagtgtaaaaagaaaaaaatatctatacctacaaaaaaggccaaagacactaatgaagttacctcagtaaagatactgtaacatgtaacttggccagccaagttacaacacattcctcacaactgtattatgtctcaaggttctgaggatctgaaaggtcttttgatccacctaaaagtggccaccaaccaaattaatttctctgaaagacatctttaagcaattatttcagcctaan

SEQ ID NO: 18856 - DNA, 407 bp, Homo sapiens
  misc_feature (1)...(407): n = A,T,C or G
atttccaagaactttcaactaataaagggtgggattataagattagtttttgttttactaattacaactatatcctggaactatttacatactacctaggaaataaagtttgtttattcttgcaggattgtttttaaaagcagtattttcccaaatattaatttaacagtaatcctaaaagtaactcaggaaataaaaaacttatcacttcagtacattttattcataatgaggtaaagcttttgctttttctctatatatgtagatatatatagcaacacaggttaattgtgcttgaggattcctatgaattacaagattatacatgttcccattctatttttctactcctanagcaatcgtatatacattatttcctaataactcaataaggtaaaagtcttaag

SEQ ID NO: 18857 - DNA, 353 bp, Homo sapiens
  misc_feature (1)...(353): n = A,T,C or G
gttttgttttagtggtgtaataaattctttggaactttaataagatctagtctgttacaccatttagaactttcctgagccattatcagtcatgccttattttcttgctaaaactctatgtaaatttaagtatgcaaaatgtttaagtcacattatttatttttcattgtgagatactaaaaactgttaatcagactacagctgttatctttcctctcctacaaagaatactccacacataaaaacttaggtaaatgacatagacgcacttgggtgaaataaaacaacaaaaaaggtaatccagtaatccacgtcaggattcaccttagaagtttagcacacgcccttcaaan

SEQ ID NO: 18858 - DNA, 371 bp, Homo sapiens
ggactacctgacctgcttcgcggggggcatgttggggctcggggctgatgcaggtcccgaaggcatggcccaacactaccttgaactcggagctgaaattgcccgtacttgtcatgaatcatataatcgaacatgtgagtacatgttattcttcatttatggtctattcccacatgctttgatttaatgcagttttgtcattgctgccctcaaaagactatccgctctgcctatgaagcttgatgatcgcgaataatgtctcaaaggaatgtatatcttattttaaaaggcaatgcttttcttcctaaaaatatctacctttagtttaccaagaaacaaaaatccaggccataaagagttaaagcccgctg

SEQ ID NO: 18859 - DNA, 348 bp, Homo sapiens
ctgattccaagcgtcgtcagaccaacaaccaacagaactggggttcccaacccatcgctcagcagccgcttcagcaaggtggtgactattctggtaactatggttacaataatgacaaccaggaattttatcaggatacttatgggcaacagtggaagtagacaagtaagggcttgaaaatgatactggcaagatacgattggctctagatctacattcttcaaaaaaaaaaattggcttaactgtttcatctttaagtagcattttgctgccatttgtattgggctgaagaaatcactattgtgtatatactcaagcctttttatttttcctcttttcataaaggcc

SEQ ID NO: 18860 - DNA, 377 bp, Homo sapiens
gcctggctgaccacatggtctttcctccacgaccacagcctctcaaagctgtggaaagcgcccagttggttggagttgcatcctcttgtcacttatgagcctgctgggtttgccctggatggcccaggcctctgcccagggtttgctatatcagatccccatgggggttttcagcactgtctgcagctggatagtagatagggtggaccccatcagtaaatcagtaacaataagaaagttccttaaatgaattatgtacctttttagaaagtaggtaagtttcacttttcccatgctttttaatttgggcacctctcagtattgtttcctctattttgcactgaaaccactgccattagaataagaaagaagaaaag

SEQ ID NO: 18861 - DNA, 330 bp, Homo sapiens
  misc_feature (1)...(330): n = A,T,C or G
atttgatcagatgcttattaaaattgtgagagttatcaaatcatggacagtttctgaaactgtaatgccttcagcaggtctcccaaagtttgctagactgtatactctttgagtgctctcacagtgccaggaacatatttgttcctcagtaaatacttgttctgtgaaatccatcacttgatgtaacctttttctatagagaaaagggttttttttttaaggttgcattaaaagtggcttaacaaatctgatttaatgattggttgtaaagaatatgttagtacggaaaggtaaccatttttagaagtttctgtaggttttctcctttgn

SEQ ID NO: 18862 - DNA, 348 bp, Homo sapiens
aaagatcttggatatggtttcttcccgggacttagaactttaatatgttaatgtacgtcttgaggttccaaaaagggccttatatttcaaggaatgctggtgtttcaagcaacagagtttgggaaacaacaaggtaaatgataatctaatgcatttaggtaagaggtaagtgaaagttagaatatatgcttgagcaacatgtaaccataatggctgtggagtcccagctttgaatatcttggaagaatagacaattatcaatgttcctccctctcaaatgatccttctcaacacaggttgtgcttgatgaatctttaagaacagaatcttatcaggattttgtcaaat

SEQ ID NO: 18863 - DNA, 408 bp, Homo sapiens
  misc_feature (1)...(408): n = A,T,C or G
attccttcacattctcatttgtgggctcctattcttttgtcaacttcttaaataggatgtcttccacgatttcgtcaccactcctctccttgttctatatacactcttctgaatgtctttagccacacttatggctatcaccatcctgtatgttgatgactccttattagttatctattgatgcatagcaaattatcctaaaacttaaaagcctaaaaccacaaaaaacatttattatctcacagtttttgagaatcaggaattcaggaacagcttanctggatggttctggcttaggatctcttaagaggctacagtcccgtcctggctaacacggtgaaaccttgtctctactaaaaatacaaaacattagctgggcgtggtggcaggcacctgtagtcccagctt

SEQ ID NO: 18864 - DNA, 399 bp, Homo sapiens
gcgtgagcctcctcgcctggccaacataccattaatatagtgaaaaagtaatgtgttcagtgtaacttggagcatcatgttggctctcaaaaagttttgggtttggaagaattttggaattttgaattagggatgctcaacttttaataataataactaatttagcagcacttcctacttgttaggcattattacaaacagtttacgtttaatcctcacatcagatatatgaagtgtactaataggtgcattttacagatctggaaaattaagtcatagaaagactaaataacttgcccaagttcaaaatgctagcaaacagaagagttaggattcaaacccaggtagtatgattccaaacgcaatgctctttgctaatactctgtagaggggccgatg

SEQ ID NO: 18865 - DNA, 349 bp, Homo sapiens
aaaactctatgcagtagttaattagtttagttgtatacttgtaaaatctatttaggtgtcttaggatgttatactaaaaacacttacttacattatttcagaatatggtcttcgattggcaagccatatatttgttaaggaaatttcacaagatagtttggcagcaagagatggcaatattcaagaaggtgatgttgtattgaaggtataatcatattcttactttttaatgaactgaaatagaaaacaagttctagagttaccatgtagtctgtgctcttgtttgaagcagttttgccaaagagaattaaaaatcagtgtttgggggagagggaagtcgacgcggccg

SEQ ID NO: 18866 - DNA, 369 bp, Homo sapiens
tggaaggtcaaggttgcagtgagccatgatcacgatactgcagtccagcctgggtgacagagtgagactgtgtctcaaaaaattttttttaattttgtgtatattagcttgatttgggtttttttttttacttacaactgaaaattttgaccagtatatttaatgttagtctgaccatttctccagggggctttctacgtatttaaaaaatagtttggactttaatctcagggtaaacaatatatataggtacactcagtttatatatgagataatattcaggatcagtggagtgaaaatagtaaagtatcttccatttttcaatggcttaaagggaaaagtgttcataatgggtatagaattaatcag

SEQ ID NO: 18867 - DNA, 369 bp, Homo sapiens
gttttttattatgggccttatttctatctctctgatttatataaaacctgactttccccccatgtttcgaagaaggttgttttaaaaggtggcattctgtttgttcttttcagctcaaaagaaatttgcatgaggtaaggggctgttgagattgagaactccacttccaggctgttaattctgttcaaagtccaggcccactcagctagagaacgggttgttgcagcgagtagttggaggtcagataccactgatcaggccgagtgggagggaatatcaggggacactcacagtgtagagtgtctctgggtacaaagttctcgatgatcatcaacaacgataaactataggaaaaatgtcccacggtgt

SEQ ID NO: 18868 - DNA, 379 bp, Homo sapiens
ccgcttcctagtgctctttttgtgacaatccatacttagggtgcctacacaacttcatctcttctgtgaagaagatgatgcaaccccaaactgtcagaattgcctcctcttctccacaagactttatccttccaggaccaggacgacgacgacgctgtcgtcgtcgtcatcgtcatcatcgtcatcatcatcatccccgcatcttccacacccccaagagccttaccatcacccacaggcaacgatacaggaggtagcagacctagctctccacaaacgcttgtcgaggtgaactgcaaagcctatctcctgagcaactcttgtctgaggtcaacatcacctgccactgaggaccactgagtgctagagtcagtcgtcc

SEQ ID NO: 18869 - DNA, 337 bp, Homo sapiens
  misc_feature (1)...(337): n = A,T,C or G
ttgggtttttttaaaaaaagttgcttttggagggtaatttgagcaccaggattccccctcaggagaggttccagttaccaggagacactggaacctcaggtctataaaaactggaggggcagtgaaggcctattattcacagcacataagattctaggagacagatttgggcagggaagaggtgggggagagggttcattgcctcccttaaatatgctacaatttttttttccccaaaaacctcggaagacactccatcccccaccatcatgaatactgagcttgcacacttggggacctgccccancgtgaggtcaggggagtgggttaatgcatn

SEQ ID NO: 18870 - DNA, 356 bp, Homo sapiens
ctccctccctccctccctcccccctcagcccaggaaaggcacaggagaggatcctgccaggtaaagggaaagtggcccgggaggagcccacgtgccaacaacaggagtcccagaagacagaaaagaccacagatgagaaagcagttcacgcagagaacaaaacgttcccggaccaaacccagggtcgggttgctcattcccgaggcccgatagcgagatgcagatgaactggggaagaagagggattttatttctgtaactggttacagggagaaggcctggaaatgatcgccagaccaactccagattacagtttttccagagcttacacaccttctaagctctgtgtctccgtg

SEQ ID NO: 18871 - DNA, 349 bp, Homo sapiens
gtttattttgactataaaaacatgtgagctaacactgcgcatagaaaacaaaagcaagttatactcataagacagagatatgtattatgtgataaaacagtgcctatcgagtttaaatcttgacagcatgagtacaacgcacactaaaaacttatcggtgaatactcagagcgctgagttactttttactcgtaaacaaactttgtctatttccaaggcagaccaaatttaacttggtttgctttctaagcccgaagcagatattaactatcagtgttacagtcctcaatatgtctacctaatctctcaccaatctgacatctcaattatcaaaaggtaggatacaggt

SEQ ID NO: 18872 - DNA, 342 bp, Homo sapiens
  misc_feature (1)...(342): n = A,T,C or G
taagaaagcactgttgcatgcttgtattttatctgtgggcaagctaatgggtatagaattaattttaaaagactaattaattatgcacttcttttgcaagtctaacaccttaatataccctgagaataatcctctttgccatttgtaaaactttatttggattatatacaagcccatatgagtctgcatgctatatttcaacaaggtatcatgaattgcctgaatacttaaaactttttaactaattggccccagttgtttacaattatagngaaatttgatttacaggcatctttagtctggggagggttcattccatgagcaacatatacatatatttgg

SEQ ID NO: 18873 - DNA, 331 bp, Homo sapiens
caggagcaaaccagcatctcatacatgtcgaaaaagatgttttgatccctaaaataatgagagaaaaggccaaagagaggtgttctgaacaagttcaaggacaagtaaatttttgtgaaacattgcacatgttagatggatttgggagaattttccaaactaagtggacgaacttatatagctacataaatagtaattttaccaaatgttgcaagaactctggagttcttatggtagtaaaatgccggaaagaaaattctgcattgaaagaatgtctaactgcttactataatgatccagccttttatgaagaatgcacaatggaatacct

SEQ ID NO: 18874 - DNA, 135 bp, Homo sapiens
  misc_feature (1)...(135): n = A,T,C or G
ttgtgacagacgctcggcaacatgttttaaaggcatttatctttgcattgatgtttagatcattactgctcatcaaatgttcacaatactcagagtgctatgtaactctatgtcctcatcctttagaagcctgtn

SEQ ID NO: 18875 - DNA, 337 bp, Homo sapiens
ccaaagtatacatgggtattttctttgatttaaacatacttataaagtgaattacctggttgaacaaaaatgtaattgtgacagctactcctaggacccctgtgttttgttattgatgagatcatgactgtgattcacagtccaagcaagatttattggttgtcaactgcagttctaataacagcttaccaggcgtcaaacctgaacaagacaacaaaagaatgtctctctgaaaccccccgccctgaattttaaccatgtgaaccctgctatgcccaagagataacttactttttttctactttgatgttataaatttcatcacagactaatttga

SEQ ID NO: 18876 - DNA, 330 bp, Homo sapiens
cgcttgcctcgtcagcgtccgcgtttttcccggccccccccaacccccccggacaggacccccttgagcttgtccctcagctgccaccatgagcgaccaagatcactccatggatgaaatgacagctgtggtgaaaattgaaaaaggagttggtggcaataatgggggcaatggtaatggtggtggtgccttttcacaggctcgaagtagcagcacaggcagtagcagcagcactggaggaggagggcaggagtcccagccatcccctttggctctgctggcagcaacttgcagcagaattgagtcacccaatgagaacagcaacaactc

SEQ ID NO: 18877 - DNA, 369 bp, Homo sapiens
  misc_feature (1)...(369): n = A,T,C or G
tttccataatattgtcatctgagtacaactgcataggtgtattaaactgagcatgtacaatcttcacaccaggaagttccatttccaaaggaatgttaggggccagcttagccgcaactttcaagtcacctgggcaaatggtactaacagtactgacagaagaaggggtgctgcgtccactgccacagtcaatcccggagggagtgctgcatccactgcttcggcccgggatcacgaaaggtttgggccgaatattatgcttgtgttcaaagtagttcccgtcctgtggttctgattctaagtgannnnnnnnnnnnnnncnncnnnnnnnnnnntnnnnnnnnnnnngnnnnnnccnnnnnncnttct

SEQ ID NO: 18878 - DNA, 245 bp, Homo sapiens
atcgccggtcggcatcgtttatggtcggaactacgacggtatctgatcgtcttcgaacctccgactttcgttcttgattaatgaaaacattcttggcaaatgctttcgctctggtccgtcttgcgccggtccaagaatttcacctctagcggcgcaatacgaatgcccccggccgtccctcttaatcatggcctcagttccgaaaaccaacaaaatagaaccgcggtcctatgtcgacgcggccg

SEQ ID NO: 18879 - DNA, 378 bp, Homo sapiens
caactaccagaattctgaatttttgtgttacctttaaaaaatggatgttttcccctcattcgtaaatgttattaagcagtgaatagaatatgtaccattgtgatgccatacattttacattttttaaaaccatgccaatatattcatagtactctgtataaaccgaaataaaaacatataaatctcctgaaaacataatagctcaagtgttaggcacctgagttgtgctaagaggggatttctaatgtggcagtgcctgctctgtatgccactctctcagagctaataccctgaaaacgcttttcataaaaatgtcagttgattttgaagagaaaggtaatatggtgaccacaaggctaataaacggagagaaaggtg

SEQ ID NO: 18880 - DNA, 389 bp, Homo sapiens
ctttctttgtaagctttgaccactccattgatgttagactcaggatcaaactccaatacagcaaaccatttaatttccttcaggaaatctaagtgttttgtttgatctgggtggcatttatttgttacaagaatgtactgttcatagtatgaattatctaacaaatcttgatttcctgtcaataatttaaccaactttggtccctctctttcttttttatttgtttttgctctgaatttttcttctgctgcttttctggactctgccagtgttttaaaatctgctttaaatgctctgaaatcaactttatttttcgtaatgtccttagagctggtcccatctcgcacaaatagtgagaattttttactttgttcccatattttgttgtg

SEQ ID NO: 18881 - DNA, 329 bp, Homo sapiens
ttcctccttctcacttaatcgttgactacaaagaccaagccattttgactctgccaccgatgagctttcacatttctttcctccttccattcccatgactaccaaaccagtgcaggttctcctcacttcactctaagacaacagcgtggccctcaaatactgtcacactcttcaaggctctgtgagcacaatctgtctcatattctcttctgctgtcaccagatttattctaagaccgtttcttcactgttactcccctgtttctcaaccagttacacagaaagacgaatatccaggcatggtgtcatgtgcctgtagtcccagctact

SEQ ID NO: 18882 - DNA, 376 bp, Homo sapiens
cttgattatgatctgtccgaatgactaaaggaatttagatttgggaagataaacagggacttgctctataatttgaaaattagtcctaaagaagcatttgggtagcatagttttaactaaaatcctaaacttcgttgccttctaaaaaccttaaattgctacattttgtttttgtttttgtttttggagagtgagtcttgctctgttgcccaggctgctggagtgcagtggtgtgatctcgactcactgccacctccgcctcccgtttttaagtgattatcctgccttagcctcctgagtggctgggattgcgggcgtgcgccaccacacttggctgagttttgtatttttggtagagctggggtttcaccatgtt

SEQ ID NO: 18883 - DNA, 397 bp, Homo sapiens
gtgatatttgccacagccagggttgcattctgaacgcggtaatagaccacaccatccacgctaattgtcactgaatcctttgtgaggatctcctgaggaggaatatcaaatgaaatagttctcatgtccactttgatgaagctgtcagtgcatggcagaataaaaaacaaaccaggtcctttggctcctccttgtaaaatgcgacccaatctaaagatgatggctctttcatactcttttataatctttatgcacatccatattgagattgggaaagttataacggtgaataagaatgagaacgccaccaaaatccatccgcaaggtccaaggcccttactggggctggcatagtgctcactttaactggaccacaagttcagtatagttttcattg

SEQ ID NO: 18884 - DNA, 390 bp, Homo sapiens
  misc_feature (1)...(390): n = A,T,C or G
cccagctaattgttatatttttggtggagatggggtttcaccatgttgcccaggctggttgtgaactcctgaactcaggcagtcctcccacctcggtctcccaaagtgctgggattataggcatgagccactgcacctggccacctcagcatttcttaagggacaagtatgatgttgatgaaatccctcagcttgtttgtctgggagagtctttatttctccttcgtgtttgaaggatattttttgccagatatattattctagggtaaatgttttttttcttcaacattttaaacatgtcctgccactctctcctggcctgtgaggtttccactaaaatgtctgctgccagacatattggaactccattgtatgtcatttattttctcn

SEQ ID NO: 18885 - DNA, 364 bp, Homo sapiens
aggtgatctgcctgggtcagcctcccaaagtgctaggattacaggcatgagccaccacgcctggccagtttcattatttttaagttttgcctaaatcaccaatccgtattcccatttgaacatataatttttaagttactatgcttcaaaaagctaattgcagtattacactaaaattacacacgcacatgtacacacaaaaagaatagttggtgtctttattaggcaattttattgcagtgaaagtggacctacacataatcaaatatttgtaaacaattgagacagcattactgtgactgggagttaaattagtttgtgggagccattgtttattggtataatcaataatttttaaaaactt

SEQ ID NO: 18886 - DNA, 334 bp, Homo sapiens
aagaagcagtggcagcggaagtaaaaaatgaagaagaagatcagaaagaagatgaagaagatcaaaacgaagagaaaggggaagctggaaaagaagacaaagatgaaaaaggggaagaagatggaaaagaggataaaaatggaaatgagaaaggagaagatgccaaagagaaagaagatggaaaaaaaggtgaagacggaaaaggaaatggagaagatggaaaagagaaaggagaagatgaaaaagaggaagaagacagaaaagaaacaggagatggaaaagagaatgaagatggaaaagagaagggagataaaaaagaggggaaagatgtaaa

SEQ ID NO: 18887 - DNA, 359 bp, Homo sapiens
ggctaggctggtgtcaaactcctgacctcaagtgatctgcccttctcggcctcccagagtgctgcctcagcctcccaagtagcctcccaaagtgctgggattacaggcgtgaggcaccgcaccaggcctggtgtgctttttctttgtctgttttattcagggcgtgctacatgtttcttcaatctgtaaatgtatgtattttaccaaatttgggggattttcaactattaatgtcttcagaaccttttctgacttcgctcgctctctctattcctcctgggattccaattacatgtatgttagatcttttggtattgtcctgcagatcacaagactgttcatttttttcagtgtttttt

SEQ ID NO: 18888 - DNA, 355 bp, Homo sapiens
aaagaattgcattgttggttaaacaacttaaaaaaattaaagagggacagaaagattgtgtcagagaaaggggggtaaaacagggagtaaaacagaaatagtacagaatttggagccatacagaactgactttcaatcctaggtcagttacttccttgcaatgtgactttagacaaattattaaacatctctgatctaaggattctgtaaaatggggaaatattacccactctcaacagagtttgtggtgagacttagataagaacatatttctaaagtgctagttccctggtgggcacacaagacatgcaaggttgcttctctaggtgatggagattttgagtgaaatatgtat

SEQ ID NO: 18889 - DNA, 359 bp, Homo sapiens
  misc_feature (1)...(359): n = A,T,C or G
aacccactccaccttactaccagacaaccttagccaaaccatttacccaaataaagtataggcgatagaaattgaaacctggcgcaatagatatagtaccgcaagggtatacatctntagttccatgttgccgagtatggcatgctttcccattcatggaaaccggggccttttctggcttttggttttcatgcataaagttgctataaatgttctcacaggagcttttggttttgttattactgagatgaaaacgggtgtggaattgctgaatcacgatagatgtacattttttgagagaaggctaggcattttttccaaagtaatactgtggaaacacttatgcaatgatgtgtgag

SEQ ID NO: 18890 - DNA, 355 bp, Homo sapiens
ctttgtgttttttagcctggcgggatgatgtgtgcctatagtcccagctactcgggaagctgaagtatgaggaccgcctgagcccaggagttttggcctgctatgggctgtgcttaccacggatctgcacgaaggttggctacaacatggtgaccttctatgagaggggaagcaccagcttgcttttgaggggtgaaccgacccaagtaggaaagggagcgggtcaaaactcccatgccaatgagtaatgggagggtgcctatgaatattcactgcactgcagtctggctacgtaataagacctcgcctctaaataataatgataataatttgtggtcttaaccaacagagaaag

SEQ ID NO: 18891 - DNA, 359 bp, Homo sapiens
taggaacataaaaacttttagccaccatcagtttgataatgtatatccagaattctcaattaaatgttgttggtcctaattgtagttagtattttggaaattaaattaacagtattttcctagaatgctttcaaaattattatttgaattaagtgtatccttgatctgaattgttattattgtaatgggagtaattataaatagaaatcattgaaagccatttgcaactaatattaaatcaatcagtgatcttccaagttttattgatagataaaacagaaggaatactgcaaggggaaatgtggatggattaagcaaaaatttaaaagtagaagagggaacatggttgggtatgggtg

SEQ ID NO: 18892 - DNA, 310 bp, Homo sapiens
ccacaatattgtgatttggtgcggactatgtcacacaagaactgaagatatggtcaataaatattgctcttattggaagcagaaagcgggcagtgagccatggtcacggtgctgtccttcctgtgggtgtccaggctttaccagaggcctctggatcagtttgtgctgcatgcgcacgcatggttcaacgagacctccctcccctatgcggagcccccgctcagactgccccgaggggaaactcatgtgtggacacagctgctccgggccttggaggagagggccattccaatctgggtcgacgcggccg

SEQ ID NO: 18893 - DNA, 332 bp, Homo sapiens
ggaacctgtattggtgctacaaataaatttggagcagaagagaaaagccttattggactttctggcattttcatcggcattggagaaattttaggttggttttaaaaaaaagcgtttgcattaaaaatatcagtttattataggtaaaatagaaattttaagtgtgcttcacctttgtccttgaatttctgttttttctacttatttttacccaaacgtgtgcttttatttttctattattgctattctttttctttttttttttttttttccaaaaaaaattttcctttttcccccagggttaaattggagggccgggggcggaatccact

SEQ ID NO: 18894 - DNA, 356 bp, Homo sapiens
ttctgatgggagcttcattatcttcatctcatctaaatgccagcctaatgccacaaatatttttcagagaagattcctttatcaccaattatccccataattgaagccagctgtgtatcggtttatttgcaggatttctatgtaagactaacatttgtatatagaacagaacaaaatatgcaaaaatcttgtttattgacaaaagtaattttgcctggttgtcttgaacctaaatcagtattaatcctgaatctactacccatagaatgccagtatttgtatttagctccttatgtctgtattgttgtagattaacactttatttatctaatgagattatgtacattaattatgct

SEQ ID NO: 18895 - DNA, 137 bp, Homo sapiens
gtctaagtgcgggaagtaggtcttggtggtggggaaggacaggaacatcctctccagggcctccgcaccatactcgccagcgtgcgcgccgaccttaccccaggcggccttgacgttggtcttggtcgacgcggccg

SEQ ID NO: 18896 - DNA, 294 bp, Homo sapiens
gagaagatagggaaattagaagataaaaacatacttttcttcgccttcccgtacttctgtcttccagttttccacttcaaacttctatcttctccaaattgtttcatcctaccactcccaattaatctttccattttcgtctgcgtttagtaaatgcgttaactaggctttaaatgacgcaattctccctgcgtcatggatttcaaggtcttttaatcaccttcggtttaatctctttttaaaagatcgccttcaaattattttaatcacctacaacttttgtcgacgcggccg

SEQ ID NO: 18897 - DNA, 178 bp, Homo sapiens
cgcggttctattttgttggttttcggaactgaggccatgattaagagggacggccgggggcattcgtattgcgccgctagaggtgaaattcttggaccggcgcaagacggaccagagcgaaagcatttgccaagaatgttttcattaatcaagaacgaaagtcgggtcgacgcggccg

SEQ ID NO: 18898 - DNA, 340 bp, Homo sapiens
agaggcagcagtcagagaaaaccttcatgcctaagcaacgtagcttacagagtttggaggcaagcttgcatgctatggagtctaccagagagtcattgaaagcagaactgggaactgatttgctttctcaactgagtttggaagatcagaagagagtagatgcactgaatgatgagattcgtcaacttcagcaggaaaacagacagttgctaaatgaaagaattaaattagaaggtattattactcgagtagagacttatctcaatgagaatctgagaaaacgcttggaccaagtagaacaggaacttaatgagctgagagagacagaagggggtactgg

SEQ ID NO: 18899 - DNA, 334 bp, Homo sapiens
cgagctgctgttgcaggtccttatgtgtgaacaccttatcaatgtgctcttccctcagtgcgtactgttcgatgagcttctttagcttctcccccagctcaatgttttcctgtcggagtttggcgttgtggatgtcatgctgctccagctgggcttgaatttcatttaaggtaatctggaaatgtgcagttgcttctttacgtcgttcttcttcctctcgtgcctgctgcatattttcctcctttaacgtcttattgtgacgctgaagttctctgcaaagagattctagcttgcttcttgccaagatagccttgctatgttcactctgcaagtg

SEQ ID NO: 18900 - DNA, 328 bp, Homo sapiens
atgcactctaaattaggatctgcatttagatagattgcgagcttaaaaatcagtcctgcatttgacctcttttgtcagtgcctactatatcaaattttaacagactctttttttttttttggggcggaaccatttattaaagggccttggggaaaaaaaaaaaattttttacccccattttttagcggcccaaaaaaaacggggggggaaggggttttgcaaagttcccagattatactggggggggggaggggctctgcccaccccaggggaggaaaaataaatggtaaggtgctgggggtaaacctgtcggggaattcataatttg

SEQ ID NO: 18901 - DNA, 326 bp, Homo sapiens
attttgtgcattggttatttgactcctcatttttatattacatgttatatcaagggagggggcataaaagaaatacaaaaattgcagaggtatctggaatgtacctatttgttaattctatttgtcatttcttttgttccatcttttgagtaataagctgcttggaaaagtttctgttctttagctgattttttagctataaaaatgtatttgaaaagctcataaatttcaagattgaaaagataattgaaagttttaaaaaaacctaattcattgaagtaataaccaaataattttcaatcttgattcaactgtgattcaaatct

SEQ ID NO: 18902 - DNA, 400 bp, Homo sapiens
  misc_feature (1)...(400): n = A,T,C or G
aataaaacatataggaaaatgaaggtactgtaaaaaaagacactaaattagaacacagtattagtactagtattcattaagtgcctataaactacaaaagaacaaagaccatacatatttcactcaccactgtgaatatataaacccatcaaggcctgacatataggggggtgctcaatatatattcgttgaatgaatcaagtttgtaagcagactgtgttaggttctaggcaatccgtttcttattttcaaggcacgtgtagctcaactgcccatccaagaagtttgcaccaccatcttttgtttttgtactggtggacttagcagcctttactggtggctggtagcttcaaagaagtgaaggcctttagaccagagagataaaatgagctcatttttn

SEQ ID NO: 18903 - DNA, 337 bp, Homo sapiens
tagtgaccaattacactatgattttatggctccagttctctgagtctatgcctaaaaaatggatgctaaagtgctaggccattagatatctgtcaaaacattttatgctgaagaacacatattttgaaacttggagtgagatctggtcttgtaaaattaaaactgtgtttcataaaaaagatttaaaaatagaataaggatctgcctgggcctttctggacacacaatgaaaacatccagaagacaagaaaacgacacaggtgggatcattacattgccccaggcgcaaatgctttctgtcttaaaattttgaattctttccagttacaagttctgg

SEQ ID NO: 18904 - DNA, 329 bp, Homo sapiens
atcggagcaacaataggcagagagaaaggaaaggagggcgaagcactctccaacacaaccaaccctgccgggggattctggggggcggggagggcacaggagtccccgggtcctgcacacacaccgttccaaagccgaggccctggcagcaccctggaaaagggaggtcttttccgccagcccctctgcagcaccctgaagccagggaccaccaacagggcgcgtgaagataggagacattagtctcttccctttcgagggagcgccgaagcttgccctttctcatcctggctcattcggcgacgcggccgcgaattccagatatatgg

SEQ ID NO: 18905 - DNA, 350 bp, Homo sapiens
atttgcacttgtcacattgcttaagtatctgtatgtgttattcatctagctctttgaggggaggatctctataacgttaaccagtgtatcaacagtgtctagcttagtgcctagaatatagaaatatctgtggaataacaatctacttagagtcctctcaattcaaatttgcttttatgcctataggcttctataaggctattctagttaataagtgtatcttcttcctaactcacagttctcaaatattatttcctctataaaattttctcagataactaccaacactctcaccacctcctatcctaagtggctatccatggtactttcataatcctttgagctcaatt

SEQ ID NO: 18906 - DNA, 339 bp, Homo sapiens
ggagtgtccagaatgctttttaattgtggtggtaatgatgtgagaaacagcttgtcatttatctttgttttcctttttttttttttttttttcccttttcccccttgccttaacccttcctctttttaagcccctttttgtcttgactttttttttcccacctttttagggaaaccacttttgaaccaggccttcatttttttgtcacccggcccgaaattccaaatttttaaatccgaaatcctgaaaaaccccccaggttccttttaattgggcttggggccccatttaaatttttttcttttaaacatcgtttgcccttcttttatgaaactatcg

SEQ ID NO: 18907 - DNA, 351 bp, Homo sapiens
ttactcgagatctgtctgaccctgacctgtgtagacttgacttttttcctggactcaacatatgcatttccagctgcccattagacatcttgatgtagatgtcttacaggtttctctcggtctcagtatttccagagcaaaattgttctcatcctatcacaaaatttgttgctcctcctgttttctcttcttgaaaagaaatatcatcagccactcagtcatttaagtcattgattcccaattgactgcatgagaatcacctgggggcacatgttaacaatagaggctgctgaactgtatcctccaaagagcctgattcattaggtctatggtaggacccaggaatctttt

SEQ ID NO: 18908 - DNA, 347 bp, Homo sapiens
ccaagccccacacaaaacgctgcccgtggtcttcgactctccaaggaacagaggcctgaaggagtttcccatcaaacgcgtgatgggtccagattttggctatgtaactcgagggccccaaacagggggtatcagtggactggactcctttgggaacctggaagtgagccccccagtcacagtcaggggcaaggaatacccgctgggcaagaatctcttccgggacagctggcatcccacgaatgacatttgtggtataacagctggcgacgtccagatctatgaatcctacattatgaataagccagaatgatcacttccgctggcgtcttgcactatgtcacttg

SEQ ID NO: 18909 - DNA, 363 bp, Homo sapiens
ggaacacccgatcttcatcttatcccccttggctaccaagtccaacgtcacattctcttcactgcattctttgttgataactttgctctcaatgtctaagtattccgtccgaacagccggagtgacatttgctgagggtttccaaaaagatgccagtgtcatgctttccacactctccaggaagactgtggccagggaggacgtctcttccttggtgaatttagtccacgtggatatttgtttaagcacagggacaaagctctcagttgtattccaggcttggtggtgggcgcctgtagtcccagctacttgggaggctgaggcaggagaatggcatgaacccaggaggcggagcttgcagtg

SEQ ID NO: 18910 - DNA, 350 bp, Homo sapiens
cttgaacctagctaagctttcctttaccttagtaagccaatcagaagactacaatctatgaatatttagcaaatgtgctgaagggtttaataaggttttgttgttcaataaatttgcaaggcagggtattaacatattttgataaataaatggtgctagagttggcgcagaggattatatattgatatgtcttagttattggcatttgtgtgtgtttgctgatatcttgatttcatgatttgttaggcatttttttcttgatgctaggtatttcttcactgtacattgagacacagcactactgcacaccaaagtatgcaatacccaaaggaaactgtgtgatttctcct

SEQ ID NO: 18911 - DNA, 348 bp, Homo sapiens
  misc_feature (1)...(348): n = A,T,C or G
ctatgttcttgctctgacatccacgctgaagtgcattggtgcacttatatctcactacagcctctaactcctgggctcaaaggatcctgccgccctgcctcaccctccttattagctgggactacaggtgcatgccaccgtgcccggctaattatttaaagattattttttgtagaaatggaggcttactgtgttgctcaggctggactccccactcctggcttgaaaccatcaggctgcctgagcctccaaatgccacgattacaggcatgagccaccgcgcccagcctatgacaatagttttgactccctgagagtcttgggcatccccaaaggttcgcagaccan

SEQ ID NO: 18912 - DNA, 293 bp, Homo sapiens
aaattgtgtttggttatgaattctcccatgaaagctgcacctaggaatttctcttgtgccccttccttgtcactgctccctttttccttccgaaagacaaccaccaccttgacttctaacactgcagatgattttgcctattttgatttgtgtaaaatggaaccatgtagtatggttttgttttttgttttttgttttttttttttgaaacggagtctcgctctgttccaggctggagtgcaggggtgtgatctcggctaattgcaacctctgccttccggtcgacgcggccg

SEQ ID NO: 18913 - DNA, 348 bp, Homo sapiens
gctgaacagtgcatagagactggggaccagtttgagagcttaagctgccctaagccctgcccagcttctctaaggcaaaaagatttaatatatcagcatgattgtgacacattggaggcataccagttgggaaacactggcttgaactattttcatatctagctatttcctcttgtgaatggggcagatggggacaaaccaatagtaagtgacctgaaatcacttttaatggttttcagaaagcatctggtcacctgagatctatagagaagaaaccggaataaatttcaaaaaggatatagatacaacttaatatgccggactgttgtcttggtataatgaggtgga

SEQ ID NO: 18914 - DNA, 331 bp, Homo sapiens
  misc_feature (1)...(331): n = A,T,C or G
cttgttgtgaggattaagtgaattcacgtaaagcatttagaacagtgctggggacatagcagccatttagtaagtgttagctcattataataatagtaattttattatttggataatgattatgatgatcatgcccctaaatgtgtcagggctgggaatgcatgtcagtccttgataaacaggacaggaggcctctttctggtcaccacaacattgcctggggctgtcacacccacaagattctgtaaaacagaagagtggccaacattacaaaataaagtaagtctcttttcctaatgaggcttccatagctatttattgaaaagtaccn

SEQ ID NO: 18915 - DNA, 294 bp, Homo sapiens
gccataaataatgacaccgtaaagtgctagaaagtgataaagattccaaaaattataatcacaattactatgtgattgtgatgaattagtaggactgctaaacacaaacacctacttaatgtgttttactttgactaccactttaggataagattgaatttcaaagaactggatgacaatatatgagtaaataaagcttataccaaccattcatgacctaccagaaatctaatgaattgccccataacacccctctactcttgctgaactcatcaccagctgtcgacgcggccg

SEQ ID NO: 18916 - DNA, 338 bp, Homo sapiens
ggctggtctcgaactcctgacctcaaatgatccacctgcctccgcctcccaaagtgctgggattactggtgtgagccactgtgccctgcctttttttttttttttttttttgaaaaaaaaattttgtttttcccccacaccggaggggaaggggggaaatttggctaactggaacctttggcacacagagagttgttttagtctatctctttctattcgaatgcccttctttcacttctttatttatccatatttaaaaacgcccctcattgactcctgttccctctttcacacttaatctacactgtctattatttctccaccccctcctctatctc

SEQ ID NO: 18917 - DNA, 140 bp, Homo sapiens
cacacacacactccttcactcagctgtgctgtgaccccacccttttctttaatctgtgttctcttctctcccttagatgatggagtttcttcagttaatgagcaaatttaaggagatgggctttgaggtcgacgcggccg

SEQ ID NO: 18918 - DNA, 344 bp, Homo sapiens
  misc_feature (1)...(344): n = A,T,C or G
aagtagctaggaccacaggcgcgcaccaccatgcctagctaattttttattttttgtagagatgggatctcgctatgttgcccaggctggtctcaaactcctgggctcaagtgagccacagtgctgagccttgtcttctggtttgttgaagcagtaagtcagacaatatttgccacaataatgtctgtcaattgtttgtggctggccataaaaactccagcatcacattcatctgaaggacactgctaatgaaggccactcattttgctgttgtcatccaccttattgtatctcaggacatccagcttaatctttttctattatgtttattcttcttgggagng

SEQ ID NO: 18919 - DNA, 358 bp, Homo sapiens
gtgaaacctcatctctactaaaaatacaaaaaattagccaggcgtggtggcgggcacctgtaattccagctacttggaaagttgaaggaagacagtcacttgaacccaggaagtggaggttacagtgagctgagattgtgcaactgcactccagcctgggtgacagaatgagactccatcttaaaaaaaaaaaaaaaatccttttaaacccaaagattctggaattcaaacataacatgggccactgtctgtgtgtgtacacaaatatgtgcccacaggcaaaccatcattttatttgggggataaaaggatttgggttggggaagtttctatatactttgttccttatactccaagg

SEQ ID NO: 18920 - DNA, 339 bp, Homo sapiens
gatgacattcccatcagctgacatgaggagaaggtttgaggaagaagactgggagttgagctttggatctttacatgccagtctgatgatcaggagagacacctgggctggaaatacttatttcagggttgtgggcatacagatattacttgaagtcataagaatgtgtgagatcacagaagaagtacgtatagattgagaagagcaggtggcaaagaattcagctctggggcaccagaacattaaaaggtcagagacaaggagaggaaccaggaaaggagactgagatggagaaagcaaaagatgggaggaaaaccagccaagcaatgtatgctggaa

SEQ ID NO: 18921 - DNA, 355 bp, Homo sapiens
cttatttaccctgtgcctatcatgtagcaagcacttcataaatgttagctattattactgccaaataattttaactttacttgggtcaacttcttcacagaatgatataaaggagtatctaacattctccatccagttcaaaccatgattcttgttagccttttgatcttgatagtagagcccctgtttgcctctctgactcctctgagtctctgttttgagtgtgttgtatttctaaatgtaggccaacatcttactgaccaaactttctctttaaatgggctgttgtttttaagcaatagttgattgggagggtggggtgtgagttgtggaatacttaaaagccagggctctg

SEQ ID NO: 18922 - DNA, 369 bp, Homo sapiens
  misc_feature (1)...(369): n = A,T,C or G
gcttattgcttttgatctcatcaacattatgtaatattctttatctctgttgtagtgattgacagaattttctttcagtataacaaaaatgccactttatcatctgatctgcaaagtttcagatgtgaaattataattcgtattgtctctaaactcttggatgacctgttatgctatttttttactcttttcttatttttgngagtttagctgggataatttctgttcatctatcttcaagttcacttgatttttctttccctatcctgtgttcagctttctaagaagtgcatggaaggaattctttatttctgatatcataggtttatccttggcatttccacttgactctttttaaaaatatagttg

SEQ ID NO: 18923 - DNA, 357 bp, Homo sapiens
  misc_feature (1)...(357): n = A,T,C or G
gtcttaataaacctagacctgtgtcacagctgtaccctgctaaatattacacaactctcctctctccacatcctaaattgtggcttatctaatgttcctacaaagagaccagattctagtcacagtcttccccaggttatacctatcactttatctccatcacctggaatagtacagaagccatccctgcctccggtcttattcccttaaaccgttcttttatgctactaaagtgaactgccacaaatgcaaatctgactaccactttcctgtatcgnttatgtttttgatttttattttttgtatattctgatgttttgacatcttaaaaaacctttctggctgaggagggggtgg

SEQ ID NO: 18924 - DNA, 360 bp, Homo sapiens
aattttttaactgtaagtaaattcaaacaaactgttataaaacagaatacacagttgtctgcatagatcataaaaaacataaaaaccagaatgctgggtaggtgctggtggtgaaaactgcagggctaaaacttgctcaacaatctgtcttgaaggcagctacactttgaagtggtctttgaatacttttaataaatttattttgataaataatattgaaaaaaaaaaaaaaaaaaaaaaaaaaaaaaaaaaagcgaaaaaaaaaaaaaggtggccccccgccggaaatcccaaattttaaaatgggaaaatcggaaaacccccgggggtttttttaattgggggttggggccccatttt

SEQ ID NO: 18925 - DNA, 350 bp, Homo sapiens
tacacattaactgacaaactgagatcagttgcagagaaataaaagcacacggcctctatgcagattgctgagcaggaggaataactcgttggaggggacagggtagtaaccagacaaggaggcctcatgaaggatgtgagttctgagctgcacaaatagcacggaagaagctgggaacacaggagggaatgaacagggagctaagaatgacatcagtgggtgagcacagaacactggccactgggggccgctggagagggggccacagtggtgtgagcaggaagaggctggcaggtgggaagggaagtgggagaaagtcgtgcagaaaatgtcgacgcggccgcgaattc

SEQ ID NO: 18926 - DNA, 357 bp, Homo sapiens
aaattttatagctcacataaaactttcaaagcccttatctcacttcacccatgcaaaatcctgaaaggaaggaaaggtggttattattatctccattttacacatagggaaacaggaaaagaatttatacaatgttggtatgacacttttggaggatcatacacaaacgagtagcctactgaagaaagaacttgtcccagatgctgatgaaagtttacataaagaacaggcagcaaatgccaatgtatgaatccctggtctagagcagccagacctggtttgcaaacctagctgtgccacttagcagctggtgacatggagccagttactcagccattctaagcacaaggcctgagc

SEQ ID NO: 18927 - DNA, 332 bp, Homo sapiens
ctcactggagccttgaccttccaggctcaagcaaacctcccaggctcagcctcccaagtaactgagactccaggcgtgtgccactatgcttggctatttttgtattttttttagagacaggttcttactatgttgcccgggctggtctcgaactctgaggctcaagcgatctgcccacctcagccttaaagtgtcttccagcttttatgtgtctgaaaatatctttatttcacttcgctaaaatatattttcatcacacataaaattctaggtttgcagtttttgccttcagcactttaaagatcaagttgcactgctggtcgacgcggccg

SEQ ID NO: 18928 - DNA, 394 bp, Homo sapiens
aagaggtagaaaaaaaacccagtatgacttaaaaaatgtccttgtggtcctattggccacaactggcagccaaaaagggctttgaagccacaggtagacaggttttgttcagacagggctatgttttagatttctctttcaaatctgaatggttttacgtagggcaatatataaactttcctatttgtcacagattctagcactctttaatgccttatactgggtgtttcacacagttatttaactgcccaaatcccaatggcacttcagtttgcaactatcatgacctagaagttagttattgaacagttatgaggtaacttaaagtttcttccctttgcctctagaataagaatatcaaagaaatgtcatgatgataggaatactactgaag

SEQ ID NO: 18929 - DNA, 371 bp, Homo sapiens
cttcagcacaacccctctctctgttgaagtcttgacagaggaggttccagatatgggaaacctcacagtgaccgaggttagctgggatgctctcagactgaactggaccacgccagatggaacctatgaccagtttactattcaggtccaggaggctgaccaggtggaagaggctcacaatctcacggttcctggcagcctgcgttccatggaaatcccaggcctcagggctggcactccttacacagtcaccctgcacggcgaggtcaggggccacagcactcgaccccttgctgtagaggtcgtcacagaggatctcccacagctgggagatttagccgtgtctgaggttggctgggatggcctcaaac

SEQ ID NO: 18930 - DNA, 336 bp, Homo sapiens
ggtcagggaggtttggggctggatcaagcgcggtcttgcgggctggtgtaggaactttggcatttccttggaatcaagtgagagagcttgctaaggttttggtacagagcaaggacatgatctgacttagctttgatgagattgccctggcagctgtgtgagggctgaccacaggaggatgcagaaggaacatgggagcagtggtgacttccagagtgtagcagcaaggtggtgcacatgatcccatgtaagctgtgttttgaaggtagagctgacaaacgttgctgatggactgtgtatggagcacaagggaattaaaccatgacatggtgcatg

SEQ ID NO: 18931 - DNA, 341 bp, Homo sapiens
aatttatatttgaatttagttcattacttttataattataaaatactttgcacattttcttatgctattcagcttgatttggattttagtaactgcgcagaattttatctgttagaaatacccttccttctttgtttaacccttttacaataactgttcattctaaatgtggagctttgtgattatggggtggaaagtcagtggttgaagtacactataatttttttttctttccccaactctaaattttaggcaagtttctgcatattgttgtgaatgccaggaagtgagcattatataaggagtaactacttaaaattttcctgtgtcctaacaaagtg

SEQ ID NO: 18932 - DNA, 184 bp, Homo sapiens
tgacgaggcatttggctaccttaggagagtcatagtgactcccgccgcttacccgcgcttcattgaatttcttcactttgacattcagagcactgggcagaaatcacatcgcgtcaacacccgccgcgggccttcgcgatgctttgttttaattaaacagccggattccccgccgacgcggccg

SEQ ID NO: 18933 - DNA, 336 bp, Homo sapiens
tagagacaaggtttcaccatgttggtcaggctggtcttgaacccctgacctcagatgatccacctgcctcggcctcccaaagtgttggattacaggcgtgagcctccgcgcccggccaggtgaatctgttcttggaaaacagtctgctgtaataatatgagcgaaccgacactattaaggaccacttaatgagtttctgaacagatatttatcatgtcacagtttatttcatacatttattatggcaaataccaaagttttggaatataattgtttcattggaactactcatgcctttgataattgggtactttggcttggctcctaattgaatca

SEQ ID NO: 18934 - DNA, 336 bp, Homo sapiens
ggcacttctccctctaacactctcccctgttgaagctctttgtgacgggcgagctcaggccctgatgggtgacttcgcaggcgtagactttgtgtttctcgtagtctgctttgctcagcgtcagggtgctgctgaggctgtaggtgctgtccttgctgtcctgctctgtgacactctcctgggagttacccgattggagggcgttatccaccttccactgtactttggcctctctgggatagaagttattcagcaggcacacaacagaggcagttccagatttcaactgctcatcagatggcgggaagatgaagacagatggtgcagccacagttt

SEQ ID NO: 18935 - DNA, 342 bp, Homo sapiens
ggctaatgccctggcccacaagtatcactaagctcgctttcttgctgtccaatttctattaaaggttcctttgttccctaagtccaactactaaactgggggatattatgaagggccttgagcatctggaatatcgctgcctgtaattatggtaattagtaactcagtatagaaagttgtggcatccttcctgttgtagaggaaaggtatgtaaacttgtttcatcaaatgttggggttaactcaaagacaaatgagattttggaggatctgatagattgtgcagcatgtctttaagcacctgagacatttcctgtaagttcattctcttacataaggcacc

SEQ ID NO: 18936 - DNA, 339 bp, Homo sapiens
caaatctatgctaagcatataagacaatgactgaaagggaaaaaaatttttttaattacaaactcaattcatttggtgcatttcaaaggtgcaatacttttcttcatttatcagtgaaagaagttagaaattaacttcccaaaaaaatcagcaaatggcaaacaaatgtccttgaaagtcacagtcacatatagtgcgtcctaaaaaagaggaggggcaagatgggctccacccactttcatgagtttcatcaaatactggatctactcaagggtggagagaaaaggcaactttcaaaaaggagtatgttattaaatgaggcatttactatactccttg

SEQ ID NO: 18937 - DNA, 381 bp, Homo sapiens
aacattttttatttttcaaggcaaagtgcaaattcaactcctaatgaagctttctctgattcaccccagtaagaactgactactctttcttacgggctcccccagagtcaacgttttttaaactcaggctgaaacttattagtgggtcatgaaatccgtcgggtgggtcactggcagaaaaagaaataggaaatatcagaggacatcacacatagtgatggtgacaattactttttgaaacatttacttcagttaagagtgtatgcatatgtactagatggcaatgtaacatacaaaagttgaaaaacacaggtttggaggatcataatgtaaaacacatatcttaacatatcatggccagctgtatggccacgtagctct

SEQ ID NO: 18938 - DNA, 372 bp, Homo sapiens
tgccctctttggtcaccctgcctagctagaggatctgggaccccagccatgaggaccctccccatccttgctgccattctcctggcggccctgcaggcccacgctgagccactccaggcaagagctgatgaggctgctgcatgccccggagcagattgtggcggacattccagaactggttgtttcccttgcatgggacgaaagcttggctcctaagcatgcatgctcaaggaaaaacatggactgctattgcagataccagcgtgcattgcaggagaacgtcgctatggaacctgcatctaccagggaagactctgggcattctgctgctgagcttgcagaaaaagaaaaatgagctcaaaatttgctttg

SEQ ID NO: 18939 - DNA, 401 bp, Homo sapiens
  misc_feature (1)...(401): n = A,T,C or G
gtttgaaacgatgcccctgcaggttaggtattgtcgaggagctatgaatctagtttgaaagaaaagcatggtatgaaaaggtgtgggagatggagcatggaagtagagggtttgtgttggaaactgttgtagaagataagataatactggatgctagagtggggtgggtgaagctgatgcatctaatattgctttccacatctttgtaaaactaagatgtagtgagggaaatctccattgcttgcgctgcttacgcaaattttagttctgagtgccaaaaaagatggaaataatatttgagagtaggtgttatataaaagtttctgtggaatggatccgttttggtggatatcattatacaaccttcatactgtttataactgggaagtaagtatttcaan

SEQ ID NO: 18940 - DNA, 353 bp, Homo sapiens
cacatacataaggctccactgatttgctttgttaaaagaactctgttccatcacaggaataactctactaccttgaggcaggagaatcgcttgaactccggaggcataggttgccgtgagccgatatggtgccactacactccagcctgggccacatgagcgaaactacatctcaaacacataatggaataaacaaaaaggttcaagccacattgatacatatctggcctatcactttccatactgacgacgggaaaactaggacatgcacacaggggttgaagatggtcttttcctgcaaatacatttatttaacgttaaacagcagtagcaggcgtctctttttgactatg

SEQ ID NO: 18941 - DNA, 358 bp, Homo sapiens
ccaagggcaggtccagaaatgctgcctaagagcctaggcctaggctccctagagtcagggacctcaagagcccatttattgctctatcctaccatagatgagctggtacttaaggtgccaaagtcccctttacctttccctctgcttttctcaaacagaaggagtctttcaccatagccaccacagctgggaatgtgctgggtcgcctctgaagccagcacatctcagagcccacggccccacagtgtcctccctggctactgctgctggttattcagggcccaagggctctttagtcagtaggggatgaatgccgccaggactgggtccttcccttgaaggcggcagattccctttg

SEQ ID NO: 18942 - DNA, 352 bp, Homo sapiens
  misc_feature (1)...(352): n = A,T,C or G
gggagcttcagcttccgccaggcttttttgggcacttgctgccaccgatagtcccagttttgctgtgtggcagcctggcgtgaagcttccatgccttcccggctggaaaagcgtcggatatcccagagtttgatggtctggtctttagagttggagatcagataccgggcatcacccttgctgtcaatgaaggtgatgccatcctggtgtccagccagtgcacccacaggcttggggtcatcctcccgcatggtgcgtcgatcccacactttgcagatggcatcatctcccccagagaacaggatttgggagcttatatcagcaaaggccactgcattcacatcatcctcan

SEQ ID NO: 18943 - DNA, 377 bp, Homo sapiens
ttttaatgtttttgttttttatagagacaggtcactgtgttgcccagactggtcttgaacccctgtccttttcttacatcactgtctattctctcccctactgggctgggcactccttgcatcctcagagccttgcataatgcctgggacatacaacaggggcttagaaagtatttgttgaatgggccgggtgcggtggctcacgcctgtaatcccagaactttgggaggccgaggtgggtggatcacaagatcaggagatcgagaccatcctggcaaacacggcgaaaccccatctctactaaaaatacaaaaaatgagccaggcgtggtggcaggcgcctgtagtcccagctactcaggaggctgaggcaggagg

SEQ ID NO: 18944 - DNA, 237 bp, Homo sapiens
ctagcttctagaaattgatcatttacaggtgtcttattttctttcagatataggcatggaccaccaagctcttctaaaacaatttgatcacctagaccacctgaatcctgacaagtttgaatccacagatttagatatgctaatcaaagcggcaacaagtgatctggaacactatgacaagactcgtcatgaagaatttaaaaaatatgaaatgatgaaggaacgtcgacgcggccg

SEQ ID NO: 18945 - DNA, 384 bp, Homo sapiens
gaaacaacaataaaacagtatttgtggagattccatgaagagcataatgcaatctgtatatattatcattagtcagtaaatattaagagtgtctaatgtgtgtcttgccttaaaactgtagttctagaaattactgtcatgggcacttccctatgggtacaggttgagagcttgttcatgctagatgactaagcacgttttctaaaatgacccacgctgggttgaaccagagtggacctccttagctcacagcataacaagttgcaatctattcatattcattcataaaactgtgtttgaggaaaagagaaagatgcctagtgtaagaattatggaataccaaagattctttgttttcaccagaattcaagatggctcccagca

SEQ ID NO: 18946 - DNA, 384 bp, Homo sapiens
aagctcttcacctgtgcttctgcggttctccagcagggccatggtgtttcagacctccatgccaccgcacatgatgctccctctgcctgaaaagtctttccacagtccctgcttcacccccaagtctggcgacttcccacttagcctttcatacttagctcaggtatcaccactagatgggctttccctcatctagacccccagagttcccctattacagcacttactaaattttaattactatttataggtttgcttccatcattaagccccaaattccttggaagcatattctattcgataataatatagtaatcatgatagcagctaacatttattgagcactaactttatactaggcactatcctaagcaatttacattt

SEQ ID NO: 18947 - DNA, 384 bp, Homo sapiens
  misc_feature (1)...(384): n = A,T,C or G
gagaaatgaaaccatcactgtcgagtgatgatccatagtgggcacagatctttttctacaaaggctttgtgggccacaatgtctccaatatatttaatggcaaaaacagcaactacttttgcaccaacctaatagctacttaattgtgccactgggccgcaaaagcggccccaggtaaaacatcgatgaatgaacatggctgtgttccaatatagaatggtatttacaaaaacaggtagcccatgggcaataaagtttgcccacccttggtttagaatatggagtctggttgggtgcagtggctcacacctgaaatcccagcactctgggaggctgagggaggtagatcgcttgagtccaggagttcaagaacagcctgggcan

SEQ ID NO: 18948 - DNA, 377 bp, Homo sapiens
  misc_feature (1)...(377): n = A,T,C or G
cctgaagcttggagaagggacaggagtgcactgcaggcgggggtgtgaccacgtccgcacccctcccagagtgcgaggctgtgtctttttagtccatttcttcccccactgcatgctgggacactcatcatgtcttcagccctgtgtgtgtgtgtgagtgtgagagattgtgagtgagtgtgtgtgtgtaagggtgtgtgtaaagcgtgaatgtgtcagtgtgagagtgtgtgtatgcgtgtgagtgttgaatgtgtgtgtgagtgtgactcggctgagaggagacagcgcagctgggcaggtgatgcttggtgagtgtgatagtgtgatgtaatcaaaaacatactttggtctctggccctggctctgggcacacn

SEQ ID NO: 18949 - DNA, 381 bp, Homo sapiens
cccagctttacctgataccaaaatcagaaaaggagacaacaaaataagaaaactacaggctaatatcactgatgaatacagatgcaaaaattctcaaaaaaaatactagcccaactgaattcaacaacacattaaaaagatcattcaccataatcaagtgggattcatcccagacatgcaaggatggttcaacatacacaaatcaataaatgtaatacatcacattaacagaacgaagaacaaaaaccatatgatcattttgatacatgttaaaaaagcattcaataaaattcaacatcccttcatgataaaaaaaaaaaaaacctcaacaaaggggttacagagggactatacttcaaaataataagggccacatatgag

SEQ ID NO: 18950 - DNA, 334 bp, Homo sapiens
ctcgctactacattttctaatgtgaataacacaactgttacataaatagagtaaaaagaactcagtcaatgctttcctttaattctaaaaaatttgactaatccagtaacagaaactcaagaagctataaggataaaatcaccaattgttactttgtatcttaacttgtaagaatctctaggattgcccacaggatgaaatcacattctaaaattactacttgaatttcatttatatggattcattttcaaatataatgacctgacaaactagcatttttgttagtcttaactctaagagcacataatcaaaaatatcacctcttattatggag

SEQ ID NO: 18951 - DNA, 346 bp, Homo sapiens
atttcacagtttgccaggcatgatggctcacgcctgtaatctcagcactttgagaggccaaggtaggaggatcacttgagcccaggagtttgagatcagctagggcaacacggcaagaccccgtctctaaaaattaaaaattaaaaaaaaatttcatagctatttcttttcctttcctcatacactgtattccaggccttgctacttttcttgttgaactctcagactatcattgctatattggcctgatccagtgcctttggcctcagtagagtctttctcaggtctgcccctaaagttcatgatttgcatgtggactaatattatccttctttggagcctttaa

SEQ ID NO: 18952 - DNA, 348 bp, Homo sapiens
cgcacttataattttatacatttttctatttaaaaagcattacattttaaaatatgaacctgttttgacatttggcaaaaaggaaactgtacctatggttcaatttaaaacaaagaatcaacatggggagtttaccggaatgaggactgaaacacttatgagttatagcaattcaaggggcgtgtgagtgactctccctttctctgtcaatactctctcactctctctggctctctcacagacacagactctaacacacacagccatatgtgtaatcattttttagtacaaaatattccctgtagccagacatttatcttcagaataatcacaccacattacatgagt

SEQ ID NO: 18953 - DNA, 362 bp, Homo sapiens
tgcatcactacgtatcactttgaatctaccaaaatctgatttattttacttcagtgtatagaggtagccttcattttatacaaagatgtgtacctgagaagttgcataaaaactctggtaagaaatgatgcttcagccgggtacggtggctcacgcctatttgtttatattttgagacagggtctcactctgtcacccaggctggagtgcggtaccgtgatcatggctcactgcagcctcgacatcctgggctcaagagatcctcccacctcagccccctgagtggctgggaccacaggtgtgtgccaccatgcctggctaatgttttctttttgttgttgttgtagaaacaagatcttgcc

SEQ ID NO: 18954 - DNA, 340 bp, Homo sapiens
ctcccgggtagaagtcacttatgagacacaccagtgtggccttgttggcttgaagctcctcagaggagggcgggaacagagtgaccgagggggcagccttgggctgacctaggacggtcagcttggtccctccgccaaatatcacataagcactcaggctgttgtcatacgattggcagtaataatcagcctcatcctcagcctggagcccagtgatggccagggaggctgaggtgccagacctggagccagagaatcggtcagggacccctgagggccgattcttgttaccatagatgaggagtttgggggcttctcctggaagctgctgataccactg

SEQ ID NO: 18955 - DNA, 345 bp, Homo sapiens
tcaagcgtcttgctgaaaactcggcttccagcgatgatctcttggtggcagaggtggggatctcaaattatggtgacaagctgaacatggagctgagtgagaaatacaagctggacaaagagagctacccagtcttctacctcttccgggatggggactttgagaacccagtcccatacactggggcagttaaggttggagccatccagcgctggctgaaggggcaaggggtctacctaggtatgcctggttgcctgcctgtatacgacgccctggccggggagttcatcagggcctctggtgtggaggcccgccaggccctcttgaagcaggggcaagataacc

SEQ ID NO: 18956 - DNA, 347 bp, Homo sapiens
gttttaataaaactttatttacaaaggcaagccatatgctggatttggcctatgagctgtagtttgtccagtgggctggatcatcaacctccagaggaattaagactgataatgagagtcctgggtaactgtcagacaggacagatgcccacatgtactcagagtccacagacaaagaaaacgtcaatgggcatgggactcccggctgtacctcaggtgaatatcatgtattgatccgcactgagttgcttcacatttgggcaagactgttttcagacccaccggtaaggagaagcagggatttattacatgatagtaaatgattcccctaaactacacaaggacat

SEQ ID NO: 18957 - DNA, 347 bp, Homo sapiens
cagcatttgagtttcttctgggcacctgccactgtgcatgtgtgacctcaactgctttgtgcaccctgactggggggtaggtgctagcgttccaacattacagatgagaaaaccgaggcacacagaagaggtaacctgcccaaggtcacaggtgttaggtggcagagccaagatgttattgtcagtctgacttcaggtgcataaaacctgaggctgagcctccccatgagaggaaaaatgtgtttgtggtgtgacctcagttgccagggaacttgtgcaggaagccgggagagatggcacagacccacctgtgctcacagtacatgttaagaattcccaagtctcag

SEQ ID NO: 18958 - DNA, 347 bp, Homo sapiens
ggaaattaaagaagtaatcagatgttgattgaggttatctgcttcacttcaagcagaagcaaatcaagtggacttcccttgaagacagaaatttctctattgatagagctaagggtgtttcatgatgctgaattctttgtggctccttttcacataaaagtaggaagccattttccctggagtggaagggaggatgacttcccaggaatatgagctttgagccaaagaggcaggaactgggaggctctcagttacacttgagaaagaattatttctctcaatattgttcttcttttcctccagagccccagtgtgagcctgggtgcaagctctgataaattaattga

SEQ ID NO: 18959 - DNA, 154 bp, Homo sapiens
ggacagtgcaagactccatctcaaaataaaacaaaacaaaacaaaacaaaacccaacacaaaaacagacaataaaaacaaaaaaaaattgtgaatccataattaaaatcaatttggctataaacttaaattttagaagtcagtcgacgcggccg

SEQ ID NO: 18960 - DNA, 364 bp, Homo sapiens
caatggtcagctcaagtactggagatttaggctactggctgtgtaccggcatgggaagctgtcttcaactctttcacaactcacgccagaacagagaagcttgacagggcaggaaaagcgagcaactgcgtgtcaaacctgcaggtgaaacccctagtgtagaagagcaactatttatttgtcaacactacagattttgtttttaaaaattaagcttagtactaaaaagtcaaaatttttttgcatgatagaggagtgtaaataaagttccataaaccagtatacatatgcttatgagccaataatcttaaaaagacaaaaaaagctgcatggatcctaaatgactatgtaaatagatccactc

SEQ ID NO: 18961 - DNA, 102 bp, Homo sapiens
  misc_feature (1)...(102): n = A,T,C or G
atccgaatttaggagtgtcggncactctggtgtgtctagcaaggtagcagagggacattcacaaagaccggagaatacaaagatgttaaacagggtgaggag

SEQ ID NO: 18962 - DNA, 341 bp, Homo sapiens
ctcggatgtccccgcacacagccttccggtgagcggccgtgccgtcccctcctctctctaaggcattggggagcagagggcccataggcagcaccctgcaaaaaaaaaaaatgatctacgtgtgaggaaagggcaaggggctggatgcaggcaaaaaatgactttaaaaaaaaattctatgatcccttcctttagtatggagctcgattttccagctggcgctgggggagaaagtccttgaaaaactcatagacagaccaaaaaatggcgggggagggcatctggtaaatgacacgcccctggatgcctttgaagtacccggccaggccgttgagctggat

SEQ ID NO: 18963 - DNA, 333 bp, Homo sapiens
ctgatatgttcccagtcaacgccttcaaaaaaagagttactttttatttcctcaactccaggagctccaattctatgttcccattcacagcagaacctcaaaattagatccttggctttctcagagatgggaacttctggaggaaaagtcaaagtttctttccagttcatcaccttcttatatgtctcttgaggggtctcagaacagaaaggtgggtagcctgtaataaaaaaggaacttcggagcttttacactccagaactttgaatctgaccgagattactctccttaataaaattctatggctttttttttcttttttctttttttttc

SEQ ID NO: 18964 - DNA, 332 bp, Homo sapiens
  misc_feature (1)...(332): n = A,T,C or G
gtgaaatgaaagatatagatacaaaaattggtcaagtgtggtcccagctacttaggaggctgaggtggaaggatctcttgagtccaggaggtcgagggtgcagttagctgtgattgcgccactgaactccagcctgggcgacagagtgagaccctgtccaaaaaaagaaagaggtaggaatagagttttcaaggtcagaatttagaacagagggagccttgaaataaggctcaagatgaggaaacgaagaccctgatagttatgggatttattgctaggctttcaaaaggtcgacgcggtnnngtnttnnnntgtcttttgtcctattttta

SEQ ID NO: 18965 - DNA, 156 bp, Homo sapiens
tatcaacagaattgtatttgttgaatgggaggcacgagtcatgttagaaggccgattatggcagcacaagaggatgtgggggcacagagagtccaggaatatcatagagacagacctgtaacacttggtagccaggagttggagtcgacgcggccg

SEQ ID NO: 18966 - DNA, 343 bp, Homo sapiens
gtgcagaggtgcggcgtccagaacccggctcctgcagaggctctgggtggcagcagccctgttaccgcttagatggcgcgcaggacagagccccccgacgggggctggggatgggtggtggtgctctcagcgttcttccagtcggcgcttgtgtttggggtgctccgctcctttggggtcttcttcgtggagtttgtggcggcgtttgaggagcaggcagcgcgcgtctcctggatcgcctccataggaatcgcggtgcagcagtttgggagcccggtaggcagtgccctgagcacgaagttcgggcccaggcccgtggtgatgactggaggcatcttggctg

SEQ ID NO: 18967 - DNA, 343 bp, Homo sapiens
gtctgccgttactgccctgtggggcaaggtgaacgttgatgaatttggcggtgaagccctgggcatgctgctggtggtctacccttggacccagaggttctttgagtcctttggggatctgtccactcctgatgctggtatggtccaccctaatgtgaaggctcatggcacgaaagtgctcggcgcctttagtgatggtctggctcacctggacaacctctgggtctgctttgacacactgtactatctgcactgggaccagctgcacgtggatcctgagaacttcacgctcctgggcaacgtggtagactgtgcgctggcccatcactttggcaaagaattt

SEQ ID NO: 18968 - DNA, 335 bp, Homo sapiens
ctctgccttccaggttcaagcgattctcctgcctcagcctcccgattagctgggattacaggcgtacaccaccacaccccactaattttgattttttagtaaagacggggtttctccgtgttggtcaggctgtctccaacaccctaactcaggtgatctacctgcctcggcctcccaaagtgctgggattacgagcgtgagccactgcacctgcccttgtttttaactcctcttactataattcccagtcacgcagtttgtttttgactgtgatttatcctccataggttggggtgaaacacggcactctgtctgcaaactggcagcagagtttt

SEQ ID NO: 18969 - DNA, 382 bp, Homo sapiens
tacagatgctaccatggcatttgtaaactgtcctgacattggtaggagtgtcttttatcatgctaatgcattataactagcatataatgagcagaggggttgatcaaagatcactttcgttgccatcttggccaatgccaccatctttggtgggctttctttttttttcttctctgcatcctggattataagcaaggtctttatgacctgcatcttgtgataacagaactgccaacctcctatcttttcctgtgacttacaaagcctaacctgggaatacagcccagcaggtatcatcctcattttccccataccctattcgagatggagtcactcttgtaattttggcacagtggattggacaatcctcctactggttgtt

SEQ ID NO: 18970 - DNA, 223 bp, Homo sapiens
atgactacagaacttggcctgcagaaactgaaggagtctggaaagcagcacggctttgcctctttctctgattattattataagtggacctcggcggattcctgcaacatgagtggattgattaccatcgaggtactccttgtgatcgcctttgtagtctataagctgttcctgagagacggacaatattctcctccaccgtactctgaggtcgacgcggccg

SEQ ID NO: 18971 - DNA, 364 bp, Homo sapiens
atttttttttaaatgggtcctttgatatactttgacactgtcatacatgaagtatttaggagaaggaatttcaatgtaagcttgtgtgttagtttgcttgcattgctagaaaggaatccctgagactgggcaatttataaagaaaaaggtatattttgactcaacgtttctacaggctgtatagaaagcattgtgctgacatctgcttctggtgaggcctcaggaagcttgcagtcatggcagaaggcaaaggggaagccggtgtagcacatggtgcgaggagcaaggggtcaagccattcactaggggtctgcccccatgacccaaacaccacctacgaggccccaccccccacacttggggg

SEQ ID NO: 18972 - DNA, 351 bp, Homo sapiens
  misc_feature (1)...(351): n = A,T,C or G
cctctcgccacttccacccaccaaaccttcagtcatgaaaccactcctagtcccaagcttactgatgatgcagcaggttgccagagtaattcggttaatcacttaaccaaagggaagaaactagtttaacaattatctgaggctaatttctttctaaattattccagcacgcaaaagaaataagaagtagcctgaagaaaaatctgtgaaccaaaggtgtactaaatttttgttcttgacacaagatttttagttgactaaaacagaggttcaactttggtagtacacttctaaaaacaatcagacctaacattttaaactactgggtcgacgcgnnnnnnnnnnnnnnnn

SEQ ID NO: 18973 - DNA, 345 bp, Homo sapiens
caggacatggatgaaatactacgaatatgcacagtggggcagcgtgggggcttctcagtaatggagaacaggtggcgaaactttttttttttttgaccaaagcttaaaaattattgggcatatttcccccattcaatgcaaattagcgcggaaactttgtttggtgataaataaggagacctggaccaccgctttaggttttttccatatgctgggggaaaactttttataaggctttttttttcccccaattacgcttctataaagggggaaaacatgaaggagccttgagattctggaatctgcgctgacgccgccaaaaattttgatttataaaacgaaagg

SEQ ID NO: 18974 - DNA, 404 bp, Homo sapiens
  misc_feature (1)...(404): n = A,T,C or G
gtcattaagctatgacagatgaatggggccatcttcacagcaggagcagtggacttatgaaagcaaacacaggaaacaggggaagatgcacatgtattaagtcacgattaacagctgggcgcggtggctcaggcttgtaatcccagcactttgggaggccgaggcaggtggatcacttaagcccaggagttgggtaatggccgacacagcatggggaaagcccatctctacaaaaaaaaaaaaaaaaaaatttagcggggagggggggggaccacccgcagcatcccaattgggaaacccgggggagaagaaggccctaacccccggaggtgaaggttgattagattgttattggtaaacgggcgcggaaattccaaatttaaaaatggaagatacctgaaaan

SEQ ID NO: 18975 - DNA, 396 bp, Homo sapiens
ttcaatctatcaccaaagtccttcaatcctaccctcataacataagcagaatgtgactactcttattcctctcctccatcaccacctggtcccagcaaccaccgaatgcatccagattactacaagagcctcccctaactgacctcttataccgctgcttctacccctgctcccctacagtctttccagagaagcaacatgaccttttgaaaatacaagttcaatcatgttcaaacccttgctcaaaccctccagaggttgccatcatgctctgaataaaaccctgatatggcctaccaggctctgcacgttctggcccctggctgtcccttggactcatctctcaccagaacaccagctcagtccccacagacaccaggcccgcccactctcacc

SEQ ID NO: 18976 - DNA, 405 bp, Homo sapiens
tgaaatcccagctacgcaggaggctgaggcaggagaatcgctcgaacccgggaggcagaagttgcagtgagccaaagtggcgccactgcactccagcctgggcgacagagcgagactccgtctcaaaaaaaaaaaaaaaaaaaaaaattccctcctctttaaaaaaaaaatggcccaaaaaatttctaaacctctttttgaaaaaaaaaagggaaaggaaaagggttccccaaaaaaaatttttttttaaattttggggttgggaaaccccccttttttatccctttggaaaaattttttttacttttaaggctttataaaaaaagggcaatccccggttaaaaacccggggggggcgggccccaggggcccacgctttggtttggtttggtttggtttccaaat

SEQ ID NO: 18977 - DNA, 402 bp, Homo sapiens
gagaaatctgctataaacctttactttggtcctccataaaacatggcctctggctctgactgttcagaggagcatattttaccacttgatttatgagcacttctggttcatgagctcatgccggtcttagagcatgactacttcatgcctcttgagctcacgggtcgaggagcttcttagatcatcaagtttccataccatttggacatttgttcatcatctcaaaagactgttttctgttctttgcacactttccttagaactctccaaatccatgggagttatagacctaccataggttctcttaaagctcacaggggcttgcttttttttttttttttttttttttttgaaaaaaaatttttttttttcccccggggggggggggggggggccattccc

SEQ ID NO: 18978 - DNA, 401 bp, Homo sapiens
  misc_feature (1)...(401): n = A,T,C or G
aagttgcttatttgtagcctccttttgaggctacaaggctagtccatatcaaagcattcattcatcctgtagaccgataggtatggaggggaagtattattggagagacctcagggttttctcacctgagaagggagagagccctggggtggtcagagctgggccctgagtggtgggatttagaaagaagggaagaggggagggcttggaagataggagaaacagcatgaacagcagcagggggaatgggtgagtgtcctcctgaaaggactgtggagatggccgtggagcctcttcttgcccacttcctgagatggtcatggcttagtgctagagacttttattccttgggcaatgtagacccagctctatgggttccctggtttttccttctcttcctn

SEQ ID NO: 18979 - DNA, 358 bp, Homo sapiens
cacaacattgctttgattatcacataaatgctggtccattgccttctctatctattcaaatctttaagcattctttgagattcaactcaattctccttttcaaactaggccatttaaactacatcagttccattttgatttttttgctttgagtctacagactcaaaaacaaaaacttaaaaacttattttttaagttttctgctactctcacctcttcaacactcacatacacgcattcataataagatggcagaatgttcaaggataaaatgatttatagaactgaaaagttaggttttgatcttgttgctgtcaagatgactacctacctgatctcaggtaattaattatgtagc

SEQ ID NO: 18980 - DNA, 200 bp, Homo sapiens
ctttcttttatttctccttcctgggtagcactttatgagatcagaaaaataaggtgctaaccaggaaggagaaataaaagaaagactatatcatgagatttgcaaataggaactaggctaggtgtaaaagtgagagaaagtgaacattacctttggtgagtggcttctggggaaatggctgtgtgaggtcgacgcggccg

SEQ ID NO: 18981 - DNA, 373 bp, Homo sapiens
  misc_feature (1)...(373): n = A,T,C or G
cgacgggcatgtgcccacatgacattgccaccactctgcagcacctccacatgatcgacaagagagatggcagatttgtcatcattagacgggaaaagttgatattgagccacatggaaaagctgaaaacctgttccagagccaatgaacttgatccagacagtctgaggtggaccccaattttaatttctaatgctgcagtgtctgaagaagagcgagaagctgagaaagaggctgagcggctaatggaacaagctagctgctgggagaaggaggaacaagaaatcctgtcaactagagctaacagtaggcaatcacctgcaaaagtacaatcgaaaaataaatatttgcattccccggagaggcgggccgn

SEQ ID NO: 18982 - DNA, 347 bp, Homo sapiens
tcctggtaaaacaaaaggaaaacatttttgataaatgtacccaaaagtctcaaaagggctacgctggtcttctgaacggaaaccaaatgaggtctccccaggctcatgtcatgagtctcagggaaggtgtgtcctagaccgtggccttgggcctgcccaggccgaggctgccgtcactgcagatcctgcaggttgatagtgcttcctgggaactgggtggcctccggtccagcagggcctccagatgaggggagcacctcctgcaaaaccaagcattgtcatgaagagggaggagggaggggagccacaggatccctctgcctcgtcgacgcggccgcgaattccag

SEQ ID NO: 18983 - DNA, 346 bp, Homo sapiens
tttgtgattccaattctttgtaattgtcttcagagcagccctactagcacataccgcgtggtgtttgtatttctgtgaacacacagccagtccgtttctaggctttgtttctctgtgtgcttagttttaaagacaactttgaagtaaacaatgaaataaaagatgtcactaaaacctctgaggctcctgagcacattttgctgatacagtctgtggggcttgaggagaccgcatgtattggtctttcttttgtttttcttctgagttctcaactgcggagagcacctgaaccccctttcctttttgaccgcaggctgcactttgggccccagccagccctttttct

SEQ ID NO: 18984 - DNA, 357 bp, Homo sapiens
  misc_feature (1)...(357): n = A,T,C or G
cctctccctgtctgtgggtaaatgagtgccagggccggcaagcccccgctccccgggctctcggggtcgcgcgaggatgcttggcacgtaccccgtctacatacttcccaggcacccagcatggaaataaagcacccaccactgccctgggaaaaaagtcgacgcggtttnttttttgatgtaaaatatattagttgttaatcgttttcagaaagtggggggttatgggaatttggtgttgtacttattttgtgagtttgtctgggttctataatgtttttacttatctggtacgtaatatatgaatattatctatgtttatcgattatacaacattttgtgctcgttttgtatatg

SEQ ID NO: 18985 - DNA, 360 bp, Homo sapiens
caggattattttctttcttttataaatattcagtctgtctttggtggtgaggttcttataggattttaccactaagcatctgccatcgtgaatttcattatttctaccccgtccgtcttctccaaatcaaaatctatagactgaaatttttgtctaaattaaattttactttatatagtctttgctggggatagatatttttcttttttctttttggcttttgtagagacagggtctcactatgtttcccaggctgggctcgaactcctggcttcaaaccatcctcctgcctcaacctaccaagcactgatattacaggcatgcgctaccacacctgacttggggctagttttaatttgg

SEQ ID NO: 18986 - DNA, 353 bp, Homo sapiens
tgtttattaagggaatacattaatgccaggctctgctgtgtgctgtgagtgtggaaagaatctgtgagacctgccttcaaggcacctctgtggagccacgagggaggcatttaaaactctgaattctgagaattctagttgatcctctttgaaggatgcttttcctctcgtatttctgaagatattgatcttctgtatttgaaagtccccttgtcttagctcttgttgccatattgtttgggagtggggggagttggggttaaggttgggtgacttgccttggctggtctgccccaaacccctgcctgtctgtttgggaatctgaggggaaagaggtgggggtagggatgggg

SEQ ID NO: 18987 - DNA, 184 bp, Homo sapiens
cagacccttccccggagcctgacggacccagtgcatggcataatcttcaaatctgaatccagaagctgcacaggagagtctcagggatcccccaggctgtaccacgactcccccagactccaccagctgcacttcacactggacaccttttagaatagcaacaaggaaaacgtcgacgcggccg

SEQ ID NO: 18988 - DNA, 310 bp, Homo sapiens
ctgcaacctccgcctcctaggttcaagcaattctcgtgccttagcctcccaagtaggtgagactacaggcgcgcactgccatgcctggctaattttttgtatttcaggagagacggtttcaccatgttgcccaggctggtcttgaactcctgagctcaggcaatccacctgccttggcctcccaaagtgctaggattataggcatgagctaccgtgcccggcacataatctctttttttaaattacatttagtggttggtgtgtatagaaatgcagctgatttttataagatgctttgtcgacgcggccg

SEQ ID NO: 18989 - DNA, 245 bp, Homo sapiens
gcttgagttacagaaggcataagtagtttgaagaatgcagcagcctttttgtaaacttcccagatatcaaaatagactttgatatataaatggttttctgagatgacactgcctctatttctataaccatttcacctggactatctaatcagtcctatgaatgtatccctaaatgtggttattgaaaacctaatagctgcctcatgacaagtacatgttatttaaggaggaagtcgacgcggccg

SEQ ID NO: 18990 - DNA, 335 bp, Homo sapiens
ctgtgatttgagttggggtctcactcttgttcgcccaggctggagtgcagcagtgcattctcagctcattacagcctctgcctcttgggttcaagcgattctcccacctcagcctcccaagtagctgggactataggtgcccaccaccacgcacggctaatttctgtattttttggtagagacggggtttcaccattttggccaggctaggaggtcattgctttctgagcatgtggcaagatttctcagaagctgctttaggaaaatgctgagcagatgtgagctgacagggctgcctgtcacccaacctagggtacagcccctggctgtcactt

SEQ ID NO: 18991 - DNA, 328 bp, Homo sapiens
ttttttttgatgttaatgactttactttgagatatgatggaaaaatattacaggtacacatggaaaagacatgatcaccaagtgaaaacaatctaaccagaaagctttaacgtctgtcagttaagctgaagctgaaattctgggagcatgacatgctgcagggccaaaaggaatggataattagtattcctctccttcttcctcaccctctccttcaacagaatccacaccaacctcctcataatccttctcaagggcagccatattttcacgggcctctgaaaactcgcctttctccatcccctcacccacgtaccagagaacaaag

SEQ ID NO: 18992 - DNA, 385 bp, Homo sapiens
  misc_feature (1)...(385): n = A,T,C or G
tgtatattaaacaagcagaacatgtcttacctgtgcctggcacaaagctagcgttcggagatagtaaaccctgaaatgaatattattattccctttctcaaggagataccctttctgatatgaacatgcattcataacccctttaataaaagcaaaagtttgagcagcaagagccctactcctagaattgcatctctagcgaatcctgaagacctggcttctaacggtaaacgcatggtctatcgtatggagaggaccctacatggcctggagccacacccctctgacactccactacctcactgcgtgaattaggctaagataaaccacctctatgtgcctgaaattccttttctaaaaacggtgattacagttggaccacccn

SEQ ID NO: 18993 - DNA, 388 bp, Homo sapiens
agatcccaagctttatgggacttttggaaagggatggggctgtgattaggacctttgaacagaggtcatgttcctgccgggaaactggaggataaattttattattgaatggatctctcagaccacaagatgattctaagtcatctgacatccttatcctctaaatcaaaaacagggggccgggtgtggtggctcacacctgtaatcccagcactttgggaggcccaggcgggtggatcacttgtggtcaggagttcaaaaccaacctgaccaacatggtaaaacctcatctgtactaaatataccaaaattagcaggctatggtggcatgtgtccataatcccagctacttggtatgctgaggcaggagaattgcttgaacccagga

SEQ ID NO: 18994 - DNA, 389 bp, Homo sapiens
  misc_feature (1)...(389): n = A,T,C or G
ccgccttttggggcactatattcctaaggttgggctttaagattttttaacaggaaacccaggaatttctgaaaaacaaggcctttttcacattaccaagaactcacagctactctgtgaatgccctaggtatttgactcaaatttttcactcaatcttattaggtatatttctggattatttgaatctacaaaccaaccctagaatatcatgctttccagtcacacctgtggcacaatgagcagtgtacgaccatgccccatcacaatccaacccttggtaccctacattgtgacacctcctagaaaggtattaaagctgagccaattaatctatattttgatttcagactaagattaataaatgcttttaaataaagtaacttttan

SEQ ID NO: 18995 - DNA, 380 bp, Homo sapiens
  misc_feature (1)...(380): n = A,T,C or G
gggaaacagagtttttgactttaaaaaacagatgagttgttttcataagtagactccactggggtagaggtattcaccttaaaacatagggtgagtagatgcttttttaggcctttttgtgtatatgtacgttgtttgtttttttccttttgtttctagcctgttcagtgtacagtttattcaaggctacatgcttttctttaatgcttctggctatgcattttctctttttacatataggatttgggattgggggtgggtnttggngtttgnttggggacttatttantagtattgagtctcttatagccctactcttaagccttcaatactgtccactctttatattcctttacttgcagaatttataaaagcccccc

SEQ ID NO: 18996 - DNA, 382 bp, Homo sapiens
tgctgatcgagcgcccgttctgtggctgtggatctgaccagagcaggtcacacatgggccctgaatctgggggttgtcgattccgctcaattttccggatgtcatccagggtgacaccgtcttcactgaacaggcctccgtgcatgatcagcactttgccgttgatgcactgggccaacgggagccactcgaacacctcgctaaagagctcgtacatctgggctgtgtacttggccttcacctcaccctcgaaaccgtagatctggttcatgttgtctgtctcgtggttgcctcgaaggaggtgaaagtgatctgggtacaggagcttgaagccgaaaagggtgaggatcacttctacagagaaggagcctcgggtcgacgc

SEQ ID NO: 18997 - DNA, 222 bp, Homo sapiens
cttagttgagagcatttgctttcatcatggttcaggagagacactgaccactcagaatttggcaacagtatcttgccagtgatgttaagtataactttgtagaaaaatgctaatgaaaaacttactacaatgtgtctgctatcagaactcagcacttcccaatagcaatgttgctagtgtttattctcctttaactacttggtcaaaaagtcgacgcggccg

SEQ ID NO: 18998 - DNA, 364 bp, Homo sapiens
  misc_feature (1)...(364): n = A,T,C or G
ggtatttctataacagatattattcagtcttatttcctaagattttgttgtaacttaaggtatcttgctacagtagacagaattggtaatagcaacttttaaaattgtcattagttctgcaatattagctgaaatgtagtacagaaaagaatgtacatttagacatttgggttcagttgcttgtagtctgtaaatttaaaacagcttaatttggtacaggttacacatatggccatttatgtaaagtccctctaagactacatactttttgtttaaaacaaaattggaatttgttttcccttcttggaagggaacattgatatttaacagagtttttagagattgtcatctcatatatataaan

SEQ ID NO: 18999 - DNA, 352 bp, Homo sapiens
  misc_feature (1)...(352): n = A,T,C or G
aaattgttgctaattttagaacacatatttttattctgataatgatttaatttttttacttagtacttcagtagaaaacatgtgaatagattgtatgccccatatcagtatttaaaaaaaaaacctgaacaacattcttttaaatgtccatttaacaaaatatatgttaacggctattgttttatcatgattaaattggtatcaaattaataggcataagggaaaaaactaatcacttactagtcatttagaaaatgcagtaacatcatgcattatgtattactaagaaagttctcacttaacataagcagtagatgaggagaacagtatcatgaaaattctaaatatatcn

SEQ ID NO: 19000 - DNA, 362 bp, Homo sapiens
gaagaaaactctgagctctaaatgagtctcttcttataccaattcctatgactactgatcgagccaattttaatagtttcctgtatgtttaaggtctgttgcttgcaaaccaaggcctggatggttataaaacgtactggtcagtgaattatactgggagttctctgcaacacaattcatttaggagttgcaccttggactcactcagataaatataggtttcagaagtaatggaagctcttcatcacaaaaatctaatacaatcttggagtatgtgcccaagaatggtatcaaagcaagggtccaataaacttgactgacttaaacctgtcattgtgttgcaacattcaccatcctaaggg

SEQ ID NO: 19001 - DNA, 344 bp, Homo sapiens
ggttggtcaatcgcttgaagaatatcactctggatgatgccagtgctcctcgcctaatggttcttcgtcagccaaggggaccagataactcaatggggtttggtgcagaaagaaagatccgtcaagctggtgtcattgactaaccacatccacaaagcacaccattaatccactatgatcaagttggggggaatctggtgaagggttctgaatatctccctcttcatccctcccgaaatctggaatacttattctattgagctattacaccagttttaacaccttcctcgtgttatgtttaaaaaaataaataaatttaagaaaaccattttaaataatgcaca

SEQ ID NO: 19002 - DNA, 330 bp, Homo sapiens
tcttttatttcagtgggttagctgtgtgtgacatgttgggcaattactcagctgttttaacagcttccagatatgcagtatggtgcctgtactactcaaaagttgattttggtttaattcatctttaaggtacctcccagctctaaaactatgattctaggctgtgtaatggggttattcctactttattctctttccttttttaagggttcattttatacttaataagcatccatttcttgggtcacctacagtctttgttctcctaaggattaaaatagaaaattcatacataacaagcaaatgatgacattttcctaaatgctcctt

SEQ ID NO: 19003 - DNA, 335 bp, Homo sapiens
caaactttttttctggacagcgtaaaaacagatctattactggggccctagccccaggtaaaaataaaaccataaatccttagtgtgcctgtcattccttaacacataacatatagattataaaattccccagagaacatcagaaaaatttaggccttaccattaagactaaacctctgagctaattactggggaactttaacatacaggaaagtatttgtcgccttgacagctggatctcaatgaattgatcttaattaattaagcaagtatcattttaagggcttcttgctttctctccattattttggatccacctacgttgacggtccttt

SEQ ID NO: 19004 - DNA, 333 bp, Homo sapiens
tccgtgagccactgcacccggccaagattctctgtttttaaggagaacaatagacactccagactagatgggggaggacgtgggttgaaaaactacctattgggtactgttctccctgcctgggggcagtatacccatgtaacctgcacatgtagcccctgtatctaaaataaaagttgaaattgaaaagaaagaaaaaatgcttttgtggcacacgttctcaggattgcctggggctgtaccacggggaaaaaattagaaaaaaatagtttcatgttaaaaaaaacttttttgttgttgttgctgtttcctctatccctcccttcttttttg

SEQ ID NO: 19005 - DNA, 335 bp, Homo sapiens
tttgaccccggcacaagtaacacttgtttaaaaaagggggtgggggggggacgcccaagtgcgcgacttttctattttattaaaaataacataaagacaactgctcaagtttttttctcccaactcccgggcgtgaaactaagtactaaccctagatatgtatatatacacaaacacacacatgcacacagatgtagctttgtaaaactacggtagctcacacctgtaatcccagaacttttgtaggccaatgcaggcggatctgttgaggtcaggagttcaagaccagcatggccaacacggtgaaaccctgtctctattaaaaatacaaaatg

SEQ ID NO: 19006 - DNA, 318 bp, Homo sapiens
cctgacaaagcctacggaatctgggacagaagacaaaaagggaagggactctaaggagtcagaaggaaaaacagaaaggacagagagcctaaggtcacaaaatggtggagaaaactctgtgtgaagttgtccttccacatcctctactgctgcattaaatacagctgcagctgccaacccattagctcttaacccacaagtatcactaagctcgctttcttgctgtccaatttctattaaaggttcctttgttccctagtccaactactaaactgggggatattatgaagggccttgagcatctggattctgcctaat

SEQ ID NO: 19007 - DNA, 314 bp, Homo sapiens
tttgttttttagacgttcaatccgcacgtccacggaggatatgattggaatcttcgaggggagcatatagatgacagcgatgatgatctggatgacaaaccaagccctgtcataaaatagcgctcacccagacctcagagcttctgcctctcctccagcatctccccccaagacaagctggcactgccaggattcatcactccaagggacaaacagcggctctcctatggagccttctccaaccagatctttgttttcacaagcacagactcgcccacatcaccaaccacggaggctccccgtcgacgcggccg

SEQ ID NO: 19008 - DNA, 300 bp, Homo sapiens
gttcaatccacacgtccacgtagaatatgagtggaatcttcgacaggaggagatagatgagagcgatgatgatctggatgacaaaccaagccctgtcaagaaagagcgctcacccagacctcagagcttctgccactcctccagcatctccccccaggacaagctggcactgccaggattcagcactccaagggacaaacagcggctctcctatggagccttcaccaaccagatcttcgtttccacaagcacagactcgcccacatcaccaaccacggaggctccccgtcgacgcggccg

SEQ ID NO: 19009 - DNA, 342 bp, Homo sapiens
ttttttttttaaacacaaaaccagaatttattgaaagtaggtaccagctctgattaaaacaatcagctcaaagataccattactcaaaacaatatatacaaaaatctcagggaaaggagaataaaagaacttaaaagaatacaacttgaacaggactgttttactaaaagggtcttgttgcaaaataataacaaataccacagagagccctacatgagaaagccatgtgccttcaagcctggggatgaggactctagttctcaaattcttaaaacatagcacatgattctccagggcagagaggctggctggagaatgaggacctcactgctgactctgctt

SEQ ID NO: 19010 - DNA, 337 bp, Homo sapiens
attttatctagaaggaaagaagaggccaaagctgtgattgccaaagaaatagcagtcactcatatcaaccaccatagggggatgtttggtgatttttgtggctatgaccatgttcctgtttttgtgttgagacatcattacagaaagggcttgctttgttttgctctagcacagtcagtgtggccttatctgataccgatgttctgtgaaattctctatgttgatcaggagaacacaaaaaccttgctgtgagggccaggccaactcctgtcagggttgtttactctttctcacaacagagaccttgacatgaacacatctgatggaaagatcagac

SEQ ID NO: 19011 - DNA, 362 bp, Homo sapiens
gtgaaaccccatctctagtaaaaatacaaaaattagctgggcgtggtgcacacgcctgtaatcccagctactcggggggctgagacagaagaatctcttgaacctgggaggtggaggttgcagtgagccaagatcacaccactgcactgtagcctgggctatagagcgaggatccgtctctcaaaacgaaatgaaaaaaggaatattttataaaaaaaaaggggctccccaaaaagactcttttttgcttggccccaaaaaaaaatcccggggaaatgaaaaaaaaccccggcgttttttgggggtctttgaggggggtaatttttaccaaagggtatttaacgggggatttaaaaaagggg

SEQ ID NO: 19012 - DNA, 360 bp, Homo sapiens
ctcatgaaggacttacagaaaatagagagccagattctgttgatgagaaaattactttcccttctgacattgatcctcaagttttctatgaactaccagaagcagtacaaaaggaactgctggcagagtggaagagagcaggatcagatttccacattggacataaataagcatattcagcaaaaaggtctgaaaagcaagggaataccattattttcggattagcggtttattaagctcttctatattaaacactaatagatattcaataacggagtaaactgttccagataaagcaagaatagttgcaagaagtaaattctggcacaaagcgtaaaaatataacagaagaaataatgt

SEQ ID NO: 19013 - DNA, 347 bp, Homo sapiens
gctacacttgctttccttagtgtctgagagtcttactgaactcttagcttcatcttcacctctgcaatgtttgggaaggcctctgaccctaatttacggaagctctttttctgagagttttgtttctgcaaaagaggagggtggggattcccagccctggaccctgtcagcacccttcaagggttttgctaggagtgggagcccctgggcccactcccccaccatgctaatgtcctcagtgtccgtgtacccctgtgctcctgacaggctctgtctagcacctccaacaccttggcttggatcccagctcctcacatgctccctgggcacacctgctctccggtgca

SEQ ID NO: 19014 - DNA, 353 bp, Homo sapiens
cacccactccaccttactaccagacaaccttagccaaaccatttacccaaataaagtataggcgatagaaattgaaacctggcgcaatagatatagtaccgcaagggatacgtctttggctccatgttgcccactttgggatgctatcccattcatggaaacctgggccttttctgcgtttaggttttcatgcataaggacgccataaaagggctcacaggctctctcgctttggttactactgagaggaaaacggttgcggaaatgccgaatcatgatcgatgtacattttttgagagatggctaggccttgtttgcacaggaatactgtggaaacacttagccagtgatgg

SEQ ID NO: 19015 - DNA, 376 bp, Homo sapiens
cccagaacaatatataatacaagacaatacactctagagctcttacttttaagcttgaagtacctggaatttctagtgctgatggtaatcatacatatgtaagacactaaaagggcaagtgatgctaaaggtcccaaaattggccacttcgtgaacacagtaaatgaatttgcatcaaaaatcactgagaggctgggcacagtggctcacaccggtaatcccagcactttgggaggctgacgtgcgtggatcacgaggacaggagctcgagaccagcctggccaacagagtgaaacctcatctctattaaaaatacaaaaattagctgggtgtggtggtgggcacctgtaatcccagctacttgggaggctgaggc

SEQ ID NO: 19016 - DNA, 314 bp, Homo sapiens
tggtggggtgtctcaatttaagactataaaggcaggctgattgcggtggctcacacctataatcccagcactttgggaggctgaggtgggcgaactacctcaggctaccgagacgctaacagtctggccatgatagagaaagcctagcctctataatagttcttgatcattcaagcgtgggactgcatgcatgctgtcccacctactgaggaggcttgtccacgagaaccggtcttacccatgtgggaaacgttgaggcgggctgacatcgcacgactagtctccgtgcggggcgagcagagacacactccatc

SEQ ID NO: 19017 - DNA, 275 bp, Homo sapiens
ttttaaagcaagcgtttgggcagaaaggagtctctggtgctctgtgtgcttttgaaacacatgggcggcatggcgtgtgtgcatctgcgttgggcgagttgcttagcctgtcttgtagcactttcccgatggtgtgtgtagtttttctttattactgcatattatttcacagtagggacagatatgtttttatctagctactgtcctgttgatggagatgatgttttctttgtagtttttaatcttatgaacagtattaaaagtcgacgcggccg

SEQ ID NO: 19018 - DNA, 357 bp, Homo sapiens
gttatgttctcggccagatccaaacatcctgcccaacattgtatttggctgtgcagtaaaaatggatgggtctacaacaaatctagtgttatccactattagtgtcactcgttctgacgttcttatattccgagctccttcttttgcattttcatatacaaacaccatctccccagctgtcttacagctaccatctgaacttgactgactactgtttctgctgctgttcccagcactgctaatggaaccatttggggatgctttttgaggacgcggactgcttggacgagaggaactgtgatctttttctcgttcaacatggtgctgtcgtgttggagaagtcacatttctaataca

SEQ ID NO: 19019 - DNA, 154 bp, Homo sapiens
ctttatttacaagaggagaagggttggccctgcctggggcctggctgggctatatacagggtcagggagaggtgggggggatgcagccatttaaattacaaaagaatggggcactcctaggttcaggttgtgagtctgtccgtcgacgcggccg

SEQ ID NO: 19020 - DNA, 395 bp, Homo sapiens
ctccatgtattcaccttccatttattccttattcttattctaccaccgttctgcttccgcatttatggctctcagaaaactgcagtctcaaaagtcgcagtggctccaaacctatctatgcagctttcctttttcttggctttttttttttttttttttttaaaaaggggacccccatttttggaaggcaaaccggcttttaaatttttgggactttttttttaagcccctttaaggggtcccccccccccaggactttggccctggtttaaaagtggaacctcccctattttcctcggggcccttttttttaacaattttggtttcccccaaaaacgggttccttttataaggaaagctaaattaacccccttcgggcgaacgcgcccgaaatt

SEQ ID NO: 19021 - DNA, 309 bp, Homo sapiens
tgagcacctactacatgcaaggcactgtactaggcgtgagaagcatatagaggcaagaaagagataccaagatgccatctgtgtcctggttagcagagctggaccagtggtgccttggagggataagccagctgcagctgggctgtgtggttgacttatgggcccagccagccaggctcaggccatggctcccctttttcttcctcaccctgatttcttgcttattcactgaagttctcctgaagaggaactgggcctgttgccctttctgtaccatttatttgctcccaatgtttgtcgacgcggccg

SEQ ID NO: 19022 - DNA, 357 bp, Homo sapiens
  misc_feature (1)...(357): n = A,T,C or G
gtcgacgcggccgcggccctgatgagacttcaggacacatacaggctggacccaggcacaatttccagaggggaacttccaggaaccatgtaccaggcaatgctgattgtggatgactgctttgggatgggccgttcggcctacaatgaaggggactattatcatacggaggcgcggatggagcaggtgcttaagcagtttgatgccggggaggaggccgcctcatccaaaacacaggtgctggactacctcaggttgctgtcttccagttgggtgatctgcaccgtgccctggagctcacccgccgactgctcttccttgacccaagccacgaacgagctggagggaatctgcggn

SEQ ID NO: 19023 - DNA, 397 bp, Homo sapiens
  misc_feature (1)...(397): n = A,T,C or G
gttaatttctcctctagttattgctttcattcctccagttcagagccaagcttcttgaaggagctgtctacatgtgctctctccactttttccgcctatttacaactcaacccactatagtctgacatatgccagcaccaagctaacaaactgatcttagaaaggacatcagtgatttgccttaatgattttaaatctaacagccattctataggaatcttgaatgcccactcagtagcacctaacttcagagcactgaaatagtagnctctttcattgcttctttctaactgcattctcctgattttcttttattttctctggacatttcttttcttggtataacttccccatatatagggatgtctttcttagctctcttctcttacccctctan

SEQ ID NO: 19024 - DNA, 379 bp, Homo sapiens
tgcttttctccggtgtaggacagagtgaagcttacagctctccctttcctttcaagagaacacatgaatgtacattgtctagtttctcacgtgtggattactcttgaatttcacattttcttcatgtgacatacttgacatacttctgccctagcatattccagaagttctaattactgcaattaactgggatgctttctaagcaactgcagcactatcaggaacatgtgagcccactgtctatgaaacagtactgaaaaaccaaaaggaagtgctctgcaaagaatccatgcctctgcccttggccgtctttctttgggaaaataacactgccctccaaagtcccgaagggcgtccttctatcttcttctcatttgcg

SEQ ID NO: 19025 - DNA, 233 bp, Homo sapiens
tgttttgcccaccagatcatggcccacatggaggcccacctgcctctgtctcactgaactagaagccgagcctagaaactaacacagccatcaagggaatgacttgggcggccttgggaaatcgatgagaaattgaacttcagggagggtggtcattgcctagaggtgctcattcatttaacagagcttccttaggttgatgctggaggcagaatcccgggtcgacgcggccg

SEQ ID NO: 19026 - DNA, 233 bp, Homo sapiens
ttttgattttgtgcagttcaataattttaattctgtatactggaaaggaagagcctttttgtatgtactttagtgttggaattcttttttttttttttcttttttttttttgggaaagggatttttaatcaacttcatggagggtggtcattgcctacaggacctcattcattgagcagagcttccttaggtctatgctgtatgcaaaatccccgctcgacgcgggctttaac

SEQ ID NO: 19027 - DNA, 376 bp, Homo sapiens
gtttcttaaaggttagttgcagtctggaatctgaaaccctggtaatggactctttatgctctgttacattaaaattcattgctctttcttgaactttgaatggctctttaatccatgcctgattttgtaacatgcactgccatttggaaaatattgttttccaaatattgaatgttcaataagttatgcagatcttccaaaaattttttttttgaggcatagtcttgctctgtcacccagtctggagtccagtggcatgatctctgctcactgccacccctgcctctgggttcaggggattctcctgcctcagcatcctgaatagagtagctgggattgcaggtgtgcaccaccatgcctggctaatttttgtgtg

SEQ ID NO: 19028 - DNA, 381 bp, Homo sapiens
cacccttgctgtgttgcccaggctggagtgtaggggcttattcttggctcactgcaacctccacctcctggattcaagcaattctcatgcttcagcctctctagtagctgggattacaggcgtgcaccaccctgcctggctaatttttgtacttttagtacagaccaggtttcaccatgttggccaggctgctcttgaactcctggcttcatgtgatccacccaccttggtctcccaaagtgctgggattataggcgtgagccactgcacctggctgtattttttattttattcattgaattgatcagctgcaggatttctatttgactctttttcatgatatttatctccgtcgaatttctaatttatatcacgattttg

SEQ ID NO: 19029 - DNA, 379 bp, Homo sapiens
ccaggaataaaaaggatactcactgttaccattctggctctctgtcttccaagccctgggaatgcacaggcacagtgcacgaatggctttgacctggatcgccagtcaggacagtgtttagatattgatgaatgccgaaccatccccgaggcctgccgaggagacatgatgtgtgttaaccaaaatggcgggtatttatgcattccccggacaaaccctgtgtatcgagggccctactcgaacccctactcgaccccctactcaggtccgtacccagcagctgccccaccactctcagctccaaactatcccacgatctccaggcctcttatatgccgctttggataccagatggatgaaagcaaccaatgtgtggatg

SEQ ID NO: 19030 - DNA, 375 bp, Homo sapiens
attaaattcagtccaaaactccaagattttctcttcttcagcaggaaaatttatgttttctggaacttgttgaagcattttgttgctgaggggcctcgcgtgcctggacagccccgcgggccagcaagcctaaaagcaactcatccggcgtccacgctgcaacccttttttttttttttttttttttttttttttaaaatctttttaaaattttttggaaaaaaacccccaatttttttaaaggaaatttttcccccgtttaagggtggcggggaaaattttgggggggaaaaggggtttttttcaccaccttgtttgggagttgttattaagggggcgaaaccccccgggctaatgtattcctgggcgcccccc

SEQ ID NO: 19031 - DNA, 382 bp, Homo sapiens
tgcttgtggaccatcgtgctggcgcactgtgaaaaatgaacctagagctctaataacggtcgcatcagacaaaaccacgtccagcccaggtttggctgtccggacggtgcaatggcgaggccggccgcgaagatgccagtggcggtgatggcggaaagcgcctttagtttcaaaaagttgctggatcattgcgagaaccaggagctcgaggcccctggaggaattgctacacccccagtgtatggtcagcttctagctttatatttgctccataatgacatgaataatgcaagatatctttggaaaagagtgccacctgctataaaatctgcaaattctgaacttgggggaatttggtcagtaagacaaagaatctggcata

SEQ ID NO: 19032 - DNA, 383 bp, Homo sapiens
  misc_feature (1)...(383): n = A,T,C or G
ctggaaatgagctaaaaaaataaacaaaatccacctcccacctccctgttcccacttcctcccattccctccaaataaaagggaaaaaaggcaaaggaaaaaaaaaaaaccaaaaaaccaaaccacctgaaaaccaaaaacccccctaaaccccccaaaacaaggaagggcattcccccaggggaaagggaaattaaccctgaaccccctggaaccgaaacggaaattttccggttacaaaaacctgcaaaaaaagacctcaaaccaaaaaaaaaaccccaaagggaaccaaaataaatcccccggcctcttttgagggggnncnnnnnnanannnnnnnnnnncnnnnnnnncnnnnnnncnnntnctccccctccnccccc

SEQ ID NO: 19033 - DNA, 380 bp, Homo sapiens
cccgcctcggcctcccaaagtgctgggattacaggcgtgagccaccatgcccagctaactttcttcttagtttcttactactgtggattctctgcacttctttcaagttcagttatttaagtagtgtttcagtgcttatatttttaaatatttcattgggtttggatctgtttgggtttgagaggcaaaaggatgctgttatacaatttaaaattattttagatttttataatttttaatttgctcatcacctatcaacatgtcaaatattttgtgcctattatgtactgtgtactttgagaaataaagatctttggctagattccctccttcaagagacttattcctaatataaaccctagtggaactaaggtatatat

SEQ ID NO: 19034 - DNA, 348 bp, Homo sapiens
cccaaattaagaaccctgataatattagttgttgataagatgtggagcaactggaatgttcttacactgctgttgggaatgtaaattgctgcagccactttggaaaacaacatgacatcagtaaagtagaagataagcagttccactgtcgggtatgttccctaaagatactcgtccacatgcacaccagcatccatataaaaaacatttctatcagcattgttcatgatgaccccactggtctatctagagtagaatggataaaataatcatggtgtaatcagaaattgtaatattaatcagtaatgaaaaggagtgaggaattttcacttaaaaatgcttaatttt

SEQ ID NO: 19035 - DNA, 382 bp, Homo sapiens
  misc_feature (1)...(382): n = A,T,C or G
ggaaaacagtcaggaggaagacatcacctacgatggcagtctgacatcaggtatcagagcctagggtgtgagggaaagatgcactgagaggctggttacatgtacacgtgtcagatttctgtcatagaaatggtagaagttttacaaatatagaaagaattagaacaaccccttgagtgttggatcagaattggaggtatcagtgtaaactccttgatatcaaactacatagtaagatgtaaaaataaatatgtgtttttatgcatgtgtattacctatggtgagtgtccaagtatattcatacatacattcaagtattctccagctctatccactaagagttttggagaggcacaactgcaatactaacaggcacatgtan

SEQ ID NO: 19036 - DNA, 388 bp, Homo sapiens
tccaacactgggaattacaatgccacatgagatttgggtggggacacacatcccaaccatatcacctcctaacatgtactagaagattgaaattaccagtgtgggtcacatcccacgtctgctggtcccacagccccacagagcccatcttggtgttcaagcagctgtccaggcctccccttcctgcaacattaaccagggatgtggctttcccttcgggaagggagacagcggtgagggaaagtggcttactgtagacttctgggccttactcacaggaccataaccttgcactgcgcctttggaaagacatggtggggaagatgcaagcacccctcatggtggaccgcagcagacacagcaagccttgtacgacgtgatatgggga

SEQ ID NO: 19037 - DNA, 69 bp, Homo sapiens
cttgaagttgaccgggtccacccgaagcttgtgcgcgtgcaggtcgctcagggcgggtcgaccgggccg

SEQ ID NO: 19038 - DNA, 378 bp, Homo sapiens
  misc_feature (1)...(378): n = A,T,C or G
gttctggattctgggcatcgtcggcgcatgcttgtaatcctacttgggaggttgagacaggaggatcacttgaggctaggagttggaggctgcagtgtactatgttcgcatctgtgaatagccactgcactctagcctggacaatatagtgagaacccatctcaaaaaaaaaaaaaaaaaaaaaaaaaaanccccttaaaaatttttttttttttgggggaaccaattacccaaaaattaaggggccgaaaccacctaaatttttggcccccccggcccttgcccttaaaaagccaaaaggggttgggggggtttctttgctgggggtcaaacagggccaatttaagggggccaccttcccgggcctttattgggaaa

SEQ ID NO: 19039 - DNA, 482 bp, Homo sapiens
  misc_feature (1)...(482): n = A,T,C or G
ncgtatnnnnntttgaagactgagatattgtanaacctcccatttagcaagaacccccccaccctaaaaatgatctctcgagatcctttttcctcgccttcgacccggcaanatcaccacgcaccgcgggctcatttaaattgaaaccctgtaatttaaaatcnnannnaaagcaaaaaaaaatgccttttatcatttatactatttagaataacatgtatcaaatcattcattttactaaggagttgatagctcaactccactgtatgtaacagttgctagatacagacaattccaaacttgggtggtaatctatagactgttacaagtattgcaactgcttccctaaagcaacagaactctaagtgtctataatctgtgaaaacaatctaatggttacactgcaatttgcctaaagcaatatttgttcagttgcaatgatgtcacaaacacaaaaaggcttgtcagttttcaattatttn

SEQ ID NO: 19040 - DNA, 394 bp, Homo sapiens
  misc_feature (1)...(394): n = A,T,C or G
ttcgcggtgtttataaagcaggaaacccaccaaggccancgtgagggctcaaatgtgggcagcctaaggaactnnntttaaagactctccctacccagttcaagaggtgggaaagggaaggtctacttggctggccagccttgcttctccctgagggactgggagataactgttttctccctcgtttgtaaaaataacttttttggtgggtgggaaggaagtgaccaaacttacattttgagcctgacaacatgtcagcgtcatcctaaaaataggaggtttcctttgttcctcacaaatgaaaagtttcctacctccaagccaggcagagtacagccgcagagtctgaattcacgcagacgcgggcaactgcacttggcaggcaccaagctcn

SEQ ID NO: 19041 - DNA, 387 bp, Homo sapiens
  misc_feature (1)...(387): n = A,T,C or G
tacctatatataaagagagagagaaagagagagaactttctcattgctcgggagataaatatcttactgngaaagtttagtgttctgaaactggaacagtttttcattttgttgtaatgataatactaaatccctaatgtctgtattatggacaatatgaaatataagcctttctttcattaattttaaaaaaaattgtttctttattatgaaatttaacttgttactccagccttttgagtaatagtatcccatttgaatcttcttcactggaaaattaaggtatcagtcacagntcagtcagggaagcaaaaagcccttttggtatttcaaacaaaagccgtttaattgaggaaaatagttacctggttgctggaaatgctggag

SEQ ID NO: 19042 - DNA, 463 bp, Homo sapiens
  misc_feature (1)...(463): n = A,T,C or G
ggggaannnatgaagctgtggcatcgaaaacttcatattttacaaaaccccccaacccaaaaagatactctcgggatccttttcctttcgcgcacccagaatttatactgcttctgatttttagtttatgtgatagaaatgtttatanattctctaattgttgttttatttttgtggggtcagtggtgatatcccccttatcatttctgattgtgtcatttgattcttctcttttcttctttattagtctagctagcaatttatctattttattaattttttttcaaaaaaacagttcctggattcattgatttttgaaggacttttggtctctgtctcctacacttctgctctgaccttggttattccttgtcttctgctagctttggagtttgtgcttggttctctagttcttttggtttgaatgttagattgttgatttgagatctttctagcttttcag

SEQ ID NO: 19043 - DNA, 384 bp, Homo sapiens
  misc_feature (1)...(384): n = A,T,C or G
aaagtccctgcctctagctgtgcccattgtgcaatgatcagaatcccttgtttcaatagtattttgacttctttaagaatactctgtatttggaagctgaaacctcacttggatccattgttgggaaccaagtacggagccttacatagcccggaggagtttcaggagcaatgccactttcccttccatccctccctctgggtctggctcttcccatagtccattttccccttttatctcccattaatttctgtcttcctctctcaccttttccatgtctctagcatcctccaggatttaaaatcatctttacccaacttatctgtgaagtaatggcaaaagaacatctccaaattaagtactccttttcttcanaggagtttn

SEQ ID NO: 19044 - DNA, 220 bp, Homo sapiens
ctgccgcttaccacgcttctgttctgccttgaccaggtagccgccaaaatgggcccccatgttggacagcaccttctttttcttggcatcatcctctgcccgcttcttggcctcttcctcttccttcctcatcttctcctccgccagcttagcctgacgttcgcgttccttctcagttctgaagcgctgttgctcggctctctctgagtcgacgcggccg

SEQ ID NO: 19045 - DNA, 353 bp, Homo sapiens
ctccactatacaagagaaaaggggattccaagtcatgcgggcgggactagccttggaaggcagaggggcatgagtatatctgaagctgaggagaggagaaaaggattcatgcaaatgcagagcaagttggctttggaagagaagcgaggaatgcatactgtagtgtgtgcgatgacaggctaactgggaggcggcaggagggtggattgggtgacctttggtggggagtagaggagtttcgaacattgcagcttaatgggtggatgtaggaacaggagtgtgaaatggcctatgtgccccactgtggctggccacataagaagcatgctcttcctcttccctttctcagggct

SEQ ID NO: 19046 - DNA, 356 bp, Homo sapiens
ctaaaataaaccacacagtgttggattagaatgagatatcagtatgaactcataatttctaacatatacacagacatacacagaaataaacatagatacatgtgtaatatgtagctgagtatacataagcctattttcctagttctgtctgctgagaagacttagaagcagtgacacccagtagcaatgagcacacttaaaagcatattgacagccaggctgtaatcccactttgggaggccgaggtgggtggatcatttgaggtcaggagtttgagaacagcctggccaacatggtgaaactcctctcttactaaataaattcctttactaaataaaaaaattatgcaggcgtgg

SEQ ID NO: 19047 - DNA, 108 bp, Homo sapiens
  misc_feature (1)...(108): n = A,T,C or G
aggcnntaataatgatgtatgcattattattaaccttaacagaaatatttacgataaatctgctaacaccttgttttaaaagtatgtatcctaataatcacatacagg

SEQ ID NO: 19048 - DNA, 347 bp, Homo sapiens
ctcacgtgtaaaatggggataacaacagctctcaccacgaagcattgctaaggtgattaaatgacatattatatggggagacccttaaacagtacttgttcactggtatatactcaaaaaattgccggctactacatttgcatatgtcactttattattcggtgcctgcctttactcctttcttgcacctggtccatcagtgatgaaaagtttctcactttgtaatttgttaagcatgcagcttagttctataagatagcatcatatatttctctaagcctaatccatccacagtacattagaagatggcctcacaaccctaagtcatctgtgtggaaatgttctat

SEQ ID NO: 19049 - DNA, 356 bp, Homo sapiens
tttaaattgttttctaaataaaggtcttataagtctttttaaaaaatttactccgaggttctttgtatttttgttgtgattattaaataaatgggtatatagtgtatatagtctgtttattgctgccgtataaaaatgtatttgattttgtatctgaccaccttactgaattttgtcctatgaaacatttatttgtagattcatctggatttttccttttacaatattgtttctctcttccttatgtgctaactttattagataactgccatttgaaactaaatagggttaaagggaatgcttttcatgttttactgataggatggtgtttgctccagctttcttagtagatactc

SEQ ID NO: 19050 - DNA, 347 bp, Homo sapiens
tctccctcatatatatacaaactattatttttttaaatgaatcattgacagtttgaatctgcttcacatattatgaatattcttgtatgtcaataaatatagacatatcaattaatggctgtatctgttccataattacttatccttgattttcagcctttttccaatattttcactttaaagatactgctaaagcatcatccttgtagctaaatttctgtacacatccataattcttcccttaagataaatcttaagaggtggaactgctgggtcaaaagctcttgacacatactgtgaaaatgtccctcagaagaaaaaaacacccacttacattaccaggagtg

SEQ ID NO: 19051 - DNA, 348 bp, Homo sapiens
ctcctgccttgccctctgaaagtgctgggattacaggcatgagtcattggatccaggcctgtagctttttaaaactatttattatggaaaatttcaaacatatatagaagtagaaaaaaatagtataagaaaaccccatttatccattgcctagcttcatggccaatattctcatctgtgccctccactcctcttctttttcaacttatttagaacaaatctcaggtaaaatatttcaatatgtatctctaaaatataagaaaggaatataaatcttttaagattatatatagttgccttttaaaataatttttttttttttgagacagagtctcactttgttggcca

SEQ ID NO: 19052 - DNA, 214 bp, Homo sapiens
caaactttaaatggggaagaagcccggctcgctggcgtggagccgggcgtggaatgcgagtgcctattgggccacttttggtaaacagaactggcgctgcgggatgaaccgaacgccgggttaaggcgcccgatgccgacgctcatcataccccagaaaaggtgttggttgatatagacagcaggacggtgggtctacgcggccgggaaattct

SEQ ID NO: 19053 - DNA, 358 bp, Homo sapiens
  misc_feature (1)...(358): n = A,T,C or G
cttcatgagatgtagttttcatcttttatttcataggtgagaaaataaaagcctatctaacttattaaatattgcatatctagtaagaggcagcatttagattcaaacgtaattacataacaacacatttatgatactatggaggtagaattatgagatacttactacttggaccagaataaaaattactaaatttaaaaaactatattatatgttttatagtgataaatatgtcttgttttattattctttaggctccatatttctgagatgtgtgnttttctttttctttttttttttttttaaccctttttttttcacatttaaaaaccttttttcattttgaggggggagcttg

SEQ ID NO: 19054 - DNA, 393 bp, Homo sapiens
ttcagaaatacatttgggaatcgattgaaaatacccctttgcaaaacagaaaagtaatattcattgagtttaaatgttctgtttaggaagtgtctgtcgtcttctttttctagtcagacccaagctggtagtgacattgataatggcggtggttttggaaggtggatagggagcatgagctaagttagggttgggtgtatcattacctcacaagatactataacctgactacatacacaaagccatctggccccactccattttctagatggggaaattcaggccctgaacctggctctagacccacttccccaacgtttctaaataaatgtttgagtttagcacactagacaaagtcactttaagtatcttaagctgacatcaaagccaagg

SEQ ID NO: 19055 - DNA, 399 bp, Homo sapiens
aagagactacttttgtaatgcatgatactaaaggagaaatattatattgtactgtactttagatgactattatcaacaattcatgaaaatgtattttataatctaattttagaataagctaaaatatacacatcttttattgtggtcataaatataatgtgtcttggaagcatgggacaaagtacttagtacattatgggttagttaacagtctctcaataaatagtgacaaaaataattttttataaacttttgcaaaattttaacaatgttttgtgtgtgtttattcaatttaggcttcttagtgttgaagaaaagaagaaaatagggcatctttgtaaattgctgattgaccaaggtcgaatccagtatttgcagcagaagggattcagtcctgct

SEQ ID NO: 19056 - DNA, 335 bp, Homo sapiens
caaaatacaaaaagaataacaaggagagtagtattttaaagacactcaagtgtatgcaagacacaacaagtattttacaaccaagccagccaagctatccttcaggtatcaaggctgtaaaaaataaatatgcaagaactcagagaatatcacacttacaagactttcctggggaatctaacagaagataagcttcatccacctaagagatgactggggtcattgtcatttttggcaaaagaactgatggtgagaattgaatgtttaattgagaatctaagactaaaacaaaggtggtgacaagcgttgcagaatatacattatattctgacaag

SEQ ID NO: 19057 - DNA, 334 bp, Homo sapiens
ctcaatctcacgcctttcctgagttggcaggcagggcacgtaggccccactgatgacactagtgacaacatattccaagaatgatgtgaggcttctcaagtcacatatacaccaactcctattgctctttgattctacacatgtaaagacatgaaggtccaaactacataggcttgagtctaggttattaatgcttctgaaaagcttatcataatatgatctccaaaagtagaatgaaaagaaatggcttcatgactgactgattttcgatcctaaatagcataaaacgtgaccacatattagctcttctttcttcacaagccacaattaaatg

SEQ ID NO: 19058 - DNA, 333 bp, Homo sapiens
agtcgagccaaataccaaagacagccaactgacccagataatcttcagctcccaatgtaagctgtggcctgttaacttttctggaacttaggaatcatgagttggaaggacctgctcatagttcttaccttaccctgtggcaactcagagactaaagccattctggccccaaaatgctacggacaatcttacttgccctggtttgaaagtcctttttagctgacctttagaatatggtctatcagacctacgtgctagaaccagctttttctgaactggtaactttaaaatagtgggtttaatttactgttggtctttttttttttttttttt

SEQ ID NO: 19059 - DNA, 336 bp, Homo sapiens
  misc_feature (1)...(336): n = A,T,C or G
taaaaagtgatatatgttggagttataaagaaatacactaaggagaggtagtaaatgtgaaccttgttgcagtgtataaggtggaagcctaaagaaatctcaccgaaacttactgctgaatgattacattctcccttaagcagaaaactttggatgtgccatgcaatggtgtctgtgtaattattttgctctttgattaaaaaaaagacccccagcaataaaaagtgggtcactctaatgggaaaaaaaaaaaagtggaaaaaaaaaagtggagaaagtaaantnnncnccgccgcaaaagccagcggatagggttgggtatgtatggagccccca

SEQ ID NO: 19060 - DNA, 217 bp, Homo sapiens
aaacagtccagcatgacggtgatggaaagtgaggtcagccggcttttcatcaacgtcatgctggactgtttgtgcaggcggctgaaggacaggaccagcgagcaccaggcggccaactgcttctgccgagtgtccacattcggttgtaacgtaaagaagggtgggaagcgatactgccacggccactcgaaactcatcgccatcgtcgacgcggccg

SEQ ID NO: 19061 - DNA, 183 bp, Homo sapiens
cgcggccgcgtcgacctttttaattatagctgttgtgactgatgtgagatggcatcttactgtggtttttgcttgcatttatttatttgatgattagtaaggatgagcgctttttcatatacttgagtgtcttcttttgagaaaaccctcaataaatattctcattgtcagtcgacgcggccg

SEQ ID NO: 19062 - DNA, 268 bp, Homo sapiens
cgcggccgcgtcgaccaaacgtgcaagaaaacgctatgaaggggctttaaaaaagatatcatcaaagcaaacatgcaagaaaacgctatgaaggggtttcagaaacgagaaaccgttaaagaaaagatgcaaggaaacaacactgtgaggggtttcagaaaagagaaatcatcaaagcaaacatgcaagaaaatgctatgaaggggcttcagaaaagaaatcatcacagccgtggtgcaagactctgctaaagcgccgtgaaatcgat

SEQ ID NO: 19063 - DNA, 359 bp, Homo sapiens
atttttaacaaaaattataaatataaaaaagaacaatgatcatcttctgtaactccagaaaatcctttaactccaacaaggtaaaaaatgctaaaaaccatcatacctaattctttagcatctcctcctgctggacttccatttttctgttgtgctacaagtgcattcaaaataatttttgttgccccagaccttggcagagtaacatttgtaagaaatggcaagttatttttcttggcaaatgcctgacttgtttctcgcctcttcctgaggaagcccccttctggaaacaaaacaatccattttcgatctctgctcctgtaattattttctaagtgcttcttgagaagcagcagctg

SEQ ID NO: 19064 - DNA, 350 bp, Homo sapiens
ctccctgctaaacctcgtaagttgatgggattacaggcttgagccactgcacccagcctatcgtttgtagataaatgtgccaatgctcctattacgagcccagagtactgttatatactgagaatgaaacctacgtaatgctttaaatcttacaagactggaatgataagacatactcttattattactgcaacaccttgggaaataataggacctatagctactgtattatacgctgggagaaagactcacacagtgcttaagatcatatagctagctagtaaatgtttgagtgaaaatacaaacaaaggttttctgactttaagagcttgagttttttccactatacc

SEQ ID NO: 19065 - DNA, 341 bp, Homo sapiens
ggagacagcggtgacaggagcagcggccgggagcccttagggaggcagacagagcctgcagccaatgccccaggagccctcggttccaaccaactgatgcccctgtgcccactggcccacgccatgcagccccagtccgttctgcacagcggctacttccacccactacttcgggcctggcagacagccaccaccaccctcaatgcctccaacctcatctaccccatctttgtcacggatgttcctgatgacatacagcctatcaccagcctcccaggagtggccaggtatggtgtgaagcggctggaagagatgctgaggcccttggtggaagagggcct

SEQ ID NO: 19066 - DNA, 386 bp, Homo sapiens
tacccaaaacaaagaaaatactgaattatcatacttagcaggagccattgactttttaaatgaaattgagaatcttcaaataatgtttctgttcagttaaatatttgtctaatattctttttttcatattattaaaaccaactagatatcattgcagtactttatatatataggcagccaatctttctatcatagcatcttttttcctttttctttttttcttttttttttttttttgggaaagggaccctccttcttggccaaaaacggggagggaaggggcatattttatgttttttgaaacctccccctctggggtgtaaagcagattcttttcccaacccttttgataatggggaaatacgggggggccctacccacccggg

SEQ ID NO: 19067 - DNA, 341 bp, Homo sapiens
gtttggttctttcttttcttatttatttgcctaactagtgttccatctagtttattaattttttttttttttttaataaaaacagctccgggatggggggagtttttttttttttggaaaaagtttaaggggtttttttcccttaaaccttaactgggattggggttttttttggttttgggcaactttcagggggggtttcccttgggttttttggttttttaaaaaaaaggggggggggtgaaccccaaaacttttaaaatttttttttttttggggggaagagttccttttggccccccaacgggggaacggggggaatattcggggtaaccggcccg

SEQ ID NO: 19068 - DNA, 341 bp, Homo sapiens
ctggattctggcttatctcacctgttgacttaagatgggcaacaaggagagaataagagactttaattgatcatgaaatgaggattattgagagggaatatgaggatgtagaactaagactagggagaagaacacaatgaaggataaggatgattgagaggatgaaagagatgaccatatgtgattagggagtagagacttggtgaagataggttgaaggaggctgattaaggaggttagggcttataaaagaagggaaggaagaagaaaagaaaggaggaggagaagaggaaagaaggaggaagaaggagaagaagaaagaagataggagaagaactaag

SEQ ID NO: 19069 - DNA, 336 bp, Homo sapiens
  misc_feature (1)...(336): n = A,T,C or G
aataaacccgtcatttgctaatgagatataaacttacggggacactgacttaaagaaatttgatattacctttaaagactggctcttagtaacataattctcagactgaagcaatttctcatagtcttcaaaaatctaatgaaaagaaaatacacattaaagtgtaaaagcagcagtggattctccgtattaagctggcttgctttctttttcaggagcaaattcccaacttctggccattttaccatcctcttttttngtgaagacactgggggacagggaggtcaagaattacaagagacatccttccctattttaattagttctgcaaattaa

SEQ ID NO: 19070 - DNA, 337 bp, Homo sapiens
catttatttgagatgaggaaaggaaattgagcagaaggtacaggagtaatagcaattccctgtagctctcaaagcaaattttgagctcatttttctttttctgcaagctcagcagcagaatgcccagagtcttccctggtagatgcaggttccatagcgacgttctcctgcaatgcacgctggtattctgcaatagcaggccatgtttttccttgagcctggatgctttggagccaagctttcgtcccatgcaagggaaacaaccacttctgggatgtccgctgcaatctgctccggggctgcagcaacctcatcagctcttgcctggagtggctca

SEQ ID NO: 19071 - DNA, 330 bp, Homo sapiens
ccatggtataacaattatttacacagtgtttacagtgtactatcacaagtaacttggagatgatttaaagtatacaggaggatgtgcataggttatatgcaaatactacaccattttatgtaagggactcgagcatctgctgatttttgcaaccagtcctccaaggataccaagatggcagtacctctagaactgcagattcagtatctacacaagggggagctgagtacagcataatgttcttgtaccactgtgctgggaactgtatacaaatcaagacagaaatctgaagtttaataacagtataaacaattggggtggctgggtgcg

SEQ ID NO: 19072 - DNA, 342 bp, Homo sapiens
  misc_feature (1)...(342): n = A,T,C or G
cangacaaaaaaaagataaaataggatatgatcaccgatgccagattcttttagtgctgccacgtaagaaaaactggagaccacaggtgggaggtaatcactaaagtacaatgaaatgtctaaaacagtttcctgtccctgtagttgttcaaaaaaatgttgatgaattgctgcctaaggaggaagaacagttggagctctaagcccctcaactcccagcttaagggatggtgggggagagggaggaagtgacattattgggagcacacaggaaaggcagaagtggggaggcagtattgttttcaaccctcagggttccaggtcctctcgtcgacgcggccg

SEQ ID NO: 19073 - DNA, 399 bp, Homo sapiens
cttttctcttatattgttcaaatgttccttaattttatatggccaccttcaccaagtgaaagtgctaaaaataaatgtcaattttaaaacatttgctaggaagatatgctgaaaaagatccaagtgctttaaagtataccactgaatttctaagtgagatacttaataaaaaagagaccaaaataacaaaacttcacattaagcctcttcacattatgtgagataatacataacaaattataatttagcatccctgatcagaataattaagaaaagaggtagaaaacttttatctggaagatcttgtagtgaagctaagttttagagggtgtgccttgcggattagtccactaagcaaatggctacacatctagtactaggaagaagcagaattctgag

SEQ ID NO: 19074 - DNA, 175 bp, Homo sapiens
tcaggatcctttcatgacctctttcaggagctaagtccctctctgacagggtctcataggaccatgctccttagccttgtcataaatgtaattttatagtagtgtaattattcgatgaatatttttctacttctaaattccatgagagcagggactatgtctgtcgacgcggccg

SEQ ID NO: 19075 - DNA, 368 bp, Homo sapiens
gcaacctcaaacagacaccatggtgcacctgactcctgaagagaaggctgccgctactgtcctgtggggcaaggggaacgtggatgaagttggtggtgaggccctggtcaagctgataggggcctacccttggacccagaggttctttgagtcctttggcgatctgtccactcctgatgctgttatgggcaaccctaacgggaaagctcatggcgcgaaagtgctcggtgcctttagtgatggcctggctcacctggacaacctcaagggcacctttgccacactgagtgagctgcactgtgacaagctgcacgtggatgctgagaacttatgctcctgggcaacgtgctcgtctgtgagctggcccc

SEQ ID NO: 19076 - DNA, 392 bp, Homo sapiens
  misc_feature (1)...(392): n = A,T,C or G
gtttctttggaaggcagtggatttttgctggtgtccttcaacaagcatgaaggtgataaatgtgtttccatggctttagactcatttttgaagtcttggattgtgtgaacattcttagaaacaataaaatgttttaattaaaagccctcgactaccagctgaattcagtgtctactaggaaaatgggtagatttgttacattgtccctttgctctctatgactttgttccagttgtcaaggaacttaaatgggtattcaggaaaaagaattcttgtttccctttcctcaccttgccagttaaataactcctggtgacacttcaggtggtagaattgaaacacaaacctgacttctgaccacatgggtcaaaggcaaaaggcaaatggcttcn

SEQ ID NO: 19077 - DNA, 121 bp, Homo sapiens
cccggccataaatgtgtttaagacgtctaaccaagcacacatctcagcttaacctcggctggcttgaacatgcttggaacacttgccgacgcggccgcgaatatcaaatctgtgactccct

SEQ ID NO: 19078 - DNA, 334 bp, Homo sapiens
ctttttaatacttgtttcagcctctttaatctctttataagttaactaataaatctattttcttcagacttctgcaatagttctttaaaatcacaacagttagcaagctgacttttgtaatgtgctcaatacaaatacttgtgaacttttaatatgttgagtgctttcattttgataactggatctccatttgatattttcatttgtataactcatttgcagtctgaaaattttttttagtgccagtccctgaacatatcattgaaaggtaattttctttgcattttaaaatatctggattatgaagaaaaagtgatgaaaataaattaaaact

SEQ ID NO: 19079 - DNA, 335 bp, Homo sapiens
gttttaaaatatgtttattttgtatgttttacaatgaatacttcagcaaagaaaataattataatttcaaaatgcaatccctggatttgataaatatcctttataatcgattacactaatcaatatctagaaatatacatagacaaagttagctaatgaataaaataagtaaaatgactacataaactcaatttcagggatgagggatcatgcatgatcagttaagtcactctgccactttttaaaataatacgattcacatttgcttcaatcacataaacattcattgcaggagttacacggctaatcatggaaaattatgatctttgttagct

SEQ ID NO: 19080 - DNA, 474 bp, Homo sapiens
  misc_feature (1)...(474): n = A,T,C or G
nttggaggnccccnnnnnnttttgccccgcgctgcaggaattcggcacgagctctcacctgctcccatacacatctctgcacacctggctgaggcattcccagacctaacctcagataatgtgcatgtgatgaacactcccaagtggctaggcctcttgcacctgagcaggtggattctgccccagcactggggctttctctgggctgtccatcatgggtatatctctggattccaggattgctagttagcacctcacatttgagggtctgtgctattcagtctagaatcagagttggatgagaaatcaactttgaacaccacctttggggtggctgcattggctcacacctgtaatctcagcactttangaggctgaggcaggaggatagcttgaggccaggagttcgagactaaccggagcaacatagtaaggccacatctgtacaaaaaaaaaaaaaaaaaaactcggggg

SEQ ID NO: 19081 - DNA, 490 bp, Homo sapiens
  misc_feature (1)...(490): n = A,T,C or G
nagggaattgaatgcgtgtggcattcggcacgagcttggtcatgttctacgccccttggtgcccacactgtaagaaggtcattccgcactttactgttactgctgatgccttcaaagatgaccgaaagattgcctgtgccgctgttgactgcgtcaaagacaagaaccaagacctgtgccagcaggaggcggtcaagggctaccccactttccactactaccactatgggaagttcgcagaaaagtatgacagcgaccgcacagaattgggatttaccaattatattcgagccctccgggagggagaccatgaaagactagggaaaaagaaggaagagttataattcctgcctcagaaaaagcttttccattacactgtgaatgatacctgttttgttgtttctgaatttccacatgttctgaagacaaattttttatagccgcttatggccattttgtacaattttgaaataaaattaaaccatttaag

SEQ ID NO: 19082 - DNA, 477 bp, Homo sapiens
  misc_feature (1)...(477): n = A,T,C or G
aggaggggnttttnaataganttgctgtcggcaattcggcacgagctcctttttctgatgaaattgaagttgactttagtaagccctatgtcagggtaactatggaagaagccagcagaggaactccttgtgagcgacctgtgagagtttatgccgatggaatatttgacttatttcactctggtcacgcccgagctctgatgcaagcgaagaaccttttccctaatacgtacctcattgtgggagtttgcagtgatgagctcacacacaacttcaaaggcttcacggtgatgaacgagaatgagcgctatgacgcagtccagcactgccgctacgtggatgaggtggtgaggaatgcgccctggacgctgacacccgagttcctggccgaacaccggattgattttgtagcccatgatgatattccttattcatctgctggcagngatgatgtttataagcacatcaaggaggcag

SEQ ID NO: 19083 - DNA, 500 bp, Homo sapiens
  misc_feature (1)...(500): n = A,T,C or G
aggggnnnnnnagnnnnnnnnnncttgacctatgtgcacgacttcggcacgagcagggtcagagcccctggcaggagagacgcccaaccaggccctgaaacccggggcaaaatccaacagcatcattgtgagccctcggcagaggggcaatcccgtactgaagttcgtgcgcaatgtgccctgggaatttggcgacgtaattcccgactatgtgctgggccagagcacctgtgccctgttcctcagcctccgctaccacaacctgcacccagactacatccatgggcggctgcagagcctggggaagaacttcgccttgcgggtcctgcttgtccaggtggatgtgaaagatccccagcaggccctcaaggagctggctaagatgtgtatcctggccgactgcacattgatcctcgcctggagccccgaggaagctgggcggtacctggagacctacaaggcctatgagcagaaaccagcggacctcctgatggagaagc

SEQ ID NO: 19084 - DNA, 508 bp, Homo sapiens
  misc_feature (1)...(508): n = A,T,C or G
gacggcggannnngnggnaccattgatancatcgaccggccgtacgaatncggcacgagggctggcgactacacctaccgtgagggccttgagcacaagtgcaagcgggacatcctgctcggccggctccggagctcggaggaccagacctggaagcggatccggccccggcccactaagaccagcttcgtgggctcctactacctgtgcaaagacatgattaacaagcaggactgtaagtacggggataactgcaccttcgcctaccatcaggaggagatcgacgtgtggaccgaggagcggaagggcaccctcaaccgcgacctgctcttcgacccgctggggggtgttaagcgcggcagcctcaccatcgccaagctcctgaaggagcaccagggcatcttcaccttcctctgcgaggtactgcccacccacccactgccaccccataggccatggcacagacagggctggggatgctccctggcacagaccaccataggaagtc

SEQ ID NO: 19085 - DNA, 515 bp, Homo sapiens
ggcggtggggaactgacgccgcggaatttgccgagccagatccttttccagcagccataattttaaaagttgctttgaatatggcaagagggttaaagtatctgcaccaagaaaagaaactgcttcatggagacataaagtcttcaaatgttgtaattaaaggcgattttgaaacaattaaaatctgtgatgtaggagtctctctaccactggatgaaaatatgactgtgactgaccctgaggcttgttacattggcacagagccatggaaacccaaagaagctgtggaggagaatggtgttattactgacaaggcagacatatttgcctttggccttactttgtgggaaatgatgactttatcgattccacacattaatctttcaaatgatgatgatgatgaagataaaacttttgatgaaagtgattttgatgatgaagcatactatgcagcgttgggaactaggccacctattaatatggaagaactggatgaatcataccagaaagtattt

SEQ ID NO: 19086 - DNA, 503 bp, Homo sapiens
  misc_feature (1)...(503): n = A,T,C or G
agcggcccgnnnnanggtgnaaccattgatanattgaccggctgtacgccagngtacgctaggcaacaattctcccgctccagaccctcaccgaccacctgtcctgggaccaggctgggaggggagtgtggcagggaggaggaagaggaaggtgagaatgagtagaacagttttgtattctactccctacaagccattttgaacttctgccctcaccggactctgggctgtgactggggcaccaaactcagcacatgagtctcccctagctctcgtggggagagggatgctatttattcagtttggggcaggagggagaggagggaaagtatttctgaccctgatgccaacagccgggtggctgtccaagcaggattgcaggggacacagggaagcactgcccagcccctgcctggctgccctttcccccctgctgctgccaccgcttcctgcctgtcatttgaataaacagtgtttctattgaaaaaaaaaaaaaaaaaaaa

SEQ ID NO: 19087 - DNA, 489 bp, Homo sapiens
  misc_feature (1)...(489): n = A,T,C or G
gcggggattgacctgctgcggacggaatcgattntgatatcgaagagttcttttcggcctcaaatatccagactcaaactgaagagagtgaacttagcaccatgaccaccgagccagtcttggagtcactggacatagagactcaaacggacttcttactcgcagatacctctgctcagtcctatgggtgtaggggaaattctaacttcttaggccttgagatgtttgacacacagacacagacagacttaaactttttcttagacagtagccctcatctgcctctgggaagtattctgaaacactccagcttttccgtgagtactgattcatctgacacagagacccaaactgaaggagtctccactgctaaaaatatacctgctctagaaagcaaagttcagttgaacagtacagaaacacagaccatgagatctgggtttgaaaccctggggagcttgttcttcaccagcaacgaaactcagacag

SEQ ID NO: 19088 - DNA, 458 bp, Homo sapiens
  misc_feature (1)...(458): n = A,T,C or G
agctgganaaattgaactgactcgcgctgcaggaattcggcacgagcacacttgtgccaacttgattcatattgggcattactaacaacccctgggcaaggtaaataggttgaacaatcaataacattatccctgcctgcatacatgtgaacaaaagctatagaggacatgcaaattctacagtcattcctcatatgctttagacagagtgcagctactggaatcttccagatttcagtgttttaaaatcagagctctgaatacacaaaaggaaagagaaatggagcagctgacatattttaagctcacagtgatactcagtgacaggagcacagagctctaatgtccacaggatgttgtagggtagggtctctcagtaaatcaagtcccttacctatgttctgacactgaggctcttggagctatgggttagaaatccaggaggcaatatgtcttta

SEQ ID NO: 19089 - DNA, 470 bp, Homo sapiens
  misc_feature (1)...(470): n = A,T,C or G
cttggcccacgcngtttcccccgcgctgcaggaattcggcacgaggcagcgcggaggccgcacgatgcctggagttactgtaaaagacgagaaccagcatgatttcgtcagagctctggcagccttcctcaataagtccgggaagctgacagtccccgaatgggtggataccgtgctgctggcctagcacaaagagcttgctccctacgataagaactgggtctacacgcgagctgcttccacagcgcggcacctgtacctccggggtggcgctggggttggctccatgaccaagatctatgggggacgtccgagaaacggcgtcatgcccagacacttcagccgaggctccctgagtgtggcccgacgggtcctccaagccctggaggggctgaaaatggtggaaaaagacctagatggcagccgcacactgacacctcagggaccaagagatctggacagaatcgccg

SEQ ID NO: 19090 - DNA, 344 bp, Homo sapiens
  misc_feature (1)...(344): n = A,T,C or G
gcggnattgatttccatcgcctgcaggaattcggcacgagcttgacttcagatgatccatctgccttggcctcccacagtgctgggattacaggcgtgagccaccatgcccggcctctttctcacctttacacctgtcttcttatcctcacatctgttttcacaccttcatccctgtcttcctcatgttcacacttgtcttccccatgttcatagctgcctttcttaccattttggtttgaagggcagtcttctctggcttgtttttttgtttttcccagaaaatcagtattattttttaaataagaaaaacattcctagaagatgaaaaaaaaaaaaaaaaaa

SEQ ID NO: 19091 - DNA, 537 bp, Homo sapiens
  misc_feature (1)...(537): n = A,T,C or G
ggattcgtttgccttgttagttattataatttatttgaattatacatctcctcgagtgagaanacggaaaaanttttgagcgcctgcggatttcgcacgatcaaaaaccaggcatggcgggggatttttgacatcttgtgaagcagaactacaggagctcatgacacagattgacataatggtggctcataaaaaatctgaatgggagggacgtacacatgctctagaaacttgcttgaaaatccgtgaacaggaacttaagagtcttatgagtcagttggatgtgacacataaggaggttggaatgttgcatcagcaggtagaagaacatgaaaaaatcaagcaagagatgaccatggaatataagcaggagttgaagaaactacatgaagaattatgcatactgaagagaagctatgaaaagcttcagaaaaagcaaatgagggaattcagaggaaataccaaaaatcacagggaagatcggtctgaaattgagaggttaactgcaaaaatagaggaattccgtcagaaatcgct

SEQ ID NO: 19092 - DNA, 472 bp, Homo sapiens
  misc_feature (1)...(472): n = A,T,C or G
cattgccaccatctccnccgcgctgcaggattcggcacgagtgattctacaccgcccaaaaagaaaatgcggaagacagaaaatggaatgtatgcttgtgatttgtgtgacaagatattccaaaagagtagttcattattgagacataaatatgaacacacaggtaaaagacctcatgagtgtggaatctgtaaaaaggcatttaaacacaaacatcatttgattgaacacatgcgattacattctggagaaaagccctatcaatgtgacaaatgtggaaagcgcttctcacactctgggtcttattctcaacacatgaatcatcgctactcctactgtaagagagaagcggaagaacgtgacagcacagagcaggaagaggcagggcctgaaatcctctcgaatgagcacgtgggtgccagggcgtctccctcacagggcgactcggacgagagagagagtttgacaaggg

SEQ ID NO: 19093 - DNA, 478 bp, Homo sapiens
  misc_feature (1)...(478): n = A,T,C or G
ngagagattgacngccnattgcaccggctgcaggaattcggcacgagctcccttgccccatgtgctgtcactgactctccttgggactcgcctgcctgctcagagccctgcagggcttggtcagctgcctgttcagtgtcaacacttccctgcacatcttaaaactgggctttattttcgctgaaggaactgtgttgggacccttgacatctgtcaggtttgcacatgctgtttttttttctcagcccacgtgttctcccccacgtggggtagcagcaggacagacagtgaatcacagagtctgccctgagcagaggctgctgtccctgggactcctagccatggtcagactgtacaaaacggttttccagaaatgaaatgtaaatccatttttatactgaaaatgttactgaaagtcacttttatgagcatctgccttaataaacagacattgattcccttaaaaaaaaaaaaaaaa

SEQ ID NO: 19094 - DNA, 502 bp, Homo sapiens
  misc_feature (1)...(502): n = A,T,C or G
ngcgcgggannngtgnacactgacgtaatgaggactgtncggagaggacaaaaaggagaactcagccagaaagttctggagcatagtctttttgccaaaagaacacgttttcaaatgaaagaggtggtgctggggcactgaggaatcagggggatggaccccactggagcttgtctcatgctggcagcaagtctcaggcctcaaacacatacctgggccacctcaggagagagactgcagggaagaaatgagttgcaatgctccagcctaaccaactccccttttgttaatccaatcccagaaggtactgggtagggtcagttaacagacagctgcctgtctcctggcagagtctgaccaagccccagtgggcgcttctcttcctaagtcctctggtgtaccccattcttcaagggaaacggtccccttaagaatctatgtgaaagggttctgaaattgctgtaccagttaatgaattatttactctaaacaatgtcttgat

SEQ ID NO: 19095 - DNA, 535 bp, Homo sapiens
  misc_feature (1)...(535): n = A,T,C or G
agggggtnnnnaaggggannnnnanantttagacccagctngtaggcaccgcgctgcaggaattcggcacgagaacaagtgtgtgtattaccacatcctcagagctgacttgctgcccccggaggagagggaagtggaagagacgccggaggagtggaacctctactacccgatgcagctggacctggagtatgtgaggagtggctgggacaactacgagtttgacatcaatgaagtggaggaaggccctgtcttcgccatgtgcatggcgggtgctcatgaccaggcgacgatggctaagtggatccagggcctgcaggagaccaacccaaccctggcccagatccccgtggtcttccgcctcgccgggtccacccgggagctccagacatcctctgcagggctggaggagccgcccctgcccgaggaccaccaggaagaagacgacaacctgcagcgacagcagcagggccagagctagtctgatcctgcgcgagggcacgggctgtggcccgaggaggcggtggactgaang

SEQ ID NO: 19096 - DNA, 498 bp, Homo sapiens
  misc_feature (1)...(498): n = A,T,C or G
ggtgctnntaaagatcgcttgaggacttctgacgagcacccctgaggtctggccaggccccaggcacagagctgcctgctccctcccggggctcttcttcatcacctcacggtatagcacattgcttctgcgctggtggcaatagggcaacaaagccataggccagagggcggggggatgtccctgcctccctgccaccccccctgcctgagcccaggacccactggagccagccccaccctaggcaggaagacccctgctgagggcccccccgtgcagtccgcatacccccctgtccagcagggcactgtgggtggctcaccctagattgtggcccagatctcaagagtctctgccttcagggtcatccaaaagtggaccttgggagcagtgggggtgtctgtggagtgcatgactcagccccccgactcgcagccttaataaagcgatggttgacgtctaanaaaaaaaaaaaaaaaaaaactcgagggggggccc

SEQ ID NO: 19097 - DNA, 475 bp, Homo sapiens
  misc_feature (1)...(475): n = A,T,C or G
ggtgtgattcncggctgtatgaattcggcacgagggaactgcctcatcacggaagaccctctggaatcaagaactctacatccagcaggacaactcagagaggaagcggaaacaccttccagaccgacaggatgggcctgcagccaagagtgagaaagcagcccccagaagtcagcactggttgcacagggacctgcgtgtgcggtttgtggacaacatgtacaaaggaggccaatattacaacaccaagatgataattgaagatgtcctaagcccagatacctgtgtatgtcggacagatgaaggccgagtcctggaaggcctgagggaagacatgctggagaccctggttcccaaggcagagggtgaccgtgtgatggtggtgctgggcccacagactgggagggtgggacatttgctgagccgggacagagcacggagccgggctttggtgcaactgccaagagaaaatcaa

SEQ ID NO: 19098 - DNA, 470 bp, Homo sapiens
  misc_feature (1)...(470): n = A,T,C or G
cctcgaccagcgccgtttcccccgcgctgcaggaattcggcacgaggttcttcagagagcttccaccagctgctgagtttgtgaagacagtggagttcacaagactacgcattcaagaggaaaggactttggcttgcttgaggctgctggcctttttggaaggaaaggaaggggaagacaccctagttctcagtgtttgggactcttatgcagaatcgaggcagttaactcttccaagaacagaagcggcatgttgaagaaaatctgggggattgggatgggggatgtgtggatttttnnttcactannttggcctgaaacatgttgaacataaattcaaaaattttatcccaaaaaaaaaaaaaaaaaaaaacttcaaggggggccccgtcccccagtgggggctaaggggccccaattaacaatccatgggccgcgtttttacaacgtcttaatggtgaaaaacctcc

SEQ ID NO: 19099 - DNA, 450 bp, Homo sapiens
  misc_feature (1)...(450): n = A,T,C or G
nttcgccatcgctcccgctgcaggaattcggcacgaggaaagaagttcttcgtcggcgcctagcgacgcccaacacctgtccaaacactgcctgctgaagatgaagtcttactacagaaattaagagaggaatcaagagctgtctttctacaaagaaaaagcagagaactgttagataatgaagaattacaggcaatttttcacagcaaaagtctttgctaaactccttcatacagattcatatggaagaatttccatcatgcagttctttaattatgtcatgagaaaagtttggcttcatcaaacaagaataggactcagtttatatgatgtcgctgggcaggggtaccttcgggaatctgatttagaaaactacatattggaacttatccctacgttgccacaattagatggtctggaaaaatctttctactccttttatgtttgtan

SEQ ID NO: 19100 - DNA, 450 bp, Homo sapiens
  misc_feature (1)...(450): n = A,T,C or G
ntttgacattcgctccgcgctgcaggaaattttgagcacccaagctcttctgtacctatttaaagtccaccaaggggactgcagctcctagaacatgagaatcaagcctcttaattttaaactgcggaatgtggcctctgcttcctccgtcctcctgcccaaggacgacgaggattgctccagggctgctgggtagtttaccggccccttctataggcatggagttggcactgacatcacagcttcataaccccaccaccgccagcttcccctgcctcctacatccagtctgttcttgttcatagtgagaatcctgtgttcccacttcagtgacacctgaattgtttgttgttggtttttttttttattggcttcaaagaggaagggccccattaaagggggaacttgtaataaattggaatttcaaataaacctcatgtacttgtgttt

SEQ ID NO: 19101 - DNA, 472 bp, Homo sapiens
  misc_feature (1)...(472): n = A,T,C or G
ngagtgttcaccgctgctgaattcggcacgagattagggggaaggcgtgaggaaagtaccaaacagcagcggagttttaaactttaaatagacaggtctgagtgcctgaacttgccttttcattttacttcatcctccaaggagttcaatcacttggcgtgacttcactacttttaagcaaaagagtggtgcccaggcaacatgggtgactggagcgccttaggcaaactccttgacaaggttcaagcctactcaactgctggagggaaggtgtggctgtcagtacttttcattttccgaatcctgctgctggggacagcggttgagtcagcctggggagatgagcagtctgcctttcgttgtaacactcagcaacctggttgtgaaaatgtctgctatgacaagtctttcccaatctctcatggtgcgctttgggtcctgcagatcatatttgtgtctgtacccacactct

SEQ ID NO: 19102 - DNA, 479 bp, Homo sapiens
  misc_feature (1)...(479): n = A,T,C or G
aagcggcccctnacctganaaatgagggctgccgaatncgcacgagtctgactctagggctgtggtcaggccctctgccgcgtgtgacgttgcactgctccagaactctcctaggctttgtgactcagggagatttttccatggctgttggctgtggagaagccctggggtttgttagcttgacaggcttgctggatatgctgtccagccagcctgcagcgcagaggggcttagtgctactgaggcctcccgcctctctgcagtatcgatttgcgaggattgctattgaggtgtgaatgcgtgcttgtatcccagcagggcatagataatacgttattattgtctgccaagttctacatgtggagaatctgcttctgctttaaaatatcatgtgaaactccctggaaacaagaataaaaaattatgtattatgcaaaaaaaaaaaaaaaaaaactcgggggggggcccggtccccaatt

SEQ ID NO: 19103 - DNA, 449 bp, Homo sapiens
aaaaaatttgcccgcctgcggaatttggcacgcgacaggatgaagaagtacctgagcaagaccggccgggaagacattgccaatctagctgatgaattcaaggatcacttggtgcctgaccctggctgccattatgaccaactaattgaaattaacctcagtgagctgaagccacacatcaatgggcccttcacccctgacctggctcaccctgtggcagaagtgggcaaggtggcagagaaggaaggatggcctctggacatccgagtggacgccctggcatgccagtcactggcatctgctgctgctgggtacagtgtggctgtgaagagcatggagcctggagccagatggcctgggcttgaatcctggctctgccacctaacagccactaacagctgagtgaccctgagcaaactacttcactgtctatgtgtgggttccccatc

SEQ ID NO: 19104 - DNA, 427 bp, Homo sapiens
attcgcccattcctccgcgctgcaggaattcggcacgagggacgtgatagctctgcctattgcaggacaatgatggctattctaaacgctaaggaaaaaaaacaaacacagaactgtttcaagtactcaagactgacttacagaccaaccaaccaccttgctggaacccttgctagcaggcattcttataaaagaaactttcgagcctccttatattgctggaaactcagctgtgctccagactagagcctccttacctatgctatggatttttaatttattttctcttatttcatgtacactgctttttttggttacagtgtatgatggatgtgtatgaaaaaaatgtatctttgggaaaacaattacagtttgttaatttgaaaaaaaaaaaaaaaaaactcgcggcacgagggggggcccggcc

SEQ ID NO: 19105 - DNA, 498 bp, Homo sapiens
  misc_feature (1)...(498): n = A,T,C or G
aggaagtnncccnaagggacngcccngttatgatnncccctactgcaccgcgtgcaggaattcggcacgagaagaattacaatatgaatttgatgaacagggacatagcacttggctctgcaaggtgagattacctgtggacgattcaactggaaaacaactggtggctgaggccattcactcaggaaagaaaaaagaagcaatgatccagtgctcattggaagcttgtcggattcttgacactttgggattgcttcggcaggaagcagtatctcggaaaaggaaagccaagaactgggaagatgaagacttttatgatagtgatgatgacacatttcttgataggactggcctgattgagaagaagcgtctgaacagaatgaagaaggctggcaagattgatgagaagccagagacctttgaatccattgtgcaaaattaaatgatgctgaaagggaactttctgaaatttctgagagattgaaagcctcaagccaa

SEQ ID NO: 19106 - DNA, 488 bp, Homo sapiens
  misc_feature (1)...(488): n = A,T,C or G
gcgtgnnaaattgaattcgttaggcattcgccacgagactgctgctacacaagaccctgagactgacctgcaggacgaaaccatgaagagcctgatccttcttgccatcctggccgccttagcggtagtaactttgtgttatgaatcacatgaaagcatggaatcttatgaacttaatcccttcattaacaggagaaatgcaaataccttcatatcccctcagcagagatggagagctaaagtccaagagaggatccgagaacgctctaagcctgtccacgagctcaatagggaagcctgtgatgactacagactttgcgaacgctacgccatggtttatggatacaatgctgcctataatcgctacttcaggaagcgccgaggggccaaatgagactgagggaagaaaaaaaatctctttttttctggaggctggcacctgattttgtatccccctgtagcagcattactgaaatacataggcttat

SEQ ID NO: 19107 - DNA, 330 bp, Homo sapiens
agtgggatttgactgcctgccgtgccacccatgaaccagcccagcatccagccagtgagtgggcacccaatgcctctcaggatgagaccagtaaatgccggaggtggagctgggcagctgtggagccccaggccacaggccagtctcgcttggctctcatgactgtggtggtggagatagcgtggggagcctcgcccatggtctcacgtggcaagaagtgcctttagctctggatcccaaccgtttggcacagctttggccacagccaggcccctctggaattgtccttattaaaccagtttcccgagaaaaaaaaaaaaaaaaaaaaaa

SEQ ID NO: 19108 - DNA, 479 bp, Homo sapiens
  misc_feature (1)...(479): n = A,T,C or G
nggagcgnttttnttactgaactgtctaggcaattggcacgagcgtaaaccatctctatgctgacctgcaagatgccctggtaatcttacagttatatgaacgaattaaagttcctgttgactggagtaaggttaataaacctccatacccgaaactgggagccaacatgaaaaagctagaaaactgcaactatgctgttgaattagggaagcatcctgctaaattctccctggttggcattggagggcaagacctgaatgatgggaaccaaaccctgactttagctttagtctggcagctgatgagaagatataccctcaatgtcctggaagatcttggagatggtcagaaagccaatgacgacatcattgtgaactgggtgaacagaacgttgagtgaagctggaaaatcaacttccattcagagttttaaggacaagacgatcaactncagtttgggcagtgtggatttaattgaa

SEQ ID NO: 19109 - DNA, 472 bp, Homo sapiens
  misc_feature (1)...(472): n = A,T,C or G
agagggaacactgacttcgcntgacgaattcggcacgagcttaaaccttgggtgtgctgtgccccacaaggagacatgatctatgaccccagctggcaccatccgcctccactgataccctattattccaagatggtctttgaaacaggacagtttgacgatgctgaagattgagtgtggagctttctgccttgtaggtgggcgggcctccacgtcaagatctcttttcctgtcttggaggtgaaaagtcatatctgagaaaatgtttgcagtgacccctagtctggggtacacagaccagtgttccttattgacagtgttcaataaggccccgtcattctcgccagtctgttgttgttcttaatgggctcctccttgaaatgtgtgtgtgtttgtgtcaagaggagttgtgttctttgtaaataanggttnnnnnnnnannnnnnnnnnnnnnnnnnnnnnnnnnnnnnna

SEQ ID NO: 19110 - DNA, 449 bp, Homo sapiens
  misc_feature (1)...(449): n = A,T,C or G
nattgaccctcgctgcacgaattcggcacgagcctgatccgtcatggcgggaagaagatgcggttcctggtcgcgaagtccgacgtggaaacagccaagaagatccatttccgcacgccccctctctaggggggctgcgaggacacccccacaggcccggcacccggtcccacctggtgacactgggcttcctcccgccttcgtccctgttttgtaactgaccaagttgggtcccgggtggggagccttcaccctggggacatgcctgttgataacatgcatctcagtgtaggttctatttatatggcagatgacgtgaaattgtgatgtttgttacagagcttttatgtttaaagacttcaatggagaagtacggttcaataaactatttttcccgttaaaaaaaaaaaaaaaaaactcgaggggggggccgggacccaaattccctn

SEQ ID NO: 19111 - DNA, 461 bp, Homo sapiens
  misc_feature (1)...(461): n = A,T,C or G
nttgccctcgccccgcctgcagaattcgcacgagaaaacatgcaccattttcatgtgcttttgcctctcctctctgttcacatgcttttagcagcaagtcccctccaaatctgtcttggttccccttcagaaggtggcgctgcccccgaaaggcacctcagcctgtgagtgctgaggaaccagctcctctggctgattttccagttggactggccattgctctccagaagtgctctgttagcaaacgtgatgtggaaacgatcacagatggtgttttctcgttgttcgccagaatttatacgggggagacaaattcccggtaattaccaagtctgcactcgggtaccaaagctctgaagctctctgaacagttgccatacttgagttgatgaatgtgctattcatggcgtctcatctcatcaatgcatcttgagagacttaatgagattttagcaacagta

SEQ ID NO: 19112 - DNA, 452 bp, Homo sapiens
  misc_feature (1)...(452): n = A,T,C or G
ngaaaaacttgacccgcctgcggaatttggcacgcgctcccccgggagcacattattgacacgtttgtagtggagagccccaacggtaaactgactgatttcctgagcttctatacgctcccctccacggtgatgcaccaccctgctcacaagagcctcaaagccgcctactcattctacaacatccacacagagacgcccctgctggacctcatgagcgacgcgctcatcctggctaaatcgaaaggatttgatgtattcaatgcactggatttgatggaaaataagacattcttggaaaaactcaagtttggtataggagatggcaatttgcagtattacctgtacaattggaggtgtccaggtacagattctgaaaaggttggactagtactacaatagatggatatttttatttctagaactctgacatcatcatttgttaatatttt

SEQ ID NO: 19113 - DNA, 499 bp, Homo sapiens
  misc_feature (1)...(499): n = A,T,C or G
gggcncgccnnnnntttcgcctcggctgcaggaattcggcacgagatcacgaanaaaactctacctctctatactaatctccctacaaatctccttaattataacattcacagccacagaactaatcatattttatatcttcttcgaaaccacacttatccccaccttggctatcatcacccgatgaggcaaccagccagaacgcanaataaaaaaaaaaaaaaaaaaaaaaaaaaaaaaaaaaaaaaaaaaaaattttgggggggggggggggggcccccatttccctttaagggggggggaaaaaaaattgcgggggggggttttaaaaggggggggggggggaaaaccngnncnnctcngcttgtaccctcggccggtgggtgcccctcctcgtcacctggatggaaaacgcaacagatgcttgaaccggattgccaatttctagccgctgggcgtgccccggccctatccctgctaactcaatcgagaagaggcg

SEQ ID NO: 19114 - DNA, 464 bp, Homo sapiens
  misc_feature (1)...(464): n = A,T,C or G
natgaacctgaccgcctgcggaacctaaagaacccagaccatgcggctcaagtcactcagaggctgctgcatttcagggctatgttggtcctttgtttacctcctaaaccacagctgtttgtgcttcacatatgttgtgaattttccttggttctttttaaaggaatgataataaagttacttgctttaggatttgcttgattttcttccacttcagaagcttctgagagggaatgggatgatcctaccaggtgccttttcagacctgaggctctaactcaagagattcctcctctccctcaccattcctgccaccattttttctgggtgatgcagcaagagttaaattgttcacattctagaatgtgtcgaagcttctggctccaggtgtctaatggataattcagctaaatagcggctattttcagtggcaagaattataataataaagggcagtcacaagt

SEQ ID NO: 19115 - DNA, 501 bp, Homo sapiens
  misc_feature (1)...(501): n = A,T,C or G
aggccnnnnnnnnaattgaatgcgctccggctgcaggaattcggcacgaggcccccagcccgacgtgaccatgctgtcccgcctcctaaaagaacaccaggccaagcagaatgaacgcaaggagctgcaggaaaagaggaggcgagaggctatcactgcagcgacctgcctgacagaagctttggtggatcacctcaatgtgggtgtggcccaggcctacatgaaccagagaaagctggaccatgaggtgaagaccctacaggtccaggctgcccaatttgccaagcagacaggccagtggatcggaatggtggagaacttcaaccaggcactcaaggaaattggggatgtggagaactgggctcggagcatcgagctggacatgcgcaccattgccactgcactggaatatgtctacaaagggcagctgcagtctgccccttcctagcccctgttccctcccccaaccctatccctcctacctcacccgcagggggaagg

SEQ ID NO: 19116 - DNA, 470 bp, Homo sapiens
  misc_feature (1)...(470): n = A,T,C or G
agagtnnaactgactgcctgacgattcggcacgagatgaacgacaccgtaactatccgcactagaaagttcatgaccaaccgactacttcagaggaaacaaatggtcattgatgtccttcaccccgggaaggcgacagtgcctaagacagaaattcgggaaaaactagccaaaatgtacaagaccacaccggatgtcatctttgtatttggattcagaactcattttggtggtggcaagacaactggctttggcatgatttatgattccctggattatgcaaagaaaaatgaacccaaacatagacttgcaagacatggcctgtatgagaagaaaaagacctcaagaaagcaacgaaaggaacgcaagaacagaatgaagaaagtcagggggactgcaaaggccaatgttggtgctggcaaaaagccgaaggagtaaaggtgctgcaatgatgttagctgtggccactgt

SEQ ID NO: 19117 - DNA, 448 bp, Homo sapiens
  misc_feature (1)...(448): n = A,T,C or G
attganatcgatcccgctgcacgaattcggcacgaggccatttcctagctcccgccttcctccaggaattatcgggggtgaatatgaccaaagaccaacacttccctatgttggagacccaatcagttcactcattcctggtcctggggagacgcccagccagtttcctccactgagaccacgctttgatccagttggcccacttccaggacctaaccccatcttgccagggcgaggcggccccaattgacagatttccctttagacccagcaggggtcggccaactgatggccggctgtcattcatgtgattgatttgtaatttcatttctggagctccatttgtttttgtttctaaactacagatgtcaactccttggggtgctgatctcgagtgttattttctgattgtggtgttgagagttgcactcccagaaaccttttaaga

SEQ ID NO: 19118 - DNA, 478 bp, Homo sapiens
  misc_feature (1)...(478): n = A,T,C or G
tctgagccatgacgctgagaatcatgcaagcccttatgagttcgacgagtgcttcacctcagtgcagaagagagcgatccggaccctctggacagtgctagatgccattgatcacatgtggctgccagtggtgaggacttggcgcctcaatgagcggcactatgggggtctaaccggtctcaataaagcagaaactgctgcaaagcatggtgaggcccaggtgaagatctggaggcgctcctatgatgtcccaccacctccgatggagcccgaccatcctttctacagcaacatcagtaaggatcgcaggtatgcagacctcacagaagatcagctaccctcctgtgagagtctgaaggatactattgacagagctctgcccttctggaatgaagaaatagttccccagatcaaggaggggaaacgtgtactgattgcagcccatggcaacagcctccggngcattgtcaagcatctg

SEQ ID NO: 19119 - DNA, 484 bp, Homo sapiens
  misc_feature (1)...(484): n = A,T,C or G
agggagttnagggggagnnnnnnntttgatccgccagaaggactntcgcacgagttcagagctgccaggaagaaatgatttcccttggggatggagacatcaggaccatgtgcccccttctgtctatgaaacctggagaatattcttatttcagtcctcggaccatgtcgatgtgggctggcccggatcactggcgctttatgcctcgacgcaaacaagatgctccttcccaatcagaaaacaaaaagaagagtacaaaaaaagattttgaaattgactttgaagatgatattgactttgatgtatattttagaaaaacaaaggctgctactattctgaccaagtccactttggagaaccagaattggagagctaccacccttcctacagatttcaactacaatgttgacactctggtccagcttcacctcaaaccaggcaccaggttacttaagatggcccagggccatagggtagagactga

SEQ ID NO: 19120 - DNA, 442 bp, Homo sapiens
  misc_feature (1)...(442): n = A,T,C or G
nttgaccgcctgcggaatttggacgacgtattgtcaagagaggacgtgaaatgggaaaattgaattttagctggacatggtggtgcattcctgtagtcccaggtatttggaggctgaggcaggattattttagcttgggagttcaagtctagcctgggcaacataatgagaacccatctcttaaaaaaaattgactttaatcaaagaaacctataattatatagcagtgggacaagatagcctcttttgggcctctgtttcatctgtgaaatgatgcttttcaattagatgatgtgtggcaagagccacacggtttgagattcacaatattttgcaagtgatatataattaagcaatgctgttttctaaggtattcatgtatatattttaaccccatcctgtaaaattaaagtcaaactttggaaataagacaggtagatac

SEQ ID NO: 19121 - DNA, 490 bp, Homo sapiens
  misc_feature (1)...(490): n = A,T,C or G
agaactgatgcctggaaaangacggccttggagagagctctggacaagagagaggccagggctttcaatgaaggggagcaagagaagtgtggttccgagacccatcacaccaggaggaactctaggtgggacaagaggacactggagcaggaggacagcagttccaagaaaagaaagcttttataggaaagcccagtgacatgggccagcagccacagcatattgtaaactgaagatgaccagctcgtgggaccatctagataagcttgttttttgtaaggagtttgtgtgctgttggaaaacatggaaaatgcatccttaacacctgagcctctggtcatcttcagtattttctgtcatttgcaaaagctttcagagggcattgtgtatccgtaataatgtccttgaagtcagagactggaaatgttgatctcttagtcttctatagacaaggaggtcagactggagtgaatgttgtaaaagttgaaat

SEQ ID NO: 19122 - DNA, 472 bp, Homo sapiens
  misc_feature (1)...(472): n = A,T,C or G
agcggggaatgaactgcatngctctgcggaatncggcacgaggaaagaagcagtctgatgtcatgcgctttcttctgagggtccgctgctggcagtaccgccagctctctgctctccacagggctccccgccccacccggcctgataaagcgcgccgactgggctacaaggccaagcaaggttacgttatatataggattcgtgttcgccgtggtggccgaaaacgcccagttcctaagggtgcaacttacggcaagcctgtccatcatggtgttaaccagctaaagtttgctcgaagccttcagtccgttgcagaggagcgagctggacgccactgtggggctctgagagtcctgaattcttactgggttggtgaagattccacatacaaattttttgaggttatcctcattgatccattccataaagctatcagaagaaatcctgacacccagtggatcaccaaaccagn

SEQ ID NO: 19123 - DNA, 478 bp, Homo sapiens
  misc_feature (1)...(478): n = A,T,C or G
agggggcnatcgccatgctgcaggcattcggcacgagcaggcacatcccgatggaacaaccggcaggtggccttgtgggaccaggataacctctctgtgcctctgatggaggaggacctggacggctcctcgggcgtgctgtttcccttctatgacgcggacaccagcatgctctacgtggtggggaagggagatggcaacatccgctactacgaggtgagcgccgacaagcctcacctgagctacctgactgagtaccgctcctataacccacagaaggggatcggtgtcatgccaaagagaggactcgacgtgtcctcctgcgagatcttccgcttctacaagctgatcacaaccaaaagcctcatcgagcccatctccatgattgtgccccggcggtcagaatcctaccaagaggacatataccctccaacagcaggggcccagccctccctgacggcccaggagtggctcagcg

SEQ ID NO: 19124 - DNA, 505 bp, Homo sapiens
cgcccccattcgcccgcgctgcaggaattcggcacgcggtgaagcggtctgccagagcccatggtgaccgcgtgagtggagcccagctgtgtggatgccccagcatggatgactacatggtcctgacaatgattggggagggctccttcggcagagctcttttggttcagcatgaaagcagtaatcagatgtttgccatgaaagaaataaggcttcccaagtctttctctaatacacagaattctaggaaggaggctgttcttttagccaaaatgaaacaccctaatattgttgccttcaaagaatcatttgaagctgaaggacacttgtatattgtgatggaatactgtgatggaggggatctaatgcacaagattaaacagcagaaaggaaagttatttcctgaagacatgatacttaattggtttaacccaatgtgccttggagtaaatcacattcacaagaaacgtgtgctacacagagatatcaagtccaagaatatctt

SEQ ID NO: 19125 - DNA, 453 bp, Homo sapiens
cttgaccctcgctgcacgaattcggcacgagctcaccggatttgtccctggtgccttatttagttcacttggtgaggtcatgtttttttcctggatggtgttgatggtagtagatgttcttcagtgtctggacattaaaatcttgggcatgcagcaccatatgagaggtttaaaaaataaaattaaaaaagagaaaagaacccagagttgatctctgcagcatgccatcactgctggggatgaggaaacggtgatttcaggactgttttttctgtctcttcagtgcctctttcagtgatctgaggttaaaaccagagggacaatcagtggagccttctttctgccgtcttgctttactctcacgcccaagaatcagaattcagaacttttaataagaaaagctttcagaactcaggaaggacaaggaagacattctggttctccatgcttaac

SEQ ID NO: 19126 - DNA, 442 bp, Homo sapiens
actgattccgctgcggaattcgtacgaggcgcttcgtggaggttggccgggtggcctatgtctcctttggacctcatgccggaaaattggtcgcgattgcagatgttattgatcagaacagggctttggtcgagggaccttgcactcaagcgaggagacaggccatgcctttcatgtgcatgcacgctcactgatttcatgctcaagctttcgcacagtgcccaccataagtatgtccgacaagcctggcagaaggcagacatcaatacaaaatgggcacgccacacgacgggccatgaagattggagcccgagaatggagagccaagaagacggattttgatcgttataaagttatgaaggcatagactttgaggaacagaataatcaagaatgaagttgagaagcttcaaaaggcagctctcctgaaagcttctcccaaa

SEQ ID NO: 19127 - DNA, 478 bp, Homo sapiens
  misc_feature (1)...(478): n = A,T,C or G
gtgtgcccnaattgatcgtctgtangacttcggcacgagcctgccagtaagcaggagcccgagaacgatcagggggttgtgtcccaggctgggaaagatgacagagagagtaagttggagggaaaggcggctcaggacatcaaagatgaggagcctggagacttgggccgaccgaagcctgaatgtgagggttacgaccccaacgccctgtattgcatttgccgccagcctcacaacaacaggtttatgatttgctgtgaccgctgtgaagaatggtttcatggcgattgtgtgggcatttctgaggctcgagggaggcttttggaaaggaatggggaagactatatctgcccaaactgcaccattctgcaagtgcaggatgagactcattcagaaacggcagatcagcaggaagctaaatggagacctggagatgctgatggcaccgattgtacaagtataggaacaatagagcaga

SEQ ID NO: 19128 - DNA, 453 bp, Homo sapiens
  misc_feature (1)...(453): n = A,T,C or G
ntttgaaattcgctccgcgctgcaggaattcggcacgagctcattttactttttgcatggaatacagccatttagtcctaatatacataccaatgagacaattaaaaattggttggaagatggagcttatcacattgtgctactacgactttattttttcttgaaaataaagccttgaggatgtgaacataaatgttggtatcataaaacaagtagtaataaaagcataaattatcaaatatcaggtgatcttactatggagaaaaaaaaccaatatctagttaccagatgaaaaaatgtttaatacaaagagctgaaaatgtagaaattgagttatcttccctttgcaaaatttttacactttaaattagtaattctttgtttgcaaggttttcatccctatgctgttgttttctactacctgttttactcttgttcatactgctactttcc

SEQ ID NO: 19129 - DNA, 455 bp, Homo sapiens
  misc_feature (1)...(455): n = A,T,C or G
attgacgcctcctgagacgcacatgnngttttaatagncattccaatatgagatgccgtgttacaggaaagcccttgccatcctaaaagccaccccacttctctttaaagagaaaggcccaagcctctcccaagtccacacaggggaggtgatagcattgctttcgtgtaaaatatgtaatgcaaaatttttttaatcttcgccttaatacttttttattttggtttattttgaatgatgagccttcgtgcccccccttcccccttttttgtcccccaacttgagatgtatgaaggcttttggtctccctgggagtgggtggaggcagccagggcttacctgtacactgacttgagaccagttgaataaaagtgcacaccttaaaaaaaaaaaaaaaagggtcatctcatggggccagaattcgggcatgcccacacctacaaagctgagaactg

SEQ ID NO: 19130 - DNA, 477 bp, Homo sapiens
  misc_feature (1)...(477): n = A,T,C or G
cggcgcccccattgacaatcgcatcgcctgcaggaatacggcacgaggaggtgcaagtgaccatgtgcatcggcgcgtgcccgagccagttccgggcggcaaacatgcacgcgcagatcaagacgagcctgcaccgcctgaagcccgacacggtgccagcgccctgctgcgtgcccgccagctacaatcccatggtgctcattcaaaagaccgacaccggggtgtcgctccagacctatgatgacttgttagccaaagactgccactgcatatgagcagtcctggtccttacactgtgcacctgcgcgggggacgcgacctcagttgtcctgccctgtggaatgcgctcaaggttcctgagacacccgattcctgcccaaacagctgcatttatataagactggttattattattaattaattgggtgaccttcttgngacatcggggctggtctgatggactgtgtatttattaaa

SEQ ID NO: 19131 - DNA, 456 bp, Homo sapiens
  misc_feature (1)...(456): n = A,T,C or G
aatagcaattctgccccgcgctgcaggaattcggcacgagggaatatggttgatggatatagagatacctctttattgtgcaaagctgccatccatgcaggaataattgctgatgaactaggtggccagatcagtgtgcttcagcgcaaagggatcagtcgatatgaagggattctggccaatggtgttctttcgagggatggttccctgtcagacaagcgatttctgtttacctccaatggttgcagcagatccttgagttttgaacctgacgggcaaatcagagcttcttcctcatggcagtcggtcaatgagagtggagaccaagttcactggtctcctggccaagcccgacttcaggaccaaggcccatcatgggcttcgggcgacagtagcaacaaccacaaaccacgagagtggctggagatcgatttgggggagaaaaagaanataaca

SEQ ID NO: 19132 - DNA, 463 bp, Homo sapiens
  misc_feature (1)...(463): n = A,T,C or G
natagccccgtctgcaggcattcggcacgagggaaaccccatagtcccttcatttcttgagactcaactcctgggaggagagggtctcaagagttgtccctggaaggagggcgggggcagtctgcatctatttcaggttgtggctcttggttctaggactcttacttctctggctaagggctcagcttcttgggacttcaaccatcttctttctgaaagaccaaatctaatgtaaccagtaacgtgaggactgccaagtatggctttgtccctatgactcacaggagggtttgtcgggcaaattcaggtggatgaagtatgtgtgtgcgtgtgcatgggagtgtgcgtggactgtgatatcatctctacagcctggcgataaaccagacgaacttacaaaaaaaaaaaaaaaaacctcaagggggggcccggcccccagttccccctatagggagccggataa

SEQ ID NO: 19133 - DNA, 476 bp, Homo sapiens
  misc_feature (1)...(476): n = A,T,C or G
nttggcccgcctgcagaattctgacgagctcattttatattatgaaactgagtccaggtaagtgaatctgtccaaggtcacccagcaaggtatcagtagccctgagggtaaggactctgataaggctcgggagggtcctggaaagcctgaggcggcaggaagagtgtgcagagttgagcgtgtctggaaggctgatccactgctgggcccacatcaaagcccccatggggagcagacccgactgcacatggctcttttgctggaagaagagcatggctgcgcagaggactaaaatttcatctgggaaggcttcttttgactgtcagtagcaggatgtcnnnncatgagggtgctatgggaccacagctgtctttgttcccattgcaactcaaccctgcgggaggccgcctacatccctgagagccttctggagcctacagaggagacattggccagccaaaaggaaaggagtggcc

SEQ ID NO: 19134 - DNA, 509 bp, Homo sapiens
  misc_feature (1)...(509): n = A,T,C or G
cgccccatttgccncgcgctgcaggnctagcacccgcgctgcaggaattcggcacgaggcgtgccgctgtaaactggcctctgggccgggggcgagcagcccccgggaggccgagtgcatctgttggaccgtgcgaggagaagaaaaaaaatatcggccagaggagaggaactaaccgaacattcttcctccctaccttatagaggggagtggtcatctacactaaagcaaagtgttaggcgcgtccgtgcgaagagaccaccaaacaggctttgtgttccttatcacaggaagaaaattttccttgacctttaggtgcttttatattcatctcaaaaacaaaattctgaactcaggacttggcaagtgtctctatgttgtctcctagagtgggtagtcctgcttcttttacccagttactttccctgtttttgaaatgtggctatcacttctctacacattacctccatgatttggaatggaaaaggccactttctttttgtctggct

SEQ ID NO: 19135 - DNA, 457 bp, Homo sapiens
  misc_feature (1)...(457): n = A,T,C or G
ataagccctcgctgcagcgctgcaggaattcggcacgagtataagcatgagttgaagaaactacatgaagaattatgcatactgaagagaagctatgaaaagcttcagaaaaagcaaatgagggaattcagaggaaataccaaaaatcacagggaagatcggtctgaaattgagaggttaactgcaaaaatagaggaattccgtcagaaatcgctggactgggagaagcaacgcttgatttatcagcaacaggtatcttcactggaggcacaaaggaaggctctggctgaacaatcagagataattcaggctcagcttgtcaatcggaaacagaaattagagtctgtggaactttctagccaatcagaaattcaacacttaagcagtaaactggagcgggctaatgacactatctgtgccaatgagttggaaatagagcgcctcaccatgagggtcn

SEQ ID NO: 19136 - DNA, 471 bp, Homo sapiens
  misc_feature (1)...(471): n = A,T,C or G
gggggngtgncctggctacatggcagtangaattcggcacgagcagatgtgagaatgagcagaggtgggcattgaagcagtcgtttttgctgtattccctctgttcagaagttaagtagaaccacagctcgatgtcccctcaggctcattaggatggttactattcaaaaaaagaaagtggccaggtgcggtggctcacgcctgtaatcccagcactttgggaggccaaggcgggtggatcacaaggtcaggagttcgagaccagcctgaccaatatgatgaaaccccatctctactaaaaatacaaaaattanctgggtgtggtggcaggcgcctgtaatcccagctactcaggaggctgagacaggagaattgcctaaacccgggaggtggaggttgcagtgaaccgagatcgcgccattgcactccagccttggcaacaagagcgaaactccatcttaaaaaaaaaaa

SEQ ID NO: 19137 - DNA, 476 bp, Homo sapiens
aggcggctttgccatagagcccgctgcaggaattccgcacgagctgcctcctatacctagctggtctcctctctgttgctcaatgttaccacagcaggctttctagaagcactctgacagtgttactccctaatatccttcagtgacttcaggaactttcaggagaaagccaaactcctctgtttggtgtacaaggtcttctgatgtgtttcctccaccgaatgttctggtgaaacagacttacacttcttcagaagccacatttggccaggcctcccgccttggtaaatgctgtactctttgcatcaagtatgctagtcatccttccccacttggaaaattcctatgcatcttgcaagcctgacataagcatttcctctgtgaaacctcctttgctccactcaaggagagtcatctaacttccactttcgtgtcaccactgtaattacaacctacctctattgatgtcacttaaa

SEQ ID NO: 19138 - DNA, 497 bp, Homo sapiens
  misc_feature (1)...(497): n = A,T,C or G
aggagttccccaagggagcgcccngatagaaaacctaatagatccgcctcgcangaattcggcacgagctggtcttgaactcctgacctcgtgatccacccaccgtggcctcccaaagtgctgattacaggtgtgagccaccatgcccagccatgtcatttcatttaaagtcacaatttccatgaatctcaacaagtgaggacctgctatattttgttgcatgcagcttttctttacggacactaaaaggccccatacttaagattccatctactttaagtttaaaggattttcagaatcaccttaagtgtcaaatttgttagcaggattaattgatatgaattcacttattaaacagtaaactcaaataacatagacatcaaataacagacatctgctctagttaatgataaaatgtttatagattttatcaggtgagtagtttgaaactaaatggtttacatctaaattaagggcaggagctgtctttcagacat

SEQ ID NO: 19139 - DNA, 476 bp, Homo sapiens
  misc_feature (1)...(476): n = A,T,C or G
gctggcggananaganaaaactgaccgcctgcgggaatcgacaagcgctgcaagaattcggcacgagtgagggtctaagtccgggcagccgaagagtgtggtaggttagcaagatgaacaaagatgcgcagatgagagcagcgattaaccaaaagttgatagaaactggagaaagagaacgcctcaaaaagttgctgagagctaaattaattgaatgtggctggaaggatcagttgaaggcacactgtaaagaggtaattaaagaaaaaggactagaacacgttactgttgatgacttggtggctgaaatcactccaaaaggcagagccctggtacctgacagtgtaaagaaggagctcctacaaagaataagaacattccttgctcagcatgccagcctttaagattgaattagattgtgttgttgtggttttatttctgaaagtaaaacttgccataaattagaaaacaatttn

SEQ ID NO: 19140 - DNA, 328 bp, Homo sapiens
catagatccgcgctgtaggaattcggcacgagagcaatcaagcttctacctgtaccttatgtaaggtagaccctcctagtgtcagtacctgagctagtttacctcagttccgcaggcaggacagccggtccgggaaccctgagtgagaatgagtgtggatgtgtacagtacacgcactggacggcagcgggaggctgggactttccattacaaatagagacttcattcctgttgagtctagttggaatttttagtatgaatgtgagatttttctcctgcttgtgacattaagaataaaaaactgtgatctaaaaaaaaaaaaaaaaaa

SEQ ID NO: 19141 - DNA, 429 bp, Homo sapiens
  misc_feature (1)...(429): n = A,T,C or G
gggatggcccngaggtggnnnnnctactgatnngcctntatgattcgccctcnaggaatccgcacgagagattggagagcgggtgtggctgcccaaccccatccagagcatctgcttccagatgagccagtgcctcgcatgataccagaggaggcgagggacagagacagcaaggcagacagtggctggcaggggggcccaggcccgggacgaggcctccccttcagctcaggcacagcaacttgcccaggactgacactgtcaccctgactgcaggaggcacagggactccgggagactcagagggcgaagagcactggcatttggcatgtccatgacattggggactcccctagcacggtgtctgacgtgtggggaaccctcagtaaatagtggtgcatttgtattgagaaaaaaaaaaaaaaaaaa

SEQ ID NO: 19142 - DNA, 471 bp, Homo sapiens
  misc_feature (1)...(471): n = A,T,C or G
ngtgtgccnaaatgaganccaaagatagctagcggaaancgcacgagcttgcttttagttttgatagaagggaagacctgcagtgcacggtttcttccaggctgaggtacctggatcttgggttcttcactgcagggacccagacaagtggatctgcttgccagagtcctttttgcccctccctgccacctccccgtgtttccaagtcagctttcctgcaagaagaaatcctggttaaaaaagtcttttgtattgggtcaggagttgaatttggggtgggaggatggatgcaactgaagcagagtgtgggtgcccagatgtgcgctattagatgtttctctgataatgtccccaatcataccagggagactggcattgacgagaactcaggtggaggcttgagaaggccgaaagggcccctgacctgcctggcttccttagcttgcccctcagctntgcaaagagccacct

SEQ ID NO: 19143 - DNA, 477 bp, Homo sapiens
  misc_feature (1)...(477): n = A,T,C or G
ngagatgccnaaaattgatncccaattgatcgccactgcgagncaacttttggcacctgtggagactgggacttaaaagtcatgctcccaggccagtgccagtacttgggcttgccagtggcggattacttcaagcagtggattaatctgaaaaaggcttacagcttcgccatgggctgctggcccaagaatggacttctagacatgaacaagggcctcagcctgcaacacataggccggccccacagcggcattgacgactgcaagaacattgccaacatcatgaagacactcgcctatcgaggcttcatcttcaagcagacatcgaagccgttctgattggccgaggacaggatggggcaggacagggtagctgtttggcccagcccagaatcctcctctccctcaccagaggggaagagggagagtggcataactctgtgtccagagtgtcctcagctgccctgtgggctcatg

SEQ ID NO: 19144 - DNA, 473 bp, Homo sapiens
aattagaacggccttaggaattcggcacgagatggggcttgcaacttatctcacacccgaccaatcaggtagtgaagagagctcactaaaacgctaattaggcaaaaacaggaggtaaagaaatagccaatcatctattgcctgagagcacagcgggagggacaatgatcaggacataaacccaggcattccagccagcaacggctaccctctttgggtcccctccctttgtatgggagctctgtttccactctattaaatcttgcaactgcactctcttctggtccgtgtttgttacggattgagctgagcttttgcttattgtccaccattgttctttgccgctgttgcagacctgccactgacttccatccctctggatcaagcagggtgtccgctgtgctcctgatccagcgaggcgcccattgccgctcccgatcgggctaaaggcttgccattgttcctgcacggct

SEQ ID NO: 19145 - DNA, 474 bp, Homo sapiens
  misc_feature (1)...(474): n = A,T,C or G
attagaaagccttaggaagcctgcagatactaccagacaaccttatccaaaccatttacccaaataaagtataggcgatagaaattgaaacctggcgcaatagatatagtaccgcaagggaaagatgaaaaattataaccaagcataatatagcaaggactaacccctataccttctgcataatgaattaactagaaataactttggcttcatctttctcttgtgtggcttcacatttaaaccagtatctttattgaattagaaaacaagtgggacatattttcctgagagcagcacaggaatcttcttcttggcagctgcagtctgtcaggatgagatatcagattaggttggataggtggggaaatctgaagtgggtacattttttaaattttgctgtgtgggtcacacaaggtctacattacaaaagacagaattcacggatggaaaggagaatgaacaaatgtgggagtn

SEQ ID NO: 19146 - DNA, 475 bp, Homo sapiens
  misc_feature (1)...(475): n = A,T,C or G
ggagatgtccnaaaactgaggnggcattgataancnctcgcgagagacattacactagttgaggctaccgaaccttacattttgctagagctcaagtaatagaaacttagtttcagaatcctgaattcagcacctattttgaattaatgtgagaccacaggtggcaggcagattcctgcttggcataagcatttgtaggtcttcattcaattctgttagatttttttattggacttacataatgccgtttatttgagaaacacataacatctctcctttctatgaaaaattttttaaaaggtggttaaaattgcctttaattgcccagtagactaattccacagtcagaacatgcaaacttttttgaagaaattacttgaataagtagttttcatgttttcaatatgcagttttgaaaatgaggattcacctagacttttttagatttactactaggagaccttcctcatatgan

SEQ ID NO: 19147 - DNA, 474 bp, Homo sapiens
  misc_feature (1)...(474): n = A,T,C or G
aatagaaagccttcaggaatccgccacgagcaaagatacaattttcttgctgacataaaaatcacacaaacaagtcccccccaaaccacaactgtctctcaaatagcttaaaaaaattgaaaaacattttacgatttttcaagttttctagattctaacaagatgttcagctattagaggaatgttaaaaattttatattatctagaacacaggaacatcatcctgggttattcaggaatcattcacacatgtgtgtgtgtctgagatatagtctaaattaagcaagcacatagtattacatacttgaggggctggtgaacaaaagaacaatatactttctgcaaaaccaaggactgtgctgcgtaatgagacagctgtgatttcatttgaaactgtgaaaccatgtgccataatagaattttgagaattttgcttttacctagattcaagacaatgaaattacacttttaagn

SEQ ID NO: 19148 - DNA, 494 bp, Homo sapiens
  misc_feature (1)...(494): n = A,T,C or G
nattgcaccgcgctgcacgaattctgcacgagcccctgtccttacaataagccgaggattctgggtgctgctttcctactacctggggctgctgcccttcatcccaatccctgagaagatcttcttctgcttcctgcccaacatcatcaacaggacctatttcccattttcctgctcttgcctgaaccagatattggctgtggtttcgaaatggctgatcatgaggaagagtctgatccgacacttggaggagcgaggggtgcaggtggtcttttggtgccttaatgaagagtcggattttgaagcagccttcagcgtgggagccactggcgtcataacggattatcccacagccctgcggcactacctggacaaccatggaccagctgcccggacctcctaagtccagaagcctcgaggtctcctgtatctcttcctgaaaaataaatatttgcctttcgatcagaaaaaaaaaaaaaattctggaggggggg

SEQ ID NO: 19149 - DNA, 500 bp, Homo sapiens
  misc_feature (1)...(500): n = A,T,C or G
cttggccnccgcctttccgccgcgctgcaggaattcggcacgagcccctgtccttcacaataagccgaggattctgggtgctgctttcctactacctggggctgctgcccttcatcccaatccctgagaagttcttcttctgcttcctgcccaacatcatcaacaggacctatttcccattttcctgctcttgcctgaaccagttattggctgtggtttcgaaatggctgatcatgaggaagagtctgatccgacacttggaggagcgaggggtgcaggtggtcttttggtgccttaatgaagagtcggattttgaagcagccttcagcgtgggagccactggcgtcataacggattatcccacagccctgcggcactacctggacaaccatggaccagctgcccggacctcctaagtccagaagcctcgaggtctcctgtttctcttcctgaanaataaatatttgcctttcgatcanaaaaaaaaaaaaaaaactcgg

SEQ ID NO: 19150 - DNA, 446 bp, Homo sapiens
  misc_feature (1)...(446): n = A,T,C or G
cgagggtaannnnaattgaccgcctgaggaactcggcacgagccaaagtcagtcttgagcagagggagcacattttgtggacctggttccacctttccattccaaaccacctgtttccccttccattagcagaaactctgggggaactttgtgtctcagtcctagaatctccccaagtgagtggaagtgacatgatgcagtcttcctcatggggcacctgaaagaaattagtgtgggtgcttcgatctaccttgtctgtcagagttgaatatctctttccctatcatgctgcttctgaaaattcagttttggagcaagtcctgtgagcaagataagaatctatagaaccaagatgctcattttcagaagaaatatgttcaacctgggatcagacttccatgctctggggaatccaagtggtagcacctgtaaccctgtgtactaag

SEQ ID NO: 19151 - DNA, 474 bp, Homo sapiens
  misc_feature (1)...(474): n = A,T,C or G
ntttgaacatcgaccgcctgtcggaattcggcacgaggaacattctgttacctcaaacacgctgttttcatgcaatttagttaactggtagcactttcagaagaagacaaagtaaaaatggttaggtcaatttggtggcatagagtattctatcgatcagtggtcaaaagagtagtcattctgagtgatctctaacattacggttgatggaagagatgacccatagatgtccctacatctcatttctcttatgacacacacttgggagaaatcgtccagtgcactttgtccaggccttttacttgtaccaactactttgctttatgctgttttcactttagtggttctgccttctagtccacagaaaagatttttcttaacgtatttttttcccaacactttattatgggaattttcaaacataccgaaaagataaaagaaatttacagagaatactcgtgtctctatcagctn

SEQ ID NO: 19152 - DNA, 450 bp, Homo sapiens
atttgattttcactcgcgctgcaggaattcggcacgaggagcgcttctcaggcacgtaccactttctccggacccagaagatcatctggatgcctcaggaactggatgcatttcagccataccccattgaaatcgtgccagggaaggtcttcgttggcaatttcagtcaagcctgtgaccccaagattcagaaggacttgaaaatcaaagcccatgtcaatgtctccatggatacagggcccttttttgcaggcgatgctgacaagcttctgcacatccggatagaagattccccggaagcccagattcttcccttcttacgccacatgtgtcacttcattgggtatcagccgcagttgtgccgccatcatagcctacctcatgcatagtaacgagcagaccttgcagaggtcctgggcctatgtcaagaagtgcaaaaacaacatgtgt

SEQ ID NO: 19153 - DNA, 484 bp, Homo sapiens
  misc_feature (1)...(484): n = A,T,C or G
ggagtncgggtcacattgacggcttnatagatgngtctagaggagcaccccctctttaagaagctgaacttcaagcggctgggagctggcatgctggagccgccgttcaagcctgacccccaggccatttactgcaaggatgttctggacattgaacagttctctacggtcaagggcgtggagctggagcctaccgaccaggacttctaccagaagtttgccacaggcagtgtgcccatcccctggcagaacgagatggtggagaccgagtgcttccaagagctgaatgtctttgggctggatggctcagttcccccagacctggactggaagggccagccacctgcacctcctaaaaagggactgctgcagagactcttcagtcgccaagattgctgtggaaactgcagcgacagcgaggaagagctccccacccgcctctagcccccagcccgaggcccccaccagcagttggcggtagcag

SEQ ID NO: 19154 - DNA, 472 bp, Homo sapiens
  misc_feature (1)...(472): n = A,T,C or G
tggcgaaaannnnnaattgcnctgcgctgcacgaattcggcacgagaagatggtggccgcaaagaagacgaaaaagtcgctggagtcgatcaactctaggctccaactcgttatgaaaagtgggaagtacgtcctggggtacaagcagactctgaagatgatcagacaaggcaaagcgaaattggtcattctcgctaacaactgcccagctttgaggtaatcgaagagactgaacgtgcttcgcctaccgcgaattcatcgtgaacgaatatacaggagtgtaaacttgtaatctgagtaccatgaactcgaacacttgcaggataattacggtagcgattgtggtgtttggcccttcattcccgtctccccgacccacccccaaatcgtgtgctccccttctgtgagcttatttttggaggagaaatgtgtgtgtgtggcaggagtgaaaacagaacatcgaggtttaatg

SEQ ID NO: 19155 - DNA, 530 bp, Homo sapiens
  misc_feature (1)...(530): n = A,T,C or G
aggagattgcgccttcgccggctgcaggaattcggcacgagatccagtgtccagacgccttgccactggggtcagcatggcatccagcatccaacgccagctgtggctgtgacaaacgcagcagcactgggcgttcagcagcagcagcactgaggctgtcctcacctatctggctctgtgatggaatttggtgtaattctaggtacctggtctctgtttctgcttttttcccaagccttgtttctacagccttcaagtgattctgtaacttactcaatgtgctttcaataaaattcatttcctgatttaaaaaaaaaaaaaaaaaaaaaacctcgggggggggcccgggccccaattccccctatagggagtcgtataacaattcactgcccgccgtttaacaacgccgggacgtgggaaaannnnnnnnnnnnnnnannnnnnanagttntttnnnngagantgnnnttnnnntaaaanntgttttgttnnaagttaattaggggttgtttaatttatacaaggncacg

SEQ ID NO: 19156 - DNA, 463 bp, Homo sapiens
  misc_feature (1)...(463): n = A,T,C or G
cctagaccgcccttaggaattcgctacgagccgacacgannagatgaagagttcaatccgtgctgtctgaactcacagtgtagcangcgagatagacgggaagatcggtagggtgggagatgccggaaaggcttcccgtgagactggataagaaatcaaaaatctggtgaaattgccggcaagagggagttaaggacattccaggcagaggcaagattcctaagatgaggacacagcatcctgggccactgtcactaatacaaatttgcctctggagggactctacggaagataattcccctgaaatttggagagttgaattaagctaggactgattctggctggaatttgtggtggctacgtaccctagagggcctcaaggaaacccacggttcaagacagccctgacagattctggagtctagaacagaaatggatttgaacatgggcaaggccaaccacc

SEQ ID NO: 19157 - DNA, 455 bp, Homo sapiens
  misc_feature (1)...(455): n = A,T,C or G
cgatgggtaaannnnaaattgcccgcgatggacgcgcgctgcaggaattcggcacgagggacggcctcaccatgatgaaacgggcagctgctgctgcagtgggaggagccctggcagtgggggctgtgcccgtggtgctcagtgccatgggcttcactggggcaggaatcgccgcgtcctccatagcagccaagatgatgtccgcagcagccattgccaacgggggtggtgtttctgcggggagcctggtggctactctgcagtccgtgggggcagctggactctccacatcatccaacatcctcctggcctctgttgggtcagtgttgggggcctgcttggggaattcaccttcttcttctctcccagctgaacccgaggctaaagaagatgaggcaagagaaaatgtaccccaaggtgaacctccaaaacccccactcaagtcagagaaacat

SEQ ID NO: 19158 - DNA, 490 bp, Homo sapiens
  misc_feature (1)...(490): n = A,T,C or G
gggcggagnnnnnnaattgaaatccntaaactgaggggtgagctgaaaaactcttgaacgtncagaaatgatttctggaatcagaatttcaatatgtaataccctcaggtaggcaatcttgaaccctctatgcagtgagagcattattaatatgagatgttgaatgatgcctttacagacttcagcagcaaagccatttggttgaggttttctgtgttaatgtgaaaagctaagccactgagatttgcaggggagcttctgagccaccctgcttgttggttatatgaggatgtaaaataggtggaattaaaatgtgagcaggaaaggcaaggcatgtgtgcattttcactcattttggtcaaggttaaactgacatgtatagcactgaggtctgtagggttcttaatatcttttgagtcttgctgtgaaatgaaagtgtgggaggtttcctttgtccattagcagccccaagaaccagaacccttttgct

SEQ ID NO: 19159 - DNA, 540 bp, Homo sapiens
  misc_feature (1)...(540): n = A,T,C or G
gagagattcgcggctgagattcggcacgagctaacatccagtcaatcatggcatctgaaaaacaagtcaacatcctgatgaaattgctagatgaggctctaaaggaggtagatcagattgaattgaaactgagcagttatgaggaaatgctccaaagtgtaaaagaacaaatggatcagatctctgaaagcaaccacctaattcatcttagtaacactaataatgtaaaactcctatctgagatagagttccttgtgaaccacatggacttggccaaaggtcatataaaggcccttcaggaaggagatcttgcttcttccagaggcattgaggcctgcaccaatgctgctgatgcccttctgcagtgcatgaatgtagctcttcgaccaggccatgacttgcttctggcagtcaaacagcaacagcagcgattcagtgatttgcgagagctttttgcccggagactgggcagtcacctcaacaatgtttttgttcaacagtttactcaggccctccttcaactctataacaggtcctacn

SEQ ID NO: 19160 - DNA, 459 bp, Homo sapiens
  misc_feature (1)...(459): n = A,T,C or G
ntcgacccgccgtgagaannttttcccccggctgcaggaattcggcacgagcaggactggagtcttggcagctgatgaacaacaccttgccggccatgaggagctgatgctgactatctccccaacatctgaaggcttaaagaacattgtcgttcttcagccctccttgcttctctcaatacaataagacattgcagaagcaaaagggtggcctctgctccaggcaaggcagctggctctgtctggggcatcggcctggggcttgggtgccacgtgctgagattgcatagtcgaaacagccatttttgacaacaatagcttgtggctccccacattttcctaccctgcactcaagggccagaccactctctgcatggaccagaccatcttcccaaacccatggtgctgtgtgcccaactcaacctagactccaaggtggggagggatgggcacaggccc

SEQ ID NO: 19161 - DNA, 481 bp, Homo sapiens
  misc_feature (1)...(481): n = A,T,C or G
nggagtgattgacngccgatggacncggctgcaagaattcggcacgaggatacgtgcccaggccaaccgaatggctgaagatccagcagccttgaagccccccaagatggacatcccagagatggaaggaaagaaacagccaccacgggcccataacctcaaaccccgtgacctgaatgtgctcacacccactggcttctagagccctctttccagggattctggtaaaggtgggttcttgcatcccactccccttttaccttggctttgacataggaaaggtatatttaaaaacttaatcagctgggcgtggtggctcacgcctgtaatcccagcactttgggaggccaaggtaggtggatacctgaggtcaggagttcaagaccagcctggccaacatggtgaaaccccgtctctactaacaatacaaaaattagctgagcgtggtggtgggcgcctgtagtcccagctacttgagagg

SEQ ID NO: 19162 - DNA, 495 bp, Homo sapiens
  misc_feature (1)...(495): n = A,T,C or G
atttccaccgcgctgcaggaattcggcacgagaatgaaaggactcttggcctaacttcaagagtcccctggggtttgaaggggcaaagtttgagtctggatggaacctgggctgaggtaccttaagcttccccccgcaacaccccagcctcagggattgcgggagttgtcagagatctgatggatccgaaaggggcagggccaggggattaggtttggggtcagaggttctgttttccaggggaggggtgagataggcctggatcatgccctctgccatgccctccagctaggaggatcttgagtcagagaggattggaagtgctttctcctccacccaggtgaggtcaggggagcttangtcttatggagatggcaagttgaggtatgaagggaagctggggcttttggagctgccgaacaactgagggacccagtgcgccttccatcccgcactagtgaatagcgccccctcttcccccgaanacgaggtgcg

SEQ ID NO: 19163 - DNA, 543 bp, Homo sapiens
aggatgattcgccggctgaggaattcggcacgagcacatatgttaaatcatttaatcctccacaaccttggagtatatatttctacccaatttagagaaaactgaggcacagtcattaaaatgaatgaaaactggtgtattttatttcctttaccactcaagttactttaagggtgctatatcactaagaaagaaacacagatagttttgccaagtaaaacataacccataaaaaattaaagggtttagaataaaagctgaaatttaaggtttcattgtatctactctccctcaacccaattaaaataaaaattcttttcagatccccatggttggtaagtcagtgaaattacctttctctttctcccccttctggcagcttttggagtagttatgtcaactgctttagtcacatcctaaaaaagaaaaaagaaaactgaatactgaataaattattccaggaatgaaagaaaccttgttaaactaaaagttacaagcacgtttaactgaaagcattggggaaatctggtttgctcttgagag

SEQ ID NO: 19164 - DNA, 480 bp, Homo sapiens
  misc_feature (1)...(480): n = A,T,C or G
nattgancgcctgcagaaatcgtacgacgctacttatggcctcacaatggttgagatgactggggtgtggcagtgccaagccgaggctgtgaaaggccttccacctttactctcgtgctcgtgccctcccccattgttaggagaagggcatgctcaagccaacccattagcccaggaggaggacaagaaacacacggagcagacacaagccacctcaccaacccagccaaggctgtcctgaattagcaaccctgacacgtgtgagcaagtccaacggacaccggaagatccacctagtcaagcccaaccaagactggcagagctgccaagctgaccacttaaggcgcatgaggaataaacactcgttgctgcaaaaaaaaaaaaaaaaaaaaaaaattggggggggggccgggaccccattcccccttaaagggagcggaataaaaataaatgggccgcgttttaaaaacgtgggagggg

SEQ ID NO: 19165 - DNA, 477 bp, Homo sapiens
  misc_feature (1)...(477): n = A,T,C or G
ggggtgtctgacgctgtctgcccggctgcangaattcggcacgagcctgactccccttcactgtgcagtcatagcccacaatgctgtggtccatgaactccagagaaatcaacagcctcattcacctgaagttcaggagcttttactgaagaataagagtctggttgataccattaagtgcctaattcaaatgggagcagcggtggaagcgaaggatcgcaaaagtggccgcacagccctgcatttggcagctgaagaagcaaatatggaactcattcgcctctttttggagctgaccagttgcctgtcttttgtgaatgcaaaggcttacaatggcaacactgccctccatgttgctgccagcctgcagtatcggatgacacaattagatgctgtccgcctgttgatgaggaagggagcagacccaagtactcggaacttggagaacgaacagccagtgcatttggttcccgatgg

SEQ ID NO: 19166 - DNA, 464 bp, Homo sapiens
  misc_feature (1)...(464): n = A,T,C or G
nctggaacgcgntgaagaaaaaatttgccccggctgcaggaattcggcacgaggggaaagctaggcccttgcctaagaaagcacctcctaaggccaaaacgcctgccaagaagaccagaccctcatccacagtcatcaagaaacctagtggtggctcctcaaagaagcctgcaaccagtgcaagaaaggaagtaaaattgccgggcaagggcaaatccaccatgaagaagtctttcagagtgaaaaagtaaattttataggaaaaaagggtatcatgatgaaattcaaaatcttattttctaagattttaaaatcaggttattaaactgttagaagcttacttggcacaagatgaacaagaacaaaggaagcatatacagccttgagtttcaaaagccagggagcagggaagagaagccaggtgagcaagagacatgagttccttctgagctgtggccaccagn

SEQ ID NO: 19167 - DNA, 469 bp, Homo sapiens
  misc_feature (1)...(469): n = A,T,C or G
ggaagttccnnnnntgnnnnaaaactgatagcactcgactgatcncggctgcaggaattcggcacgagtagggttctggtgttaggattcttcattctttactgcactcagatttaagccttacaaagggaaagcctctggccggcacacttttgacgcatgaaggtcactcgtggtgaggctgacatgctctcacattacaacagtagagagggaaaatcctaagacagaggaactccagagatgagtgtctggagcgcttcagttcagctttaaaggccaggacgggccacacgtggctggcggcctcgttccagaggcggcacgtccttgggcgtctctaatgtctgcagctcaagggctggcacttttttaaatataaaaatgggtgttatttttatttttttttgcaaagtgatttttggacttctgttgacattcggagtgatcctgttctgcgctgtgaaca

SEQ ID NO: 19168 - DNA, 483 bp, Homo sapiens
  misc_feature (1)...(483): n = A,T,C or G
aggagtcccnnnnnagatgtnnnaactgactcccctgctggaattccgctcgagcaaaggtgtcgtggtggtcattaagcggagatccggccagcggaagcctgccacctcctatgtgcggaccaccatcaacaagaatgctcgcgccacgctcagcagcatcagacacatgatccgcaagaacaagtaccgccccgacctgcgcatggacatgctggcatctactgggtcagggctctgctgctcggtggctgtgcaaccttgggcaagttcctcaacctctctgtgtcttcgtaccctcatctgtaacatgcgtgtcgatagaccctactactcagggttgatgagaagattaaatgtgcaaaacctgcttgactgtgcccacaaatcctgattgtaggaataaattaatgactttttataaatattttgatcagatggactcagatgatcacagatgtcttcacatgcctatgactaatt

SEQ ID NO: 19169 - DNA, 483 bp, Homo sapiens
  misc_feature (1)...(483): n = A,T,C or G
ngcccggnaatcgcncgcctgcaggtattcggcacgaggcaggatgctccttgatcacggcatcccccggcggtagtacagggtgagcttgcaggagggtctgcaagtgcagacagcagctggggccaaagaggtgttaggttcaaaggctgcgaagagaataggctactggaaaaccaaacccaacagaattcacgtccaaaaatccacattctccatcgcttctcagccttttggctaagattaagtattaaaaaaaaaccaggctctgccaggcgcagtggctcatgcctataatcccggcactttgggagtctgtggcaggaggattgcttgaggccaggagtttgagaccagcctgggcaacatagcgagaccccatctctacaaaagattaaaaattagctgcgtgtagtagcatatgcctttcaacgtagctactcaggaggctgaggtgggaggatcccttgagccgaggagttt

SEQ ID NO: 19170 - DNA, 484 bp, Homo sapiens
  misc_feature (1)...(484): n = A,T,C or G
ggggnnnnnnnnagaaggggncctgcccgcctgctgactccgctgcaggaattcggcacgagggaaacagggtcccctgaggcctgtgggggctgcaggggaggaggatgtaccttgtgtctctttcaagtgccttaatccgagccagcagggccttctgcttgcctgctgccatactgtatgtaggaaagtgttctgtggctgctttgtgtcaagaaaagagcagtcactctcagaatcttgattccccatcagccaaagcaaaagatggctgctgctttgtaggcatgtgcctgcaagtgggaccttgctgggcattatatgccctgtgggggtttcagagaccctgaaagaggagggaggacccgcctccttgtctgcacaactgcatgcacttctctccccatcgctccacaacctgaaaccgagaaggagttgctgaccagtgcccaccccggcagcccgggaggaacacaggcagctc

SEQ ID NO: 19171 - DNA, 484 bp, Homo sapiens
  misc_feature (1)...(484): n = A,T,C or G
gcgcgccccccattgacattcgatccgcctgtggcaaancggcacgagggcaaactgaaggagctaaagcaagtagcctcccctttcactctgatcattgatgatccctcatggaacagctttgtggaaaacccacatgctcctcagagagaagatgccctggtgatcacacactacaaccggacccgacagcaggaagagatgctggggcttcaagaagaagcaccagcagagaagccagaagaggaagatctcagaaatgaagtgctccagttcagcacaaactgcccagaatgcaatgcccccgctcagaccaacatgaagctagtacaaatccctcactttaaggaggttatcatcatggctaccaactgcgagaactgtgggcatcggaccaatgaggtgaaatctggaggagcagtagaaccctttggcaccaggatcacccttcacatcacagatgcctcagatatgagcagagacg

SEQ ID NO: 19172 - DNA, 452 bp, Homo sapiens
  misc_feature (1)...(452): n = A,T,C or G
ntttgccctcgctgcacgaattcggcacgagggatttccttcctgtttatttccttggtgacttggtcatacaagcaaacatggcaaaaccctctcagaacccaaaagaacagcacacggatgaaccaaatgtgaggaaagcagctgtgatattttgggtggagagaaacacaagggcaatttggcacaacgctgctagatactgtgggtttacaatcaaccttttcattcccaagctgtacacaaaactctctgtttcttgttacacgcctgcctgctccatgctgaaggagacttcggggtgcttgtagctgagcagaatgtctgtaatacacgtagatggatagcaagaggagtttaaatgctggctgccatcactcaggtctgggtgctcatgacctcccaggcttgccccacattcctcattntccccatcctgaaactgctggctg

SEQ ID NO: 19173 - DNA, 489 bp, Homo sapiens
  misc_feature (1)...(489): n = A,T,C or G
atgagaccnccnntgngngnnnnacnattttaccccgcgctgcaggaattcggcacgagagaaggcaggggaaggacctgatgagaacagaatagctgggaggctgcagagggtgctgggagcccctagaagttccaaaagagaatgtgaagcagatcaaggaaacttctgttgagctaggctcagggtgagctttggctggggttgcccttgtgtagtacagggaagtctgacacagcctctccagcctataaacagccggggggctgtggcacaggttggggcaatgttcccttgttggtgggcccccaagctggcaaggcctcttggctgaaggccagggactctgccccnnnagtcctggagttaagggatgaaggcaaggctgcaggtctggcccaggggaattaaaagccagccactccaaaaaaaaaaaaaaaaaaaaaaacttgggggggggcccgggccccatttccccttatggggagc

SEQ ID NO: 19174 - DNA, 454 bp, Homo sapiens
  misc_feature (1)...(454): n = A,T,C or G
attgaccatcgatccgcgctgcaggaattcggcacgaggcgagctggccaaggactttattcggaagcttctggttaaagagacccggaaacggctcacaatccaagaggctctcagacacccctggatcacgccggtggacaaccagcaagccatggtgcgcagggagtctgtggtcaatctggagaacttcaggaagcagtatgtccgcaggcggtggaagctttccttcagcatcgtgtccctgtgcaaccacctcacccgctcgctgatgaagaaggtgcacctgaggccggatgaggacctgaggaactgtgagagtgacactgaggaggacatcgccaggaggaaagccctccacccacggaggaggagcagcacctcctaactggcctgacctgcagtggccgccagggaggtctgggcccagcggggctcccttctgtgcagactn

SEQ ID NO: 19175 - DNA, 487 bp, Homo sapiens
  misc_feature (1)...(487): n = A,T,C or G
cgcccccattganatcgaccgcctgtangaattcggcacgagctcatcttgacagtatctggaagcaggtctgttttggtcaccaacaaccaccaccaaattgatctgagcatcctgggacatcccggtaattctgtggaggtttcaggtactggtattctcggttggaacccaggtaccgctaatgcattcagaagtaacaggtgctctgaaagagtcctgggattcagttatgtaggctgcaccatgttggtgggatgaatcagaacttttacgtagtattttatgttgagcctactggacactgctactataccaggaagaaaaagcaaagggcaaactatgtgtttttaaactgttgcagattcctctctgctagatgctctaatttacttatgatggctaaaacaaaggcaagcagtggtatagacagttactgaaattgatgaaacagtattatcaggaaaaccatgtgaaaacccaagga

SEQ ID NO: 19176 - DNA, 465 bp, Homo sapiens
  misc_feature (1)...(465): n = A,T,C or G
nggggttgcgctgtgaattcgccgagccgggcaatagggcttcaacaacaactggctgcgagtggtgccacgcacccggtttggggcctttgccaggggagctaaggtcgtgctctacaccaagaagagtggggcccacctgaggatcatcgacgggggctcaggctacctgtgtgagatggagcccgtggcacactttggcctggggaaggatgaagccagcagtgtggaggtgacgtggccagatggcaagatggtgagccggaacgtggccagcggggagatgaactcagtgctggagatcctctacccccgggatgaggacacacttcaggacccagccccactggagtgtggccaaggattctcccagcaggaaaatggccattgcatggacaccaatgaatgcatccagttcccattcgtgtgccctcgagacaagcccgtatgtgtcgacacctatgg

SEQ ID NO: 19177 - DNA, 499 bp, Homo sapiens
  misc_feature (1)...(499): n = A,T,C or G
agcgcgnnnnnnttttgaacgcttgcacgaattcggcacgaggcggcccaggagaagcagttcctgccggcgctgctgagtttcttcatctacaacccgcgcttctggccgcgggaaggagaggttgttcggaatcctataattgaaaaacagtaaagatggaaaaccagttattgaatatcaagaggaggagttgttgaagtctcaggggatccagaactgcagccagtccttgctgggctgttcctgtccatgtgcctggtcacggtgctggggaacctgctcatcatcctggccatcagccctgactcccacctccacacccccatgtacttcttcctctccaacctgtccttgcctgacatcggtttcacctccaccacggtccccaagatgattgtggacatccagtctcacagcagagtcatctcctatgcaggctgcctgactcagatgtctctctttgccatttttggaggcatggaagagagacatgctc

SEQ ID NO: 19178 - DNA, 496 bp, Homo sapiens
  misc_feature (1)...(496): n = A,T,C or G
tggtnccnnagttgtnaatccagcctcttatgccagctcgtctccaggaanccgcacgaggagcacccctgctggtggctctgtcctctgttaggcaccacactggttggtcaacttggatgttcatcgaggctcattctggccttgctcagaagcccttctgatgctcttcagtgagggaggcactaccatttgaagtgaccccatgtcagtcacatggactggtctttagcaaagtccaaggctgcctgcttccacctaagtggtctctgttctacactttaatgtcaccctctacatcatcttacctagcccacccaaccttataaacatgataattgactactttcctgaanaaaaaaaaaaaaaaaaaaaaaaaaaaaaaaaaaaaaaaaaaaaaaaaaaaantccgggggggggggccccgccccccaccccccctttggggggggtttataaaatcccgggggccggttttaaaaacgggggggagggg

SEQ ID NO: 19179 - DNA, 486 bp, Homo sapiens
  misc_feature (1)...(486): n = A,T,C or G
agtggccnnagtagtaatccaggtcttatgacgatcctctgaggaacngcgcccaagaaagggggatgttttcctggtgtttggatggtcagctgggagtgtccatcatcaggggaagatcaaacacaggtgcactcagctgcccagggcctctgggacacttgccttgacttgcaacttgccttgaacatcacgatcaaagcagcaggtgctgtggtctctcaaaattgatttttatttgactctgtggctctaagactgccttgaaccgcctgaggcctatgcatctgaacaagtgggtctctcccttgagcaccaggagtgggtgccagccggccccgaggattcccagcaccccacctatggtcttgccagcataggcttgctagttccttcttggtcagaggtagctgcagaggggggaggccaagggtttggtctaagctgtgccctgccacctggcaggaggcccactcactgcccaag

SEQ ID NO: 19180 - DNA, 407 bp, Homo sapiens
cttcgcattgatgcgcctgcagtttgtacaatatactggagaatcatgcaatgctgccaacattggatgcaatgcggggccacaagtctgcacactcctttgctactggtcctgtaatggcagaacctttcatctcgcctttattgttcactatgactcctgcattatcttccaaataaagaaacacgccatcttttatacggtatgactctcgttgtcgaatgaccactgctggatgtaccttttttctgagctctggtgtgcctttcttgactgtggccatgaccatgacacccacaccagcagcgggaagtttgtacagacgtgccttgagccccttcacggagatgatatacaggtttttggctcctgtgttgccagcacaattgattacagctcctaccgga

SEQ ID NO: 19181 - DNA, 463 bp, Homo sapiens
  misc_feature (1)...(463): n = A,T,C or G
attcccctgctgcacgattcggcacgagaacgtcgctccagctgctcttgacgactccacagataccccgaagccatggcaagcaagggcttgcaggacctgaagcaacaggtggaggggaccgcccaggaagccgtgtcagcggccggagcggcagctcagcaagtggtggaccaggccacagaggcggggcagaaagccatggaccagctggccaagaccacccaggaaaccatcgacaagactgctaaccaggcctctgacaccttctctgggattgggaaaaaattcggcctcctgaaatgacagcagggagacttgggtcggcctcctgaaatgacagcagggagacttgggtgaccccccttccaggcgccatctagcacagcctggccctgatctccgggcagccaccacctcctcggtctgccccctcattaaaattcacgttcccaaaaaaaan

SEQ ID NO: 19182 - DNA, 488 bp, Homo sapiens
  misc_feature (1)...(488): n = A,T,C or G
agcgggtcnnaattgaaattcgatcgcatgtcggaatncgccacgagcagatttccaacttttatttcagtggttcagattagtattaggtcggtactaagaaataagcatgttttcactaatttaagtacttgagactcttgaagaaaattcagaatgaagttctggagaaaggtatgttactgtagtaattactctttgaacaggttttgtgttttgtcattagctctgccctttttaattaaatattttggttcatggaccaaagggtttacttgacaaatttgtgtgacagactccgaacaattcctttactacgaagtataatttataaaataaaatatacccattttaagggtacagtttgatttttgaccagtgaaactatgatcccaatcaaggtatagatgccgtcaccccaaaaagttccctccatatccctttgcagtcagttcatccctaccctggcccagatgatcactgatctt

SEQ ID NO: 19183 - DNA, 479 bp, Homo sapiens
  misc_feature (1)...(479): n = A,T,C or G
tgaggttcnnnnagaagtnnncccgacccgcctgttgaattccgctcgaggatccgcccaccttggcctcccaaagtgctgggattacaggcgtgagctaccgcgcccaaccaattaccctttttgagagttagtttctccctatgaaactgcagatactggtacaactgctcaggactttttcacagattaaatgaatcaacatacataaggtacctagcacaggcctgggcacatggaactgtgctctcggactctgggagaggagcttcaaggaaacaagtccatcccagaggctccctggatgacagggataagactccttccactacgtggggatgatgtgtttgggaacctaagagccactccaaagctacatgacggtggagggatggactgagaaactgcttgtgtgacccaaacagaagcccttctccactgagaacaggggcgtcccttcaacaaggacagcaggagct

SEQ ID NO: 19184 - DNA, 485 bp, Homo sapiens
cgcgcccattcacatctgcggacttcgcacgaggagctccgccagcgatctcagagccgccagcaacatcatcttctccaacgggaacctggacccctgggcagggggcgggattcggaggaacctgagtgcctcagtcatcgccgtcaccattcaggggggagcgcaccacctcgacctcagagcctcccacccagaagatcctgcttccgtggttgaggcgcggaagctggaggccaccatcggcgagtgggtaaaggcagccaggcgtgagcagcagccagctctgcgtggggggcccagactcagcctctgagcacaggactggaggggtctcaaggctcctcatggagtgggggcttcactcaagcagctggcggcagagggaaggggctgaataaacgcctggaggcctggcaaaaaaaaaaaaaaaaaaaaaaaaaaaacttgggggggggcccggcccccaattcccccttaagggg

SEQ ID NO: 19185 - DNA, 481 bp, Homo sapiens
  misc_feature (1)...(481): n = A,T,C or G
atttgacncgcctgcgtgaattcggcacgagacctagtgcactgtttggccagtgtccacagcctcttttctggctgtgttttagagaaagggatttgagctataggctcgcctcctgttctcattctcacaaagctgccttgactgtggcctgcaaccacgagtgccatgctttcaggtcttctgtggcctactggccttcaagacagaggcctgccccagtgtgccacagatccatgtggatggagcctccttcagaggggtcacaggtctttgagactcagcctgggctttaatgtgtaggaaaagccttctggccacccagagagccggagccctgcttgctgtattctctgctcccttcttcctgctgggttttagccataatagggcccggtacgatatgggagtgacatttctgtaaagaagaggaaaaatcatttttctataatttgtaaagttgtgaaagagccactaccac

SEQ ID NO: 19186 - DNA, 477 bp, Homo sapiens
  misc_feature (1)...(477): n = A,T,C or G
ngagcgattgannccnnatcgcccggctgcaggaattcggcacgaggaaaaattgatctctgtctgagctctgaagggtccgaagtgattttagctacatcaagtgatgaaaaacacccacctgaaaatatcattgatgggaatccagaaacgttttggaccaccacaggaatgtttccccaggaattcattatttgtttccacaaacatgtaaggattgaaaggcttgtaatccaaagttactttgtacagaccttgaagattgaaaaaagcacgtctaaagagccagttgattttgagcaatggattgaaaaagatttggtacacacagaggggcagcttcaaaatgaagaaattgtggcacatgatggctccgctacttacttgagattcattattgtatcagcctttgatcattntgcatctgtgcatagcgtttctgcagaaggacagtagtctcaaatctttcctcataat

SEQ ID NO: 19187 - DNA, 504 bp, Homo sapiens
  misc_feature (1)...(504): n = A,T,C or G
nattgatcggctgttgaattcgcacgagggctcctgaggttggaaggcttctctgaccttggccacagctcccaggatccgatatcctgagtccaggaagctcttttgcagtccagggtcggaaatgtttccagccacagcttttgcatccatcaccattggggagatggttttgctcaattcatcagaggcagctttcacagcctcacggaacttgggatcctcggaattctccacctccctcttagccaccagcaggatccggttggcccgacgagcaatactggttgccccagcaaccagcatctgaggctgaatgttggccatagctaccttgcacttgtccaggtcttttttaattgcttcttctgaagcatccaacagagatttggtatcaatggcttcgtccaccagccctgtcattntttcaacattatcgatccactggttcttcatggtctcaaaatgttcataagcagctngatttccanggttcctaagtaa

SEQ ID NO: 19188 - DNA, 455 bp, Homo sapiens
  misc_feature (1)...(455): n = A,T,C or G
aattgacccgcgctgcaggaattcngaatgacacccgctgcatgaattcggcacgaggggacgcatagcttgcagaggtgagagagcatcgcaaccgtctgtgtgaccttatgggcgtacccaggccccagctggtgccccagcctggtgcctgctgaagccagtcctggagcccatacctcacccctgcctggtgaggatgtcttgttcctgagggaggccggtgtggaaagcctcgcacagtggtgcctccagctgttgaagggtagcgctggcccttggaggctggcactagctgacagcttttcctctctgcacctgcgctctggtgacttggggtggacacctctgccttcacttgaacacaaatgtgcttcctataaaatcatgtaccaagaanaaaaannnnaaaaaaaaaaaaaaaaaaaaaaaaaaaccccggggggggggcccgc

SEQ ID NO: 19189 - DNA, 477 bp, Homo sapiens
  misc_feature (1)...(477): n = A,T,C or G
tggtggnnnnnagangtnttctgcccgcctgtggaattcggcacgaggggaaggtcaccgtcaagtatgaccgcaaggagctacggaagcgcctcaacctagaggagtggatcctggagcagctcacgcgcctctacgactgccaggaagaggagatcccagaactggagattgacgtggatgagctcctggacatggagagtgacgatgcccgggctgccagggtcaaggagctgctggttgactgttacaaacccacagaggccttcatttctggcctgctggacaagatccggggcatgcagaagctgagcacaccccagaagaagtgagggtccccgacccaggagaacggtggctcccacaggacaatcgctgccccccaacctcgtagcaacagcaataccgggggaccctgcggccaggcctggtgccatgagcagggctcctcgtgcccctggcccatgggtctcttcc

SEQ ID NO: 19190 - DNA, 487 bp, Homo sapiens
  misc_feature (1)...(487): n = A,T,C or G
cgtgcccattganatcgaccggctgcaggaattcggcacgagattccacagattttgaagtacaccgaaactggcttgctatcactcacagtttgccaatatcacagtggtattatgaggcaacttcagagtggacgttggattacccccctttctttgcatggtttgagtatatcctgtcacatgttgccaaatattttgatcaagaaatgctgaatgtccataatttgaattactccagctcaaggaccttacttttccagagattttccgtcatctttatggatgtactctttgtgtatgctgtccgtgagtgctgtaaatgcattgatggaaaaaaagtgggtaaagaacttacagaaaagccaaaatttattctgtcggtattacttctgtggaacttcgggttattaattgtggaccatattcattttcagtacaatggctttttatttggattaatgctactctccattgcacgattatt

SEQ ID NO: 19191 - DNA, 481 bp, Homo sapiens
  misc_feature (1)...(481): n = A,T,C or G
attgccccccgnctgangcagaacattagcaagacatggcccagttcatacatttattttctaagttttacccctgtgaggagtgtgctgaagacctaagaaaaaggttgtgcaggaaccacccagacacccgcacccgggcatgcttcacacagtggctgtgccacctgcacaatgaagtgaaccgcaagctgggcaagcctgacttcgactgctcaaaagtggatgagcgctggcgcgacggctggaaggatggctcctgtgactagagggtggtcagccagagctcatgggacagctagccaggcatggttggataggggcagggcactcattaaagngnnttagagcccgaanaaaannantaaaaaaaaaataaaaaaataaaaaaaaaaaaaaaataatntntnnnnnangggaataattaaanaaanaaaaattttttcgggggggggggcgcggccccccttcctctaatgga

SEQ ID NO: 19192 - DNA, 453 bp, Homo sapiens
  misc_feature (1)...(453): n = A,T,C or G
ntttgccctggctgcacgaattcggcacgaggaatcgtgaaagaacgagggcacttcgctaagcagacgccacggacaactgcacagcagcacgccagataactcagaagaagcaagcacgcggctgtgcacgcttccgaaatgcactccagaagaaaatctcagtacgtctatagcaagtgaagaggccgagttagtcccttagaaacctcccagtggccgggccgggtgtggtggctcacgcctataatcccaacacttcaggaggccgaggtgggcggatctgagtccaggagtttgagaccagcctgggcaacatagcaagaccacatctatataaaacattaaaaaggaccaggcacggtggctcacgcctgtaatcccaacactttgggaggccgaggcgggcagatcagttgaggtcaggagttcgagaccagcctggccaacacn

SEQ ID NO: 19193 - DNA, 486 bp, Homo sapiens
  misc_feature (1)...(486): n = A,T,C or G
ggagggccnnnnagaaggggncctggaccgcgcttttgactcgcgctgcaggaattcggcacgagccctcctccaagtgggcctaatccttatgcgcgtaaccgtcctccctttggtcagggctatacccaacctggacctggttatcgataaggaggctcctctacaccaattaatgtagctgctagctattggcctcccaaaagactccagtactattttaatttgtattgaagaagttcagaaatttaaaagcagagcattttttatgatatcattgttggtgttaattgaaagtataatttgctggaacacaaagaccaaaatgaaagttttttcctccctgcttaaaaatgtagcagcttcttagttactttggaacactactcttacatgtataaagtgattgacttgactttctagcttcccttgtccggaggatattaaaatgctagggtgaggtttagccatcttacttggcttttt

SEQ ID NO: 19194 - DNA, 477 bp, Homo sapiens
  misc_feature (1)...(477): n = A,T,C or G
ctcgcacgcctgcggattgagcaccagcccaccccaggccacatccccacccatctggaagtgaaggcccagggactcctccaacagacaacggacggacggatgccgctggtgctcaagaagagctagtgccttaggtgggggaaggcaggactcacgactgagagagagaggagggggatatgaccaccctgccccatctgcaggagcctgaagatccagctcaagtgccatcctgccagtggcccccagactgtggggttgggacgcctggcctctgtgtcctagaagggaccctcctgtggtctttgtcttgatttttcttaataaacggagctatccccgccaaaaaaaaaaaaaggggggggccgggcccccattcccccttatggggggcggaatcacagtccgggggccggggttttacacggccgggaggtggaaaaacctntccccctccggcccgatctatacccc

SEQ ID NO: 19195 - DNA, 486 bp, Homo sapiens
  misc_feature (1)...(486): n = A,T,C or G
cgacagnccnattgaacgccttaattgatcgcatgcacgaattcgccacgagctgagttcccacccatgtgtgtggtatggttaggattcatccagatacactgagagaggcacaacaggaggagaaaggataggggtgtggggacagcgggcccccaatatggtgtaatcgtggcaggtctctgcctgaagtgctatgtggggtttttcttgatttaattttgactttaacccctgatttgtaagtttttcataaaataaacagaatcataactcatgtagatggctataagtgccgtagtgttctgtgggtctctggtgtctgccagtgataagtgtggcaccccaggaaggctgtggaccccatcaaggtgctatgtgagggccatgcttggggtggtggtgggcccagtagaccctgcagccattcatgcagcctggccactcacactgcccttgtgtactcctgctttgctacgctatcaa

SEQ ID NO: 19196 - DNA, 498 bp, Homo sapiens
  misc_feature (1)...(498): n = A,T,C or G
gggccnnnnnnaattgancgattgcangacttctgcacgagagttcatgtgccagggcggtgatttcacaaaccacaatggcactgggggcaagtccatctatgggaagaagttcgatgatgaaaactttatcctcaagcatacgggaccaggtctactatccatggccaactctggcccaaacaccaatggctctcagttcttcctgacatgtgacaagacagactggctggatggcaagcatgtggtgtttggagaggtcaccgaaggcctagatgtcttgcggcaaattgaggcccagggcagcaaggacgggaagccaaagcagaaggtgatcatcgccgactgtggggagtacgtgtgaggcggcactctctctgcttccccctccgctcttgaccctgcatatccaggaaggaactgccagcctcagaggaggcagcaccgagggtgcctgtttgaagcaagcagcatttgggatatgtgcccttcctcagg

SEQ ID NO: 19197 - DNA, 499 bp, Homo sapiens
  misc_feature (1)...(499): n = A,T,C or G
ggcgtccggggnccngttgnnaccttgannaatcgaccggctgtacgaattcggcacgagccctaccccggattctggtgtggcctccgcctgggtgtgtcctggttaattcctgtgcctactgaaggcctgccccagctgatctcgctcgctcgcctcctagaccatgctggccacattggttctcatccagtcttctggggtggggacccgtccaaggacaggctggctgctcagtcattctgcagggccaagcagggcctgcaaggacgatgggcagacacagccgcatcacccaggcaggacagcaggctctggcccaggagatctgggggtgaatcctggctctgccagccattagccagagtggaagtgggcaaatggattaacgcctccagcacctggtttctcaccgagaacacagagaaggttataatctggacctggtataatctggactctgatttacaaatctgaatgccaagcaaaacccattcac

SEQ ID NO: 19198 - DNA, 510 bp, Homo sapiens
  misc_feature (1)...(510): n = A,T,C or G
tcgtatataaaattatatggggantataaaagggaagaaaaaaggcttgcaccgcctgctggaattccgcacgagctggcggtgatcaaactgctgaacgagaaggagcaggagctgcgggagactgagcacttgctgcacgatgagaatgaagatttaaggaaacttgcagagaatgaatcactttgtgtcaaaaagaaataactcagctgaagcatcagattatcttacttttggttccctcagaagaaacagatgaaaatgatttgatcctggaagtaactgcaggagttggaggtcaggaggcaatgttgtttacatcagagatatttgatatgtatcagcaatatgctgcatttaaaagatggcattttgaaaccctggaatattttccaagtgaactaggtggccttagacatgcatctgccagcattgggggttcagaagcctataggcacatganatttgaaggaggtgttcacagagtacaaagagtgccaaagacagaan

SEQ ID NO: 19199 - DNA, 519 bp, Homo sapiens
  misc_feature (1)...(519): n = A,T,C or G
gannnnnnnnnnaaggnnagannnnnncnagcnacncccncaattgaccggccatagcacgcctgcacgaatcggcacgagtgtggcggttgctggtcagtaacagccaagatgctgcggaatctgctggctcttcgtcagattgggcagaggacgataagcactgcttcccgcaggcattttaaaaataaagatccggagaagcaaaaactgttccaggaggatgatgaaattccactgtatctaaagggtggggtagctgatgccctcctgtatagagccaccatgattcttacagctggtggaacagcatatgccatatatgagctggctgtggcttcatttcccaagaagcaggagtgacttcagtcatcccagcaatcgcttggttcagtttcattcagctctctatggaccagcaatctgataaataaccgagctcttctttggggatcaatatttattgacttgtagtaactgccaccaataaagcagtctttaccatgaaaaaaaaaaaaa

SEQ ID NO: 19200 - DNA, 447 bp, Homo sapiens
  misc_feature (1)...(447): n = A,T,C or G
ntagaccctctccgccggcggcaaggagaaccccatgcgggaacttcgcacccgcacactctgtctcaacatctgtgttggggagagtggagacagactgacgcgagcagccaaggtgttggagcagctcacagggcagacccctgtgttttccaaagctagatacactgtcagatcctttggcatccggagaaatgaaaagattgctgtccactgcacagttcgaggggccaaggcagaagaaatcttggagaagggtctaaaggtgcgggagtatgagttaagaaaaaacaacttctcagatactggaaactttggttttgggatccaggaacacatcgatctgggtatcaaatatgacccaagcattggtatctacggcctggacttctatgtggtgctgggtaggccaggtttcagcatcgcagacaagaagcgcaggacagg

SEQ ID NO: 19201 - DNA, 491 bp, Homo sapiens
  misc_feature (1)...(491): n = A,T,C or G
cggcgcgcanncncccatttcgcccgccctgcattagttcggcacgagcggcacgagagaagatgaggggcagagctaacaaattaccttaatcattaaaaaatcacaaagttggagaattttttaaaaagagtggataccaaaatagcttttaggaagatgacagcttaatagtctcttaaattgctgaagagagcaaaagaaagcttaagatctggaggataaaagttatatcaaaaacatgctaaagaatacattaaaacaaacaaaaaggaaagaggaaaaaataaactatgccttagaagttaaatcctatcataaatgaacatcatttctaaaggactatggcccacttcaacactcaaacaaaaaaatcctcattgctaaaacagcttcaacattcctttggagtttgctgttaaagaatttatcctgcatatatggtagacacgaaacacatcctgaagagactcagaatatctgcaaacata

SEQ ID NO: 19202 - DNA, 483 bp, Homo sapiens
  misc_feature (1)...(483): n = A,T,C or G
cgaancgccaattcancgcctgcattagtacggcacgagcagngcagttgggtgaactaccgttgcacactggagtttctggtgtctttgcttggaactgacctagctcgtggcagggggaactcggctagcggccccacagcccctgctgactcaaaacaactgagttgtaagacgttcatcgccgtgttatccttgagtaaagaatgaactctggaagcccagccagggacaatgcaccttcacagagattctgcactaatctgagtgaaggtctaaggtttggaatctccccctcatggagagaagctttgtatggctgtcatgcttagacagtgattcctgcaacttgaccttcaggctgggagaggtggagagccatgcctgttctccttccttgctatggaatttgctgacacaatatcttccgcctggtgctgggcatatcctaagaacttacaactttcctgtattatcctgtgg

SEQ ID NO: 19203 - DNA, 483 bp, Homo sapiens
  misc_feature (1)...(483): n = A,T,C or G
aggcgggcnnnnntgcccggctgctgaattcggcacgaggatgactgggagagcgagctgaatgcaatggagtgtgcattacatttggaaaaaaatgggaatcaatcactactggaactgcacaaactggtcactgactataatgacccccatttgtgtgacttcattgagacacattacctgaatgagcaggtgaaagccatctaagaattgggtgaccacgtgaccaacttgcgcaagatgggagcgcccgaatctggcttggcggaatatctctttgacaagcacaccctgggagacagtgataatgaaagctaagcctcgggctaatttccccatagccgtggggtgacttacctggtcaccaaggcagtgcatgcatgttggggcttcctttaccttttctataagttggaccagaacatccacttaagtgctttgatttgtaccattccgttcaataaagaaatttggtacccagga

SEQ ID NO: 19204 - DNA, 484 bp, Homo sapiens
  misc_feature (1)...(484): n = A,T,C or G
cgggcgtgnnnttttaaactggacggccgttcagatagtcctagcgaagnnctccgggctgaacagcaaattaaagataacttgcgagaggtcaaagctcagattcacagttgcataagccgtcacctggaatgtcttanaagccgtgaggtatggctgtatgaacaggtggaccttatttatcagcttaaagaggagacacttcaacagcaggctcagcagctctactcgttattgggccagttcaattgtcttactcatcaactggagtgtacccaaaacaaagatctagccaatcaagtctctgtgtgcctggagagactgggcagtttgacccttaagcctgaagattcaactgtcctgctctttgaagctgacacaattactctgcgccagaccatcaccacatttgggtctctcaaaaccattcaaattcctgagcacttgatggctcatgctagttcagcaaatattgggcccttcn

SEQ ID NO: 19205 - DNA, 483 bp, Homo sapiens
  misc_feature (1)...(483): n = A,T,C or G
gggggacgnnnnaatgcccgcctgcagaattttgacgagcccatccttgctgcagcttctaactggtaaaaagatccagggatggagatgggaaggttagaaaggcagccctcacctctgaggacagaggccggggtccaggcccgtgggcgcaaaggtgcctcatagcatagccagcattcagcacacacaaacctactgcccacatttgggctcagggttggccatttgctagttctgctgccctcttaagatctgactgccaaataaatcatcctcatgtccttaaaaaaaaaaaaaaaaaaaaaaaaacctcgggggggggcccggcccccaattccccttatagggggcggaataacaattcacgggccgccgtttaacaacgccgggacggggggaaggggnnnnnnnnnnnnnnnnnnnnttttnttnnnnnttttttttntnnnnnnnnnnnnnttttttttnntttntnntntn

SEQ ID NO: 19206 - DNA, 514 bp, Homo sapiens
  misc_feature (1)...(514): n = A,T,C or G
aggattcccnagggttnnnnnnnaattgatngtcattgagagacttcggaattcggcacgagctgaagggtnaattgagcagttcatgacccaggatatctgaaaatattctactggcctgtaatctaccagtggtgctcaatgcaaatagtagacatttgtgtggaaatcataccagttgttcattgatgggatttttgtttgactccttaccaatagcctgaatttgaggagggaatgattggtagcaaaggatgggggaaagaagtaggttctgttttgttttgttttaatcttagcttttaatagtgtcataaagattataatatgtgccttaagttttagtctttagaactctagagagccttaacttcttaaaccatttttgctgaattcatctatttcgagtgttgtgttaaaaggaaaaataacaactaacttgtttgaggcaaatctaaaatttaaaattaatcttgcttcattgttacatgtaatatatttcagacattntcac

SEQ ID NO: 19207 - DNA, 495 bp, Homo sapiens
  misc_feature (1)...(495): n = A,T,C or G
cgtgcgtgacacanaccccttttgcaccgccctgcattagttcggcacgaggtcgcactaggattttcattgcttaaagcgtcttaatcctttgttcccagacacacaacccctctagctctcggaggggcgatcatgagaaaccttccagggaaactgagcacaggatgaactgttagttgtttttaaaagtctatataaatatttcaacagatcgtaaagaaaaaatttatctctttggtccttgcaagagaagtcaaaggaacttttgtttctcctcaagagcctggacatctctgtctgtcatgactggaaagggcccgttgtgctgaaatcctatcatcatggtggatttgatcttcagtggccaaacacgaattaaagtataattcttaactgaactggtgggtgggttgagctttagggaagtatatggcggtcattcctggtgcgcctatcggtgtgacatgagccctggagtgtgtcgtccctctt

SEQ ID NO: 19208 - DNA, 241 bp, Homo sapiens
aatgacccctgcaggaattcgatgaggcacgataggattgaggctgggccttcccctgccggcccagaggggcttctgtcctgtgtgttgtgggaggggatgggaggcgcccctcgagtgtgcgtgtatcagggggtctcttctattctcccttgggttttatgggcgctgtgggccctgaaggaagacctgggcccagtgccctcaataaagagaggcccagaaaaaaaaaaaaaaaaaa

SEQ ID NO: 19209 - DNA, 268 bp, Homo sapiens
  misc_feature (1)...(268): n = A,T,C or G
aggggnnagggggccggnnnnnnnnnaatacgagcgatagtggactatccgacaacaatactgctagctttcaggatgatttttaaaaaatagattcaaatgtgttatcctctctctgaaacgcttcctataactcgagtttataggggaagaaaaagctattgtttacaattatatcaccattaaggcaactgctacaccctgctttgtattctgggctaagattcattaaaaactagctgctcttaaaaaaaaaaaaaaaaaaaaa

SEQ ID NO: 19210 - DNA, 469 bp, Homo sapiens
  misc_feature (1)...(469): n = A,T,C or G
atacgaccnccttcgaccggctgtangaattcggcacgaggaagcctgttgggttctgtgctcaccacctgggcgacaggatcagtcgtaccccaaacctcagcattacgcagtaaacccacaaaacaaacctgcacatggacttgtggatctaaagaaaaagttgaaattattttttttttaaaaagtcctgtctccaccaggaaccttgttttacctgccagtctgaggctggccggcggcctgatccaatggccagggaactagccatagcctgagtcgggtggattcagtcttcctatgctgctctgtaacggccctaactgcagcagttcccatcagggactggggcaaaggctagcaggggtgtacatagatgggacatcagcatcaacaatacactcaggaccggggaccacatcatagtcctgtagcatccacagtacgttggctgtacaccacgtccgtt

SEQ ID NO: 19211 - DNA, 497 bp, Homo sapiens
  misc_feature (1)...(497): n = A,T,C or G
tggcgggncgncnnntttgcccgccctgcgngaanaattgacncgcctgcacgaattcggcacgagagcccttcaagttcttttatttctgggtaacagaagtagacagacaggttacttggtgtatcttctgttaaagaggattgcacgagtgtgttttcctcacacactttgatttggagaattggtgctagttggcaatagataactcagcgtagatagtattgcaaaaaggggaggaaatacacaacaataataaatgtaaaaacctgctattcaacatgcagttttatttcgaagccaaaaatctagagctttcccaagatcctgttgccttaggcacatcacacttcaacagtgcacactatccaacagtgcacactattcaacagtgcacactattcaaaagcgtagactatttttttgctgttcaagatatttgttttggtcttatgtgtgtgtgagagagagagattccttatgcattaaggagcatc

SEQ ID NO: 19212 - DNA, 496 bp, Homo sapiens
  misc_feature (1)...(496): n = A,T,C or G
agcgggtnnnaattgatactcatccgcgctgtaggaattcggcacgagcatggccctacgctaccctatggccgtgggcctcaacaagggccacaaagtgaccaagaacgtgagcaagcccaggcacagccgacgccgcgggcgtatgaccaaacacaccaagttcgtgcgggacatgattcgggaggtgtgtggctttgccccgtacgagcggcgcgccatggagttactgaaggtctccaaggacaaacgggccctcaaatttatcaagaaaagggtggggacgcacatccgctccaagaggaagcgggaggagctgagcaacgtactggccgccatgaggaaagctgctgccaagaaagactgagcccctcccctgccctctccctgaaataaagaacagcttgacggagagaaattagggggcggacggcagcaagagcctgagaaagaagccctcnccaggggatgtctgggggggggccgcgctccctta

SEQ ID NO: 19213 - DNA, 482 bp, Homo sapiens
  misc_feature (1)...(482): n = A,T,C or G
ngggggagnnnntttcancgcctgcagaatattgacgagcgtgcccggcgcaccctgaggcggttcaggcccatgtgctgggctgcttctcccctgctgagcaggagctgctgcctctgttgctggatcgagccaccgacctgatcttggaccacatccgtgagcgaagccaggggccctcactggggccgtgacactagtggccatggctgcctgcctgactgtagtgcccaccaacccagccactgccacagagctgccacgccagccttggtatctactttttatacaaatctcctctagactgttccaggctgcctgcggattaaagtgggggtgactgtgagaaaaaaaaaaaaaaaaaaaaaaaaaatttcttggggggggggccgggccccaaatcccccttaagggggggggaataaaaatccagggcccgcggtttaaaaacgcgggagggggggaaaannnnnnnnnnnnnn

SEQ ID NO: 19214 - DNA, 484 bp, Homo sapiens
  misc_feature (1)...(484): n = A,T,C or G
ggcncnccccaattgaccgcccgcatttgcaccgcctgcaggaattcggcacgagcatattacaaaacagttttacacttaatatgttaacattgggtgcaataatttagtagcattagctttagttacaaatataactggatctttctgctgacaacttaggttgtatgagttatgcttaaaagctttaaatctgatgtttcctgtacctgccacactatgttagaatgtgtccttcaaacatatcctcctgcaacttctcaaactgtactaaattgatatttcttgaagtctaactctgtgctaacagatctccattttaaatagaatacggttttaatttttgataagctgctgaattttaaagagagttttttggggccaccaaatattttggatcatgcagagaatatatattgtactgtagtaattttgtatttacatttgtatgatgtgacataatagatgtgaatgttaatcactg

SEQ ID NO: 19215 - DNA, 499 bp, Homo sapiens
  misc_feature (1)...(499): n = A,T,C or G
ggcgngnnnaattgcatagcccggctgacgaacgagcctgatgcatatcatttccatgtatttctagaattcattcattgctgtctcttcccctgccttcccaccaaaactaccatcctcacttgcctgtactgcagcaatagtccactcattaatctcctagcacttacccttgttcctttgtaaatcattctctatcctgtaatcttttcaaaacacaaatctgacctcttacgatacagacaagaagacttaccctgtcctgcaagcccagcatagtctggcccctgtgtcccactccaccctccttgcatggcacattcgttcttgccctctctactttagctaaggctcggctctgcttgggccctcatactggccatgtgtatcactcaagatcaagtcaggagataagaaccatactggttatttgaataggagaaatgtaatggtaagcattggtaattacaacagtacgaggctactaactactagaagg

SEQ ID NO: 19216 - DNA, 485 bp, Homo sapiens
  misc_feature (1)...(485): n = A,T,C or G
tgcctgccccacccattgcacgccctgattagtacgcctgggtcgcactaggattttcattgcttaaagtgtcttaatcctttgttcccagacacacaacccctctagctctcggaggggcgatcatgagaaaccttccagggaaactgagcacaggatgaactgttagttgtttttaaaagtctatataaatatttcaacagatcgtaaagaaaaaatttatctctttggtccttgcaagagaagtcaaaggaacttttgtttctcctcaagagcctggacatctctgtctgtcatgactggaaagggcccgttgtgctgaaatcctatcatcatggtggatttgatcttcagtggccaaacacgaattaaagtataattcttaactgaactggtgggtgggttgagctttatggaagtatatggcggtcattcctggtgcgcctatcggtgtgacatgagccctggagtgtgacgtccctctn

SEQ ID NO: 19217 - DNA, 540 bp, Homo sapiens
  misc_feature (1)...(540): n = A,T,C or G
aggagatcgattcgcggccgtangaattcggcacgagaaaagacgaagtgaccccaacttcaagaacaggcttcgagaacgaagaaagaaacagaagcttgccaaggagagagctgggctttccaagttacctgaccttaaagatgctgaagctgttcagaagttcttccttgaagaaatacagcttggtgaagagttactagctcaaggtgaatatgagaagggcgtagaccatctgacaaatgcaattgctgtgtgtggacagccacagcagttactgcaggtcttacagcaaactcttccaccaccagtgttccagatgcttctgactaagctcccaacaattagtcagagaattgtaagtgctcagagcttggctgaagatgatgtggaatgagaaacaaatgtcaacataataaaatctcagttaaaaatattntaaaaattcttggtagttgagcagctctgggggaataagggcanatatgcttggtatgaactacactgaaatctacccaaggtaatggttaactttgtgan

SEQ ID NO: 19218 - DNA, 487 bp, Homo sapiens
  misc_feature (1)...(487): n = A,T,C or G
ggggngacnaattgaannccccnaattgcaccggctgcaggttctacgggctctcggagaatgacgagtggacccaggatagggccaaacctgtcacccagatcgtcagcgccgaggcctggggtagagcagactgtggcttcacctccgagtcttaccagcaaggggtcctgtctgccaccatcctctatgagatcttgctagggaaggccaccttgtatgccgtgctggtcagtgccctcgtgctgatggccatggtcaagagaaaggattccagaggctagctccaaaaccatcccaggtcattcttcatcctcacccaggattctcctgtacctgctcccaatctgtgttcctaaaagtgattctcactctgcttctcatctcctacttacatgaatacttctctcttttttctgtttccctgaagattgagctcccaacccccaagtacgaaataggctaaaccaataaaaaattgtgtgtt

SEQ ID NO: 19219 - DNA, 494 bp, Homo sapiens
  misc_feature (1)...(494): n = A,T,C or G
agcgggctnnattatgacgccngttgaattcgcctcgagggctgccagtccctctgaccagagtggaaactcgtggagccttttctgggcctgccaatggcccaatcagcacacacttcttccccgctgaggtccataaaaaccctgggctcagccagagcagcgcagagaatagccagaggatgaagatggtagagacgaggggacaggatgaccagctgcagagagccgtaccctctctgctgatagctggagacggtggggtgaccagctacagagaggagtaccttctccgctgaaagctacagagaccacctgccagcagagaggagctacactctgctgcaagcttcagagacctgcagagacattggaatgacttgcctgcggagaggagccactctctccagggcctcctctctgttgagagctgaatgcttgagctcatgggacaatctgtctccagagaggagctacccactcctctgagctct

SEQ ID NO: 19220 - DNA, 479 bp, Homo sapiens
  misc_feature (1)...(479): n = A,T,C or G
ggacacaccatcgcccgcctgcaggagattcgcacgagaagctggtggactgtatcatcgaggtccacgatgcccggagcccactttcaggctcgagccctctgtttcaggaaacccttgggcttaagcctcacttgctggtcctcaacaagatggacttggcggatcttacagagcagcagaaaattatgcaacacttagaaggagaaggcctaaaaaatgtcatttttaccaactgtgtaaaggatgaaaatgtcaagcagatcatcccgatggtcactgaactgattgggagaagtcaccgctaccaccgaaaagagaacctggagtactgtatcatggtcattggggtccccaacgtgggcaagtcctccctcatcaactccctccggaggcagcacctcatgaaagggaaagccaccagggtgggtggcgagcctgggatcaccagagctgtgatgtccaaaattcaggtctcn

SEQ ID NO: 19221 - DNA, 475 bp, Homo sapiens
ggaaacccaatgcccgcagaattgcccgcctgcggtttagttctcctgctcagtctttcctattaaacttttaatgttgatattttccttaatgccatctgctagctttttggtctgtttgtgagcttagttttcttgggccaggcctttacaataatgctcgtctatgtgtggagccgaaggaacccctatgtccgcatgaacttcttcggccttctcaacttccaggccccctttctgccctgggtgctcatgggattttccttgttgttggggaactcaatcattgtggaccttttgcgtattgcagttggacacatatattatttcttggaagaggtatttcccaatcaacctgggggcataagaattctgaaaacaccatctattatgaaagctatttttgatacaccagatgaggatccaaattacaatccactacctgaggaacggccaggaggcttcgcctggggtg

SEQ ID NO: 19222 - DNA, 483 bp, Homo sapiens
  misc_feature (1)...(483): n = A,T,C or G
cggcgggcncccacaattcaccgcctgcaggaattcggcacgagccggtctcgaacttctgacctgaggtgatctgcccaccttggcctcacaaagtgctgagattacaggcttgagccaccacgcctggcctagttagcattttaaagaaacacaaagccataacaaaaaccatcattgtttgtattccacactgttaatgaatgtaaagaggttagaaatgtaccgtttgattaatgatgtttatttttactgtatttaatatgagtaatttttcatcatctttcaagaggaataatgtttattgattaaaggtgagaaatgatagttaagacaccaattccatgtccagatctttgactgtatcatgcattgtacaattgatttcatattttatgaaatgccttaattttcctactataacataaagacaatgatgaataaagtttatgtgtatgattaaaaaaaaaaaaaaaaaaaact

SEQ ID NO: 19223 - DNA, 502 bp, Homo sapiens
  misc_feature (1)...(502): n = A,T,C or G
ggcncccnnnaattgcccttctccgggtgtcangagattcgccacaagataacacatctcatagaagtgaggcttcaccaagttcaatgctgatgaatttgaagacatggtggctgaaaagcggctcatcccacatggctgtggggtcaagtacatccccagtcgtggccctctggacaagtggcgggccctgcactcatgagggcttccaatgtgctgcccccctcttaatactcaccaataaattctacttcctgtccacctaanaaaaaaaaaaaaaaaaccaaaattaaaaaattcagaaaaataaaaaaaaaaaattttgggggggggggccggggccttggtggcctttaggggggggggaatacctcccctggggcggtgttataaaaggcgggggagggaaaannnccngggctgcgacatatttaatatggagatagancctgaatctggttttatatctttaagtagcaacttgcgttagatcgactgtcac

SEQ ID NO: 19224 - DNA, 474 bp, Homo sapiens
  misc_feature (1)...(474): n = A,T,C or G
gcgtgccnattgacgtcgtcggacttcggcacgagccgagcagctcagggcgcccttgaaagttcttggatctgcgggttatggccggtcccttgcatggcggtggggcccgggccctggacctactccggggcctgccgcgtgtgagcctggccaacttaaagccgaatcccggctccaagaaaccggagagaagaccaagaggtcggagaagaggtagaaaatgtggcagaggccataaaggagaaaggcaaagaggaacccggccccgcttgggctttgagggaggccagactccattttacatccgaatcccaaaatacgggtttaacgaaggacatagtttcagacgccagtataagcctttgagtctcaatagactgcagtatcttattgatttgggtcgtgttgatcctagtcaacctattgacttacccagcttgtcatgggagaggtgtgaccatccagccactt

SEQ ID NO: 19225 - DNA, 491 bp, Homo sapiens
  misc_feature (1)...(491): n = A,T,C or G
cggggcagccccaattcancgctgcagaanatggacgagcgtgccgcaatcaccacgagagacctttaggctcacttggtccaagagagtactttattcctggtacccgaataccacccccaacccatggtccccaggaatacccaccaccacctgctgtaggagacttactgccgtcaggctctagagatgagcctccacctgcctctcagagcactagccaggactgttcacaggctttaaaacagagcccataaaactatgacctctgaggtttcattggaaagaaagtgtactgtgcattatccattacagtaaaggatttcattggcttcaaaatccaaaagtttattttaaaaggtttgttgttagaactaagctgccttggcagtgtgcatttttgagccaaacaattcaaaaatgtcatttcttccctaaataaaaatcaccttttaagctagagcgtccttacaactttgaaatgtgcaatn

SEQ ID NO: 19226 - DNA, 451 bp, Homo sapiens
attagaccttcgcccccgcgctgcaggaattcggcacgagcaaatatggaaactcgttactttgcaaagaagaaaacccttcttggcttgagtaaattggctgcattagcttcagacttttcagaggatatgctacaagaaaaaattgaagaaatggctgagcaggagcgctttctactgcatcaggagaccctacctgaacagctgctggcggagaaacagctaaatctcagtgcgatgccagtattgactgcaccacaactcattggtctatatatctgtgaagaaaatagaagagctaatgaatatgatttcaagaaagctttggacttgttggaatatattgatgaggaagaagatataaatataaatgatctaaaactggaaatcctttgcaaagctcttcagagagataactggtccagttctgatggcaaagatgatccaattg

SEQ ID NO: 19227 - DNA, 491 bp, Homo sapiens
  misc_feature (1)...(491): n = A,T,C or G
acttgatgccctgttatagccacgaggttccaggacctggctagaagcagagacaccaggacagaaaagacagtgttctgctttcatggagttcacagaagagtcgaggagagcttcacatttttcatccattcttaaaattgagccagtttagccctaggaggtgggcaggctctgaggaatcatcaatcaagagaagagaacatcgccagaaacaccatgctgcagtacaaaaattctataaaaataccttttttgagtcattaacataaaatgaagaaaacagcagcagccaagaagagagatgttgaaatttaagagaggaagacagagaagaaaaatccactggataccttatgtgtaattcaccaatctgttggaacacttctgccacgtgtgaagagttttggcagaccaaatccacatgcctgaagtgatgcccaccaacaaagacataaaaattttcaacatttcaacagccatgttggaan

SEQ ID NO: 19228 - DNA, 486 bp, Homo sapiens
  misc_feature (1)...(486): n = A,T,C or G
tgggcggggnnnnnatttgatatgcangngctgcangaattcggcacgagccacgactcctccttcctctgcgcttccagtgataagggtactgtccatatctttgctctcaaggatacccgcctcaaccgccgctccgcgctggctcgcgtgggcaaggtggggcctatgattgggcagtacgtggactctcagtggagcctggcgagcttcactgtgcctgctgagtcagcttgcatctgcgccttcggtcgcaatacttccaagaacgtcaactctgtcattgccatctgcgtagatgggaccttccacaaatatgtcttcactcctgatggaaactgcaacagagaggctttcgacgtgtaccttgacatctgtgatgatgatgacttttaaggaccctgngggctgtgctagggacctgcagtggcagaactgcagagctgagccttggcagtggggcgtgcttggaagccaccagccacn

SEQ ID NO: 19229 - DNA, 477 bp, Homo sapiens
  misc_feature (1)...(477): n = A,T,C or G
atcgacngccttgngatttccccgcctgcaggaattcggcacgaggcccagtaaatgcggatgtttatcttccattgtttgtttcctgagattcagatgtctaaagcatttttctgtgacttttcaaggcaagaggaaaacctgacatatggaaagggaattaattgctcgttttatcctcttctcctgcaatgctctgaatccatgggtttggagtggggccctgggagttgggggaagcaccatacccagtgagtctgcactttgaggacccactgccagtgtcagcttcaaaatcacattgtaaaaggcccggcgcggtggctcacgcctgtaatcccagcactttaggaggacgaagcaggcggatcacttgaggtcaggagttcgagaccagcctggccaatatggcgaaacctcgtctctaccaaaaatataaaaattatccgggcgtggtggcgcgggcctgtggttccg

SEQ ID NO: 19230 - DNA, 338 bp, Homo sapiens
  misc_feature (1)...(338): n = A,T,C or G
gaacaggccnnaaactacaattactactattcattgaatgcctggctgctgctgtgtccctggtggctgtgttttgattggtcaatgggctgcatccccctcattaagtccatcagcgactggagggtaattgcacttgcagcactctggttctgcctaattggcctgatatgccaagccctgtgctctgaagacggccacaagagaaggatccttactctgggcctgggatttctcgttatcccatttctccccgcgagtaacctgttcttccgagtgggcttcgtggtcgcggagcgtgtcctctacctccccagcattgngtactgtgtgctgct

SEQ ID NO: 19231 - DNA, 486 bp, Homo sapiens
ccccccccccattgatcgcctgaggaattcttcgcgagctctcgcagagcatggaaggcaggagaggtgggctggcctagggcaggagctccacttctctctgcctctggctatgggaaggagcaggcggttggaaatcctgtgacagcagagatcttctggatttttgcctggacccttctgcaagcctggagactggacctgccacatgttccaagtctgtctgcctaggtcactgctgccacttctcctcccactaacagacctttcttgaagacccactaggtccagacactgccgggacttgcaggtatggggggtagaaggagaggcagataagctgcctggggggctgttagctaatgggtacaaggacaccccctcccgagaagagaagccacagatgagtgggccagcgaggccagtcttcaatgtccactaattcactctaagcatttggccaaaaaaaggagagagaaataactg

SEQ ID NO: 19232 - DNA, 346 bp, Homo sapiens
  misc_feature (1)...(346): n = A,T,C or G
aggggggnnnnnntttcgcctggctgcaggaattcggcacgagggcgagctcaggtgatgccggccaccagcaatgcctggcctggtagctccgcttctgctttcaccaagagagtgtttcttcactcaactcaagtggcatttggggtgacatctcaaaggccaggaattccgttgacttgttggctgccagtaggggcgggaggaaaggcggaggcgagccctggaggagggaggccacaactccgagctgcccacctggtgctgagctggggccccgcctcctttctgttttatttttgaggaaataaaataaccaagtgctaaaaaaaaaaaaaaaaaaaaa

SEQ ID NO: 19233 - DNA, 488 bp, Homo sapiens
  misc_feature (1)...(488): n = A,T,C or G
tgggggtcgccnaattgancgctgcagaanaattgtccgcctgcggcagaaattgcttatccagagtgtaaggaggctgcagcatcagctggaaagtgagtctgtgacaggcttttcacctcattgagaggcagagccacatgctgtgagatgctgaggcccctgctgtgaaatggtgtactgcacatttgctgggtttgttgtattgctacgctctttgcattttgtggttcaggcaataagcagcagaatatgcgaaatgaggacaagtatattaaagatatcttgtagcttttggttgcacatatttaaactgctagaaacagtagctccgggttcatactttctgtcctttatatgtgtttaatcagttagaaagcctatctctgctttgtaaagcaataactaggaggctgatctttatgttcagaaaaaaagggacatgtcagaaacactgttatcaggaatcttatgcatatggaatggtg

SEQ ID NO: 19234 - DNA, 494 bp, Homo sapiens
  misc_feature (1)...(494): n = A,T,C or G
nagcgcttttnaaattgantgcctnaattgatcgcccgtaggaattcggcacgagcaccattctgcttgccagcctcttccttgggggtggctacctccaaaaacaacagtgtccttaaggaaagagtctctcctttgccacttgctggccaaagggaccttggtaccaggaagacaatttcagaatgtctccttcatctgcaagttcagggtgaagaaaaagaagaagatgaagaagaattctttatatagcataaaataaatgtggttttctaaaacacaagatcagataaaatgttctagaaatggagtactgacccagaatcagcctgttagttgttcatctgaggggggctgaatgctccccatgcacaatctgtattgattttatttcaaatgttcaaagtctaaaggtgctgggaatgattgtttatttgccgtcacagtcataagagaacacagccaacacacagggaaaaaaaccgaatgctttn

SEQ ID NO: 19235 - DNA, 441 bp, Homo sapiens
aattgaccgcctgcggaattctttgcgagccgtgtccaaacactgcgcccagtgagtgcaaaaacaaaacctttatgatcaagagatgttttgccaaataaccggcaactttatgagatggccctgacatataactttcatcaacccaagagtggggaagtaactccaagctgcccactactttgtgaactattatatgaatctgaatttgacagccaactgtggattatttttgaccagaacaaaagacagatgggttcaggcgatgcctatacacatcagtattctttgaaactggagaaaggagattatacaattcgactacagattccccatgagcaaatcaatgatttggaacgccttaaagaccttccatctattggttctcatagattgcctaataccttgagcttagatattcatgaaaatcataatcctgca

SEQ ID NO: 19236 - DNA, 446 bp, Homo sapiens
  misc_feature (1)...(446): n = A,T,C or G
agtttgtccccctgcagaanccctgacctcgctgcagagaccctgaaacccggagttcattctcaacagtcctactgtgacctccattaaatggtggcctggtgggcttggaaagacttcaaatcatgcaatagttcttgcccagctcatcactaaggggaaatgctatggattacatgcctttatcgtacctattcgtgaaatcgggacccataagcctttgccaggaattaccgttggtgacatcggccccaaatttggttatgatgagatagacaatggctacctcaaaatggacaaccatcgtattcccagagaaaacatgctgatgaagtatgcccaggtgaagcctgatggcacatacgtgaaaccgctgagtaacaagctgacttacgggaccatggtgtttgtcaggtccttccttgtgggagaagctgctcgggctc

SEQ ID NO: 19237 - DNA, 498 bp, Homo sapiens
  misc_feature (1)...(498): n = A,T,C or G
ngagganccagggtttgannccccatcgaccgcctgtangaattcggcacgaggttaagcattagtataaagtaacttctgtaataaattatatcgcatattttttcagataggacagctcaaccttacgatgcctacctgatgccaggtgatgcttattttcttcctaaagtaggttactggtcatatcttttttccaaatattaaatgcaccttgccagatattctcctgcagctctaaggaaaggaaatcaatttaaaaataatttgtagaatctactattgagccaccaaagtataattccctaaaagtttaagaaaccctggcaattaattcagcataaacatatcctataaacagcaggagaggttcagctttctgattttactgtggaccttttcctaagggcattcatgaatgcagcaacagttttaactatggcttacatttattttaaatttcactaaatacaaatcttgattgtcatgccagtttta

SEQ ID NO: 19238 - DNA, 485 bp, Homo sapiens
  misc_feature (1)...(485): n = A,T,C or G
cggggggcacccaatgcccgcctgcggattcatcgcgagccagtattgtaaacaacaggtttgcattcatggagctttcattcattctggagtctactaatttacctgaatggtgtttgcattctgtgaaatgcctctccacgttgcatatgtcacacttttgtctgcacataactcttttttcacaagaagggtcactgccacaacagcacagtcagcgggtgaattacaggtgcctgctgcctgcctacctgggtaatctgatcttgtctgtatcgccgtgtgctcatcactgaagaattgcaggccactcatgtcagtgaccagatttgtggcttataaacattagcagtttatttatgttttaagatgcaaagatgtgtgtttgatattcactttaataattagaaatggatcttgtaaacagggcatatatcanagatgaccttataatatgtacccgaatatacagttcaagagttttg

SEQ ID NO: 19239 - DNA, 484 bp, Homo sapiens
  misc_feature (1)...(484): n = A,T,C or G
cgggggccagnnnntttgancgcctgaggaattgatagaagccgtcgcggacctggaagcggatgtcctggttctactaccagtacctgctggtcacggcgctctacatgctggagccctgggagcggacggtgttcaattccatgctggtttccattgtggggatggcactatacacaggatacgtcttcatgccccagcacatcatggcgatattgcactactttgaaatcgtacaatgaccaagatgcgaccaggatcagaggttccttggggaagacccaccctacgaagttggaatgagaccatcagatgtgataagaaactcttctagatgtcaacataaccaaccttataaagactaaaattcatgagtagaacaggaaaatcatcctgactcatgtgttgggttctttatttttaattttcaaagaggctcttgtatagcagnntttgtctattntaacattgtaggcaattgtac

SEQ ID NO: 19240 - DNA, 468 bp, Homo sapiens
  misc_feature (1)...(468): n = A,T,C or G
atgngccatctgacccggctgcaggaattcggcacgaggaagcctcgcgtcctcccccgtaccttgcgggtcggtggttcatccatgtatttcaacgccttttcacagccggttcatatggtcccgacttctgtgtgcttagaaaattatggaacttggccgggtgcggtggctcccgcctgtaatcctagcactttgggaggccgaggcgggcggatcacacggtcaagagatcaagaccatcctggccaacatggcaaaacccccatctcgactaaaaatacaaaaaattaattgggcgtggtggcatgcgcctgtaatctcagctacttgggagcctggggcaggagaatcacttgaacctgggaggcggaggttgcagtgagcggagatctgggcactgtactttagcctgggcgacagagagacccatctcanaaaaaaaattggaacctgagaagggggtcg

SEQ ID NO: 19241 - DNA, 457 bp, Homo sapiens
  misc_feature (1)...(457): n = A,T,C or G
agatttgtccgcgntgnnaggaanaaattgactcngcgctgcaggaattcggcacgagcacaaggccagtttctgcctggaggacagcacctgtgacttcggcaacctcaagcgctatgcatgcacctctcatacccagggcctgagcccaggctgctatgacacctacaatgcggacatcgactgccagtggatcgacataaccgacgtgcagcctgggaactacatcctcaaggtgcacgtgaacccaaagtatattgttttggagtctgacttcaccaacaacgtggtgagatgcaacattcactacacaggtcgctacgtttctgcaacaaactgcaaaattgtccaatcctgatctccgggagggacagatggccaatctctccccttccaaagcaggccctgctccccgggcagcctcccgccgaggggcccagcccccaacccacaggca

SEQ ID NO: 19242 - DNA, 397 bp, Homo sapiens
  misc_feature (1)...(397): n = A,T,C or G
ntttgccctcgctgcacgaattcggcacgagtatgaatcaaagaaagccaaaaaacctgcacttgttgccaagtcttccatcttactagatgtgaaaccttgggatgatgagacagatatggcgaaattagaggagtgcgtcagaagcattcaagcagacggcttagtctggggctcatctaaactagttccagtgggatacggaattaagaaacttcaaatacagtgtgtagttgaagatgataaagttggaacagatatgctggaggagcagatcactgcttttgaggactatgtgcagtccatggatgtggctgctttcaacaagatctaaaatccatcctggatcatggcatttaaataaaagattgaaagattaaaaaaaaaaaaaaaaaaa

SEQ ID NO: 19243 - DNA, 415 bp, Homo sapiens
  misc_feature (1)...(415): n = A,T,C or G
natttgcnccgcgctgcaggaattcggcacgagagcctctccgcgagtcttccccgtgtgtcctcatctgcggcaggcaggagagggggagcaaacaggaaattccacagctgcctccagaaacattaaccacccctctctagtcttactggtattttttgtttccttaataaagctccagtctccctcatttgagcaatactctcatttcctctgatgtctggatgatcggcagggcaggaatctgagcgctggccccgtggtgaggccatgttctcataatcaggctccagccagaaaaataagaaacaccgcaacaggcttcagtatcagggctgaaactgctggatgaataaactatttattaaaaacggaaaaaaaaaaaaaaaaaaaaaactcgggggggggcccggac

SEQ ID NO: 19244 - DNA, 444 bp, Homo sapiens
  misc_feature (1)...(444): n = A,T,C or G
nattgaccttggtgagcgattcggcacgagtggacacagaggagcaggaggagttcaaagcagcagacgtggagcagctgaagccagaggaaatcaagtcgggcaccacagcacccttgggctttgatgagatggaagtggagatccaaactgttaaaacagaggaagaccaagaccccagaacagacaaagcccataaggagacagaaaatgagaaaccagaaagaagccgagagtctaccattcatacagctcatcaatttcttatggacacgatcttccagccctttttaaaagatgtcaatgagctaagacaggagctggagagacagctggaaatgtggcagccacgtgaatctggaaacccagaggaggagaaggttgcagctgagatgtggcagagttacctgatcttaacagcgcctctttcacaacggttatgtg

SEQ ID NO: 19245 - DNA, 521 bp, Homo sapiens
  misc_feature (1)...(521): n = A,T,C or G
ngacggtgtnnnttatgacggctgtggaattctgcacgagcctcaacgccctcacctgtgccctgggcttgctgtacttcatccggcgaggaaagcagtgtctggatttcactgtcactgtccatttctttcacctcctgggctgctggttctacagctcccgtttcccctcggcgctgacctggtggctggtccaagccgtgtgcattgcactcatggctgtcatcggggagtacctgtgcatgcggacggagctcaaggagatacccctcaactcagcccctaaatccaatgtctagaatcaggccctttggacatcctgctgacacttgggccccttaacaccttgggctgctcagaccctccagatgaggtccagcccagatctgagaggaaccctggaaatgtgaagtctctgttggtgtgggagagatagtgagggcctgtcaaagaaggcaggtagcagtcagcatgacagctgcaagaatgacctctgtctgttgaagccttggtatctgaga

SEQ ID NO: 19246 - DNA, 441 bp, Homo sapiens
aactgaccgcctgaggattcggtcgagctcaaataaaccgactgtagaaaggcattatttttgggaaacccgaggatggactcgctattagatgatattaaggaattgtagttaatctcgtcgcgtgtatctgttaagggctataggctgaagtatttaatgctgaaaccatatgatggtttctttaaaatacccccaaccggccgggcgctgtgactcaaacctgtaatcccagcacttgggaagccgaagcgggaggatcgcttgagcccaggagttcgagaccagcctgagcaacatagtgagacctcgtctgtacaaaaaattttttttaattatttatttaattaaattagcttggcgtggccgctcacacctgtagtcccagctacttgggaagctaacgctggaagatcgctcgaacccaggaggtcgaagctg

SEQ ID NO: 19247 - DNA, 470 bp, Homo sapiens
  misc_feature (1)...(470): n = A,T,C or G
cggnncgccaattgaccccccnnnttagacccccgctgcaggaattcggcacgagggaaaaccacccttcaacctgggtgatgctccttggggccctacctagagggactgacttttgtccattgacacaaaccccttttagtactgttttgagttttgtcattaaaacagccacctttgtattttataatttatgacagaatgaagtcattttgaatctacatgaatgaacactttggattttgttgtagtttgattctagggtagaaccagtccatgctgtttttattttttatctccgtaattgtagaatcatgtttactcaacatttttccccagctgcctcagtaactgggcactcggaggccttggccgggttctggaggacagacagcaattctatgagtgctcactgagatacttgctggagacctcagaaaacacaagtgccttctccacggtgcaattcn

SEQ ID NO: 19248 - DNA, 450 bp, Homo sapiens
  misc_feature (1)...(450): n = A,T,C or G
aattgaacggcactngcgctgcacgaaaccggcacgagtcgaggctgtgcattgcagtgcgccatcttatcgcctgctttcaaagccagagaattttctatcactgatgtctgaccatatccaatgtctctgagatggaattctccacctgaagaagggccaagtgaatgtgaagtcttttccaaaaatcatgctgctcctttctctaaagctcttacattgtatagaaaggaacctttcactcttgaggcctactacagctctcctcaggatttgccctatccagatcctgctatagctcaactttcagttcagaaagtcactcctcagtctgatggctccagttcaaaagtgaaagtcaaagttcgagcaaatgtccatggcattttcagcgtgtccagtgcatctttagtggaggttcacaactctgaggaaaatgaggagccaatg

SEQ ID NO: 19249 - DNA, 487 bp, Homo sapiens
  misc_feature (1)...(487): n = A,T,C or G
cggggnnnaagggggnnnnntttgancttcaccggctgcaggaattcggcacgagctgnggaagcaaagtagaatttcataagaacaaaatggatggagaggagaaaacctatggtggctgtgaaggacctgatgccatgtatgtcaaattgatatcatctgatggccatgaatttattgtaaaaagagaacatgcattaacatcaggcacgataaaagccatgttgagtggcccaggtcagtttgctgagaacgaaaccaatgaggtcaattttagagagataccttcacatgtgctatcgaaagtatgcatgtattttacgtacaaggttcgctacactaacagctccaccgagattcctgaattcccaattgcacctgaaattgcactggaactgctgatggctgcgaacttcttagattgttaaataaaataaattataataaactgttaactcttttcagtatttaatacctgtagatcaan

SEQ ID NO: 19250 - DNA, 320 bp, Homo sapiens
  misc_feature (1)...(320): n = A,T,C or G
gggagggcccaggaaanaaacatgatcgcctccgctgatcgcactagctcatcactgcacagatctgtctgaaagcctcagtttctgagtgacccaggaacagatcagaaatggagcatggccttgtcctttaatggggatgcaaataaagtttgtggggttaaaagttataagacagcagtgataccccactctctccattattgtccagcggggtgacataatgacaggttaaatatttgtgattcattgattaaatattatttaaagaaatgtaaattcaaaaaaaaaaaaaaaaaaactcgggggggggcccgggc

SEQ ID NO: 19251 - DNA, 482 bp, Homo sapiens
  misc_feature (1)...(482): n = A,T,C or G
ggggggcncnnnaggagaaanaatttgacccgcctgtggcagacggtcgtttgccctctcaggctcctgggatggaaccctgcgcctctgggatctcacaacgggcaccaccacgaggcgatttgtgggccataccaaggatgtgctgagtgtggccttctcctctgacaaccggcagattgtctctggatctcgagataaaaccatcaagctatggaataccctgggtgtgtgcaaatacactgtccaggatgagagccactcaaagtgggtgtcttgtgtccgcttctcgcccaacagcagcaaccctatcatcgtctcctgtggctgggacaagctggtcaaggtatggaacctggctaactgcaagctgaagaccaaccacattggccacacaggctatctgaacacggtgactgtctctccagatggatccctctgtgcttctggaggcaaggatggccaggccatgttatgggatc

SEQ ID NO: 19252 - DNA, 493 bp, Homo sapiens
  misc_feature (1)...(493): n = A,T,C or G
ngggcccnnnnattacccgtctgcaggcggtcttccgagcggtcgcgtgaactgcttcctgcaggctggccatggcgcttcacgttcccaaggctccgggctttgcccagatgctcaaggagggagcgaaacacttttcaggattagaagaggctgtgtatagaaacatacaagcttgcaaggagcttgcccaaaccactcgtacagcatatggaccaaatggaatgaacaaaatggttatcaaccacttggagaagttgtttgtgacaaacgatgcagcaactattttaagagaactagaagtacagcatcctgctgcaaaaatgattgaaattggcttaatttttactggaggtgaaggctgtatttgtagtagtactcaagaatcacctgatgttttcttattctccttaaattaagagttattatgtggttgtattcttgggctgatgttataataaacatattggttactgcaaaaaaaaaaaaaaaa

SEQ ID NO: 19253 - DNA, 485 bp, Homo sapiens
  misc_feature (1)...(485): n = A,T,C or G
aggagtgccnaggagccccctactgaccgccttctgaattccgtcgagctgatgtgttaggtgtttaaggaaataatgcttcaggacctttttgacaacacagcttcatgaatgactgggggatatttatgtttgtgctgagaaaagggagggagtgggcaggttggagtggggacctttccattgaaagcagtgcagtcagctgtttcgtagatgcattttttctttatgcttgtaacattgttcttgtgtccataattgactgaaatgtcaagctccaggaatgcaaggcatttatcaggtgaccagaagtagaaccttgttgattatgaaatggaagaataatgtcaaggtagtgggggtaaaatgacaaatgagattttactggtgaatttccatgcttagtatgtacattaacctctttttaagttgcatgttaatctggtataacgtattgtgtctggtttatgctntgagtaaaaaaa

SEQ ID NO: 19254 - DNA, 403 bp, Homo sapiens
gagggccttcccgctctggatctggccaagctcaaagggagcacggggtgctgggaggtaaactgaggcaacgactggggctacagctgctagaactgccacctgaggagtcattgccgctgggaccgctgcttggcgacacggccgtgatccaaggggacacggacctaatcacgcggccctggagccccgctcgtaggccacaggtcgatggagtccgcaaagccctgcaagacctggggctccgaattgtggaaataggagacgagaacgcgacgctggatggcactgacgttctgttcaccggccgggagattttcagaggcctctcctaatggaccaatcaccgaggagctgagatcgtggcggacacgttccgggacttcgacgtcttcactgtgcg

SEQ ID NO: 19255 - DNA, 475 bp, Homo sapiens
  misc_feature (1)...(475): n = A,T,C or G
naatgatttgcctccggtaaatcgtacgagcannnangcgannagcagcttcaagatgaagctgaacatctccttcccagccactggctgccaaaaactcattgaagtggacgatgaacgcgaacttcgtactgtctatgacaagcgtatggccacagaagttgctgctgacgctctgggtgaagaatggaagggttatgtggtccgaatcagtggtgggaacgacaaacaaggtttccccatgaagcagggtgtcttgacccatggccgtgtccgcctgctactgagtaaggggcattcctgttacagaccaaggagaactggagaaagaaagagaaaatcagaaacctactcaacacagcactctaggcagccactatcaatcaattgaagttgacactctgcattaaatctatttgccattaaaaaaaaaaaaaaaaaaaaaacttcgggggggggcccggtccccatttct

SEQ ID NO: 19256 - DNA, 475 bp, Homo sapiens
  misc_feature (1)...(475): n = A,T,C or G
gggagccgggggnnnnnnaaaactggtgaactgccngctngcgggaannncgcacgagctanagacagagaccacgtaccctcgtggaggcttaattacctgggaatgacgcagctgtactgctacctgtgtattttctgtgttaatactggtagctctcaccacataagcttaattactgggggcagagtgacatgctcgtgcacagtcaagattccactaaaagggtttgatttcgttgtaaatagtctcgtattgcctaatgcattaaaactcttgaaatgattgtattgctaggccctttcttcaaaacgggctttcttcgcattatttagtttacaggaggacttttttttttttaaaggaagccaaattattgaatgtgtaaaagtactataaaaagctgattgcttattttgagtgtcaagacccagttccgggtactttattctttaaatttggtagggtagcatag

SEQ ID NO: 19257 - DNA, 462 bp, Homo sapiens
  misc_feature (1)...(462): n = A,T,C or G
gggagcaggggnnnnaaccctgcngactggcggtatncgcacgagctgccctcttgaaaggcatttacttgtttaacacttgtccagctacagtggggtacagtagctggctattcacaggcatcatcatagcccactagtctcatattattttccttttgagaaattggaaactctttctgttgctattatattaataaagttggtgtttattttctggtgnaaaaaaaaaaaaaaaaaaaaaaaccttcgggggggggcccggcccccaattccccttataggggggcgaataaaaattcatgggccgccgtttaacaacgtcgggacgggggaaaaannnnnnnnnnnnnnnnnnnnnnnnnnnnnnnnnnnnnnnnnnnnnnnnnnnnnnnnnnnnnnnnnnnnnnnnnnnnnnnnnnnnnnnnnnnnnnnnnnnnnnnnnnnnnnnnnnnnnnnnnn

SEQ ID NO: 19258 - DNA, 478 bp, Homo sapiens
  misc_feature (1)...(478): n = A,T,C or G
gcccccgccccatcgaccccccatnnaattgaccngcgctgcaggaattcggcacgagaaggaaggagagagaaaacagcagaattttgataagaaaagaaaagcaaaaactaataagaagatggatcacataaagaagagaaaaacagagaatgcttataacgcaatcataaatggggaagctaatgtcaccggttcccaactcctaagcagtattttaccaacttcagatgtgtcacaacataacattctcacgagtcacagcaaaaccagacaagaaaagagaactgagatggaatactatacccatgagaagcaagagaaaggcactttgaattcaaatgcagcttatgaacaaagtcatttcttcaataaaaattataccgaagatattttcccagtgacaccaccggagttagaagaaaccattcgagatgaaaaaataagaagacttaagcaggtgctgagagagaaagaa

SEQ ID NO: 19259 - DNA, 485 bp, Homo sapiens
  misc_feature (1)...(485): n = A,T,C or G
atggaaaaccnntaaaaaaanntttgaccccgcgctgcaggaattcggcacgagcagacttcgctcgtactcgtgcgcctcgcttcgcttttcctccgcaaccatgtctgacaaacccgatatggctgagatcgagaaattcgataagtcgaaactgaagaagacagagacgcaagagaaaaatccactgccttccaaagaaacgattgaacaggagaagcaagcaggcgaatcgtaatgaggcgtgcgccgccaatatgcactgtacattccacaagcattgccttcttattttacttcttttagctgtttaactttgtaagatgcaaagaggttggatcaagtttaaatgactgtgctccccctttcacatcaaagaactactgacaacgaaggccgcgcctgcctttcccatctgtctatctatctggctggcagggaaggaaagaacttgcatgttggtgaaggaagaagtggggtggaag

SEQ ID NO: 19260 - DNA, 502 bp, Homo sapiens
  misc_feature (1)...(502): n = A,T,C or G
cggcgggcatttgannccccnnnnattgtcccgcctgcaggaattcggcacgagatgatattgatgatgttaagaagttcaaaccgggttacctggaagctactcttaattggtttagattatataaggtaccagatggaaaaccagaaaaccagtttgcttttaatggagaattcaaaaacaaggcttttgctcttgaagttattaaatccactcatcaatgttggaaagcattgcttatgaagaactgtaatggaggagctataaattgcacaaacgtgcagatatctgatagccctttccgttgcactcaagaggaagcaagatcattagttgaatcggtatcatcttcaccaaataaagaaagtaatgaagaagagcaagtgtggcacttccttggcaagtgattgaaacatctgaaattctgctgtcaagattcccatctctaaggactccaagtgctagagacaagggggtctatgagcatttactgacttcctgt

SEQ ID NO: 19261 - DNA, 542 bp, Homo sapiens
  misc_feature (1)...(542): n = A,T,C or G
aggcgttcacggctgnattgctcggctgcacgaattcggcacgagccagtgtgattttgacattgctggtcagtttgaccctatgatccccgatgcagagtgtttgaagatcatgtgtgaaatcctaagcggattgcagttgggagactttctcattaaggtaaatgaccggcggattgtggatgggatgtttgctgtctgtggtgttcctgaaagcaagttccgtgccatctgctcctccatagataaactatacaagatggcttggaaagatgtgagacatgagatggtggtgaagaaaggcctggctcctgaggtggctgatcgaattggggactatgtccagtgtcatggtggggtatccctagtagagcaaatgtttcaggatcccagactatcccagaacaagcaggccctggagggcctgggagacctatagctgctatttgaatacctgactttatttggaattgctgataagatctcctttgacctcagcctggctcggggcctagactactatacaggagtgatctatgaan

SEQ ID NO: 19262 - DNA, 492 bp, Homo sapiens
  misc_feature (1)...(492): n = A,T,C or G
nttgcccgcctgcagaattcggcacgagccgcagtgggggctggggactggcgcagccccaggcgcctccaagggaagcagtgaggaaagatgaggcatcgtgcctcacatccgctccacatggtgcaagagcctctagcggcttccagttccccgctcctgactcctgacctccaggatgtctcccggtttcttctttcaaaatttcctctccatctgctggcacctgaggagtgtgagcaacctggaccacaagcccagtggtcacccctgtgtgcgcccgccccagcccaggagtagtcttacctctgaggaactttctagatgcaaagtgtgtatatgtgtgtgtgtgtgtgtgtgtgtgtgtgtgtgtnnttatgnngattttggnatatgtgagggagatntancttngttatgtataaataaaggntncngtgggtccaaaaaananaaannttnaaaattttttttttgggggggggggggggg

SEQ ID NO: 19263 - DNA, 467 bp, Homo sapiens
  misc_feature (1)...(467): n = A,T,C or G
aattcgcccggctgcatgaattcggcacgaggtaaaagcctccccgcctcctgagctccctcggtcgcctcccgagaagccaacgggcctctctggtggagcgctaggttgacagcgttttagcaggaccgcgagaaaccggggagatcctcttacgaggaaaaactccaagattacatccctgttatctttcctccaagagctgactaaggctttggaacagaaaccagatgatgcacatatattatcgtcaaagagcttattgtcacattcttcttgggaattactgtgagacggggtttcactgtgttagccaggctggtctcgatttcttgacctcgtgatccacctgcctcggcctcccaaagtgctgggattacacgcgtgagccgccatgcccagccagaaacgcatctttttctacatagttgctgttgctgatgcanagaagtctcgcgaattcaatc

SEQ ID NO: 19264 - DNA, 487 bp, Homo sapiens
  misc_feature (1)...(487): n = A,T,C or G
aggatgtcccnaggtgnnnccaatgatcgctcgtggaattncgctcgaggncaactgtgccatcattgccaatgggatcaccaaagcctgccgggagctagaactcaaggtgcccctggtggtccggcttgaaggaaccaacgtccaagaggcccagaagatactcaacaacagcggactccccattacttcagccattgacctggaggatgcagccaagaaggctgtggccagtgtggccaagaagagatgtctttgtcctgatccaatggagaaagaaagccatttttccataaaaagggatggttcatcattgtgaaagaaatggttatctcattggggaagaaaaggggagggggaaggcaagaatcactgaaaaatcttaaatctgtgttttctggaataagatatctagacagcctaaatctgattttagtctttataaaaataatatcttgagttctcatacttttctgtcactgtaagn

SEQ ID NO: 19265 - DNA, 495 bp, Homo sapiens
  misc_feature (1)...(495): n = A,T,C or G
ggggggnncccnaagggaggccnngtctgatnncccctacgatccgcctgcangaattcggcacgagcatggcccagcgctcggacctcctggagctcgactgtcagctgacacgggacagagtggtggtggtgtcacatgatgagaacctgtgccgccagtcgggcctaaacagggatgtgggcagcctggacttcgaggacctgcccctctacaaggagaagctggaggtttacttctctccaggccactttgctcacgggtcagaccggcgcatggttcgtctggaggacctgttccagaggtttccaaggacacccatgagcgtagagatcaaagggaagaacgaagagctcatccgtgagcaggcttggtgagacgctatgaccgtaatgaaatcaccatctgggcctcggagaagagctcggtcatgaagaaatgcaaggctgccaaccccgagatgcccctgtccttcacaataagccgaggattctg

SEQ ID NO: 19266 - DNA, 512 bp, Homo sapiens
  misc_feature (1)...(512): n = A,T,C or G
agcggtnannnnnttttgatcgccctgccggaattcggcacgagtatcaaatggaatgaaactagataatttcaagaaactgagtaggacaaagggagaaagaaatacatgttctttttcctgcaattaataatcagactggaaaattgttgtatcattttaatttgtagttacaattgctttcattcgtgaagccgaaacgtttttaaacatgaattacatatgaattattaagcatatgtgctttcgcagctgataatataaaaggaaatcccacagtctagatatagccccattactacaaaatgctaaaatatttaatgaaaattgatggtggccacagtgtgcaggttataaaagcattaatacatttcaaggtaagagccttataagttaaaaacattttcagtttttttttaaaaaacgtactcttattatctggaacatagaaatataaaagggaacatctaaagcttagaatagtgtgatttttagtaagccattattctcct

SEQ ID NO: 19267 - DNA, 461 bp, Homo sapiens
  misc_feature (1)...(461): n = A,T,C or G
natagatnnccctggagagcgctgcacgagccgctttgaaaggaaagggtagtgtccaaacagcattttccagacaagctctgtacttttttgccaaaagaattaactttaaactgaaggcaggggacagttaaacaagagtcggcactgggaacagctgtgcgtagaccagaccagtgacttataaggaggcgatcgagatcggatgacagcaaatcatgaaagctacctcctcatggcaagcacccagaatgatatggaagactgggtgaagtcaatccgccgagtcatatggggacctttcggaggagcaacacagatgtacacacggtggcatcacttcttaagctgtacctccgagaacttccagaaccagttattccttatgcgaagtatgaagattttttgtcatgtgccaaactgctcagcaaggaagaggaagcatgtgttaatgaattagc

SEQ ID NO: 19268 - DNA, 496 bp, Homo sapiens
  misc_feature (1)...(496): n = A,T,C or G
attggacccccgctgcaggaanccnnattgacactcgctgcatgaattctgcacgagctgactcaaagcatcttcaccatagtcatccatgagattgcccgtgtggagaattcctatgggcaagagcgtcgctgccatctcatgtgagcccttgggtgtggggtaactgccttgcttctgcccccggcacttgccatgttccagtggggggcagatcctcaggacttcacgggtatggttgccagctgtgttcctggcccctggacacacagtgtggcatcctcatgtttgcacactttccccaggctccagtggcctggatgtcaatgtttacaaaggggcaaggacctctcatggacactggcctctagccctctgtttttgtttgatgaattctgttataacctatggggtcaggatatgagtcctgcgcattatttatccatgacccatcctcttgggtgggttgtgggtgctcgctggataaggcgagccg

SEQ ID NO: 19269 - DNA, 488 bp, Homo sapiens
atttgaccccgctgcaggaattcggcacgagatcagaaccatgcacggccatgaccacaatgtttcttcagtagccatcatgcccaatggagatcatatagtgtctgcctcaagggataaaactataaaaatgtgggaagtgcaaactggctactgtgtgaagacattcacaggacacagagaatgggtacgtatggtacggccaaatcaagatggcactctgatagccagctgttccaatgaccagactgtgcgtgtatgggtcgtagcaacaaaggaatgcaaggctgagctccgagagcatgagcatgtggtagaatgcatttcctgggctccagaaagctcatattcctccatctctgaagcaacaggatctgagactaaaaaaagtggtaaacctgggccattcttgctgtctggatccagagacaagactattaagatgtgggatgtcagtactggcatgtgccttatgaccctcgtgggtc

SEQ ID NO: 19270 - DNA, 505 bp, Homo sapiens
  misc_feature (1)...(505): n = A,T,C or G
ngcgcggtnnnngtgaaaactgatgcactgaccgactgtacgaattcggcacgagctgcggcagaaatgcccctccgggctaggagcgacggcgccggcccgctatactcgcaccacctccccacctccccgctgcagaaagcgctgttggccgccggctccgcggcgatggcgctctataacccctaccgccacgattcctggatcccacctaaacgcactgaatctgaatctgaatctgcagtggagggagaaatgggcgtgaaaccgaaagtctgtctttaaactacttgggagaatctgtcatgcagccatattgagaacatctagactaaatagatgattcataagtaccgatcagtttataatatcctactagaaagtcaactccgaggtcgaggaccatgtctgcctcgttccactgcatctgcagccttctggatagtgcctggcacatagtaaatgctcaataaatgtttgctggatgtgtgactagaaaaaaaaa

SEQ ID NO: 19271 - DNA, 415 bp, Homo sapiens
  misc_feature (1)...(415): n = A,T,C or G
nattgatnncccnactgatcagcctgcaggaanncggcacgagtatcaatctctgtactatagactacttcaaagaaatgcaattttattactgtcagatacttactgtaaaccaaattaggctaacaaagtattgtctagtgtgtatgtcttcaaactttatcctgtgtaccctaaaagaattttgaaaaatctatgtaataccttgcagcattttaagttgcagcaacacttttatcataagtttaaacatttgcccggactgtaatttctgttgaattgtaaatattgacattttaaaacaaaaggattacatctctccattaaatgtaaccattggattaaaataccatagcagtttaacacctaacactatttttaatacataaattaactcttttttaaatagaaaaaa

SEQ ID NO: 19272 - DNA, 462 bp, Homo sapiens
  misc_feature (1)...(462): n = A,T,C or G
natagacccgcctggaagaactctgcacgagggacgttggtgttgaggttagcatacgtatcaaggacagtaactaccatggctcccgaagttttgccaaaacctcggatgcgtggccttctggccaggcgtctgcgaaatcatatggctgtagcattcgtgctatccctgggggttgcagctttgtataagtttcgtgtggctgatcaaagaaagaaggcatacgcagatttctacagaaactacgatgtcatgaaagattttgaggagatgaggaaggctggtatctttcagagtgtaaagtaatcttggaatataaagaatttcttcaggttgaattacctagaagtttgtcactgacttgtgttcctgaactatgacacatgaatatgtgggctaagaaatagttcctcttgataaataaacaattaacaaataaaaaaaaaaaaaaaaaactcgagg

SEQ ID NO: 19273 - DNA, 478 bp, Homo sapiens
  misc_feature (1)...(478): n = A,T,C or G
ggagtnnccnnnagagnnnnacatgatcgcctgttgattgctttcagagggcagtgtagagctttatgctgaaaaggtggccactagaggtctgtgtgccattgcccatgcagagtctctgcgttacaaactcctatgagggcttgctgtgcggagggcctgctatggtgtgctgcggttcatcatggagagtggggccaaaggctgcgaggttgtggtgtctgggaaactccgaggacagagggctaaatccatgaagtttgtggatggcctgatgatccacagcggagaccctgttaactactacgttgacactgctgtgcgccacgtgttgctcagacagggtgtgctgggcatcaaggtgaagatcatgctgccctgggacccaactggtaagattggccctaagaagcccctgcctgaccacgtgagcattgtggaacccaaagatgagatactgcccaccacccccatctca

SEQ ID NO: 19274 - DNA, 517 bp, Homo sapiens
  misc_feature (1)...(517): n = A,T,C or G
agggtgtnnnnaattgacggctgtggattcggcacgagatcgctccctcagggacaggaagactgggcaggaagaggggagaagcattcaagttaaggcaaaaggcccaacgcagagcagcacactgaggtcacacctgtgagatgtggaagagaattcctgagcgtggagcgatggggttaggtgccaggatgattgcccattttgcttctgtcagactcttgactaaggatttctggttgcattttattacataaaagccagggaggttatatcacggtgagaaagcttccctgacgccgcctcctgtagcgcagccaagcgagcctgtggaggtaccatatgactgtaggcctctggggacagggagctgcatctgcttctcaaggccagggacacagccatttctgccagcatctgttgatcagtgagtgagtgagtgggcaggtagagcaggagccagtgaagagcaggccctggatgggtggngatgcaccatgtccccaggctgcagctg

SEQ ID NO: 19275 - DNA, 453 bp, Homo sapiens
  misc_feature (1)...(453): n = A,T,C or G
nattgcnaactgagggcactgcggaatacggnacgagcctatgtttattaaggaatcactaaaacaaattcttgaggagagtgacatctatgcctatctattacttcttgtgcttgaatctgctttttacctttgtggaattattctatggcgtgctgaccaatagtctgggcctgatctcggatggattccacatgctttttgactgctctgctttagtcatgggactttttgctgccctgatgagtaggtggaaagccactcggattttctcctatgggtacggccgaatagaaattctgtctggatttattaatggactttttctaatagtaatagcgttttttgtgtttatggagtcagtggctagattgattgatcctccagaattagacactcacatgttaacaccagtctcagttggagggctgatagtaaaccttattggtatct

SEQ ID NO: 19276 - DNA, 472 bp, Homo sapiens
  misc_feature (1)...(472): n = A,T,C or G
ctccgcaccgcctgatagaactgccntgcaggaattccgcacgagggattttattacctttgttattgatttttagtgtaatccattgtgttcagagcatatacgctatgtgatttcagacctttgaaatttattgatactttatggcttagtatatggtctattttgataaagtttcataaacacttgcaatgaatgtatatgttgcagttggtgattataggttctatgtatgttcagtttttcagtttgttggtcttctgtgtctttgatttttttttttctacttgttatatcagctgctgaagaagaatattaaaatatcctactataaggatcttatgactgggcacagtggctcacacctataatcttaccaccttgggaggccaaggtggatggattgcctgagctcaggagtttgaggccagcttggacaacattatgaaaccccatctctactaanaatata

SEQ ID NO: 19277 - DNA, 505 bp, Homo sapiens
  misc_feature (1)...(505): n = A,T,C or G
attcgcccgccngcagatttcccccgcgctgcaggaattcggcacgagcttatcacaggtcccagtcatcttcctccgtcttgatcaacaaatcaatggattccatcaactaccctagtgatgtgggaaagcagcagctgctgtctttacacagaagttcaaggtgtgagagtcaccaggacttgctgccagatattgctgactcgcatcaacagggcactgaaaaactctcagatctcacactccaagactcacagaaagttgtggtggtcaatagaaatttacccttaaatgcccaaattgcaacacagaattatttttccaatttcaaagagactgatggagatgaagatgactatgtggaaatcaagtcagaagaagatgagtcggagttggagctatctcacaatcgtagaaggaaatctgactcanagtttgtggatgctgactnttctgataatgtctgcagcggcaacacattgcattcttttgatagtccgcgcac

SEQ ID NO: 19278 - DNA, 485 bp, Homo sapiens
  misc_feature (1)...(485): n = A,T,C or G
aatagaaaagcgatganaaaannttttgaccccgctgcaggaattcggcacgagtggacctggagatggtcaccatgaattccctcatgagctaccgggccagctctgtactgaggctcaccgtctttgtaggggcctacaccttctgaggagcaggagggagccaccctccctgcagctaccctagctgaggagcctgttgtgaggggcagaatgagaaaggcccaggggcccccattgacaggagctgggagctctgcaccacgagcttcagtcaccccgagaggagaggaggtaacgaggagggcggactccaggccccggcccagagatttggacttggctggcttgcaggggtcctaagaaactccactctggacagcgccaggaggccctgggttccattcctaactctgcctcaaactgtacatttggataagccctagtagttccctgggcctgtttttctataaaacgaggcaact

SEQ ID NO: 19279 - DNA, 473 bp, Homo sapiens
  misc_feature (1)...(473): n = A,T,C or G
nattgtcgcctgcggaattcgtcgcgagcacgtcctctgtagtggttgaatcattttacactattactacattatgggaagattccagttgctccatatctttgctaacacttggcattgtcagtctcttaaaatttaatccactctagcctccttatgattttaatttgtatttgcccactgaataatgtatgtctatgatttcatctgcttattgcttttccgtgtcgtcttttgtgatgtgtctgttcgtgccttttgcctgtttttaagttgggatgcttattgttgactcaagttctttccatattctgcatgaaaaacatacatgtaatatatagaattctttgtctccatttgtgacaaatattgtgaatattaaaaaaaaaaaaaaaaaaaaaaaaaacttcgggggggggcccggaccccaattccccctatagggaggggaataacaattcatgggccggggg

SEQ ID NO: 19280 - DNA, 504 bp, Homo sapiens
  misc_feature (1)...(504): n = A,T,C or G
tgaattntncnaccgtantnaccaagannnnnnncntttgagcgcctgatgaattccgccgagtaggcgggatggtgccgctgtgccaggttgaagtattgtattttgcaaaaagtgctgaaataacaggagttcgttcagagaccatttctgtgcctcaagaaataaaagcgttgcagctgtggaaggagatagaaactcgacatcctggattggctgatgttagaaatcagataatatttgctgttcgtcaagaatatgtcgagcttggagatcagctcctcgtgcttcagcctggagacgaaattgccgttatcccccccattagtggaggatagtgcttttgagccatctaggaaagatatggatgaagttgaagagaaatctaaagatgttataaactttactgccgagaaactttcagtagatgaagtctcacagttggtgatttctccgctctgtggggcaatatccctatttgtagggactacaagaaataacttt

SEQ ID NO: 19281 - DNA, 500 bp, Homo sapiens
  misc_feature (1)...(500): n = A,T,C or G
gaagaaaaaaanttagataaccngttggaccgcctccaggaattcggcacgagccaaaatgaagtttaatccctttgtgacttccgaccgaagcaagaatcgcataaggcatttcaatgcaccttcccacattcgaaggaagattatgtcttcccctctttccaaagagctgagacagaagtacaacgtgcgatccatgcccatccgaaaggatgatgaagttcaggttgtacgtggacactataaaggtcagcaaattggcaaagtagtccaggtttacaggaagaaatttgttatctacattgaacgggtgcagcgggaaaaggctaatggcacaactgttcacgtaggcattcaccccagcaaggtggttatcactaggctaaaactggacaaagaccgcaaaaagatcctcgaacggaaagccaaatctcgccaagtaggaaaggaaaagggcaaatacaaggaagaaaccattgagaagatgcaggaataaagta

SEQ ID NO: 19282 - DNA, 487 bp, Homo sapiens
  misc_feature (1)...(487): n = A,T,C or G
cggggnnaaaggggnnnnnnttttgacctacatcggcatcacgaattcggcacgagggaaagtcagcatttgagtgtagagaaaaaaagaggatcatacagatgtcatcaaattataggctttaatacaggttgctttttttaatccaaaaggaaaagcacttatcctatcagaatgtctaccatgttttatagtaataatttgtgtaaaaaattgaatttttgaatagttttttgtattttttgtgatgaaaaactcataacataaaatttaccatattaactgtttctaaagaatacagttcagccatgtgaagtacatttacactgttgtgaaacagatctccagaactttttcatcttgcaaaactgaaactccatacccattaaacaactcccctttttgttttctcctcagtggaatagaattttgactccatataaatcaagaaacacctaaattctttagttgtttgtgtttgcaagat

SEQ ID NO: 19283 - DNA, 336 bp, Homo sapiens
  misc_feature (1)...(336): n = A,T,C or G
atgcacaggaagcgttgggagatgttgtttattgtagtctccctgaagttgggacaaaattgaacaaacaagatgagtttggtgctttggaaagtgtgaaagctgctagtgaactctattctcctttatcaggagaagtaactgaaattaatgaagctcttgcagaaaatccaggacttgtaaacaaatcttgttatgaagatggttggctgatcaagatgacactgagtaacccttcagaactagatgaacttatgagtgaagaagcatatgagaaatacataaaatctattgaggagtgaaaatggaactcctaaataaactagtatgaaatan

SEQ ID NO: 19284 - DNA, 481 bp, Homo sapiens
  misc_feature (1)...(481): n = A,T,C or G
natgatcgcctgcggaancatcgccccgcctgcacgaattcggcacgaggagagagagagagagagagagagagagagagagagagagagagagagagagagagagagagagagagagagagagagagacactcgcgccgaatggcgcgcgaggctttttttttttttttttttttttttgcccgcggaccaatgtttttttataaaaccgtcgggccaaaggtttttaccccccggcggggggggggtgccctgaaaaaaccaaaagcctgttttttttcccccaagcttattgttgactcaaggtctttacaaaaaaaagatgcggggcgtgcctgttataccccccccccccccccccccgtttgtgaaggatcccccgcctcctcccccccctttgggggaaggggaaaaatttttgggggggtgtttcccccctttacagggagggggggggccccccccctttggggccgttttt

SEQ ID NO: 19285 - DNA, 503 bp, Homo sapiens
  misc_feature (1)...(503): n = A,T,C or G
tgtanannnnnagggtgacccnagnnccccccnaaagcccgcatgatgaatcgcctcgagaaagaacccaaagaagaagttaagagcttcatggatcgaaagaagggatttacagaagttaagtcgcagaatggagaattcatgacccacaaacttaaacatactgagaatactttcagccgccctggagggagggccagcgtggacaccaaggaggctgagggcgccccccaggtggaagccggcaaaaggctggaggagcttcgtcgtcgtcgcggggagaccgagagcgaagagttcgagaagctcaaacagaagcagcaggaggcggctttggagctggaggaactcaagaaaaagagggaggagagaaggaaggtcctggaggaggaagagcanaggaggaagcatgaggaagccgatcgaaaactcaaagaggaggaagagaagaggaggctaaaggaagagattgaaaggcgaaaagcanaagctgctgagaaacc

SEQ ID NO: 19286 - DNA, 504 bp, Homo sapiens
  misc_feature (1)...(504): n = A,T,C or G
tggaagaaaaattatggtngtttaaaaggggagaaaaaggcttgaaanacanttttgcaccgcctgcaggaattcggcacgaggagacagacaagaaagactgggtcaaagagacagagccagaagccgaccaggacgggtactaccagaccacactccctgccattgtcttccagatgtttgaacagaatcttcaagttgctgctcagataagtgaagatttgaaaacaaaggtactagttttatgtcttcagcagatgaattctttcctaagcagatataaagatgaagcgcagctgtataaagaagagcacctgaggaatcggcagcaccctcactgctacgttcagtacatgatcgccatcatcaacaactgccagaccttcaaggaatccatagtcagtttaaaaagaaagtatttaaagaatgaagtggaagagggtgtgtctccgagccagcccagcatggacgggattttagacgccatcgcgaaggagggctgcc

SEQ ID NO: 19287 - DNA, 526 bp, Homo sapiens
  misc_feature (1)...(526): n = A,T,C or G
gtgggntnnnnnngnattgcccggctgcngaatncattccaccgcctgcaggaattcggcacgagcagaagctggatttcagtactggaaacttcaatgtgttagctgttagaatcgctgttctggcatccatttgcgttactcaggcatttatgatgtggaagttcattaattttcagcttcgaaggtggagggaacattctgcttttcaggcaccagctgtgaagaagaaaccaacagtaactaaaggcagatcttctaaaaaaggaacagaaaatggtgtgaatggaacattaacttcaaatgtagcagactctccccggaataaaaaagagaaatcttcataatgaattataaactaattgattaatgtccccaaagaaatctgctttctactatatctttcagcattagagatttttctgttcttgaaaatacagtctgtgctctttgaaaaaaaaaaaaaaaaaactcgggggggggcccggcacccaatccgccctatagggagccgaatcacaattcc

SEQ ID NO: 19288 - DNA, 450 bp, Homo sapiens
  misc_feature (1)...(450): n = A,T,C or G
atttgacaatcgatccgcgctgcaggaattcggcacgagaaatgtgcaagtgtttgattcatgccatttgataaacttctgccttgtagtcattgtttgatgggaccaacttgtaaagtatgagccttaaataaatctccatgctgaaaaatgtgttctaatgcaacacaaaaacatgaagtgactgcccagaggtagagttagtgtttaggtggaaagggagatgacagctttccaaagaaggacctaaaacacaccaagattgtcttctacaggaattgctgggcaggtctccgactaaaggtcttatgatgaaaaggaagaaacaagcccccaacacaaggctctgatacttattggtaaatgtaggagagaattaagaatttgttaattaaaatccaaacagagcttatttcagtagtcaagttacctgacatgataattattttn

SEQ ID NO: 19289 - DNA, 497 bp, Homo sapiens
  misc_feature (1)...(497): n = A,T,C or G
aaaaaaaaaaatttgatcnccntttgtaccgncntgcaagaattcgccacgagcaaaaaagtagttttaagcttgtttgcacagttctttttttccattggaaatggaattcattgccttaggtctttttaaatagtgtattattatcgttggggctggctctatgcttgaaaaccagtttatttataacctgttataagtgctatattctgtttgcagttaggaaatgcagaattcaaagtgatctcctagcttgtaagcaaactgagatgcactatcccttttctataaaaaataagttaatgtgtcaagaaaccaactctattaaggtggggtttaatattaccctttcctatgtgttttatctaattattttggttgttaatatggtgataatggaaagtcaagttaaattttaaatattaagaattctgatttattgagattgaattatgccaccacgtttatgtaaaaatgaaggtggcaccgtggtgaga

SEQ ID NO: 19290 - DNA, 479 bp, Homo sapiens
  misc_feature (1)...(479): n = A,T,C or G
tgatgtnccnnnaagagnnnnaactgaccgcctgtggaattccgcacgagtttaaatctttgcctttcagatacaggaaaaataatggcattaaattgctttaatttgcattattttagttatccagtttgcacatatttttataggtatcttaagcatcgattggtattttttaactgggccaagcccattaaggtctttcttctgttgggtgctatcattttctgattaagtctttttgactattgacatacagtctttcacggatggtggagtgtttttcccccaaatctgttgtttgtcttataatgttgtatatgagggtttatggtgtatgaatatgaatgcttctgtaatgtcaaacagatccctagtaaactccttcttcacttttactgtcagatttacaaaggtcctcccattgcaaagcagaggttgtgctaatctatatattgggtttctagctcactttgagcagc

SEQ ID NO: 19291 - DNA, 454 bp, Homo sapiens
  misc_feature (1)...(454): n = A,T,C or G
ntttgaaatcgatcgccacttccgaacgaggntggaggagatatgaagaatgtgaataaaaactgctgccctttttgaaaaaagtaggcttctctccaaaaaaggacattcactttatgccctgctcaggactgaccggagcaaattttaaagagcagacaaattactgcccttggtacactggattaccatttattccgtatttggataacttgccaaactttaactgatcaattgatggaccaataatactgccacttgtggataagttccaagatctgggcactgtggtcctgggaaagctggaatccgggtccatttttaaaggccagaagctcgtgatgatgccaaacaagcacaatgtagaagttattggaatactttctgatgatactgaaactgatattgtagccccaggcgaaaacctcaaaatcagactgaagggaattgaaga

SEQ ID NO: 19292 - DNA, 495 bp, Homo sapiens
  misc_feature (1)...(495): n = A,T,C or G
agggatgtcccnnaggttgcncccctaactgaccgcctgcttgaattccgctcgagaggcagcaatatttgctgttctgtagcctctgctggtgatacccaggcaaacagggtctgcagtggacctccagcaaactccaacagacctgcagctgagggacgtgaccattagaaggaaaactagtagacagaaaggaatagcttcaacatcaacaaaaaggacatccacaccaaaaccccatttgtaggttaccaacatcaaagaccaaaggtagataaaaccacaaagatggggagaaaccagagcagaaaagctgaaaattctaaaaatcagagcacctcatctcctccaaaggatcgcagctccttgccagcaacggaacaaagctggacagagaatgactttgacgagttgacagaagtaggcttcagaaggtcggcaataacaaacttctccgagctaaaggagcatgttctaacccgtcgcanagaagct

SEQ ID NO: 19293 - DNA, 492 bp, Homo sapiens
  misc_feature (1)...(492): n = A,T,C or G
gggatgtccccnagggaggnccnnaattgatnncccttactgatcgccgtgcagaattcggcacgagcccggacgtctaaaccaaaccactttcaccgctacacgaccgggggtatactacggtcaatgctctgaaatctgtggagcaaaccacagtttcatgcccatcgtcctagaattaattcccctaaaaatctttgaaatagggcccgtatttaccctatagcaccccctctaccccctctagagccaaaaaaaaaaaaaaaaaactcgggggggggccgggcccccatttccccttatagggaggcgttttacaattcatgggccggggttttaaaacggggggagatgggaaaaaggnnnnnnnnnnnnnnnnnnnnnnnntnnnnnnnnnnnnnnnnnnnnnnnnnnnnnnnnnnnnnnnnnnnnnnnnnnnnnntnnnnnnttnnnnnnnntnnnnnnnnttntntnnnnnnnnnnnnnnnntt

SEQ ID NO: 19294 - DNA, 443 bp, Homo sapiens
  misc_feature (1)...(443): n = A,T,C or G
nattgacctcggtgagctttttgagcagatagctattcattccagattttcgtgtacccattctgtttcaggagctcttctaggtaaagctgagatcacaggaacagcaggtgacaggcctagctatagttaggaatacacaagccgtaaaatcgagtccttacagccataccacaaggtacgtccatttggactacaagaagagcttcctttaaaggtcctatttcagcataaagaggctgtccttttttttgaggaatagtttggaccttgtgcctcctgtgggaggctgaggactgcgagaggagagctagcagatatgcctgttcacccctctctggtacttgtggcttgctaagatggttttatgaaaaatctcgggcattgtttgcattgtgtttattaataggggtttgtttttgttggttccttttttacaagaa

SEQ ID NO: 19295 - DNA, 336 bp, Homo sapiens
  misc_feature (1)...(336): n = A,T,C or G
gtccagctctggggaagaccgagacgaaatcgagtcagctggcgttgggagagggcttatttccgcttccgcttgcccactttcaggaatttgattctgagagcagggctgcggttccaggcagggtttgtacacatatttgcgttggaaggagagaggagcctaggacacatatgtattaactgtgcagctggtccgactcccgacagcttcagcgcacaccagccagccttggagttgctggaacggccctggctgcaagctggaatcacccggagagctttcgacattgatgcctgaggcccagctgtggagcgacagtttgaaaagagctgn

SEQ ID NO: 19296 - DNA, 447 bp, Homo sapiens
  misc_feature (1)...(447): n = A,T,C or G
cattgaccccgctgcattaattcgccacgaggttctcggcaatacgttcaccggaacttgggagcaagaaatgtccttgttgatagtgaacaccaattgaaaattgtagacttcggtttaaccatagcagttgagaccgataaggagtattacaccgtcaaggatgaccgggacagccctgtgttttggtatgctccagaatgtttaatgcaatctaaattttatattgcctctgacgtctggtcttttggaggcactctgcatgagctgctgacttactgtgattcagattctaatgccatggctttgttcctgaaaatgataggcccaacccatgggcagatgacagtcacaagacttgtgaatacgttaaaagaatgaaaacgcctgccgtgcccacctaactgtccagatgaggtttatcaacttatgatgaaatgctgggan

SEQ ID NO: 19297 - DNA, 491 bp, Homo sapiens
  misc_feature (1)...(491): n = A,T,C or G
cgcgccggggnnnaggggaatggacgcctgcggaattaatgcgagaccctctgagccttggtgtacagaccacctttcacaaaacgaaatgctatgactgtatcttgatatctcgaactttcaaaatatattttcagtacacccagttgccaaagttttgctgtctcttagagaaagagctatgaaatcaactgacaagaaacacattcttattgacaattgtgtataactggattgcagactgttcttactgtaactacttcctgattaggaatatgaccatttgactgttcaatgattatttgtatttacagattccagagtttgtcattataataggaacaatctttgctgtatacttttaaaaaatactctgctatttctcttgctggaactgttgaaagaaaatatatagaatgatctattgctcatcagctttattttttaaacatacgacttattttgttgaaattgtcaaagactgtatttag

SEQ ID NO: 19298 - DNA, 487 bp, Homo sapiens
  misc_feature (1)...(487): n = A,T,C or G
aggaagggccaaggaaanaaccctgaacgcctggtagaccgccgagatagccatcccatgcaacaacaagggagctcactcagtgggttagatgtggcggatgctggctcgggaagatctgcgcatgcgtggcaccatttccggtgaacacccatgggaggtcatgcctgatctgtacttctacagagatactgaagagattgaaaaagaagagcaggctgctgctgacaaagcagtgaccaaagaggaatttcagggtgaatggactgctcccgctcctgagttcactgctactcagcctgaggctgcagactggtctgaaggtgtacaggtgccctctgtgcctattcagcaattccctactgaagactggagcgctcagcctgccacggaagactggtctgcagctcccactgctcaggccactgaatgggtaggagcaaccactgactggtcttaagctgttcttgcatacgctcttaagcag

SEQ ID NO: 19299 - DNA, 479 bp, Homo sapiens
  misc_feature (1)...(479): n = A,T,C or G
gcgcgcccccattgacnatcgtatcgcctgcacgaattcggcacgagtccagcctgggtgacagagcaagaccctgtctcaaaacaaaaaaacaaagatgtgaaaacagccaaccaccaggtggcaatccatgcaagagcccagctgccgggtgtgccccagcttcaagccagacagacctcagacatccagggcctggggaaggtccagccccaaatggcagccatctgatagcagcaaaagaaaacctgtgggccaggcgcggtggctcacgcctgtaatctcagcactttgggaggccgcggcgggcggatcacgaggtcaggagttcaagaccagcttggccaatatggtgaaaccccatctctactaaaaatacaaaaattaactgggtgtggtggcgcatgcctgtagtcccagctactcaagaggctgaggcagaagaatcacttgaatctgggaggcggaagttacagtga

SEQ ID NO: 19300 - DNA, 475 bp, Homo sapiens
  misc_feature (1)...(475): n = A,T,C or G
ngcgggtttgacccctttcgcccggctgcangaattcggcacgagccggcgtgggatcccggatataggaatcaaggattttcttttgctttgtggccggattttgctactgcttgctcttcttactttaattatttctgtgactacctcatggcttaactcatttaaatctccccaagtttatctgaaggaagaagaagaaaagaatgagaaaagacaaaaacttgtgagaaaaaaacaacaagaagcacaaggagagaaggccagcagatacatagagaatgttttaaaacctcaccaggaaatgaaattgagaaaactggaggagcgcttttatcaaatgacgggtgaagcctggaaattaagcagtggtcacaaacttgggggtgatgaaggtacaagtcagacatcttttgaaacatcaaacagagaagcagcaaagagccagaacttgcctaacccttaaactgatttc

SEQ ID NO: 19301 - DNA, 495 bp, Homo sapiens
  misc_feature (1)...(495): n = A,T,C or G
gcgggcngcctgacgccattgtattccntcgagagcgcgtctgagctgcttccacctggtgcttcctgttcccaaatcacaagggcctgaaggtggtccctgctttctctttctctttctctgtgtctcagatggcgattttgctgacagctgccaagaaaatgcttcactcaacagtcctcatgtgcccagagatgtttatagaactgtttgaattgcagccatcccctgccccctcccaggctgaagatctgttctttttaagttgattcgggagtggcattcttttatacccaaagactgtagtgcatcttgaagagctcaaagcacatgaccgcacaaatgcttacagggtttcctcccgagtaatccaatctcactccccttgtaagggaattctggggcagctatggtttgagtatgcagtttgcatcgtgtttctacctttagtaccttgccactcttttaaaacgctgctgtcatttcccatttctt

SEQ ID NO: 19302 - DNA, 446 bp, Homo sapiens
  misc_feature (1)...(446): n = A,T,C or G
ntttgantttcgatccgcgctgcaggaattcggcacgaggtttgccacacgagtcactcgagagaatctctgagtcctggcgagggctttctgaggcttcgtgtattagcagctgttgtcttccaactcagcggcaggacaacttgcctttgatgattttcaagagagttgtgctatgatgtggcaaaagtatgcaggaagcaggcggtcaatgcctctgggagcaaggatccttttccacggtgtgttctatgccgggggctttgccattgggtattacctcattcaaaagtttcattccagggctttatattacaagttggcagtggagcagctgcagagccatcccgaggcacaggaagctctgggccctcctctcaacatccattatctcaagctcatcgacagggaaaacttcgtggacattgttgatgccaagttgaaga

SEQ ID NO: 19303 - DNA, 474 bp, Homo sapiens
  misc_feature (1)...(474): n = A,T,C or G
gattctaacactggagcctcggctgatcacctagcaaccnacnncngnctgaggctaatccacagaaacattctgaggtttccctattaccggtgtcgcccagactcttgaggacggatttttttgtttgtttgttttaaggggtggaacgattttagcttttttagtcttttagttttgtaatataatggtatttaaaaatcaaacttgaaaaactcaaacttgaaaccacccataccaacattacttcaggcaatacattttaacacaaagtactaagaccgtaaactcagaataaatgctggcctttgcgcgcgcgcgcgcacacacacacacacacacacacacacactcattgccaacctgtcagcgacgattgttactggttttctctttttgcagcttaccagattaaagctttgtcgtggactggtgtttggaaactgttgttttataacagtttgggttgtttgg

SEQ ID NO: 19304 - DNA, 443 bp, Homo sapiens
attggcaccgcctgcttgaattcgccacgagatttattctttcatttatagttgggaaagtttttgacggtactaacaaagtggtcgcaggagattttggaacggctggtttaaatggcttcaggagacttcagttttttgtttagctacatgattgaatgcataataaatgctttgtgcttctgactatcaatacctaaagaaagtgcatcagtgaagagatgcaagactttcaactgactggcaaaaagcaagctttagcttgtcttataggatgcttagtttgccactacacttcagaccaatgggacagtcatagatggtgtgacagtgtttaaacgcaacaaaaggctacatttccatggggccagcactgtcatgagcctcactaagctattttgaagatttttaagcactgataaattaaaaaaaaaaaaaaaaaa

SEQ ID NO: 19305 - DNA, 500 bp, Homo sapiens
  misc_feature (1)...(500): n = A,T,C or G
cacgccccccctgcgcacaatatgcccccgctgcaggaattcggcacgaggcttcaagcctctgtcagataaaattcaacagcagcgattactagacattgccaagaaggaaaatgtcaaaattagtgatgagggaatagcttatcttgttaaagtgtcagaaggagacttaagaaaagccattacatttcttcaaagcgctactcgattaacaggtggaaaggagatcacagagaaagtgattacagacattgctggggtaataccagctgagaaaattgatggagtatttgctgcctgtcagagtggctcttttgacaaactagaagctgtggtcaaggatttaatagatgagggtcatgcagcaactcagctcgtcaatcaactccatgatgtggttgtagaaaataacttatctgataaacagaagtctattatcacagaanaacttgccgaagttgacaaatgcctagcagatggtgctgatgaacatttgcaan

SEQ ID NO: 19306 - DNA, 470 bp, Homo sapiens
  misc_feature (1)...(470): n = A,T,C or G
ccccccccccccccgccccncccattgacccgcgctgcattaattcgccacgagatctgccacctgcacaggtatttttgaaagcaaaataaggttttcttttttcccctttcttgtaataaatgataaaattccgagtctttctcactgcctttgtttagaagagagtagctcgtcctcactggtctacactggttgccgaatttacttgtattcctaactgttttgtatatgctgcattgagacttacggcaagaaggcattttttttttttaagggaaacaaactctcaaatcatgaagtgatataaaagctgcatatgcctacaaagctctgaattcaggtcccagttgctggcacaaaggagtgagtgaaactcccaccctacccccttttttatataataaaagggccttagcatgtgttgcagctgtcaccactacagtaagctggtttacagatgttttccc

SEQ ID NO: 19307 - DNA, 482 bp, Homo sapiens
  misc_feature (1)...(482): n = A,T,C or G
atcgccgccnttggaattgaccgcatgccgaattaggcacgagcattaggccatcgggctgaattccatgatcaaggcactacagctcccagcaggcattgccgatctggacacccgcctgccccacgtggatagagatacactcgcgctgtgaacaggaacataaaagtgaacccattcatttcaaggcaacttgaaactatatggcatgcaaaatattctaatttaatatttatatactgcttcagtatctggcgctttcacagtcgatatttcctaggagggttagtgactgatccctttatcgctgtgaaaactaattgctgtaaaccatactagctagtaagctctagaggtagccctagaacctgtttgccactacacaaaacttacgttattttaaaacttggaagccatgtaatgtcaataatcaaccccacattatagcccgtcaccagaattctctgaagaatatgtagcac

SEQ ID NO: 19308 - DNA, 486 bp, Homo sapiens
  misc_feature (1)...(486): n = A,T,C or G
cgcggcggtnnnccttgaattgcttggctgtccgacttcggcacgagagataatatgctagtgtgttcatacttggacattttcagacaccatttttctgtatgttttgtgcattttgttttgctctgtatatagtgtatataatggacaaatagtcttaattttttaacatctagaggttgccagtgtatgacaaagtagtaaaattaacatattttgtatgctttgtgttgaaattcataggaaaacttgtcttctgtaattgacttttgcataggaatttgttcagccatctctaagcattacacatgcgtgtacttgtccactgaattgaaggcagagaaggaagagaagagggaatgattcaaggccaaaatggtcacatttagaagataccttagatgataaccattgttatgtgtgtgcagttttatttaacagtgccgtgtacatggtggacaagctatgaaatatctagtctttaga

SEQ ID NO: 19309 - DNA, 504 bp, Homo sapiens
  misc_feature (1)...(504): n = A,T,C or G
gannagtaaacgggaaanaanatttgaacngcctgtttgacccgccctgcaggaattcggcacgaggagattcgggagcccgctctgcgagatgcgcagtggacttttgaatcagctgtgcaagagaatatcagcattaatgggcaagcatggcaggaagcttcagataattgttttatggattctgacatcaaagtacttgaagatcagtttgatgaaatcatagtagatatagccacaaaacgtaagcagtatcccagaaagatcctggaatgtgtcatcaaaaccataaaagcaaaacaagaaattctgaagcagtaccaccctgttgtacatccactggacctaaaatatgaccctgatccagcccctcatatggaaaatttgaaatgcagaggggaaacagtagcaaaggagatcagtgaagccatgaagtccttgcctgcattaattgaacaaggagagggattttcccaagttctcaggatgcagcctgttatccac

SEQ ID NO: 19310 - DNA, 448 bp, Homo sapiens
catttgcccgcgctgcattgaattcccacgaggacgataccattatatatctttacgtgaaaccgacagaacactcattacactttttgtgagctcatttacttcacttataatgaacatggccatggaaatgctagtggagaaagtggtcgattttctgatggatgtgataaaaaaatggtttgccgaccaattaatgacatatgtctcaaaactagtaacgagacccttaatcgctgggttgaagtttctaatcaagaagatgctcatctatgtattcaacaaagcagcttcccttgcttctgaaatgcttccaaacaacatctcatatttcctgaagaagataatgcctggacaagcagcacaagtcattcaggaggaagagggtaatctggaagagtttcctgacctactctgctgctgtgattaaacaaccaccaggaaattt

SEQ ID NO: 19311 - DNA, 452 bp, Homo sapiens
aatagacccctcgccgccgcgctgcaggaattcggcacgaggaggctgcctggtaagccaggaaaggggcttctggccgttctgttggagcgcctctgactgacttcccccatgtgtccgtgtggccacaccgtgctactttcagaggcagtgggcttttcgctaagggataaaaagaagtaaaaccttgcctttagcgcagctctccttcactgggcagattgctctccctccccactctcccaggcccaaattggatctcagcgcctgggagctccaactttagcaagtgcgaaatcctgtcttcggttttggaattttcatccgcacagactatatcagccacggataggatatgtgagaataccagcatgtcaaggctgggaatcatccttaggcatcacctagccagtcctgcctctcattttaaggtgatcacaggatctggtttg

SEQ ID NO: 19312 - DNA, 486 bp, Homo sapiens
  misc_feature (1)...(486): n = A,T,C or G
ngtcgtcnncccctgaccgcctgcagtaattcggcacgagagcaagtgaagatgttaaagagatctttgccagagccagaaatggaaagtacagacttctgaaaatatctattgaaaatgagcaacttgtgattggatcatatagtcagccttcagattcctgggataaggattatgattcctttgttttacccctgttggaggacaaacaaccatgctatatattattcaggttagattctcagaatgcccagggatatgaatggatattcattgcatggtctccagatcattctcatgttcgtcaaaaaatgttgtatgcagcaacaagagcaactctgaagaaggaatttggaggtggccacattaaagatgaagtatttggaacagtaaaggaagatgtatcattacatggatataaaaaatacttgctgtcacaatcttcccctgccccactgactgcagctgaggaagaactacgacaga

SEQ ID NO: 19313 - DNA, 476 bp, Homo sapiens
catcgcccgccctcatggcaccgcctgcaggaattcggcacgaggccatggaatcgcgttccctccgggcaggcctcatgaaaggaaggggctgcgctgtgcccagggccacgagtgcacaaggagactgagacgcgcaggagggccctggccagcctcccacagagccgcggggcccagggaggagctgggagcctctgggaaggggagtggtaggagttggaagcctttgccctgagtggctgggtgtttcctcctccggaggctcagcaaagcaccgtggcatcgcctctccctggagtgaatctctgtggaccgagcggaggggagctgaggaaactttccctgcttggccaagggaaagctggcttggggtggggctcctcatcagctccttcacctcctcgtcttctctggacaatttcagatagacatcaaaggtggcaagaaatagtacagataattccatttgccca

SEQ ID NO: 19314 - DNA, 285 bp, Homo sapiens
  misc_feature (1)...(285): n = A,T,C or G
ngagtgattgangccnttctgcccggctgcaggaattcggcacgagagaattgccaatacagccagagagaaagggactacagctttttagaggaaaagttgtggtgcgttatgtcaccatgcagttgccagtgtgattagtgcctaggggtctccatttagcagaaatggtaatgacagtgatataatgcctggaacctggttgggcagtaggggagggaggtagaaggaaaagtgtgagatttctaccttttagtttttatcctattgtggcatatatgaatt

SEQ ID NO: 19315 - DNA, 491 bp, Homo sapiens
  misc_feature (1)...(491): n = A,T,C or G
ggccagttgcccagggaacnaccaactgaaaggctgngactannnacctacacaagnacganaaccnnanggatggnggagatctgcctagtgttactgatattcgaagacctctgctctaccttcttcagtggctaaaatctgataaggccctaatgatgctctttaatgatggcacctttcaggtgaatttctaccatgatcatacaaaaatcatcatctgtagccaaaatgaagaataccttctcacctacatcaatgaggataggatatctacaactttcaggctgacaactctgctgatgtctggctgttcatcagaattaaaaaatcgaatggaatatgccctgaacatgctcttacaaagatgtaactgaaagacttttcgaatggaccctatgggactcctcttttccactgtgagatctacagggaacccaaaagaatgatctagagtatgttgaagaagatggacatgtggtggtacgaaa

SEQ ID NO: 19316 - DNA, 536 bp, Homo sapiens
  misc_feature (1)...(536): n = A,T,C or G
nggagatcgacggccgttgtttcagcgcgcagccgtaaagagaagtcaccaagggaggcaggtaatgaatgtttccagaatcagtcggatactcatagcaatttctggctatctttcaaatgttgaatttctggatgctgagagggactttgatttgatatcattaaatccaggacagtcccaagaagtgcttggagtctcggctctgacagcccaagaagggaaataacttgtattaaggaacaactatgagccaggccctgagctgtctcttagataataaaacagatggggagtggaagagtcatttgcttcaagttatacagctaggaaatactcaagccaaatcttgaacgcagctccccctaattctgtggacaggcactttgtaccacacaccatggtccacctaaaaacagaaggataaaaagacttcaggttttcccactgtgtgctgaccatcccaatttatgaatcttcttcaaaatgacatttcacagttatagttagggctcagaaatggcattgaggtagcc

SEQ ID NO: 19317 - DNA, 323 bp, Homo sapiens
  misc_feature (1)...(323): n = A,T,C or G
cttcgccgcgtttgcccgcgctgcaggaattcggcacgagaggccatcaacgtgtccagccgcttcgaggaggagatcaaggcagagcaggaggaaaggaagaagcaggcggaggagatgaagcagcggaaagcggccttcaaggagctgcagtccacctttaagtagcgggggctgcagccgaccgccctgctccggccccagtgtggtgggcgagggtggcgcatgggaggccgagcctgaatccttgcctgtgtctgacgggaccactactaaaaacctannaataaaaaaaaaaaaaaaaaaaaaacttgggggggggc

SEQ ID NO: 19318 - DNA, 480 bp, Homo sapiens
  misc_feature (1)...(480): n = A,T,C or G
gctgtcnnccactgccgctgcgtataccgccgagggtacgtgtactgggtggcacggaagcccatgaagatgggataccccccgagtccatggaccattacgcagatggtcatcggcctcagcattgccacctggggtatcgttgtcatggcagaccccaaagggaaggcctaccgcgttgtttgaaagtaccaccagtgaatctgtcttctgtctctgtccctttccccgtgacacacagagcaggcatggaatttaatgggtgttctggacagacacttgtacatggacagacatcactactgtggatactacaagactgaaaagaaaatcgtatgttgtcattctctggctatggagtgtttgtggccttcacagatttcacaggaaccaataaatccctcagagaagaaaaagctacaagaaagaaaccttaggggggggcccgggccccatttgcccttttggggagccgaataa

SEQ ID NO: 19319 - DNA, 464 bp, Homo sapiens
gggccccttgacattgcccgcctgcggtctgggccctgtcgtagtcaggccttcactcttcttctctgggtaacaaaggccctagtgctcagataccatcctctcagctcctgccttacagcccggctcatgggcctcctgagtgacccagaattaagtccagcagcagctgatggcttctctctgctcatgtctgactgcactgatgtgctgactcgtgctggccatgccgaagtgcggatcatgttccgccagcggttcttcacagataatgtgcctgctttggtccagggcttccatgctgctccccaagatgtgaagccaaactacttgaagggtctttctcatgtacttaacaggctgcccaagcctgtactcttgccagagctgcccacgcttctttccttgctgctggaggccctgtctgccctgactgtgtggtgcagctctccaccctcagctgc

SEQ ID NO: 19320 - DNA, 481 bp, Homo sapiens
  misc_feature (1)...(481): n = A,T,C or G
natagatcgttatgtangacttcggcacgagctctgaacccgatgcagaaagagtgagccctccccctgtggagtctcagaccccgatggatgtggacaagcaggccatttataggcatccactatttccattattagctttgttgtttgaaaaatgtgaacaatctacacagggctctgaaggcacaacttctgccagttttgatgtagacatcgaaaattttgtaagaaagcaagagaaggaagggaaacctttcttttgtgaagatccagaaaccgataatttaatggtaaaagcaatccaggttttgcgcattcatcttcttgagctggaaaaggttaacgaactctgcaaagatttctgcagtcgatacattgcttgtctgaaaacaaaaatgaacagtgaaactctgttgagtggagagcctggaagcccgtactcaccagtgcagtcccagcagattcaaagtgccatcacagg

SEQ ID NO: 19321 - DNA, 481 bp, Homo sapiens
  misc_feature (1)...(481): n = A,T,C or G
natacccgtcgcccggctgcagaattcggcacgagcctcccccaccatcccaacaagtcaactacattgcttcacaaccagatggaaagcaattgcagggtattcctagttcttctcatgtaagtaataacatgagtacaccagttttgcctgctccgacagcagccccaggaaatacgggaatggttcagggaccaagttctggtaatacttcgtcatcaagtcacagcaaagcctctaatgctgctgtaaaattggcagaaagcaaagtaagtgttgcagtggaagccagcgcagatagctcgaagacagacaagaaattgcaaattcaagaaaaagcagcacaagaggtaaaattggccatcaagccattttaccaaaataaagatatcaccaaggaagaatataaagaaattgtacggaaagcagtagataaatgtgtactggctgaatgttccatccaaaagatgtagcttcagaa

SEQ ID NO: 19322 - DNA, 488 bp, Homo sapiens
  misc_feature (1)...(488): n = A,T,C or G
gcgggcccccaatgaccccctcgatagatncgcctcgcggaattccgcacgagagcagctggatattgagccggatagacctattggatatggagcctttggtgttgtctggtcagtaacagatccaagagatggaaagagagtagcgctcaaaaagatgcccaacgtcttccagaatctggtctcttgcaaaagggtcttccgggaattgaagatgttgtgtttttttaagcatgataatgtactctctgcccttgacatactccaacctccacacattgactattttgaagaaatatatgttgtcacagaattgatgcagagtgacctacataaaattatcgtctctcctcaaccactcagctcagatcatgtcaaagtttttctttatcagattttgcgaggtttgaaatatctccattcagctggcattttacatcgagacattaagccagggaatctccttgtgaacagcaactgtgttctaa

SEQ ID NO: 19323 - DNA, 275 bp, Homo sapiens
attagaccggcttcgtgattcggcacgagcagccccctccgggccaatgcagcactaaatccctctctcctccagcattcctgtgtctgtctggccctaaatgtatccatgtggctacttctccagccccctccttccctctcttctgcctgatagagggaagaggaagaggaggacgaacagagatcctgaaattctgacttgctgctattccagaacccagcctcctgggtttccccagtcctcatttttcctcccaatacccacccttctct

SEQ ID NO: 19324 - DNA, 470 bp, Homo sapiens
  misc_feature (1)...(470): n = A,T,C or G
ngagcgattcgacgctgctgaattcggcacgagccatgttgcctacctgtgcccctggcagccgcgtgtccacacagttagcggagcgcaggacttctgcagtcctcaggtgaccccgggcctccagcaccctgggtcgctgtcatctgtgtttagctcggggagtgccccctaagggggcgaactgacctcaggcatgtcttgtaactgtagaggcgcctgccattaaacgtgtccgctgctgtggcgacaaaaaaaaaaaaaaaaaaaaaactcgggggggggccgggtccccaattccccctatagggagcggaataacaattcacgggccggggtttaacaacggggggagtggagaaaannnnnnnntnttnnncntnnctctgncaantattaccgcacgaacactggtcaaatacaccgccgcggctttaagtggacgccaggtgcaccggaaaacagctggc

SEQ ID NO: 19325 - DNA, 473 bp, Homo sapiens
  misc_feature (1)...(473): n = A,T,C or G
nagcgttgacgctgttgcccggctgcaggaattcggcacgagctgaaatgttacgttccatctcttttcatccttctggagactttatacttgtcggaactcagcatcctactcttcgcctttatgatatcaacacctttcaatgttttgtctcttgcaatcctcaagatcaacacaccgatgctatatgttccgttaattacaattctagtgccaatatgtacgtaactggaagcaaggacggctgcatcaaattatgggatggtgtttcaaatcgatgcatcacaacttttgagaaagcacatgacggtgctgaagtttgttctgccattttttccaaaaattctaaatacattctctcaagtggaaaagactctgtagctaaactttgggaaatatcaacgggacgaacactggtcagatacacgggcgcgggtttatgtggacgccaggtgcaccggacacaggctgtg

SEQ ID NO: 19326 - DNA, 486 bp, Homo sapiens
  misc_feature (1)...(486): n = A,T,C or G
gaggtgccnccaattgatcgcctgcggtagacgcgcactaggagaangagaattcatgagagtgagcaggagcgagcatgtgcatgcaagagcaggaaaaactgccttataaaaccatcagatctcgtgagaactcactgtcacgagaacagcatggaggaaactgcttccatgatccagtcacctcccacctagtccctccctcaacaagaggggttatggcgattataattcaagatgagattttgggggggacacagccacaccctatcagcaggtttgtaattagatgagtttatccactggggggtaatcctagagtacatatctgtgggtggttcttgacaagagtgtaaggcctgggacatctggctttgaggcagttctttctccaggttttatttatgcgaatccactcatctggcaggaatgatttgttggtgtgaaatcaggtgttggcccagcatcctgcacatgatccatacn

SEQ ID NO: 19327 - DNA, 503 bp, Homo sapiens
  misc_feature (1)...(503): n = A,T,C or G
tggaataaaataggggggaaaatgngnggaaangggaaaaggttgaaactcgctccgcctgcaggaattcggcacgagcaccgcttactataaagtggacgacccagtgtggaacattcaaattgcaaggatgcttgagctgcccactatctacaggaaagtttatgaccagccttttcacagctcagccctagagaaagaagaggcactaagcaatccaggcgccctggacctccccagtctcacgagtttgctgagtgaaaaagccaaagaattcctcatggagaacagagtgcagagcttttaccagcaggagctggaaatggtggagtctttgctgtcccttgccaatcagcctgtgattcacagtgcctgctccgaccaagtgaattttaagaaggacaccacttccaaggcaattcatagtatatttaagaatgctatacaactgctgcaggaaaaaggacttgttttccagaaagatgatggttttgataacctat

SEQ ID NO: 19328 - DNA, 504 bp, Homo sapiens
  misc_feature (1)...(504): n = A,T,C or G
agcnnnnnnnnncgnnnnnnnnnnnnaattgacctactgacggctntcgggacgaggttttgatctagaaatagcgttgtgatttccttgctgttggttttacactgccttccacattgcaacagcaagttgatttcttgtgatcccagaattttctaagaggatgagttgaatctatagcagcattgtcagtacagaccagtggttctcaaactttaaaatgcctcagcatcacttgggagcttattgaaatgcagatcccagagtcagtaaatctgcctgtgaagtatgatagtctgcatttgtaatgagcattcaagtgattctgatgcaggtgagctgggggcatacagggaggaacactgccctggactatccattgcatttttgcctctaaacaactacagaattttctagggttttaaattatgtaaaatgtttacttattctgagcttagagagaatggggagggtatttttaaattttattggtttatttctttt

SEQ ID NO: 19329 - DNA, 494 bp, Homo sapiens
  misc_feature (1)...(494): n = A,T,C or G
tggcggggnnnncnaccttgagncccctccttgatcggctgtcggcaaagttcagcctagttctatactcagatctcttttcccctattgcaataatcttgaataaaatttgtttttaccactttaagtattgtccatctctggttttccctgacacaaccatgtgacttcttacattgtttactgtttgcttatcttaactcattcttcaaagctaagatgctgattcaaacacttatttctacttgcgtgagaaatataaaagtctgaggtctagtgtggtactaattcactataattgaaagaagtgcttgacctataaatgaagcttatgcttaccttagaattgaaacatatggctgggcgtggtggctcacacttataatcccagcactttgggaagccaaagcaggcagatcacttgagcccagaagttcaaaaccagcctgggcaatatggtgaaacatcatctctaccaaaaaagtcagaataat

SEQ ID NO: 19330 - DNA, 469 bp, Homo sapiens
  misc_feature (1)...(469): n = A,T,C or G
cgcgccccattgcccgctctgangcattcggcacgagctttttcctaacttagttaactattaaaaaaaattttgaaaagcaaggtgattgaaggattgtgatgacaatctctttgcagcagctatgtatggtttatgtgaagtatccccacttattcttgtggagcaggtttggtgagacagcagtaaccaaatgacatgccaatattactggtgcaactggtattctacaaatgcataaggaacacatagacgacttccttttaggataaaatgatgcttctttcactaccttttgtggtagctgtggcttccaatagcaactgtttgacagttatataaatcttgcatgtgtattcttagtttgtgtcccttaagtactacttaattctcaagtagtaatgttattcttatacccttcagcgttctattttgattcaaaacaattgattcaaaacaattttgaatc

SEQ ID NO: 19331 - DNA, 474 bp, Homo sapiens
  misc_feature (1)...(474): n = A,T,C or G
natcctcgtctgagctgtgcactccttccgcagctcggccgcatcgactccctgagcgagcagatttccttcctggaggagcagctggggtcctgctcctgcaagaaagactcgtgactgcccagcgccccaggctggactgagcccctcacgccgccctgcagcccccatgcccctgcccaacatgctgggggtccagaagccacctcggggtgactgagcggaaggccaggcagggccttcctcctcttcctcctccccttcctcgggaggctccccagaccctggcatgggatgggctgggatcttctctgtgaatccacccctggctacccccaccctggctaccccaacggcatcccaaggccaggtgggccctcagctgagggaaggtacgagctccctgctggagcctgggacccatggcacaggccaggcagccccgaggctgggtggggcctcantggaggctgc

SEQ ID NO: 19332 - DNA, 470 bp, Homo sapiens
  misc_feature (1)...(470): n = A,T,C or G
gtggcncnaaagcccgtcctgcangaattcggcacgagaggaacatcttgctgtattgtaggaccaggaaggaggttcaagtggccagaacatagaaagtaatagggaaagtagcaagagatgaggtcagaaaagtaggggctttttgatacaggaaaaggcatttggattcattgcaaatgtgatggtaagccattggagaactttaagcaggacaggaacttgctttgatttgtaattttaaaaggtccctctgacaactccatggataatatattgaggatgggagcaagaatagaggtagaaaaacctgtgaggtgcccactgtagttgttcagtgggatgatgatggctgggccttaaaaatggtagattagatagaggccaggtgcagtggctcatgcctgtaatgccaacatgttgaggcatgcagccaggaatttgagaccaacctgggtaacaaagtgaga

SEQ ID NO: 19333 - DNA, 514 bp, Homo sapiens
  misc_feature (1)...(514): n = A,T,C or G
aggggnnnnnnnnnnnnatttgattcgcccgcgctgcaggaattcggcacgagggcaaggaatgccgctagtctctgagggagaccgagggagcccctttcaggaggaggaggggagtgctctgaagacctcttgggcaggggctcctgttcacctgggccagggtcagttcctgaagttcactcagagggaaggagatagagagtcctggtcctcaggggaggactaggaaaagaccatctgcccggcactggggacttaggggtgcggggaggggaaggacgcctccaagcccgctccctgctcaggagcagcactcttaacttacgatctcttgacatatggtttctggctgagaggcctggcccgctaaggtgaaaaggggtgtggcaaaggagcctactccaagaatggaggctgtaggaatataacctcccaccctgcaaagggaatctcttgcctgctccatctcataggctaagtcagctgaatcccgatagtactaggtcccctt

SEQ ID NO: 19334 - DNA, 407 bp, Homo sapiens
cgagggcttacctcgtgtttctaggaacctgcagtgtaaaacttctttcttcatgacagtcatttccatgactgctgccttactatacctgatttaaacaaatcctgagcacattttaaaacataaattcaacagctggacctgctatgcagagcaattcaggcggagggaatggctcatgcacactctccaagtactgttaggtatgagttctaaatttctcttcaaagaatcaatatgtcagtatgttcagttctttgccttctactgttaaacttaacttcctcgtaaagcaacctttttccattacctgctccaccctgactcattctgattacctgctcattctccaccctggcttactctgatttcctgctctgccctgtaaccatttttcccgccaaacc

SEQ ID NO: 19335 - DNA, 507 bp, Homo sapiens
  misc_feature (1)...(507): n = A,T,C or G
agggggngnaattgaangcccttaaatcgaccgcctgcggttcaggtcctggctttgcctttgcctgatgtggatgagcagctcacatgctcagggccacctgagactgtcactgctctcccctggctactgggaggagtcactgagagcttcgttacccctgctgccttgcccagggcacaccctatacctcctcatctgctcttcccctccctgccgccttctgggcaggtagcagtccctggcctctccccctggctgatcactctccctcaggcagtggagatctgcgtctggacaccctcagatcctgtcattgcctgcccagagtccttcaggggcacccctctgccttggtgtgcggtccagggctctcacccaggtgccgcaccctctggggtcttctgtccagctcccttgccccatgtgctgtcactgactctccttgggactcgcctgcctgctcagagccctgcagggcttggtcagctgcctgttcagtgtcaa

SEQ ID NO: 19336 - DNA, 497 bp, Homo sapiens
  misc_feature (1)...(497): n = A,T,C or G
gtgggaaaaaaagaatttgatncccctnnngannnnncnttcgattcgccctgcaggaattccgcacgagccgttccttgggtcccggcgtctgtgatactgcagtgcagccatggcagaaccgcagcccccgtccggcggcctcacggactaggccgccctcagttgctgctccgacgcggaccccagtaccaaggattttctattgcagcagaccatgctacgagtgaaggatcctaagaaggcactggatttttatactagagctcttggaatgacgctaatccaaaaatgtgagtttgccattatgaagctttcactctacttcttggcttatgaggataaaaatgacatccctaaagagaaagatgaaaaaatagcctgggcgctctccagaaaagctacacttgagctgacacacaattggggcactgaagatgatgcgacccagagttaccacaatggctattcagaccctcgagggggggcccggtacc

SEQ ID NO: 19337 - DNA, 502 bp, Homo sapiens
  misc_feature (1)...(502): n = A,T,C or G
ngannnaaaattgatcgccttaggtagacngacgagcctccttgcgcgttccgggtctcgcaagcgcctccaaggtttgtcttgaagcatagctccagctggagggtaccttttaagctgttcaaggtcaagatgaatacaaactcaaaggaggttttatccctgggtgttcaagttcccgaggcatgggaagaacttctgacaatgaaagtggaagcaaaaagtcaccttcaatggcaggaatccagactgaaacgcagtaatccactggcaagggaaatcttccgaaggcactttcgacagctgtgctaccaagagacccctggaccaagggaggctcttactcgactccaggaactttgctaccagtggttgaggccacatgtgagcacaaaggagcagattttggatctgctggtgctggagcagtttctatccattctgcccaaggagctccagggctgggtgagggaacactgtccagagagtggagaagaggctg

SEQ ID NO: 19338 - DNA, 501 bp, Homo sapiens
  misc_feature (1)...(501): n = A,T,C or G
tagttttttttnngcngnnnnnnnnnaattgaccgatgacggacctcggacgagcgccgcgccggcccccatggcggccgccaaggacactcatgaggaccatgatacttccactgagaatacagacgagtccaaccatgaccctcagtttgagccaatagtttctcttcctgagcaagaaattaaaacactggaagaagatgaagaggaactttttaaaatgcgggcaaaactgttccgatttgcctctgagaacgatctcccagaatggaaggagcgaggcactggtgacgtcaagctcctgaagcacaaggagaaaggggccatccgcctcctcatgcggagggacaagaccctgaagatctgtgccaaccactacatcacgccgatgatggagctgaagcccaacgcaggtagcgaccgtgcctgggtctggaacacccacgctgacttcgccgacgagtgccccaagccagagctgctggccatccgcttcctgan

SEQ ID NO: 19339 - DNA, 503 bp, Homo sapiens
  misc_feature (1)...(503): n = A,T,C or G
agaaaaaaaattgatnccctntttgatcgcctgtcggaattcggcacgagggaaaagacacggcagagcaagaatgaggccttgctgagcatggtggagaagaaaggggacctggccctggacgtgctcttcagaagcattagtgaaagggacccttacctcgtgtcctatcttagacagcagaatttgtaaaatgagtcagttaggtagtctggaagagagaatccagcgttctcattggaaatggataaacagaaatgtgatcattgatttcagtgttcaagacagaagaagactgggtaacatctatcacacaggctttcaggacagacttgtaacctggcatgtacctattgactgtatcctcatgcattttcctcaagaatgtctgaagaaggtagtaatattccttttaaattttttccaaccattgcttgatatatcactattttatgtttaatctgcttaaaacaagttcctagtagacaccatctggttgagtg

SEQ ID NO: 19340 - DNA, 465 bp, Homo sapiens
  misc_feature (1)...(465): n = A,T,C or G
nagcgcggnnnnnncctggaaactgangtctgctcgganacgcgcaggcgtncggccgccgtggctatgttcgtgtccgatttccgcaaagagttctacgaggtggtccagagccagagggtccttctcttcgtggcctcggacgtggatgctctgtgtgcgtgcaagatccttcaggccttgttccagtgtgaccacgtgcaatatacgctggttccagtttctgggtggcaagaacttgaaactgcatttcttgagcataaagaacagtttcattattttattctcataaactgtggagctaatgtagacctattggatattcttcaacctgatgaagacactatattctttgtgtgtgacacccataggccagtcaatgtcgtcaatgtatacaacgatacccagatcaaattactcattaaacaagatgatgaccttgaagttcccgcctatgaagacatc

SEQ ID NO: 19341 - DNA, 515 bp, Homo sapiens
  misc_feature (1)...(515): n = A,T,C or G
tagggttttgtntgcgnncgnnnnnnnnnnnaattgatcgactgacgngcnctcgcggaaanccgcacgagcctcacacaagccttctgaaattctggaatgcagtgaaacttctttactggaagtagctagtaaagcagcagtactaacagagacccctcgtacaagtgacggtgagaagactttaatagaaaaaatgtttggaggaaaactacgaactcacatacgttgattgaactgcaggagtacctcacaaaaagcggaagcctttacagatctttcgcttgccttttggccttcctattctttggaatacatgtcatgtcctgactgcagccaatcactcagtatacaagatggtggactaatgcaagcctctgtacccggtccttcataagaaccagtagtttataatccaacaacagatggcttgatctgtgactcacttgtgaatgaaagaagcataggcagtcctcctaatgagttttactgttctgaaaacacttctgtgcctt

SEQ ID NO: 19342 - DNA, 468 bp, Homo sapiens
  misc_feature (1)...(468): n = A,T,C or G
nattgaccgtctgcggacttcggcacgagcagagactgacttaacagtgctccaaaatggggtatcagagacctaggatagttgatatagatggaaagatgggtacgttgtcctgtatccagcctttcaacagatgtctggccagacgaagaacattgtgtcctaatggtaggcaggagaccaaggagcagaaggcttgccttcctgggagcaggatgtttgagctgttttagagcagtgagccctaccattacatcctgatatctggggcttctgaaggtctgtgctgggagtgaagagtggcttaactatttacccgctctttggggacagggcaaactaaatgcatcccttcttacctaactcccaacccctgccctgggctgaggcatatgaatgctatagttgtgcattaaaataaatgttttttatctcctggaacttcanaangaaagganaatgttntgt

SEQ ID NO: 19343 - DNA, 374 bp, Homo sapiens
catgagaggtactacaatgaactggtcgcatagctacaacgacttgactgcagaaagctggacagggctgcggcccctctgcccacactcagtactgaccaaagccagggctgtgtgtgcctgtgtgtaggttccacggcctatgcctccccagggagcagagcctggtgctgcactaagaggctttccccgaggcagctctggaatttgtgcccacctgtggcctggggaacaaggccctactttattcaagcctgggctacaggggagggagagcctgcggctctgattatggcccatttcatctctggcagcggcttgtcgggggcatacaaggcagtgatgctgcaactgtcattggggagagggaggcg

SEQ ID NO: 19344 - DNA, 509 bp, Homo sapiens
  misc_feature (1)...(509): n = A,T,C or G
ngaagggaatttgatncccctnntttgcaccgcctgtcggaattcggcacgagcccagctgagtcctgtattcttagtggagatgggatttcaccatgttggctatgctgggcttgaactcctggccttaagcgatctgccacaccttggcctaccaaagtgctgggattacaggcgtgagccactgtgcccagctgagatgtttcttattattttggaggtggagaggattttagacctctttgagcatctgaaaaaaggctatatatgtatggttttctcttcagaaaaatcttaagactcacaatacggggacttccttgttaccaggaagattttctggcaattcctagttaataaatcttattctaatggaacatacattgatcttgagttaatgcgtggttgaaaaaaaaagcggnggcaacttgaaatatatgcagtaaagtagtccatgcatacaagtccctaacatggtagatgatgttgcctcccggccctgctcagan

SEQ ID NO: 19345 - DNA, 504 bp, Homo sapiens
  misc_feature (1)...(504): n = A,T,C or G
nggggnaaatttgatcggctgcangaagtcggcacgagcagagcctggctctgctttgtgctgtggcttagccggaggggacgtggccaagggtgaggtggccaaaaccagaaccagcagtctcctgccttgttccctccctggccctcaggccctccttccagggatgtctctccagctctactttatgtcctgaagctgacccgaggtcttcctatctggaatgactagagggagccaagaggatggggtgggggccagggccccccagggcctatcgtgggagagcctgggcaggatcccatcagaaaggtgctgactaaactggttgcccggacactcaacagcctccacctccctttctaccctcacagctcctggggccttcctggctctggcccagaaagtgattcatttgtaaattatcatnggtttctttctgcattaaaatgctcatttccggaaaaaaaaaaaaaaaaaaaaaaaccctcggggggggcccgg

SEQ ID NO: 19346 - DNA, 501 bp, Homo sapiens
  misc_feature (1)...(501): n = A,T,C or G
gaggggnnnnnngnngnnnnnnnnnttatgaccgttggcggccttcggcacgagggagaacgtggccctctcgctggccaacatcagcggccggctgtcgggtatggccaatgccttccggacggtgtaccagctcaacggcctggccggctacttcaaaggcatccaggcgcgtgtcatctaccagatgccctccaccgccatttcttggtctgtctatgagttcttcaagtactttctcaccaagcgccagctggaaaatcgagctccatactaaaggaagggatcatagaatcttttcttaaagtcattctctgcctgcatccagccccttgccctctcctcacacgtagatcattttttttttttgagggtgctgcctatgggccctctgctccccaatgccttaaaaagaggaggggacgggacggccgctcaccggaaggctgtgtgcggggacatccgaagtgtggtggacaggaaggacttgggaaggggagc

SEQ ID NO: 19347 - DNA, 379 bp, Homo sapiens
  misc_feature (1)...(379): n = A,T,C or G
natttgacccgcgctgcaggaattcttcgcgagagcatgcgcagcccagcctcgaaatgcagaacgacgccggcgagttcgtggacctgtacgtgccgcggaaatgctccgctagcaatcgcatcatcggtgccaaggaccacgcatccatccagatgaacgtggccgatgttgacaaggtcacaggcaggtttaatggccagtttaaaacttatgctatctgcggggccattcgtaggatgggtgagtcagatgattccattctccgattggccaaggccgatggcatcgtctcaaagaacttttgactggagagaatcacagatgtggaatatttgtcgtaaataaanaatcaggacctaaaaaaaaaaaaaaaaaa

SEQ ID NO: 19348 - DNA, 512 bp, Homo sapiens
  misc_feature (1)...(512): n = A,T,C or G
ngaanggggnccttgannncccctnaattgcaccgcctgtcggaattcggcacgagcagatttggcaacctctgtatttgggttacagtcaacctatttggatacttggcaaaagattcttgctgtcagcatataaaatgtgcttgtcatttgtatcaattgacctttccccaaatcatgcagtattgagttatgacttgttaaatctattcccatgccagaatcttatcaatacataagaaatttaggaagattaggtgccaaaatacccagcacaatacttgtatatttttagtaccatacagaagtaaaatcccaggaactatgaacactagaccttatgtggtttattccttcaatcatttcaaacattgaaagtagggcctacatggttatttgcctgctcactttatgtttacatctcccacattcataccaatatacgtcaggtttgcttaaccattgatttttttttttttttaccaagccttacagggattatcttacgtgtt

SEQ ID NO: 19349 - DNA, 464 bp, Homo sapiens
  misc_feature (1)...(464): n = A,T,C or G
nattgcccgctctgaggattcggcacgagggaactacattagtacacagcaccagaatgtatattaaggtgtggctttaggagcagtgggagggtaccagcagaaaggttagtatcatcagatagcatcttatacgagtaatatgcctgctatttgaagtgtaattgagaaggaaaattttagcgtgctcactgacctgcctgtagccccagtgacagctacgatgtgcattctccagccatcaagagactgagtcaagttgttccttaagtcagaacagcagactcagctctgacattctgattcgaatgacactgttcaggaatcggaatcctgtcgattatactggacagcttgtggcaagtgaatttgcctgtaacaagccagattttttaaaatttatattggaaatattgtgtgtgtgtgtgtgcgtgtatatatatatatgtacagatatctaagtn

SEQ ID NO: 19350 - DNA, 503 bp, Homo sapiens
gaaaaaaaattgatcgcctgtggtagacggcccgagaacttatatagagatgctctgtcagggatgttctggtgatatcagagatgcaataaacagcctccagttttcttcttcaaaaggagaaaacaacttacggccaaggaaaaaaggaatgtctttaaaatcagatgctgtgctgtcaaaatcaaaacgaagaaaaaaacctgatagggtttttgaaaatcaagaggtccaagctattggtggcaaagatgtttctctgtttctcttcagagctttggggaaaattctatattgtaaaagagcatctttaacagaattagactcacctcggttgccctctcatttatcagaatatgaacgggatacattacttgttgaacctgaggaggtagtagaaatgtcacacatgcctggagacttatttaatttatatcttcaccaaaactacatagatttcttcatggaaattgatgatattgtgagagccagtgaatttctga

SEQ ID NO: 19351 - DNA, 480 bp, Homo sapiens
  misc_feature (1)...(480): n = A,T,C or G
gggggcnaattgacgtctgtggacttcggcacgagccagctactgcgggcacactgaaatcgcgcggctcctgctatcacatgggtccaaccccagggtggtggatgacgacggcatgaccagtctgcataaggctgctgagaggggtcacggggacatctgctccctcctcctgcaacacagcccagccctgaaggccatccgggaccgaaaggcacggctagcatgtgacctgctgccttgcaacagtgacctgcgggacctgctatccagctgagccgccaccctatctccagctgcctttaaagggtacacagaccagttctccaagcccctgccttggtcagcatccatgctgctgggcagggaactgaggccagaccacccaggaagagccccagtctggtcactgtggaagcgagggagtagatttggtgtggctaaaaagtgttaagactggacagatgatcatattctaan

SEQ ID NO: 19352 - DNA, 481 bp, Homo sapiens
cgcgcccccttgaaatcgatcgcctgcggcttttcttgacttcaccatgcctatgtgttgctttctaatttggggcctttaatgttgctagtgaaaggtaacctgtccaaactgatgggattaaccagaggtagtcctggctgcagtttttgcagaagaatgaataacattttctggaaaccctcagccagtgtctccttaagtctccttggccagggagatgggctaaataccgtaaatttaatcataaatctctgctggagctacaaatggaattctttcctcccaaacttcaaggccgaatggggttccaaggtaaatcacggctgcacatgggcctcatctgggaaagtacccagttctgtttcgttgatgaggggcatgagggtccaccatgtgtcttttttaaaaatgtaattcccaagggctcctgtacagtgtaggttgatagccactactctttgagatggtgtctcgctct

SEQ ID NO: 19353 - DNA, 480 bp, Homo sapiens
  misc_feature (1)...(480): n = A,T,C or G
cgcgcncgngtnnnnccttggattgcttggctgtangaattcggcacgagctcggcctcgctggagcctggagaactggccgagctggtgcggtcagtgcgtcttgtggagcgtgccctgggctccccaaccaagcagctgctgccctgtgagatggcctgcaatgagaagctgggcaagtctgtggtggccaaagtgaaaattccggaaggcaccattctaacaatggacatgctcaccgtgaaggtgggtgagcccaaaggctatcctcctgaagacatctttaatctagtgggcaagaaggtcctggtcactgttgaagaggatgacaccatcatggaagaactggtagataatcatggcaaaaaatcaagtcttaaaaataaaaggccattctctgaaaaaaaaaaaaaaaaactccggggggggcccgggacccaattcccccttatgggaggccgattacaattccactgccgg

SEQ ID NO: 19354 - DNA, 496 bp, Homo sapiens
cccccccttcgcccgcctgcaggaattctggacgagaccagttctaccccagaacatgactaccacacacgctgtggctattttgttttacacattgaacagcaatgttcattctgactttactagagccatggcctctgttgccaggactccacagcagtatgaacgttcattccacttcaaatatttacactactacctcacctcagcaatccagctgctgaggaaagacagcatcatggagaatggcactctgtgctatgaggtgcattataggacgaaggatgtccactttaatgcctacacaggggccaccattcgatttggccaattcctttccacatccctcctgaaagaagaggcacaggagtttgggaaccagacactatttaccatattcacctgcctgggtgcacctgtacagtacttctccctcaagaaagaagtcttgatccctccctatgagctgtttaaaggtataaatatgagctaccac

SEQ ID NO: 19355 - DNA, 491 bp, Homo sapiens
  misc_feature (1)...(491): n = A,T,C or G
gggatgttcccnnaggagnnnnnccctagatcgccngtcagaattccgctcgagcagcacatgcacgttcactgcgaagcaccctactgggtttgaaaatctgaccttgtcattttaatagttattaacatgactaaatattatcttaattaacaggaaaatagaagttgcttttaagggtttctgacatatattctggatactatccgaggtaattatgaagtttaatataaatgctcatatcaaatgaatatagaactaatattgtcgggaacacctaatagaaaggaatactattatagcaaatcacagaatgatagactcaagcataaaacttggcagttttatctgcttcaaaatgccattgatcattattcctgtattttctctgaaactgattataaaaaccaatgtccagctactcttttgtttttgacacttgaagaaatggagatcgatttgatttgtttataagcagacacactgcaatt

SEQ ID NO: 19356 - DNA, 458 bp, Homo sapiens
gaccaaaaatttgcccgcctgacgacctctgcacgaggaaaaaagttgcaaaaatattaagtcaagaaaaaacaactctgcagaaaattaatgattggataaaattaaaaactgatatgtatgaaggacttccattcttttccaaattgtcatgcgtatacgcttatgttcccataaccgacggtctgtctacaagatcacccacattcaataaggaactgtggggctcgacatgagctaactttgaaatacgcatgaattctggagaatgctgatatcgactgcgctgccaccctgttggatagggcagacaacctacttggtgacagcatccatatgggaactaggcttttaagatgttaataattagctaagctttagtaacccttactgtgctagtagattttagtagatattggtgttatattgtttgatgtttgaaaatatattaatatatg

SEQ ID NO: 19357 - DNA, 481 bp, Homo sapiens
gcgttcccattgacgtctgtgggcatgatggaataaggaaagagcttgtgaagcgcgttgcctttgccctgcataggggactgatattcaaccctcgagccaagccaagtgaattgatgcccaagctgaaagagttgggagcgaccatggatggattccatcgttcttttgaatacatacaggactatgtcaacatttatggtctgaagatttggcaggaagaagtatctcgtatcataaattacaacgtggagcaagagtgtaataactttctaagaacgaagattcaagattggcaaagcatgtaccagtccactcatattccaatacccaagtttacccctgtggatgagtctgtaacgtttattggtcgactctgcagagaaatcctgcggatcacagacccaaaaatgacatgtcacatagaccagctgaacacttggtatgatatgaaaactcatcaggaagtgaccagcagccg

SEQ ID NO: 19358 - DNA, 482 bp, Homo sapiens
  misc_feature (1)...(482): n = A,T,C or G
gccggcccatgaaatcgatcgcctgcgngaattcggcacgaggagaagacgattctttaggaggaggacagggaagcgaatgctacccaggtgtctgtgatgagcccatgttttccaaactcctccgtgattctagaacagtgctagagaagccgtgagccagctggcagcaaccactagaatggaagctgcatgtgggcatggcttagttttgtccactgctggatctcagcatccaaaacagtctaccacctgatgtctcagtatactggctcgcggcacatcgggcaaatgaacctatcagataacaacggcagatcagatgcctgagcattcagaagcaacagctgtggagcccccgtgggttcagaaggcctggttcccgtctccagaagcctggctctcctccctcctgggcccactactttggcttcttggtcctacgtacaaggagttgcgaagaggcaactcttccccttcct

SEQ ID NO: 19359 - DNA, 460 bp, Homo sapiens
  misc_feature (1)...(460): n = A,T,C or G
ntggtnctnatttcagttgcttcgcgattncgccgagtttccttctcggctggttctctgtgacggtggcgtcggctcgcctctgctcctttcatctagaaagaagccactgaccctgacagcccacggcgggtacactgagcagctgcattggtgctgtcacttttttaaggctttctgtccagacttcaacactggtttcttttcagagtttcgaaggattaatgacttcctcagcgcccttgctggcgggctgagggtgacagtcacgtccgtttcttctgtattagaaggctgcggtgattcaattagattgtcccactgctgagacctgtagggcagcttctaacatgcttttttcaaggggagaggagtagtgacaagtcgtgtgtcggaattggatttgagaacactctgaatgacccctggaggccgagggggcaggcttcgggcgtgaact

SEQ ID NO: 19360 - DNA, 468 bp, Homo sapiens
  misc_feature (1)...(468): n = A,T,C or G
cttgccccctgangtttatataacccgcctgccaggaaggccagagtcttgttcctctgaaagccactggggagtggcctctggggtgctgattccacagaggtgtatgctgtagacaggagagagccatctatgccaaaactcgccctcaaaaacaaacaaggcttgctgggaggcgtgctgggcttggccatcagtatttccagtgtggtaaactattgctggcacttccccctggaaataactaatgaggttacgagttgggcacctgcacagatgtccttctctcatagttcctaatgcttaggaatagaggagaaataaaaaaatggattctctcaaaacactgccatttgaatagcgacagaagtgctcccccaacccccaactttggacagcaaagttgaggagaatgagcagacacagtatgttgcttgatctgaatctctctaaagtaaagtatttccn

SEQ ID NO: 19361 - DNA, 446 bp, Homo sapiens
  misc_feature (1)...(446): n = A,T,C or G
nttttgccccgcgctgcaggaattcggcacgagcagcctcatacctaaaactcctgactcttaccactcatttccgtttgagtctgtatctgaaatcagtagcctagtcctactagatgagaaaggagccacaagtattgtgccctctcctcacccttccagcagatgcttctgtagtatgtgaggatgagaaaaagtctgattgtggtgatgtaggtatagtcatgccacagtgatgaaaaattaaagaaaaatcttctagctctcaggatatgcattatcacttgctacagatactccaaggccaaaggaatgcttgagcctaaaagttcaagaccagcctgggcaacatagcataaccccatctctacaaaaaaatatacaacagttagccaggcatgatggcacatgtctgcagtcccagctacttgggaggctaaggtggg

SEQ ID NO: 19362 - DNA, 471 bp, Homo sapiens
  misc_feature (1)...(471): n = A,T,C or G
agtgtntctnnaccccattcnngctanngcatgaggcaattcggcacgagcataaatccatgagtccatatgcctatttttaggttgtctgttttattatccaggatttcatactcagatgagaattagcatcaggaaagcctgaaatgccttaattgtgaactgatatgcaggaaaatgaaatatgcaagcacattggtgaccttgttctttacagacgtcgtgatcagcctccagccatacagaacaaatgagaaattagaagcgattccaagaacgtgtgatggtgtgaaacccactttggaccatcacacacatttcagcatttgaagtgacacaagctacctggtaactgcccatggcggggtcatagtttaaatggcccaatgtcatgtagaggttaatttaatcaaaatgagctataaacatggagcaatcactgtataattttaaaatagtttacctggccag

SEQ ID NO: 19363 - DNA, 497 bp, Homo sapiens
  misc_feature (1)...(497): n = A,T,C or G
aggatgtgcccnagggaggngccngattgganngccttactgatccgcctgcaggaattcggcacgagcagagacgcaggaatggaaagcggagttcctaacaggatgaaagttcccccatcagttcccccagtacctccaagcaagtagctttccacatttgtcacagaaatcagaggagagacggtgttgggagccctttggagaacgccagtctcccaggccccctgcatctatcgagtttgcaatgtcacaacctctctgatcttgtgctcagcatgattctttaatagaagttttattttttcgtgcactctgctaatcatgtgggtgagccagtggaacagcgggagacctgtgctagttttacagattgcctccttatgacgcggctcaaaaggaaaccaagtggtcaggagttgtttctgacccactgatctctactaccacaaggaaaatagtttaggagaaaccagcttttactgtttttgaaaaaa

SEQ ID NO: 19364 - DNA, 459 bp, Homo sapiens
  misc_feature (1)...(459): n = A,T,C or G
cggcggccattgacngccctattatgaacctcctggaagaagcctttggccgcctacctaccgctccaagcccagccctcagccatggcatgccccctggatcaggccattggcctcctcgtgggcattttccacaagtactccggcagggagggtgacaagcacaccctgagcaaaaaagagctgaaggagctgatccaaaaggagctcaccattggctcgaagctgcaggatgctgaaaatgcaaggctgatggaagacttggaccggaacaaggaccaggaggtgaacttccaggagtatggcaccttcctgggggccttggctttgatctacaatgaagccctcaagggctgaaaataaatatggaagagggagacaccctctgggggtcctctctgagtcctatccagtggagcggtattgtaccataaattatatttggtcgaatgtacaaaa

SEQ ID NO: 19365 - DNA, 474 bp, Homo sapiens
ttggccgcatgaggtttgaccgcctgcggaattcggcacgaggaaaaagccccagagccacatgtggaggaggatgacgatgatgagctggacagcaagctcaattataagcctccaccacagaagtccctgaaagagctgcaggaaatggacaaagatgatgagagtctaattaagtacaagaaaacgctgctgggagatggtcctgtggtgacagatccgaaagcccccaatgtcgttgtcacccggctcaccctggtttgtgagagtgccccgggaccaatcaccatggaccttactggagatctggaagccctcaaaaaggaaaccattgtgttaaaggaaggttctgaatatagagtcaaaattcacttcaaagtgaacagggatattgtgtcaggcctgaaatacgttcagcacacctacaggactggggtgaaagtggataaagcacatttattgttggaactatgg

SEQ ID NO: 19366 - DNA, 515 bp, Homo sapiens
  misc_feature (1)...(515): n = A,T,C or G
tgcggaagggaatttaatgatntttaatngggggnannngggaaaattggannncctttgctccgcgctgcaggaattcggcacgagcataaaatgtggaagaatcttcacaatttcaagttggtcatgtatatttcccttttacagagaaagctgaagcctcgaggctcagatttacctggcttctgtttacctggcttctgcagaagtttaacttgtaacctacctctcattcccaaagtgtgtttaatcatgccgccttctttaaaatatatctggaagcaccaatgagtaaagacaaaggccccaagctagatctgtagagataagtactagactcacatctcagtactatcaaggaaaacatgcttaggttatcagaattgtgaaggccatagtacaaaaagttaagagaacggaactcaggatctgagaaagatcagccattctcagcatgttgccttggctgcttaaccttactaaacttccatttcctcacatgtaaaatgtacatn

SEQ ID NO: 19367 - DNA, 418 bp, Homo sapiens
  misc_feature (1)...(418): n = A,T,C or G
cgcgggcgnnntnnnaattgancttgcgcggctgcangaattcggcacgagccccatgaggctagcactaataggaaacccttttttgttgtcatttaatgtctttattcctgcctttaatatggggaggaaggttccataagctacatgtttcctagttaagctctttcctattgtgtttatacagttttgtttgttatactctttgcaccttaaacccccaccactccccgacactattgccttcccagcatggctggagtgggaagaggcttgggccccgggggaatggttagggggactgaacccctctgaccttatgaggcccatggcactgnggcagggagctgnggacattttaatcatcaataaacgaagcactttaattctgtaaaaaaaaaaaaaaaaacggcccgag

SEQ ID NO: 19368 - DNA, 464 bp, Homo sapiens
  misc_feature (1)...(464): n = A,T,C or G
gtggtnctnaaaacgtacngactcgcgatgagcattcgcacgagaccacacaagtgcttaattcattgttatgtaatctttgtacatataggcagtattttttctgtgaaacttcatattgctgaagacatacactaagaatttatgtagataatgtacttttatgagatgtacaagtaagtgtcttatctgtacagatgtaaatgttgatgaaaatgcaattggggttaatattttaagaattctttagtatattcttgggtgtggctatattacaaaatgggatgctggcaatgaaacaatacatttaacactattgtatttttattacatgtaatttagtaatatgaatataaatcttgtaacttttaaaattgtaatggaggctgtaatcattttataatctttttaattttaatgcaagtacactggtgtttatatttgcacaaagtattgatatgtgn

SEQ ID NO: 19369 - DNA, 454 bp, Homo sapiens
  misc_feature (1)...(454): n = A,T,C or G
agatggaccccgntgaggaannntttgacccgcgctgcaggattcggcacgaggggaggctcctgggggccggggctccgaggttataatataacttatcctctcatgcttttttcctgccccttctccccaaatcatcaacaatagaagaagaagaaaacatgtcaggacacaaatgttatccctgggacttacaggatcgatatgctcaagataagtcagttgtaaataagatgcaacagaaatattgggagacgaagcaggcctttattaaagccacagggaagaaggaagatgaacatgttgttgcctctgacgcggacctggatgccaagctagagctgtttcattcaattcagagaacctgtctggacttatcgaaagcaattgtactctatcaaaagaggatatgtttcttgtctcaagaagaaaacgaactgggaaaatttcttcn

SEQ ID NO: 19370 - DNA, 454 bp, Homo sapiens
ctagaccgcctgcagaattcgcacgagctcagtgctcctgctgccaggcgcagctgggcgacattggcacgtcctgttacaccaaaagtggcatgatcctttgcagaaatgactacattaggttatttggaaatagcggtgcttgcagcgcttgcggacagtcgattcctgcgagtgaactcgtcatgagggcgcaaggcaatgtgtatcatcttaagtgttttacatgctctacctgccggaatcgcctggtcccgggagatcggtttcactacatcaatggcagtttattttgtgaacatgatagacctacagctctcatcaatggccatttgaattcacttcagagcaatccactactgccagaccagaaggtctgctaaaaggtcagagtaatgcagaatgcgtgccttcatctcagatttgttcatcacaggtggatcccatgtgtctt

SEQ ID NO: 19371 - DNA, 448 bp, Homo sapiens
  misc_feature (1)...(448): n = A,T,C or G
ggcggcaatgaccctctgaactggcatcatggaagcancgggctgcttaggaagagaaggtcagagttcgcgggggcagaggcattcttgccgctggcccagtcactatgtagtggaggggcagacaccctcgggcaaattctggaaggttcttagtctcgactagggcagtagccccaggactcctagtcgccggcttcaggtcactgccggctgaacggagctgccgtcgccatgtttggctgcttggtggcggggaggctggtgcaaacagctgcacagcaagtggcagaggataaatttgtttttgacttacctgattatgaaagtatcaaccatgttgtggtttttatgctgggaacaatcccatttcctgagggaatgggaggatctgtctacttttcttatcctgattcaaatggaatgccagtatggcaactcctaggat

SEQ ID NO: 19372 - DNA, 459 bp, Homo sapiens
  misc_feature (1)...(459): n = A,T,C or G
cggccgccttganngccctaaactggttgctcnggaagaatccggcacgagggaagatgagcccacctccaaaaaactgaagacagaggacagcctcatgccagaggaggagttcctgcgcagaaacaagggtccagtgtccatcaaagtccaggtgcccaacatgcaggataagacggaatggaaactgaatgggcaggtgctggtcttcaccctcccactcacggaccaggtctctgtcattaaggtgaagattcatgaagccacaggcatgcctgcagggaaacagaagctacagtatgagggtatcttcatcaaagattccaactcactggcttactacaacatggccaatggcgcagtcatccacctggccctcaaggagagaggcgggaggaagaagtagacaagaggaacctgctgtcaagtccctgccattttgcctctcctgtctcccac

SEQ ID NO: 19373 - DNA, 495 bp, Homo sapiens
  misc_feature (1)...(495): n = A,T,C or G
agaacgcaattgatcgccntccgattgatgcacgataagaggaagacacgaaaaaggagcttgatgaggaggtgaacaacttccagaagaagaaagcagcggctcagttactacagtcccaggcccagcaatctggggcccagcaaaccaagaaagacaaggataagaaaaatgcaagcttctcataaagcctggcaagccaaggatgttcccgcattcacctgcttttgcagtaatatcgaatctctgccatgtgtgttctttagttttattttattttattttatttttttacccttcctcaaacaccagtaactattattaactcgttttgctgaatgttgttgggtggtagaaaatgatagaacaagggaataaccgcgaatgctctgtgcagctggactctgtttccggaaagtaaatgattagctttttatgcctgttctgaatggcagcacgaagcaggcctgttacttgtatgtcgctctggacaan

SEQ ID NO: 19374 - DNA, 506 bp, Homo sapiens
  misc_feature (1)...(506): n = A,T,C or G
agatgtccnnaggttnnnctttcagtggcctttcattaggctgcgaaanncgccgagatattcggcgccggcccagagcaggcctgtgctgttttttgtttttctctgtttgttcaaccctcctcctcccggccttcagcagacccagcctaccacgtgcttcaccggctctgctgcagtgcaaagtgggtatgtcctatgggaaacctcatttatagtctgaaggccccaacagccatggacttggggggctggtttacctgtaggtctgcttagactcaccgtgggtcctggccctttgtgttttctccttggggtctgctgtctcagaaggtgtttgcaccctcactgacaggctctgtctggcacaggtccttcactttgtccagttccaatgattggacaccctgtccgtggctctgggcccattctggatgcctcccaagtccccaccatagtcctcctgggcctccatcactgctttgtttgtctgcagattaccttcg

SEQ ID NO: 19375 - DNA, 327 bp, Homo sapiens
aggcgttcacggctgtgaattcggcacgagcccccgaaacgctacgtgagctgggccctgggccagaggcagaaaacggacggaagaaaaggtctggccggagatgggtctcactctgtcacccagactggagtgcagtgagtggtgcgatcatagctcactgcagcctgaaactcctgggctcaagtgatcttctcgcctcagcctcctgagtagctggagctacaggtgtgagctacccagcatggctcatttgagatttctgagtagagaagtaacatgattaaacttgggtattgagattattaataaagaagaagaaaaaaa

SEQ ID NO: 19376 - DNA, 507 bp, Homo sapiens
  misc_feature (1)...(507): n = A,T,C or G
aggggcggnnnnnnnttttgattgcgcgtctgtaggacgctgcagcctgcagatcggctttcatgttcccttgcccgattttgtaaattggcaaatgtggacctgccctacccggcgtcctcccgcctgcaggagctgctggctgtgctgctgcggatggctgagcagctggcctggttacgagttctgagacttgacaaacggtctgtggtgaagcacatcggtgaccttctccagcaccgccagtcactggtccgctctgcctttcgggatgggacagcagaagtggagacccgagagaaggagccaccggggtggggacaggggcaaggagaaggggaggtgggaaataattccttatgtttaccccaggggaagcggccggccagtcctgcccttctcttgccaccctgcatgttgaagtccccgaagcggatctgccctgtaccccctgtctccactgtcactggagatgagacatttctgatagtgaaatagaacagtatt

SEQ ID NO: 19377 - DNA, 505 bp, Homo sapiens
  misc_feature (1)...(505): n = A,T,C or G
cgcgcaggtaaaatttggaaaattgggggaaaagggaaattganngctttgccccgccctgcaggaattcggcacgaggagagagagagagagagagagagagagagagagacttcagtgacaaacatattctttcaagacagaaagagacaggagacatgagtctttgccggaggaaaagcagctcaagaacacatgtgcagtcactggtgtcaccctggataggcaagggataactcttctaacacaaaataagtgttttatgtttggaataaagacaaccttgtttctactgttttatacactttctatatttattattgatactttctgatgacaacgccacccttacagagactgcttttcaaatttgaaatgggaagtagacaatataaaaaatgttcatgtgggaaaaaaaaaaaaaaaaaaaaaaaaancccccccttttgggcccaaaaaaaaaggggggggagggggggggccgaattttttgtgccttggaaga

SEQ ID NO: 19378 - DNA, 506 bp, Homo sapiens
  misc_feature (1)...(506): n = A,T,C or G
tggggaagataataataggtttaaatgggggananngggaattttgaccgccctgaggaactctgcacgagcttttttgccctgcgtgaccagatcccggagttggaaaacaatgaaaaggcccccaaggtagttatccttaaaaaagccacagcatacatcctgtccgtccaagcagaggagcaaaagctcatttctgaagaggacttgttgcggaaacgacgagaacagttgaaacacaaacttgaacagctacggaactcttgtgcgtaaggaaaagtaaggaaaacgattccttctaacagaaatgtcctgagcaatcacctatgaacttgtttcaaatgcatgatcaaatgcaacctcacaaccttggctgagtcttgagactgaaagatttagccataatgtaaactgcctcaaattggactttgggcataaaagaacttttttatgcttaccatcttttttttttctttaacagatttgtatttaagaattgtttttan

SEQ ID NO: 19379 - DNA, 499 bp, Homo sapiens
  misc_feature (1)...(499): n = A,T,C or G
gggnnntnnnnnattatagcaccgcctgcangaattcggcacgagagatggcggacattcagactgagcgtgcctaccacaagcagccgaccatctttcaaaacaagaagagggtcctgctgggagaaactggcaaggagaagctcccgcggtactacaagaacatcggtctgggcttcaagacacccaaggaggctattgagggcacctacattgacaagaaatgccccttcactggtaatgtgtccattcgagggcggatcctctctggcgtggtgaccaagatgaacatgcagaggaccattgtcatccgccgagactatctgcactacatccgcaagtacaaccgcttcgagaagcgccacaagaacatgtgtgtacacctgttcccctgcttcatggacgtccagatcggtgacatcgtcacagtgggcgagtgccggtctctgagcaagacagtgcgctgtaacgtgctcaaggtcaccaaggctgacggcac

SEQ ID NO: 19380 - DNA, 450 bp, Homo sapiens
  misc_feature (1)...(450): n = A,T,C or G
nttggacctggccccccggctgcaggaattcggcacgagcggacgcggagcgagaggctgagagagtcggagacactatccgcttccatccgtcgcgcagaccctgccggagccgctgccgctatggatgatcgagaggatctggtgtaccaggcgaagctggccgagcaggctgagcgatacgacgaaatggtggagtcaatgaagaaagtagcagggatggatgtggagctgacagttgaagaaagaaacctcctatctgttgcatataagaatgtgattggagctagaagagcctcctggagaataatcagcagcattgaacagaaagaagaaaacaagggaggagaagacaagctaaaaatgattcgggaatatcggcaaatggttgagactgagctaaagttaatctgttgtgacattctggatgtactggacaaacacctcatt

SEQ ID NO: 19381 - DNA, 475 bp, Homo sapiens
  misc_feature (1)...(475): n = A,T,C or G
nattggccctcgctgcagcgaattcggcacgaggtggaacgagaggagtggaagctggacacactatgtgacttgtatgaaaccctgaccatcacccaggcagtcatcttcatcaacacccggaggaaggtggactggctcaccgagaagatgcatgctcgagatttcactgtatccgccatgcatggagatatggaccaaaaggaacgagacgtgattatgagggagtttcgttctggctctagcagagttttgattaccactgacctgctggccagaggcattgatgtgcagcaggcttctttagtcatcaactatgaccttcccaccaacagggaaaactatatccacagaatcggtcgaggtggacggtttggccgtaaaggtgtggctattaacatggtgacagaagaagacaagaggactcttcgagacattgagaccttctacaacacctccattgaggaaatgcccn

SEQ ID NO: 19382 - DNA, 475 bp, Homo sapiens
atttgacccgcgctgcaggtttattaatattttgaacaggttcagctattactgaaacttgtaatttctaaacttaagttggggcaaatggctatagtgcagagtaatgccatcactgggcactgcgaatgccatgactgaagaattaacagccacccctcaggcgcaggaccaggtgcagggtcgactctttctggatgttgtagtcagaaagagtgcggccatcttccagctgcttgcctgcaaagatgagcctctgctggtcgggggggatgccttctttatcttggatcttggccttcacattttcgatggtgtcactgggctccacctccagagtgatggtcttgccggtcagggtcttcacgaagatctgcataccacctctcagacgcaggaccaggtgcagggtcgactccttctggatgttgtagtcagaaagagtgcggccatcttccagctgcttgcctgcaag

SEQ ID NO: 19383 - DNA, 485 bp, Homo sapiens
  misc_feature (1)...(485): n = A,T,C or G
cttttgcccgcgctgcaggaattcggctcgacactcgctgcatgaattcagcacgagggatggaggtgaccggggacgccggggtaccagaatctggcgagatccggactctaaagccgtgtctgctgcgccgcaactacagccgcgaacagcacggcgtggccgcctcctgcctcgaagacctgaggagcaaggcctgtgacattctggccattgataagtccctgacaccagtcaccctggtcctggcagaggatggcaccatagtggatgatgacgattactttctgtgtctaccttccaatactaagtttgtggcattggctagtaatgagaaatgggcatacaacaattcagatggaggtacagcttggatttcccaagagtcctttgatgtagatgaaacagacagcggggcagggttgaagtggaagaatgtggccaggcagctgaaagaagatctgtccagcatcatcctcctatcn

SEQ ID NO: 19384 - DNA, 500 bp, Homo sapiens
  misc_feature (1)...(500): n = A,T,C or G
agcggntnnnnanaaatagaccgcctcgcggaattcgccacgagtaccggtcgcctggtcccggcaccagcgccgcccagtgtggtttcccataaggaagctcttcttcctgcttggcttccacctttaacccttccacctgggagcgtcctctaacacattcagactacaagtccagacccaggagagcaaggcccagaaagaggtcaaaatggggtttatattttcaaaatctatgaatgaaagcatgaaaaatcaaaaggagttcatgcttatgaatgctcgacttcagctggaaaggcagctcatcatgcagagtgaaatgagggaaagacaaatggccatgcagattgcgtggtctcgggaattcctcaaatattttggaactttttttggccttgcagccatctctttaacagctggagcgattaaaaaaaagaagccagccttcctggtcccgattgttccattaagctntatcctcacctaccagtatgact

SEQ ID NO: 19385 - DNA, 471 bp, Homo sapiens
  misc_feature (1)...(471): n = A,T,C or G
gactgatcccttcganannccccagttaggcgagcaaannccgnccgagcggagactgcctgccggaggaggctgacggcaccgacacccaccttggcttacctgccggtgccagccagcctgccctgaccagctctcgggtctgcttccctgagcggattttggaagattctggctttgatgagcagcaggagtttcggtctcggtgcagcagtgtcaccggcgtgcaacggagagttcacgagggcagccagaaatcccagccgcgacggagacacgcgagcgcacccagtcacgtccagccctcggactcggagaagaacaggaccatgctcttccaggttgggcgatttgagattaaccttatcagtccagacactaaatcagttgtgctagaaaagaattttaaagatatctcctcttgttctcagggtataaagcatgtggatcactttggctttatctgccggg

SEQ ID NO: 19386 - DNA, 493 bp, Homo sapiens
  misc_feature (1)...(493): n = A,T,C or G
ntttgacccgcctgcaggaattcggcacgagtaggtgagaggaaaagctctttacttccgcccctggcagggacttctgggttatgggagaaaccagagatgggaatgaggaaaatatgaactacagcagaagcccctgggcagctgtgatggagcccctgacattactcttcttgcatctgtcctgccttctttccctctgcgaggcagtggggtgggattcagagtgcttagtctgctcactgggagaagaagagttcctgcgcatgcaagccctgctgtgtggctgtcgtttacatttgggaggtgtcctgtatgtctgtacgttggggactgcctgtatttggaagatttaaaaacctagcatcctgttctcaccctctaagctgcattgagaaatgactcgtctctgtatttgtattaagccttaacacttttcttaagtgcattcggtgccaacattntttagagctgtaccaaaacaaaaagcctg

SEQ ID NO: 19387 - DNA, 479 bp, Homo sapiens
  misc_feature (1)...(479): n = A,T,C or G
catttcgcccgcgctgcaggaattcggctcgagaatcgcccctggacagagttcctgggcagaggggaaagcagctcccaggccttactcaggcctcaggtccatgggttgggcagccagtctgggcccttctcaggatcctcatctccatcctcatcctcttccttcacagcatttacttggagctctttgtgacacaccatgtcagtcatgatgaatcggccaacagccagcccttgccagctgacgtcacagtctaagatgggaaactgtggtacagatagacatgaagagagcttagcagtgattgaggtggtgactaaatatacagtcattgaatannaaaaaaaaaaaaaaaaaaaaaaaaaaaaaaaaaaaaaaaaaaaaaaaaannntcgggggggggggcccggcccccctttccccttaagggggggggaaaaaaaaatccggggccgggttttaaaaagggggggagg

SEQ ID NO: 19388 - DNA, 470 bp, Homo sapiens
  misc_feature (1)...(470): n = A,T,C or G
natcgaccgcctgcggaattcggtacgagctccagacccaccccgaggcccagcgggccattgaggcagcccctcaggagcctgagcagaaacggagcaggcaggacccaggcacagacagaacagaagacagtggattagcagcggggcctcctgaggctgctggggagaactttgccccctgctctgtggcgcccggcaagtccctgtaaccttgacaacaggcgcatcctcccaggccaccaacccagccataggctcttctctgtccgcagggcttctggggccaaatgggtgaatctttgctttcaacattgtgtgatttcttttctttttttttttttttttttaaaccaagtataagttacttttgtaagcaaaaaaatactttcaaacaaaaataaaaaaagctgttcgttaaaccccaaaaaaaaaaaaaaaaacctggggggggggccgggcccccattt

SEQ ID NO: 19389 - DNA, 451 bp, Homo sapiens
  misc_feature (1)...(451): n = A,T,C or G
attggaccttcgcccccgcgctgcaggaattcggcacgagccaaaatccaaaacttctcttgaaaagttcagggaccgtccaggggagatggggaggagatatggagtgagtcacctgctccagaagatgccagcttctctctccagggtgcttagttggctttgcccacccctcactccccagggagctctggggacagcttcctcacacccctgtcccacccacacagctgccctagctgaccccgagaagtgctcttggctgacccctctggtgtgtggtgaggggctttctcttccccttcctgtttcagacccccccatttcccgcacatggtgtggggggctgggggaggtccaagcagagtgttttattattatcgctttatgtttttgggtattgggttttttggatagaccaaagcaaagaanataaaaataacacagaaan

SEQ ID NO: 19390 - DNA, 446 bp, Homo sapiens
  misc_feature (1)...(446): n = A,T,C or G
ataganatttcgtacccgcgctgcangaattcggcacgagcaacagcgccaggagcatcgggagcgggacctatgtctgcggcctgtgtgagtgcatccccggctacctgggcacctagtgctagtgccacgatggtgagaaccacatcgtgtaccaaaacctgtgccgggaggcagagggcatgccactgtgctacgggcgtggggactgcatctgcaaccagtgctcctgcttccagagcgagtttggcaagatctatgggactttctgtgagtgcgacaacttctcctgtgccaggaacaagggagtcctctgctcaggccatggcgagtgtcactgcggggaatgcatgtgccatgcacgttacatcggggacaactgttactgctcgactgacatcaacacatgccggggcagagatggccagatctgcagcgagcgtggg

SEQ ID NO: 19391 - DNA, 492 bp, Homo sapiens
  misc_feature (1)...(492): n = A,T,C or G
agcgaggattgaccttcgttgngcattcggcacgagcagacccccaagctctaacccattttcctccagccctggctacccggatgaagaggttggaggtgggcagccagggtagccagtgaggtcaggaagtctgttgccttaacgtccccttccccacgaacacacacccttctccgctcccaggtctggttggtgagacttgggagtcacgaataagggaaaggggattgtttggtttttgggtgtttccctaagcccctcccttttctttcagcctttttccttcccccattatgtcatgacctcacttaagtggaacactatatcataacccagagattcgtcccagccccagagtccgacagactgtctggtccctattcctaatgaggggttgtgttggggcccacgtggagggaggggattttggggttcagactgcggngaagccagggtctccctcttcaacgccctcctccccctcaaccg

SEQ ID NO: 19392 - DNA, 462 bp, Homo sapiens
  misc_feature (1)...(462): n = A,T,C or G
aggccccccctttgcccgcctgcttgatcgcactagtggggaggaagatatgggtgacccccaccccccatctgtgagccaagcctcccttgtccctggcctttggacccaggcaaaggcttctgagccctgggcaggggtggtgggtaccagagaatgctgccttcccccaagcctgcccctctgcctcattttcctgtagctcctctggttctgtttgctcattggctgctgtgttcatccaagggggttctcccagaagtgaggggcctttccctccatcccttgaggcacggggcagctgtgcctgccctgcctctgcctgaggcagccgctcctgcctgagcctggacatggggcccttccttgtgttgccaatttattaacagcaaataaaccaattaaatggagactattaaataactttattttaaaaaaaaaaaaanaaaaaaaaaaaaaaaa

SEQ ID NO: 19393 - DNA, 500 bp, Homo sapiens
  misc_feature (1)...(500): n = A,T,C or G
gggtggnaagggnnnnnnnnnnaattgaccgtctgcagacatcggcacgagcccgatttcaatctacgttctagtcactggcctcaaaggaccccacagcacctgggccagaccaacagctcgagggagaacctgaaggcccagggggtccagggcggacctggggccccgaccaccaaggacagctcacgactgccccttcactgcatgtccccaaactcagcatgactcctgtcctcttcaataaagacgtttctatggccaaaaaaaaaaaaaaaaaaaaactcgggggggggcccggcccccaattccccctatagggaggggaataaaaattcatgggccgcggtttaaaaacgcggggagggggaggaacaaaatnnnnnngngggggccttgcaggttgnctgccgcatagtcttccttttattgccctanntttacatgatacagacatactggcataactcctttctctccttaaaaattgaggttgctgc

SEQ ID NO: 19394 - DNA, 476 bp, Homo sapiens
  misc_feature (1)...(476): n = A,T,C or G
ggggggaagcncgggccnnnnnnaattgccccatgagaggcttcggcacgagtgccatctagaaaagaacgttgtcaattcgtagtcaaaccaatgttgtcaacagttggttcattccttcaggacctacaaaatgaagataagggtatcaaaactgcagccatcttcacagcagatggcaacatgatttcagcttctaccttgatggatattttgctaatgaatgattttaaacttgtcattaataaaatagcatatgatgtgcagtgtccaaagagagaaaaaccaagtaatgagcacactgctgagatggaacacatgaaatccttggttcacagactatttacaatcttgcatttagaagagtctcagaaaaagagagagcaccatttactggagaaaattgaccacctgaaggaacagctgcagccccttgaacaggtgaaagctggaatagaagctcattcggaagccaa

SEQ ID NO: 19395 - DNA, 468 bp, Homo sapiens
  misc_feature (1)...(468): n = A,T,C or G
cttttgccccgcgctgtatgaattcggcacgaggccgcacgatgcctggagttactgtaaaagacgtgaaccagcaggagttcgtcagagctctggcagcctttctcaaaaagtccgggaagctgaaagtccccgaatgggtggataccgtcaagctgggcaagcacaaagagcttgctccctacgataagaactgggtctacacgcgagctgcttccacagcgcggcacctgtacctccggggtggcgctggggttggctccatgaccaagatctatgggggacgtcagagaaacggcgtcatgcccagccacttcagccgaggctccaagagtgtggcccgccgggtcctccaagccctggaggggctgaaaatggtggaaaaggaccaagatggcggccgcaaactgacacctcanggacaaagagatctggacagaatcgccggacaggtggcagctgccaaca

SEQ ID NO: 19396 - DNA, 503 bp, Homo sapiens
cttcgcccccgcctgcaggatatgccccgcgctgcaggcgcacagacaccaaatggattgcttctgactccgagtccactgctctccagcatacatttctggagcagccttagtccagttgctccgctgagtcctgccaggctgcaagggccaagcacgctgttccagttccccacactgcttaatggccacatgccagtgccaatccccagtctggacagagctgcttctccagtactgctttcttcaaactctcagaaatcctgatgacgtctggccacaattaaggactcattaactgatgaaacaaatttgtccccacgggctagtttacctgtgtcgtgagaaggacattgtgaaactcttgttaatttggtttgcacttttcataacatggatagtctagatttatgttagcattttaaaaactgtttttgatatattcaagtatatatgaaaatctgtttggcattaagtgaattttaatgtttttggttttatat

SEQ ID NO: 19397 - DNA, 314 bp, Homo sapiens
  misc_feature (1)...(314): n = A,T,C or G
cgcccgcccnaaattcccattcctcctggctgcaggaattaggcacgagagtacacaatcatttaatatttccctgtcttacccctattcaagcaactagaggccagaaaatgggcaaattatcactaacaggtctttgactcaggttccagtagttcattctaatgcctagattcttttgtggttgttgctggcccaatgagtccctagtcacatcccctgccagagggagttcttcttttgtgagagacactgtaaacgacacaagagaacaagaataaaacaataactgtgaaaaaaaaaaaaaaaaaaaa

SEQ ID NO: 19398 - DNA, 453 bp, Homo sapiens
catagacccgccttgaagatccggcacgagggaaattccggcagcccttgtcaattgtttttatgaattctttacctgttccttttaaagacaaggaaactgaggcccaaagttctaagttgtttggcaaatggagtctcctaccctcagctcctgcaaggacttgggggacccccaggtccagcagccacatgattctgcagcagacagggacctagagcacatctggatctcagccccacccctggcaacctgcctgcctagagaactcccaagatgacagactaagtaggattctgccatttagaataattctggtatcctgggcgttgcgttaagttgcttaactttcattctgtcttacgatagtcttcagaggtgggaacagatgaagaaaccatgccccagagaaggttaagtgacttcctctttatggagccagtgttccaacct

SEQ ID NO: 19399 - DNA, 428 bp, Homo sapiens
  misc_feature (1)...(428): n = A,T,C or G
agcgnnatnnnnttttctcgaccgcctgcangaattcggcacgagatcactgatgccctgggcacctcagtcaccaccaccatgcgcaggctcatcaaagacacccttgccctctgagcgtcgctggatctctgggagctccttgatggctcccagaccttggcttttgggaattgcactattgggcctttgggctctggaacctgctctgggtcattggtgagacttggaaggggcagcccccgctggcttcttggttttgtggttgccagcctcaggtcatccttttaatctttgctgacggttcagtcctgcctctactgtctctccatagccctggtggggtcccccttctttctccactgtacagaagagccaccactgggatggggaataaagttgagaacatganaaaaaaaaaaaaaaaa

SEQ ID NO: 19400 - DNA, 491 bp, Homo sapiens
  misc_feature (1)...(491): n = A,T,C or G
agggcngnnnnnnnagacctgattgcctccgaaanccactgatgattctccgagaanccgcacgagnataaatgtcagtctggattggctataacatgtctttcagcattaggcttttaagaaacacagggttttgtattctttactaaagatatcagagctcttaatgttgcttagatgagggtgactgtcaagtacaagcaagactgggaccttagaaatcattgtagaaacacagttttgaaagaaaaataccatgtctctaagccaactttaattgcttaaaagacatttttatttagttgaaaaatctagttttttttgtaaactgtatcaaatctgtatatgttgtaataaaacttatgctagtttattggaagtgttcaagaaataaaaatcaacttgtgtactgataaaatactctagcctgggccagagaagataatgttctttaatgttgtccaggaaaccctggcttgcttgccgagcct

SEQ ID NO: 19401 - DNA, 447 bp, Homo sapiens
  misc_feature (1)...(447): n = A,T,C or G
nttgacccctcgctgcacgaattcggcacgagcctcaccctgtaccagtccaataccatcctgcgtcacctgggccgcacccttgggctctatgggaaggaccagcaggaggcagccctggtggacatggtgaatgacggcgtggaggacctccgctgcaaatacgtctccctcatctacaccaactatgaggcgggcaaggatgactatgtgaaggcactgcccgggcaactgaagccttttgagaccctgctgtcccagaaccagggaggcaagaccttcattgtgggagaccagatctccttcgctgactacaacctgctggacttgctgctgatccatgaggtcctagcccctggctgcctggatgcgttccccctgctctcagcatatgtggggcgcctcagcgcccggcccaagctcaaggccttcctggcctcccctgag

SEQ ID NO: 19402 - DNA, 458 bp, Homo sapiens
  misc_feature (1)...(458): n = A,T,C or G
cttagacccccccttganccgcgctgcaggaattcggcacgagggctgtggccatctacggcatcatcatggcaattgtcattagcaacatggctgagcctttcagtgccacagaccccaaggccatcggccatcggaactaccatgcaggctactccatgtttggggctggcctcaccgtaggcctgtctaacctcttctgtggagtctgcgtgggcatcgtgggcagtggggctgccctggccgatgctcagaaccccagcctctttgtaaagattctcatcgtggagatctttggcagcgccattggcctctttggggtcatcgtcgcaattcttcagacctccagagtgaagatgggtgactagatgatatgtgtgggtggggccgtgcctcacttttatttattgctggttttcctgggacagctggagctgtgtcccttagcctttcagagg

SEQ ID NO: 19403 - DNA, 452 bp, Homo sapiens
  misc_feature (1)...(452): n = A,T,C or G
nattgaccgcctgaggttcttttttttgtagagacagggtcttgttatgttgccagggttggtctccaactcctgagctcaagggatccttcagcttcagcctcccaaagtgctaggatcacaggcaggagccaccgtgcccagccaagatggattttcttactctccaaagcgtcagcattttgaagtttcttttatgaaagggggggcaagaatcagggggaaaatgagtgtaaacaaagcccatcctggggtcagcacccactggagggggccagcaaaggggcctcaaatgttcctgcacctggcccaggagcccaggacagaggtcaaatctaggccccttggtctggctggattcatcaggcaagattcgaaaacaagaaaacctctagaacaagaaacaatcatgtctgcagcaaatacggcactgtggccctatggccatggca

SEQ ID NO: 19404 - DNA, 461 bp, Homo sapiens
  misc_feature (1)...(461): n = A,T,C or G
nttttgaccccgactggacccgcgctgcaggaattcggcacgagaagaaacccaaggctcttgcctacaggagggagaacagtcctggggacttgcccccaccacccttgccaccgccagaggaagaggcgagctgggccctagagctgagggcagcaggcagcatgtcctccctggagcgggagcgcagtggggagaggaaagcggtccaggccgtgcccctggcagcccagcgggtgctccacccagatgaagaggcctggctcccatacagcagaccaagcttcctgtcccggggccagggcaccagcacatgttccacggccggcagcaactcttccaggggctccaaaagctctaggggctcccggggccctggccggagccggagtcggagtcagagccggagccagagccaaaggccaggacagaaacgccgagaggaaccaagatgacccttg

SEQ ID NO: 19405 - DNA, 480 bp, Homo sapiens
  misc_feature (1)...(480): n = A,T,C or G
agtagtcccactgacgcctnctggatcgcatgaggaaagccgaatattctggctctactctggccttttttctggatcccttccaaaatgcacaaatcatacccttgtctgctccaattcagtctccaaacctggagcctgagctcctggcccccctagcatcatgctatcccaggagtatcaggaccagacacatccacagccaggctcatgggtctcagacagcaacttgagttaaagctgaaactcatccttcttctctgtgatttctgggtgaaaagctgcacttatattttagccttattattttctgtaggtccggagagatggtgggttgccattctggcaggaaaatctgagttttcttatctttgacctacaagagattctttttggaccaacctgcgaaattggtagttaggtctatggaaagtgagaggattttttttttttaatcctgtgcacaggaaaagaggtgct

SEQ ID NO: 19406 - DNA, 499 bp, Homo sapiens
  misc_feature (1)...(499): n = A,T,C or G
agggggtnnaattctcgaccgtcttgcatgaattccgcacgaggaagtggcccaggaaagccatccatgcaaattttgtttccttcctacttgagagggttggggatgagaggtccgtccttccctggctcataagcccatgagttgtgtaaaacactgttcagtaaggcagaatataagtcctcttatatattgagtccagacagttttcccttttgtcacatctagtggatttggttattgcaaagcttcatgtttgtttttagtaagttaatttttaaaaataggtaaaatgtgcacatagtataaaatttttaaaaaacatataatgaaaatcgctccagtctttctgccctccttgaaggcaaccagtgttactattaatttgcatccctcacagagattgtatgtgtgtgtgggtttggtttgtgttttaattcccaggtttcttatttggtcgcgaaccaataatattctccacccctttgtttcacacttt

SEQ ID NO: 19407 - DNA, 500 bp, Homo sapiens
  misc_feature (1)...(500): n = A,T,C or G
aggtnatnnnaaggttggacagtcgtgcaggaaccgccacgagcttaattgagcatattggaaacttggatcgggcatatgagtttgctgaacgttgcaatgaacctgcggtatggagtcaacttgcaaaagcccagctgcagaaaggaatggtgaaagaagccattgattcttatatcaaagcagatgatccttcctcctacatggaagttgatcaggctgccaatactagtggaaactgggaagaactggtgaagtacttgcagatggcccgtaagaaggctcgagagtcctatgtggagacagaactgatattcgcactggctaaaacaaaccgccttgcagagttagaagaatttatcaatggaccacataatgctcatatccaacaagctggcgaccggtgatatgatgaaaaaatgtatgatgctgctaagctgctgtacaataatgtttccaattatggacgtttggcatctacccttgttcacctgggtgan

SEQ ID NO: 19408 - DNA, 482 bp, Homo sapiens
  misc_feature (1)...(482): n = A,T,C or G
agaccttgatcgccctcaggaannncactgaagcgctctgcaagaattccgcacgagctgggcctgtcagccgccgggctggtattcaccctctggcccgtggtccgtgaggacaccaggctggtggccacagtgctgctgtccgtggtcgtgctgctccacgccctcctggccatgggctgtaagttgtacttcttccagtcgctgcctccggagaacgtggctcctccaccccaaatcacatctctgccctcaaacatcgcgctgtcccctaccttgccgcagtccctggccccctcctaggaaggcccgggtcccacaggcaacacctaagtggaccaacccctctgcctgtcctgccccccagacgatgactgaaggctcctttgacaccttgagatgattctgctactttccagacttttcttacaaagcaaacacttttattttctatgcaaaaaaaaaaaaaaaaaaactcgggg

SEQ ID NO: 19409 - DNA, 478 bp, Homo sapiens
  misc_feature (1)...(478): n = A,T,C or G
catttgacccgcgctgcaggaattcggctcgagaagttcacagtcctgtttgagtctcagttcagtgttggcagcaatgagcttgtgttccaggtgaagactctgtccctacctgtggttgtcatcgtccacggcagccaggaccacaatgccacggctactgtgctgtgggacaatgcctttgctgagccgggcagggtgccatttgccgtgcctgacaaagtgctgtggccgcagctgtgtgaggcgctcaacatgaaattcaaggccgaagtgcagagcaaccggggcctgaccaaggagaacctcgtgttcctggcgcagaaactgttcaacaacagcagcagccacctggaggactacagtggcctgtccgtgtcctggtcccagttcaacagggagaacttgccgggctggaactacaccttctggcagtggtttgacggggtgatggaggtgttgaagaagcaccacaagn

SEQ ID NO: 19410 - DNA, 482 bp, Homo sapiens
  misc_feature (1)...(482): n = A,T,C or G
attgcccggctgcaggatncnnattgaccccgcgctgcaggaattcggcacgagccccgatggcggcgccgggtggcgggaaggaggaagtttcaaagccagcttgacctggttgtggccgttgggcgagatgaagctacactgtgaggtggaggtgatcagccggcacttgcccgccttggggcttaggaaccggggcaagggcgtccgagccgtgttgagcctctgtcagcagacttccaggagtcagccgccggtccgagccttcctgctcatctccaccctgaaggacaagcgcgggacccgctatgaggtgcgtgaagtgggcaggccctgtcagtctcgcgttcttcttggaagccgagacgcgggccaccctcggtcctcatgctcccggctgctccctaggcgaaaagcccgccttggggttcctgaactcccagccttgagacctaccatcagcccgaccccagggtcctgtg

SEQ ID NO: 19411 - DNA, 480 bp, Homo sapiens
  misc_feature (1)...(480): n = A,T,C or G
aatagaaagcctggagaacctccacgagcccttgngctgatcctggcgttctgtgtggccggtgcagccgccctctccgtagcctccctctgctggtgcaggctgcagcgtgagatccgcctgactcanaaggccgactacgccactgcgaaggcccctggctcacctgcagctccccggatctcgcctggggaccagcggctggcacagagcgcggagatgtaccactaccagcaccaacggcaacagatgctgtgcctggagcggcataaagagccacccaaggagctggacacggcctcctcggatgaggagaatgaggacggagacttcacggtgtacgagtgcccgggcctggccccggtcccacaataggccgtctgcaagctgaggagcatggagagccagcccgagtctcaaagctgaacttggagtccgatgttcgaaggcaggaagcgttcagcacacgagaaagatgtn

SEQ ID NO: 19412 - DNA, 518 bp, Homo sapiens
  misc_feature (1)...(518): n = A,T,C or G
cggcccccgccccncccccccnnatggcaccgctttgccccgcgctgcaggaattcggcacgaggtcccacccaggtcgagcccccaggcttctggaaaacaatgtgtgctctactttgatggaaacatggcaaggaatttaaagacaggaatgtattaatattattgaaggtgtgttcgtaacctctgattctgtggacttgccactttctccaaacgctcggttcctttgaagatttcttctgaacgtgtgtgcgcacgctgggcgggtttgtgcatacatgcggggaccccagactgtcagcacagggaggatggatcccatcctaatttttatcacctgaaggttggaaccagtgagggactgggagagagtgatttataaacaccaatatcaacttcatgtggatttttgacaaggaggggtagtttgtaatttcatttaaattcttttcagcagctggaaatattgcactatctgaaacactgaatctccttttgtaactgtgttcactgac

SEQ ID NO: 19413 - DNA, 486 bp, Homo sapiens
  misc_feature (1)...(486): n = A,T,C or G
attgcccgccttcggaatnttgcacccgctgtcagaattcggcacgagcagcactccatatcccttactgtcaccttcactccccacacagctcatgagatgtgtgacccctgtttgagttttggtatttggtagtggagggtggggggatggtgaccaccagctgacatcctcctgggaagccgagcaatgtccctggtgggtaacaccctcaagtctctttgccagtgaggccccaccacatcggtgtgagttaggtttctcatctggagctgtttctcaggcattcttcccaaccctcttccttttccccttcggtgtgcctcagtggtctccttcatagagtgagagggcttgagaccctccctcaaccggactaattaaagaaagacacttgtgatcccaagtggtggttttatttttttagtttttatgtttgtatgggaaattgtggataaagtgaaaagaattgtaaataaatggtgt

SEQ ID NO: 19414 - DNA, 251 bp, Homo sapiens
  misc_feature (1)...(251): n = A,T,C or G
nattgaccgcctgcagaactctgccgagccggatgcctgggcattccctggcaagaccaccgcaggatgggcagcagagctctgacctaagaagctggacttttgggcagtctgcccaagccatggcctcccgccaccgcccccgccccagcagtgtcctcagaacactctactcgcacctcccggtgatccatgaactctgacccctccccagtaaaggcttctgtagagagcaaaaaaaaaaaaaaaaa

SEQ ID NO: 19415 - DNA, 494 bp, Homo sapiens
  misc_feature (1)...(494): n = A,T,C or G
ntttgcaccgcgctgcaggttctgccatctgctgaggtggcaaaactataatttattcctggttggctagaactgggtgaccgacagctatgaaacaaatttcagctgtttgaagttgaactttgaggtttttctttaagaatgagcttcgtccttgcctctactcggtcattctccccatttccatccattaccccttagccattgagactaaaggaaatagggaataaatcaaattacttcatctctaggtcacgggtcaggaaacatttgggcagctgctcccttggcagctgtggtctcctctgcaaagcattttaattaaaaacctcaataaagatggccctgcccacactgtgccttgtgtttggggcttgatagagtgtgaaaggtgtgttgcttgaaaggtgtggccttagacactangagatgatgggtagaagctccttgagaaacctagcagtggccatagagaagtagactgggtatgggga

SEQ ID NO: 19416 - DNA, 455 bp, Homo sapiens
  misc_feature (1)...(455): n = A,T,C or G
natagaccccatagacccgcctgcggcgaacaaggcgtagaggtggaagatatgccgttggatcagcttgcattggaggtggccaaggtattgctgtcatcattcaaagcacaccctgaagagaccagagagctcactgtgacccatccttactctacttggccaggccacagtacaacaagtgaccttcagaacaactgccacaactggccatgccctgccattgaaacagtgattaactttgatcaagccatggggacacaaaaatgcattgatcatgaataggagcccatgctataagtacattctctcagatttgaaccagtgaaatatgatgtatttcagagctaaaactcaactatagaagacattaaaagaaatcgtattcttgccaagcaaccaccacttctgccttagatgatgtgattataaggaaatcaaataaatgttgcctt

SEQ ID NO: 19417 - DNA, 484 bp, Homo sapiens
  misc_feature (1)...(484): n = A,T,C or G
gcgtgggtattgacgtccngtangcantcggcacgagctggaacggcgtggccacttggctctgggtggccaacgatgagaactgtggcatctgcaggatggcatttaacggatgctgccctgactgcaaggtgcccggcgacgactgcccgctggtgtggggccagtgctcccactgcttccacatgcattgcatcctcaagtggctgcacgcacagcaggtgcagcagcactgccccatgtgccgccaggaatggaagttcaaggagtgaggcccgacctggctctcgctggaggggcatcctgagactccttcctcatgctggcgccgatggctgctggggacagcgcccctgagctgcaacaaggtggaaacaagggctggagctgcgtttgttttgccatcactatgttgacacttttatccaataagtgaaaactcattaaactactcaaatcttgaaaaaaaaaaaaaaaaaaaaaa

SEQ ID NO: 19418 - DNA, 453 bp, Homo sapiens
  misc_feature (1)...(453): n = A,T,C or G
natagaccgcctgaggagcgtttttaactcatctttagagcaacagtaattattatttaactcttaactgaagaaagagaagtcacaacaaaaggaagactggagaaatgcttacttctagagggagaagactgtgcggcacaggaaacagcaaacagcggggtgatctgcagcccagagaccttcaaatgcgaacactataaactccaggcttgattccaacaggcgtgggatcagatttggtgatggaaaaagcgctgtttccttgcctgctttctccaagacagattttcggaacacatttccctaccctaaagcgacatcccagtagtgtttggaattttctgttcatagatattggaagagagaatttgctttatctgttgtctagagctcatcagtaacagtattcagttagcagacagaagtgtagtatgctgtatgaatatttta

SEQ ID NO: 19419 - DNA, 498 bp, Homo sapiens
  misc_feature (1)...(498): n = A,T,C or G
gacganccggggccngtgnaaccttgaaaaattgaccggccgtangaattcggcacgagggaacactgcgtctttaaatgagaaagtatacaattctttttccttctacagcatgtcagcatctcaagttcatttttcaacctacagtataacaatttgtaataaagcctccaggagctcatgacgtgaagcactgttctgtcctcaagtactcaaatatttctgatactgctgagtcagactgtcagaaaaagctagcactaactcgtgtttggagctctatccatattttactgatctctttaagtatttgttcctgccactgtgtactgtggagttgactcggtgttctgtcccagtgcggtgcctcctcttgacttccccactgctctctgtggtgagaaatttgccttgttcaataattactgtaccctcgcatgactgttacagctttctgtgcagagatgactgtccaagtgccacatgcctacgattgaa

SEQ ID NO: 19420 - DNA, 498 bp, Homo sapiens
  misc_feature (1)...(498): n = A,T,C or G
aggtgntnnntttgtccgactgcatgaattcggcacgaggtaaatatgattgtatatgtgttactccgatatgtaatccatttcactggctgagtttggcccctagccatgtgttaatataaagtaggcatggcttcccaatggaaatctctgagaatgacagtggagttgtgcaagcattttacattgccacataattgacttgccattttatggttaaaaacggcacattaggcagttgaatatgacgttaccttgcagactaaaaggttgaaggcccgaaactaacttttagctaacaataagggctgtgccccgatggaaactgagttcattttctgagaaaggtttggatgactgaaatatttcctctacagtcaaggactttggcttgcggtggctgaaactgagcttttttgtgtgggctccagttctcactgttctgcaatgctcatggcaagttgaatggtgagctagcttataaaatanagagctctg

SEQ ID NO: 19421 - DNA, 499 bp, Homo sapiens
  misc_feature (1)...(499): n = A,T,C or G
aggnnagnnntttatagaccgtctgcaggattcggcacgagcttgatgatattgagaagtgtttggaaaagaagcagcaatctgtataatatcctctttttgttttagcttttgtctaaaatattattttagttatgatcaaagaagagagtaaagctatgtcttcaatttaatttcaatacctgatttgtactttccttgaaagctttactttaaaataccttacttataggcctggtgtcatgctataagtatgtacatacagtttcacttcaaaaataaaaaaaaatccctaaaaactctctatactctctataacaatactttatcaagaactctggacaatggtattatttttaaaaatcatggtgatgtatttattagaatgtttcttataaatctgtttactttttatattaagaattaaactgtacctaaaaaaactctgactattcccatttgtcagtttagcattacattgtcttgagcaccagaaaat

SEQ ID NO: 19422 - DNA, 523 bp, Homo sapiens
  misc_feature (1)...(523): n = A,T,C or G
ggcggtggggnattgacgccgtggaanattgacagccttcggaattcggcacgagatctatccatcactgttccatggtcagcaagtcatatttcataatgtggattttccaaaataattattgaatacagctattctatggctacttttagtgtttttgtggtatgtggtgtgggagtgtttatggaattaccagtatcttaaattttcaaaggaaccttggaagtctatcactctaaatgaaagtctgtcactctacatgaattatgtgctcaaatttgaccaactcagtttaagacacaaaacagtaatttgaagaaggaaaaatgaagagagtttctagtttaatgggttaaatttttgttgttgcaatagtaagtttactcttcttataatatttctaaatgaaaaatcataggtatttgttaccatgtgtgaagattactttgttaaaagcaaaagtggtcgtgtgatatgctaaatgttaattactgattctatatgtttaaatcacgccaaacag

SEQ ID NO: 19423 - DNA, 474 bp, Homo sapiens
  misc_feature (1)...(474): n = A,T,C or G
agtgggccaatagacnattgtnccgcgctgcaggaattcggcacgaggcgactcacgcctgtaatcccagcacattgggaggccaaggcaggcagatcacgaggttaggagttcgagaccagcctggccaacatggtgaaaccctgtctctactgaaaatacaaaaattagctgggcgtggtggtgggtacctgtaatcccagctacttgggaggctgaggcaggagaattgcttgaacccaggaggcagaggttgcagtgagccgagatcatgccattgcactccgactctgggcaacagagcaagactctgtctcgggggaaacaaaaaaaaagtgtgctttgtcaagagaagcaccagcagacctctaagaactgctctctaaggctgcggtagcaaattatctactattgcaggtgccttattggtagagggctctgaagagccaaaactgtatatgcaacacttgtaag

SEQ ID NO: 19424 - DNA, 488 bp, Homo sapiens
  misc_feature (1)...(488): n = A,T,C or G
agtgggcccgcgctgcaggaatncnntttttcccccgcgctgcaggaattcggcacgaggtttgtcccagcggagggttggcttcggatctgcagaggctttagggacctgctccagccactgaacacactagccgtctgagacggcagctgagttgcactgtgcgacgcgacagagactacatttcccagcattccagcggcgcactcgggggaccacagatcccagcgcaccacagatcccagcgcaccacaaagaggcccggggactacaaatcccagcatcccctgcactcggttcctctgtaacttagactccagtgtgccgcgcagtgtgcgcaaattcacaaacccgcccgctgagttggtcgtttcggaatcccgagacttgaaacccaacgggaagacccttctcaccctcaaaagaagatgacagcccgcagagagttaacttctgtttacatggaactcagacatctgcaaatcatg

SEQ ID NO: 19425 - DNA, 477 bp, Homo sapiens
cttgacaccgcgctgcaggaattcggcacgaggagactctgtccttctctctgcagtacaccggattggccgcaccgggcgctcgggaaacacaggcatcgccactaccttcatcaacaaagcgtgtgatgagtcagtgctgatggacctcaaagcgctgctgctagaagccaagcagaaggtgccgcccgtgctgcaggtgctgcattgcggggatgagtccatgctggacattggaggagagcgcggctgtgccttctgcgggggcctgggtcatcggatcactgactgccccaaactcgaggctatgcagaccaagcaggtcagcaacatcggtcgcaaggactacctggcccacagctccatggacttctgagccgacagtcttcccttctctccaagaggcctcagtccccaagactgccaccagtctacacatacagcagccccctggacagaatcagcatttcagctcag

SEQ ID NO: 19426 - DNA, 520 bp, Homo sapiens
  misc_feature (1)...(520): n = A,T,C or G
gggggnnnnagtgcccnggggnnnnnagnnaaatgatcgccttcgganattgcacgaccttaattggaaacgaactanaccttgcgtgtggagagagaattcgactggagaaggtcctgctggttggggcagacaacttcacgctgcttggcaagccactcctcggaaaggatcttgttcgagtagaagccacagtcattgaaaagacagaatcatggccaagaatcattatgagattcaggaaaaggaaaaacttcaagaagaaaagaatcgtcacgaccccgcagactgtcctccggataaacagcattgagattgctccgtgtttgttgtgattaccgagttaatacttacaaaaggataaaaataaactcctgcttcccaaggagaaaaaaaaaaaaaagaaaaaaaaaaaaaaaaaaaaaaaaaaaaatctgggggggggggccgggcccccatccccccttaaggggggggaaaaaaaaatccgaggcgggggtttaaaaacgggggggggggg

SEQ ID NO: 19427 - DNA, 530 bp, Homo sapiens
  misc_feature (1)...(530): n = A,T,C or G
agacggtgtnnaaaatgcttgctgtcngaatnttgcaccagcctgcgagaattcggcacgagggacaagctaagtgatggcattggggtgatgttaccccaggtgcttaaaggtatgacttcagagtctgattccattgggttgacaccaggagagaaaagtgaattggccctctctgctctaggtggctgtgtcttctacctcaaaaaatgccttattgatcaggagcttttatcaatggctaattttgaagaatatattcccttggattctgacacagtcagcactacaagatctggtgctatcttcaccaaagcctatcaacgaatggtgctagatgcagtgacattaaacaacttggagatttttctgaatggaacaaatggttctactgaaggaaccctactagagagggttgatacttgccatactccttttggtaagcggctcctaaagcaatggctttgtgccccactctgtaaccattatgctattaatgatcgtctagatgccatagaagacctcatggn

SEQ ID NO: 19428 - DNA, 478 bp, Homo sapiens
  misc_feature (1)...(478): n = A,T,C or G
gggctgaccgcctgaggaanncgctgatgaccctataggaatgccgctcgagaggcaatccacagcagctgcccctgcaaatgtcagcgccagcccagtcaaaagagcttgaaacctaccaagccggaggactgtgctgtgcctctctcgcccacattttccccaagcactctcaggaacctggcaacagactgagagaaaggaatgaaaggatggaagaattacaagatcaggcactgctgtctgtctgttccacggatgtaaccacagcacacgcgtggctcacggtactagtgtgataaatgcttgttacatgaaggcgtgaacagggatgagaagagacttcctggagaaacaaaaggactaacaatcaggaaggggaggtgatcggggcaggagtaaagtggacacctcagcaaaaaaaaaaaaaaaaaaaaaacctggggggggggccgggccccaaattccccttataggg

SEQ ID NO: 19429 - DNA, 491 bp, Homo sapiens
  misc_feature (1)...(491): n = A,T,C or G
gagggttttgatttcgattgcatgtangaattcggcacgagtaacaggtgcttgcagtttgttgacttttttgaaaaaatcaagttgtaaacttttattacaaattaaaaatgaagttcttaaaaatctcaacttgaccagatatgaaacaatttaaaaacctttaaaggcgtattgagaaaaaccaggcttttttaaaaaacacgtttgttattaccaaaaagagacgtctttaggtaaaaataataaaaaccccatgctgcatagataatgcagatagttctatttatctggtcaacgggcaaaaagcaagcactttaggtcttcagctccaatcttttgttcatttcttattgctggaatttcatatttcttcttgttggatgactaaaccggatgatggtagagatggtaagccggcatttactcagccccgccctgctcagcctcgggagcggacgaattctcagctggtggatcggctgcttttg

SEQ ID NO: 19430 - DNA, 503 bp, Homo sapiens
  misc_feature (1)...(503): n = A,T,C or G
atggtnntnnnnccttgacgaccgtcatgtatgaacccgcacgagggagtctggagacgacgtgcacaaatggcacctcgaaaggggaaggaaaagaaggaagaacatgtcatcagcctccgacctcacgtggctgaaggagagaatgtatttggtgtctgccatatctttgcatccttcaatgacacttttgtccatgtcactgatctttctggcaaagaaaccatctgccgtgtgactggtgggatgaaggtaaaggcagaccgagatgaatcctcaccatatgctgctatgttggctgcccaggatgtggcccagaggtgcaaggagctgggtatcaccgccctacacatcatactccgggccacaggaggaaataagaccaagacccctggacctggggcccagtcggacctcagagcccttgcccgctcgggtatgaagatcgggcggattgacgatgtcacccccatcccctctgacagcactcgcaggaaggcggn

SEQ ID NO: 19431 - DNA, 471 bp, Homo sapiens
  misc_feature (1)...(471): n = A,T,C or G
nattgaattcctgcgcgattcggcacgaggcatggcagactgcatcttagtcaacagccagttcacagctgctgtttttaaggaaacattcaagtccctgtctcacatagaccctgatgtcctctatccatctctaaatgtcaccagctttgactcagttgttcctgaaaagctggatgacctagtccccaaggggaaaaaattcctgctgctctccatcaacagatacgaaaggaagaaaaatctgactttggcactggaagccctagtacagctgcgtggaagattgacatcccaagattgggagagggttcatctgatcgtggcaggtggttatgacgagagagtcctggagaatgtggaacattatcaggaattgaagaaaatggtccaacagtccgaccttggccagtatgtgaccttcttgaggtctttctcagacaaacagaaaatctccctcctccacagctg

SEQ ID NO: 19432 - DNA, 495 bp, Homo sapiens
  misc_feature (1)...(495): n = A,T,C or G
ggggggtnnnnnnntttgcccggcttcggctnactgacctttanaagttggcattgtaaataaaacaacttgcaaaaaagttttctggaatagaattaacaaaatattatctttattcatgagttggaaactggaaaaaggcttcttgaagtaaatgttctgagtggagctactaggatgtcttccagcctcctgcagtcaaggagtaccactgtattgattagcctgtatgtagcagggctcccttcattgcatctgaggacttgttttctttttctttatttttaatcctcttagttttaaatatattgcctagagactcagttactacccagtttgtggttttttgggagaaatgtaactggacagttagcttttcaattaaaaagacacttaacccaaaaaaaaaaaaaaaaaaaaaaaaacctcgaaactgggagcgagagaccctattctggggggggggccgggcccccaattccccctatagggagg

SEQ ID NO: 19433 - DNA, 523 bp, Homo sapiens
  misc_feature (1)...(523): n = A,T,C or G
gggtnnnnatgtggcngggggnnnaagggatttgatcgccctcagaccttgatcgccttgaggaancgccacgagccggaacggcggcgacaagggtgttcccgaactagagtggggcatacataatcttgctgctatgcttcgaagctgtagtctgaatcaacctaagtttgaaacagaaggtgaacctctgagatagaaaatcaagtatattttaaaagaagggatgtgggatcaaggaggacagccttggcagcagtggcccttgaaccagcaacaatggatgcagtcattccagcaccaacaggatccaagccagattgattgggctgcattggcccaagcttggattgcccaaagagaagcttcaggacagcaaagcatggtagaacaaccaccaggaatgatgccaaatggacaagatatgtctacaatggaatctggtccaaacaatcatgggaatttccaaggggattcaaacttcaacagaatgtggcaaccangctgacaggggctgggaaca

SEQ ID NO: 19434 - DNA, 515 bp, Homo sapiens
cgcccccccccccccccccccccccccattcgccccgccatgtacgccgcgctgcacgaattcggcacgagctggtggggtgtagcaaatgcttatgtacggttatccatactcagtcaattgtgaagggaacagtatacccacaattccacccaaagactctacaaaataaagctttctctccatctcccttacatttaaggcctttcatttttaaggcactgggttgtgaagacttgaagacatacaaggtcagtaaaactgaagaccttgcatcctgcttgcttcaaatgtggagaggcaaacacaggctactggaccagacgggaacggttacccacggtgacaaaagcaggtctccaaagcacagcattttggttagtgcattccagatgtgttagctacaactggggacaccaacttgaataacacatttttcttttaacaaaacaaaagtttaccctgcttggatgatgctaaatgcccttaagcactaggccttcggttgcactgag

SEQ ID NO: 19435 - DNA, 550 bp, Homo sapiens
  misc_feature (1)...(550): n = A,T,C or G
tatacgatgtccgctagccgaggtatacgtttatactaatctattcatgtacaaaaacacaagaaaacaaaaaacttgagaccctttaaaccttgagagcaatggggaanaaccannananagagaaaaanaggagccagaaccaaccatgagctgcaggaaattatacagagtctacatggttaagtacaagactgatctggagaaggacattatttcggacacatctggtgacttccgcaagctgatggttgccctggcaaagggtagaagagcagaggatggctctgtcattgattatgaactgaatgaccaagatgctcgggatctctatgacgctggagtgaagaggaaaggaactgatgttcccaagtggatcagcatcatgaccgagcggagcgtgccccaccttcagaaagtatttgataggtacaagagttacagcccttatgacatgttggaaagcatcaggaaagaggttaaaggagacctggaaaatgctttcctgaacctggttcagtgcattcagaacaagcccctgtattttgcg

SEQ ID NO: 19436 - DNA, 433 bp, Homo sapiens
  misc_feature (1)...(433): n = A,T,C or G
cgcggnngtttttaattgactgcctgtggcattcgcacgagcccaacgatccccgagcccgcatggacagtgagagcctcttcaaggacgggaagctgctgcctgctatcaccatcctgggctgccgagtccggatccctgccgaggtgctcatcctgaactcgattgttctgccacacaaggagctgagccgaagcttcaccaaccagatcatcctctgagtagggctgccagaaggcccccagctcctacccactccccttgaggctgctgcctgcttggccagcctctgtccagaaaggaccagagaaagccaggctggatcgtcacatgccggggagcaatgtggatggcctggggactcctgggttttctccctcccgactccctaataaaccccgtgaacctttgaaaaaaaaaaaaaaaaaaaaac

SEQ ID NO: 19437 - DNA, 479 bp, Homo sapiens
cttggcccgcctgcaggaattctgcacgaggagagttatgtgcctgagctccaacagctcttcaaagggaaggtgaaggtggtgagcctgaagcctgaggtggcccaggtcgacctgtacatcctcggccaagccgaccactttattggcaactgtgtctcctccttcactgcctttgtgaagcgggagcgggacctccaggggaggccgtcttctttcttcggcatggacaggccccctaagctgcgggacgagttctgattctggccggagcaccagaccctctgatcctggagggaccagagtctgagctggtccttccagccaggcctggcagccagaggtgctccgggattgcaaactcctcttctcacctgccaaagatggagaagagtgccagggacccctcaaggagggagacgctccatatcccagggcataggaacttgaggttcctaagagcaggagcatctcccatc

SEQ ID NO: 19438 - DNA, 505 bp, Homo sapiens
  misc_feature (1)...(505): n = A,T,C or G
aggtgnctnnnnnnntttcgctcggctgcacgaattcggcacgaggaaaaggccaagatgatgaagtgagaacgttgatggcaaatggcgccccattcaccacagactggttttccaaattgagagtctcctgtggatatataggtgataattgtaagaatggtgcagatgtgaatgccaaggacatgctgaagatgacagctttgcattgggccacagagcgccaccatcgagatgtcgtagagttacttatcaaatatggagctgatgtccatgctttcagcaaatttgataaatcagcctttgacatagctctggagaaaaacaatgctgagattttggtcatcctccaggaagcaatgcagaatcaggtgaatgttaatccagagagagccaaccctgtgactgaccctgtgagtatggctgctccattcatcttcacgtcgggtgagggtgtaacctcgcaagcttatttcttaaccaacaccaaaacaacctcagccat

SEQ ID NO: 19439 - DNA, 533 bp, Homo sapiens
  misc_feature (1)...(533): n = A,T,C or G
gcggggnnnnntggtggccnggnnnnnnnnagnnnaaactgatnngcccgtcggattactgatncgcctgtaggaattcgccacgagtatgtttggctgagtacttgtaactgtcagaagaaggatggtggtgagtggtctttgtctgcctaaacccagagtttatgtagaaagcattgaatgttctgatcagatgtgactaaggtcaaggaaaaaaaattgaaatatcttatttaccatttcctctttttgagtcacttaaattggacacctttggtaccctggtctcagtatatgctattctggcccaaatgttccattattcagctggctgataccacatagatagcttgacaaggagtgctgtctgtccttaccacattttcagcactcagcacagtgccttgtgtataataggcactcaatttattataaatcttcagtatgtcctgagaacagctttagtcatggaatactgggagaaggaataactttcacaaaataaacttaaaacagcctgtaattattgaggt

SEQ ID NO: 19440 - DNA, 481 bp, Homo sapiens
  misc_feature (1)...(481): n = A,T,C or G
cttttgcccgcctgcacgaattcggcacgaggggctttggggaagtcacttagctccttaaggtctgtttttagacccttccaaggaagaggccagaacggacattctctgcgatctatatacattgcctgtatccaggaggctacacaccagcaaaccgtgaaggagaatgggacactgggtcatggcctggagttgctgataatttaagtgggatagatacttggtctacttaagctcaatgtaacccagagcccaccatatagttttataggtgctcaattttctatatcgctattaaacttttttctttttttcttnnngnnnnnaagaaaaaaaaaaaaaatctcgggggggggccggngccccaattccccttaaagggaggggaattaaaattcattggccggggtttaacaacgcggggagggggggggaaagctnnntgccctttngcnctanggcttcgggtgtcactgag

SEQ ID NO: 19441 - DNA, 518 bp, Homo sapiens
  misc_feature (1)...(518): n = A,T,C or G
ggcggttnnnntttcgacgctgtggaattcggcacgaggtgatctttacatttgattccagaggctatgttcagttgttagttgggaaagattgagttatcagatttaatttgccgatgggagcctttatctgtcattagaaatctttctcatttaagaacttatgaatatgctgaagatttaatttgtgatacctttgtatgtatgagacacattccaaagagctctaactatgataggtcctgattactaaagaagcttctttactggcctcaatttctagctttcatgttggaaaattttctgcagtccttctgtgaaaattagagcaaagtgctcctgttttttagagaaactaaatcttgctgttgaacaattattgtgttcttttcatggaacataagtaggatgttacatttccagggtgggaagggtaatcctaaatcatttcccaatctattctaattaccttanatctaaaggggaaaaaaaaaatcacaaacaggactgggtagttt

SEQ ID NO: 19442 - DNA, 486 bp, Homo sapiens
  misc_feature (1)...(486): n = A,T,C or G
cgccccgttccattcgcccccccccatagacccgcctgcaggaattcggcacgagcacccccaggcccttctctggagaggggcctcaccttcaaaaaggctccggttgttgcctgatgctctgcacagagctgtaagtccgcagcccatgcacttctgtaatctgctgggtgcctagttatctttcttcttgtttgggcagaatccgggcctgaatgccacccaccccaggaagcccaggacaaggcagacagccttgtaaagtcccattcctgccaggcgcggtggctcatgcctgtaatcccagcactttgggaggctgagatgggcggatcacctgaggtcgggagttcgagaccagcctggtcaacttggtgaaatttcatctctattaaaaatacaaaaattaacccgcatggtggtgggcgcctgtagtcccactactcangaggctgaggcaagagaatcgcttgaccctggaggcag

SEQ ID NO: 19443 - DNA, 534 bp, Homo sapiens
  misc_feature (1)...(534): n = A,T,C or G
nggcgattgatggctgagattcggcacgagcttcgatgccatatagacgatggggaccactccagcctgatgtcgggggccctgagcccaagtatcattcagaacctttcccatagctcctcccgcctcaccacgcctcgggcgtccctcccattcccagcgctgtccatgagcaccaccaacatggctatcggggacatgagttctttgctgacctccctagcggaagaaagcaaattccttgcagttatgcaataggctttaggaaaaaaagactgcaaccaacggaaatcaataggagttgaagagattaaactgactttgttttggctgtttttttagttctgtatgtattttagcaatctcatctcacctaactgagatgtgtttcaattatattccttttatggaaaaggactctgaaaaaccctaaagtattctagggagaaactgtcttccaattcagttttggatcagtattgttacactcaaaccacccctcttttaaaaaaaanaaaaaaactgagggggggg

SEQ ID NO: 19444 - DNA, 437 bp, Homo sapiens
  misc_feature (1)...(437): n = A,T,C or G
nggagatcgattcgccggctgcaggaattcggcacgagcttggcatccctgccccctctgcatgttgcaaagctatcccatgagggccctggcagtgagttaccagctggagcgctgtatcgtaagaccagccagctgctggagacattgaatcaattgagcacacacacgcacgtagtagacatcactcgcaccagccctgctgccaagagcccgtcggcccaacttatggagcaagtggctcagcttaagtccctgagtgacaccgtcgagaagctcaaggatgaggtcctcaaggagacagtatctcagcgccctggagccacagtacccactgactttgccaccaccaaaggttaagtgaggtccccttgattgaggacttcaccccttgattaaagcaacttctgcttcaaaaaaaaaaaaaaaaaacttgg

SEQ ID NO: 19445 - DNA, 325 bp, Homo sapiens
agaacattgcgcctggagctgctgcttgacacgtgggtttccaggaccagggaacagacatttgtcttcaccgacagcccagacaaaggcctccaggagagactggggtcccaccttgtggtcaccaactgctccgcggaacacagccacccagcttggtcctgcaagatggctgctgagttcgacaccttcttggccagtgggcttaggtggttctgccatgtggacgatgacaactatgtgaacccaagggcgctgctgcagcttctgagagccttcccgctggcccgcgacgtctatgtgggaaggcccagcctgaaccggc

SEQ ID NO: 19446 - DNA, 505 bp, Homo sapiens
  misc_feature (1)...(505): n = A,T,C or G
gtggccagggngnnnggnnaatagcttgcctgcaggacatgtcanaaatagagcacgagccacagtcctgaagcagcaatcgaatccctttctcacttttggaaggtgacttttcaccttaatgcatattcccctctccatagaggagaggaaaaggtgtaggcctgccttaccgagagccaaacagagcccagggagactccgctgtgggaaacctcattgttctgtacaaagtactagctaaaccagaaaggtgattccaggaggagttagccaaacaacaacaaaaacaaaaaatgtgctgttcaagttttcagctttaagatatctttggataatggtatttctattttttatttttttcattagaagttaccaaattaagatggtaagacctctgagaccaaaattttgtcccatctctaccccctcacaactgcttacagaatggatcatgtcccccttatgttgaggtgaccacttaattgctttcctgcctccttga

SEQ ID NO: 19447 - DNA, 477 bp, Homo sapiens
  misc_feature (1)...(477): n = A,T,C or G
ctagccccgcctgcaataattcggcacgagggaacttggcctcagcgtgagatcctgccatgcagtgttgcggtggcactgaagaagtgtgaatgtgaaggcggcgtcggcgcggggccagagcaccactctgctgccccaccacgcggcctgtgaggagccactaaacctttccgtgcctagacctccccatctgtggaatggggtcaataccacctacctcacaggggtgttgtgaggactgagaagaacaatgtcaaatgtttttaatactcagatgtgggagcgacatcaatgaaatctgtactgtatgaaagctacacaaaaatgggcagacatttggttaattgtgccagatacctaaaatgtatgttcagaaaagcattttatcaactcagaaatatgacttatttctagaanannnnnnnnnnnnnnnnnnnnnnnnnnnnnnnnnnnnnnnccctcgggggggggccg

SEQ ID NO: 19448 - DNA, 480 bp, Homo sapiens
  misc_feature (1)...(480): n = A,T,C or G
ctcgccccgcccgcaatagctccgcctgcangaattcggcacgagagagaactagataacaaagccaaggaacacatgaggctctgggcccaaacaactgtacattgtttattgagaacacccgtagatgggaaggagggatgccctgtaccgcatcgtggccaccactgactgggagccaggcccagagagcactggcagagctgggggtgggcttcccatgacacactgaccatctcggagggtgggaggaatgagaggactaggcctaagaccctggtgccatgctacaaatggggactgattggcctttgcctttcaaaaacagagggtatgggtatgcggactaccagcaaaaaatagaaacttgatttttttaaaagggcctcctgtacataacaagacagcatctgctctccatggcccgggactggcagcggggacctcangcangcangcaagccgaaggcctccaagaaa

SEQ ID NO: 19449 - DNA, 315 bp, Homo sapiens
  misc_feature (1)...(315): n = A,T,C or G
ggggggcnnnnnnttttgancggctgtcagaatctgtcacgagctcagccaggcctctcctgggagccactcgcccagagactcagcttggccaacttggggggctgtgtccacccagcccgcccgtcctgtgggctgcacagctcaccttgttccctcctgccccggttcgagagccgagtctgtgggcactctctgccttcatgcacctgtcctttctaacacgtcgccttcaactgtaatcacaacatcctgactccgtcatttaataaagaaggaacatcaggcatgctaaaaaaaaaaaaaaaaaaaaaa

SEQ ID NO: 19450 - DNA, 510 bp, Homo sapiens
  misc_feature (1)...(510): n = A,T,C or G
cggggngnnnnnnnattgttcgctcgcctgcaggaattcggcacgagagaaggcgcagcgtgaggccaacaaaaagatcgagaagcagctgcagaaggacaagcaggtctaccgggccacgcaccgcctgctgctgctgggtgctggagaatctggtaaaagcaccattgtgaagcagatgaggatcctgcatgttaatgggtttaatggagagggcggcgaagaggacccgcaggctgcaaggagcaacagcgatggtgagaaggcaaccaaagtgcaggacatcaaaaacaacctgaaagaggcgattgaaacctacagaaaaaggaaaaaaggccacaaaagttccctctcactttcagtaaaaataaataaaacagcagcagcaaacaaataaaatgaaataaaagaaacaaatgaaataaatattgtgttgtgcagcattaaaaaaaatcaaaataaaaattaaatgtgagcaaaaaaaaaaaaaaaaaaaaaaaaaaccttggg

SEQ ID NO: 19451 - DNA, 508 bp, Homo sapiens
  misc_feature (1)...(508): n = A,T,C or G
aggcgnannnnnnntttcgctcgcctgcacgaattcggcacgagatcgcccgtcgtggtcaacgggccagccgagtctggagtggttgcgaacccttctggctgcagatctggaggtggaggcagtaccctggactctattctgctgccccttcagggtttggaggagccggagcatccctcgcgtcctgtcacttccagcgaggcacacaaaactgaccgtagggatggccaccagggtccggacagcttctatttgggtcccacctctccaagaacgaaacagttcatgggataggatcagaaagctccaaggtcaggaatccatcttgggccaagggactcctggtctgcaacctctccctggaacacccaggcagaagcagaagagtcgcagaatagagaaagtcctagagtggctgtttatttcccaagagcagccaaaaatcaccaagtcctggngacctttgtcattcaatggatgtgttggggattttacctgggaggan

SEQ ID NO: 19452 - DNA, 490 bp, Homo sapiens
cattcgccccgccatgtgcgccgcgctgcaggaattcggcacgagctggtggggtgtagcaaatgcttatgtacggctatccatactcagtcaattgtgaagggaacagtatacccacaattccacccaaagactctacaaaataaatctttctctccatctcccttacatttagggcctttcatttttaaggcactgggttgtgaagacttgaagacatacaaggtcagtaaaactgaagaccttgcatcctgcttgcttcaaatgtggagaggcaaacacaggctactggaccagacgggaacggttacccacggtgacaaaagcaggtctccaaagcacagcattttggttagtgcattccagatgtgttagctacaactggggacaccaacttgaataacacatttttcttttaacaaaacaaaagtttaccctgcttggatgatactaaatgcccttaagcactaggccttcggttgccactgag

SEQ ID NO: 19453 - DNA, 484 bp, Homo sapiens
  misc_feature (1)...(484): n = A,T,C or G
agcccagtcccnttgacccgcctgcattaattcggcacgagcagccctgtggccccttcctgtcctgtctcaagccaggctaaatatgtgccttcctcagggctgtggggcaggcactaaggggcctttcccttcctttcctttctcaggccttgctcccccaggatgacccactcttagggaggggnggcatctggacaaatgccaccacagcaggtggggtggcaaagctacctggaatggatttgtgtgctgatttttaaggattattacagataattaaacagaacggtcagccttctgtggtcttaaaacataaaaataaaaaaaaaaaaaaaaaaaaaaaaaatttctggggggggggccgggccccaaatcccccttaaaaggggcgtattaaaattacaggggcggggttttaaaaccggggggaggggaggaaaaggggcctcngngcgggcngccggcccgtggccttcatgga

SEQ ID NO: 19454 - DNA, 454 bp, Homo sapiens
  misc_feature (1)...(454): n = A,T,C or G
natttgacccttcgctgcacgaattcggcacgagagcagtgcctgcccgtgtccccatgtcccggcatgaaggacactgctagagagttaccatgcacaccgatggtttcctgtatcacagcccaaagaggttctctggtggccacagctgtgtgctcagtcagtgcactgggcaagctagaagtgttggggggttaatgtccccaggagcagcaaccctgagtcaataaggagcaggacctcagcttcattgtccttgagcaggacaattctgaagtgtattctacataaactctcagaggatgcccagcaggatggagtcccagttgcccgcagcagtaacccactcattcatgtacttcctgcgggggctctcccttccctctcttccccactcccccgccttgggcttcctgggatggctcccaaataaacctcttgcacccagaaaaaa

SEQ ID NO: 19455 - DNA, 477 bp, Homo sapiens
  misc_feature (1)...(477): n = A,T,C or G
nttttgaaccgcgctgcaggaattcggcacgcgcaagactggatgccaagattgattctaaattagggcatgtggttatgggtaacaatgcagtctcaccctatcagcaagtgattgaaaagaccaaaagcctttcctttagaagccagatgttggccatgaatattgagaagaaacttaatcagaatagcaggtcagaggctcctaactgggcaactcaagattctggcttctactgaagaaccataaagaaaagatgaaaaagaaaactatcagagaatgatgaaataataaaactattatataaagggtgacttacattttggaaacaacatattacgtataaattttgaagaattggaataaaattgattcattttatgcaagactttaaaaaaaaaaaaattgagaattcgggggggggggccgggccccatttcccccttagggggggggaataaaaatcccggggggggg

SEQ ID NO: 19456 - DNA, 448 bp, Homo sapiens
  misc_feature (1)...(448): n = A,T,C or G
ntagacctttgcccacgctgcggttttctcccatacagtgcagagagctgtctggagtcacaatctgaacagattctcgggcgctccttctctccttccatcactacagtaagtaaaaggaccatagaggggaaccaggaatctgagaatcagctgtgctcaatagccaacctccctgtccagatgcagctattttggtatctcctatcacatgcactctgaatcagggtttttctataagaaatctttcagaatcagcaaaagtggggatgacccaggcatcttgatttgcaaaatcacaaaactaagttgtcagttatcactgtagatgagcaactcatctttttaaagtatagttactgaactgattctgagaaatctttagagagaaaaaactcaacagtacaaattaactaattgggaaagttagaatgtcctttctgaattt

SEQ ID NO: 19457 - DNA, 461 bp, Homo sapiens
  misc_feature (1)...(461): n = A,T,C or G
gggatgtccgnnnngttccnatacgatcctcatggatagttcgcacgagctccctactgcatggggacttccacgcgttctccgctgggcctggactcttctcctatatccgccactgggaccagaatgagcgttttctggtagtgcttaactttggggatgtgggcctctcggctggactgcaggcctccgacctgcctgccagcgccagcctgccagccaaggctgacctcctgctcagcacccagccaggccgtgaggagggctcccctcttgagctggaacgcctgaaactggagcctcacgaagggctgctgctccgcttcccctacgcggcctgacttcagcctgacatggacccactacccttctcctttccttcccaggccctttggcttctgatttttctcttttttaaaaacaaacaaacaaactgttgcagattatgagtgaacccccaa

SEQ ID NO: 19458 - DNA, 514 bp, Homo sapiens
  misc_feature (1)...(514): n = A,T,C or G
tgggtgggnnnngggggannnnnnnatttcgcccgcgctgcaggaattcggcacgagcgcaagcatggttaacgtccctaaaacccgccggactttctgtaagaagtgtggcaagcaccaaccccataaagtgacacagtacaagaagggcaaggattctctgtacgcccagggaaagcggcgttatgacaggaagcagagtggctatggtgggcaaactaagccgattttccggaaaaaggctaaaactacaaagaagattgtgctaaggcttgagtgcgttgagcccaactgcagatctaagagaatgctggctattaaaagatgcaagcattttgaactgggaggagataagaagagaaagggccaagtgatccagttctaagtgtcatcttttattatgaagacaataaaatcttgagtttatgttcaaaaaaaaaaaaaaaaaaaaaacttggggggggggccgggcccccatttccccttatggggagcggaataacattccctggcg

SEQ ID NO: 19459 - DNA, 541 bp, Homo sapiens
gagagttcgcgccttcgccggctgcaggaattcggcacgagctcgtgtgctccttggccgcttactggaagggcgtttttcagagctgcagggacagggtgagcagctgaagggctaggagggaagccggcccccgctctgcagaagctgcatttcagctgaatctgtgtttcagcctcagttggttgcaccgttagcccctctcctcccggatggtcatgtttttgtcacattagagaataaacagccacacacacatttttttttttcctttaaaacagtaacttggaaatatgaaaaggccacaaggaggagcaagggctgttttctggagtggttgaggtgttgtcctgcagttgtcattgtcttctccaccgggctgttcccatttatttcctggggaactgaatccctcctccctccactccttgggagcccaggtggtccttggccaccattcaggctttccaagaggccaaccaccttggagatttttttcttgaatctcgctgtttcttatgggttctttagataaaaagaa

SEQ ID NO: 19460 - DNA, 487 bp, Homo sapiens
  misc_feature (1)...(487): n = A,T,C or G
attgcccgcctttggaattcgtcacgagagnaaggacgaggcaattacttcgctaacgcctcccggctctcgtcagcctcccgccggccgtctccttaacaccgaacaccatgccttcaattaagttgcagagttctgatggagagatatttgaagttgatgtggaaattgccaaacaatctgtgactattaagaccatgttggaagatttgggaatggatgatgaaggagatgatgacccagttcctctaccaaatgtgaatgcagcaatattaaaaaaggtcattcagtggtgcacccaccacaaggatgaccctcctcctcctgaagatgatgagaacaaagaaaagcgaacagatgatatccctgtttgggaccaagaattcctgaaagttgaccaaggaacactttttgaactcattctggctgcaaactacttagacatcaaaggtttgcttgatgttacatgcaagactgttgccaatat

SEQ ID NO: 19461 - DNA, 496 bp, Homo sapiens
  misc_feature (1)...(496): n = A,T,C or G
atttgacccccccnttnnnnnnnnnaatagaccccgcgctgcaggaattcggcacgaggcaaaatgcacaggtcaccagagccaaggcagcaaggcaaggagcccggcttctaaggaactctgagcaggtgtggtccatggctgggaggcagctggccccacagcacatagcacggagggcggcgcggagtcctggacgctcttggcaggtcccctcatggaggatgtgggggattggcttaggcctggtctggctggccttcctggaccgcagtggccaggagctgaaaaccgtgaccccagtctccctgcagctgttcttgatgggatttctgttcgccagtcagatgcatttgcnnnnnncttggatcctgaactgtgtaacctggagaggcaggtgtgagcgggccatgctgctggcccagcctgtgccggngtctggttctgttgtctctcggnccttctgtgagccctcagtaaagctcttcgtgcttca

SEQ ID NO: 19462 - DNA, 460 bp, Homo sapiens
  misc_feature (1)...(460): n = A,T,C or G
nattgccncgccttgaggaattttgcacgacggtccccaagcttgccaaccacagagcgccccgaagtcaccgtcatcccagcccctggccttcctgccgccctccggggccatggcgctgctgttcagctcaggcacaggggcacagcagaggtttgggaagcggtctccccaccggcactgggattggcgggtccaagcccagcaaccggcttcgctccacaacacacaccacacctgggactgtttttaatacatagcaacagactgggttatttatttaagatgtgtattgtgtcatatgaagtttaagagacataaatggcattttgttatttattaagacaaactccaattgttctctggctgtttttttcagttgtgtctagcaaaatacttatctgccctttgaaataaaatgtttttgtttaaaaaatctcagaaaaaaaaaaaaaaaaaa

SEQ ID NO: 19463 - DNA, 471 bp, Homo sapiens
aattagacagcccgtttgaccgcgttgcggaattccgcacgaggagagagaaatagagcgatagcgaccgctagcgaaagagagaccgatagagacagatgtggcgctatgcttacgcgctatcaccaatctggtcgcagcagactgcgcccttacacaaaatgacatcaaaaaaatcggagccttctccacttcaagtcaactaggactcataatagttacaatcggcatcaaccaaccacacctagcattcctgcacatctgtacccacgccttcttcaaagccatactatttatgtgctccgggtccatcatccacaaccttaacaatgaacaagatattcgaaaaataggaggactactcaaaaccatacctctcacttcaacctccctcaccattggcagcctagcattagcaggaatacctttcctcacaggtttctactccaaagaccacatcatcgaaaccgc

SEQ ID NO: 19464 - DNA, 463 bp, Homo sapiens
  misc_feature (1)...(463): n = A,T,C or G
attagacagcctcttgaacgcctgtcggaaaacacaccattaggagaatttattcagacatccatgctgagatagtctaatattttaaaaactgatttccaggatcattcgctccattttaaaggaaatgcagttctattttgaatataattcaggacagggccccagctctctgatttatgcaaaaggacataaattcacaaacctgcctgggctatttttatatttcagcaagaggttgtgtgcagctgctgtttctggcaaaataaaaaaatagcgcaagtgaaaagtgaacgggaacgggaaggagcgtcattttttcttgatcaaatccatgagatcgtcttctattcctttctcactcagctcatctagactgtagtatcggngaacaattttctcggcggtgaccaccacgactcggagcccgtgggggtctctgcccagctggcatccaatggca

SEQ ID NO: 19465 - DNA, 497 bp, Homo sapiens
  misc_feature (1)...(497): n = A,T,C or G
gggaagggcacgggngnnnnnnnnaatagancgcctatagattgccgtcaagaccccccacgagccaagattggtttcccttgagtttttgctaaaacaaatcttagtagttttgcccgtttaaaacaactcacaatcgtaaatgctactattcctaagatatcttacctttttatttcagtttagccatgtattgtatgagtgtattagtctaagcagtgagaatcttttctatgcctctattccagcaaaaagtagaagtatcaaataaaaagggcaacttttaaaatattaagcctgaagacttctaaaaagacaagaaacatggcctaaataaccaacatagatttacatagtaagtttcacactaccttattaccaaaagcaaacacctcttactttaaactacattatcatgtatatctattgtatgctggtctttactttttgccaaaatcaacatataatgaagagatgcctttgtttcatgagattcn

SEQ ID NO: 19466 - DNA, 498 bp, Homo sapiens
  misc_feature (1)...(498): n = A,T,C or G
aggggagnnnnnnaatcgcctgcatgcacgaattcggcacgagagagaatccacactggtgagagaccctatctgtgcagacagtgtggaaaaagctttagtcagctttgtaatcttattcgacatcagggtgttcacacaggtaataaaccccataaatgtgatgaatgtggaaaggcctttagccggaactcgggtcttattcagcatcagagaatacacacaggagagaaaccttataagtgtgagaagtgcgacaaaagtttcagtcaacagcgcagtcttgtcaaccatcagaagatccatgcagaggtgaaaacccaagaaacccatgaatgtgacgcttgtggtgaagcctttaattgccgtatttctcttattcagcatcagaaattgcacacagcatggatgcaataaatgtagagcaatacataagctcaatttgatttgagactagtacccaagtgcagttgtagtatggctcaacatgggtcagat

SEQ ID NO: 19467 - DNA, 467 bp, Homo sapiens
  misc_feature (1)...(467): n = A,T,C or G
aatagacagcctcttgcaccgcgtgcaggaattcggcacgaggacgaatgatgacaagacaagcgaagatcagggccaattggacagaaaggctctggaaaaggtccggaagcaaatcgagtccatatagctacattccacccttgtatcctgggtcttagagaccctatctcagacagtgaaagtgaaatggactgatttgcactcttggttctttggagccttgtggtggaatccccttttccccatcttcttctttcagatcattaatgagccgaanaaaaaaaaaaaaaaaaaaaaaaaaaaaaaaaaaaaaaaaaaaaaaaaaaaaanncctgggggggggggccggcccccccccccccctttgggggggggtttaaaaattccgggggcgggtttttaaaacgggggggggggggggaaagnnnnnnnnnnnnnnnnnnnnnnnngngnngnngnngggg

SEQ ID NO: 19468 - DNA, 496 bp, Homo sapiens
  misc_feature (1)...(496): n = A,T,C or G
gagggttnannnnnaattganncccattgatcgccttcggaattcgcacgagctatggcgtggacagacttaacattccacagcacggctgaaagccctggacctctttcccttgcacccctaattcatggtgataaaaccaaaacatggtgaattaggttattagaaggttggaacatctctgaagctcaaagccctcttatggctatgtgaaggcatacgtggaggcatacgtactccaccctgaagcttctccttcaattttaatgttaatcttaccaagcgacagctttcatcctggttaaggcagctcggtgtgtgtaaaagcagcctggcctgttaaacacaatgccgttaaatcaaactgcctttctttttttttttttaaagtttctttttcagacctgccaactggggggtagagaaaccaaagacaatgttttcaaaaggcctttggcttttttaaaaatttcaaacgaggatggtagttaatcgg

SEQ ID NO: 19469 - DNA, 502 bp, Homo sapiens
  misc_feature (1)...(502): n = A,T,C or G
aggggnnnnnnnnaagggagngcccnagggggcnccctactgaccgccttctgaattgcgccgagattcccgaggcattaagaagaaaggatttaatcccttcaatttggggcttaatcttgtttaaaaaaatgtaagtgaagatggaaggctggagagaatgattgctttttgtacagttaaataaggtcacaatattcttacatactttgttttacaactgtgttttcattttttcaaatgtctggccatttagcaaagttatttactatttactgtgtacatagaaagctttattatgtgtggtgtatctaaatttttttgctgaaatacattatggtcaatcaagccaagcctgcatgtacagaatttgtttttttttcaaataaattagttgttttcttatttttttggcttagtatgttgaaataaactatggtatcttcatcattttgtacatttcctttttgaggaaggtttctttataagtgcaagggctacc

SEQ ID NO: 19470 - DNA, 494 bp, Homo sapiens
  misc_feature (1)...(494): n = A,T,C or G
nggggcacatgctcggctgtggattgcggcacgaggganaagcggnggccatacatggtgacgcgcgcaccctccattcaagccaagctgcagaagcaccgggacctggccaaggccgttctgcggagaaaaggcatgctgggggcctcgccgaaccgcccagactcttcagggaaaaggtcagtgaagtttaacaagggctatactgctcttagccagagtccagatgaaaacctggtgtccctcgactctgacagtgatggggagctgggatccagatactcctccgggtattcatctgcagagcaggtgaaccaggatgtgagccggcagctgcttcaggatgggtatcacctggatgagattccagatgacgaggacttggacctcatcccccctaagcccatggcctcttcaacatgctcctgctgctggttgcacctgtctaactatgacagggatcatagcaggttgcttaatgatacagcaggatc

SEQ ID NO: 19471 - DNA, 457 bp, Homo sapiens
  misc_feature (1)...(457): n = A,T,C or G
ggggcgcnnaattgancncccctgnttagtacccggctgcaggaattcggcacgagttttctttgctgtgggacaacagtgaatgtgtttatgccagcgtgtgctgatgatactgaggggctttaggttggcaaatagcactgttttcttagctgcaagaattcattgcacaatgtttttcatcatttttgttaatgtcatctttttttggtccttgctacgaaaaggaatgcgattctgtggtcattcgcactgggttgcattgattccccctctgatggccaatgtggagtggacaaagtgtccggaactcacatcggtgatcgtcccctcgtcttaagacccagcccgctctgtgtgagcctctggggctccctcgctcagtgagcacagttccccgggggttcatgccagagctccggctgaagcaagaagtcctccagctgcgtcgtttgcc

SEQ ID NO: 19472 - DNA, 486 bp, Homo sapiens
gggtgggcccctttgcccgcctgctgactccgcgctgaggaattccgcacgagcacgacattgccagccgctgtaccagagagaaaagcgagtcctcaagtggctagcattaacaaataaattcttagccagagagagacacacattacttcagctcacaactcactggcttgagctaaccagaagtcccagccacctacaaggaggccaggatgtgcagtcctaccttaggcccagtagacagagagccgcaggcattcagtgagtagcccacaaggaggctttcatctgctggggtcatgatggattcgtatcttccccctctagttgggaaactaaagcaccagttacagaaacctgaaatatatcgattttccattcatttaacaaatatttattaagcactgctgtgagtaaggccatgctggtggttgtagatacaatggtgaccagatacagtccttccttcaaagagctcccagtcta

SEQ ID NO: 19473 - DNA, 507 bp, Homo sapiens
  misc_feature (1)...(507): n = A,T,C or G
agggnggggnnnnnaatttgcccccggcttcaggcatcgcgctgcaggaattcggcacgagggaacccggtccctcctgggacccttccagtagattggatttcactccatggactcctcctcccctctccccctccccctcaggggagccggcagagccaaacaaagaaagagattaacaagaaaggaagaagctgtaggactaaggactgaggatcctggggtgtcccccaccactttcccctgccctgtcgcaggggcaagtgaggagggggaatccagaattaaggcctagcaggcctataggaaccctcagagatgtgtgagatttaagagatctagatttttttttaaccaannnaaaaaaaaaaaaaaaaaaaaaaaaaaaaaacttgggggggggggccgggccccaattccccctaaaggggggggaaaaaaaattccgggggcggggtttaaaaagggggggggggggggaggnnnnnnnnnnnnnnnntnnntntg

SEQ ID NO: 19474 - DNA, 498 bp, Homo sapiens
  misc_feature (1)...(498): n = A,T,C or G
agggcngcncncaattgaattgcaccgcctgcaggaattcggcacgagcccaagtgggccagcagctgtgcaagggtgcagcagtaggctggtgaaagccaggttgtccagatctttctaggggaagagaaggattatagaaaaggagaaaagggaggagcaagaacatctctccatggcctatttttatttttgttcccaagagactagtgtaataaccttatgcccccaaagacagcccagaactgagtatcttcagtgttcctgagtgtaaatcagtgaatctgttatatagaaagttaacatttcaggagcacaattatttcctgatttcaaatatgaacagaagactaaatgtcatttttttaaatcataaatttggtatccatagttactttacacattccagagtctaagcatggaaattaagttttgtattttgaacaaaaatagcaacatctgttttctgtatggcaaagaaaaactaaatcccagact

SEQ ID NO: 19475 - DNA, 448 bp, Homo sapiens
  misc_feature (1)...(448): n = A,T,C or G
nattgccngtggtgcagcaattcggcacgagcctgcacccaggggcactggcatcgtctgcgcacctgtgcctaataagctgctcatgatggctggtatcgatgactgctacacctcaacccggggctgcactgccaccctgggcaacttcgccaaggccacctttgatgccatttctaagacctacagctacctgacccccgacctctggaaggagactgtattcaccaagtctccctatcaggagttcactgaccacctcggcaagacccacaccagagtctccgtgcagcggactcaggctccagctgtggctacaacataggggttttatacaagaaaaatatagtgaattaagcgtgttaaaaaaaaaaaaaaaaaaactcgagggggggcccggacccaattgaccaatagaaaggctgtaagattgactggccgcgttttc

SEQ ID NO: 19476 - DNA, 471 bp, Homo sapiens
  misc_feature (1)...(471): n = A,T,C or G
ggttgccgcctgggaancactgaccgcctgcaggtgcggccttcgggtgccatggggactcctcccggcctgcagaccgactgcgaggcgctgctcagccgcttccaggagacggacagtgtacgcttcgaggacttttcggagctctggagaaacatgaagttcgggactatcttctgtggcagaatgagaaatttataaaagaacatgtttacgaaagaagctttagctttggcttggcgatattttttacctccatacaccttccagatcagagaaggagctttgtatctgctatatggatcatataatacccaactgtgtggaccaaaacaaaagatcagagttgccctgaaggattgggatgaagttttaaaatttcagcaagatttagtaaatgcacagcattttgaggcagcttatatttttaggaagctacgactagacagagcatttcactttacagcaatg

SEQ ID NO: 19477 - DNA, 453 bp, Homo sapiens
  misc_feature (1)...(453): n = A,T,C or G
nttttgcccctgcgctgcacgaattcggcacgaggaagatggcggacattcagactgagcgtgcctaccaaaagcagccgaccatctttcaaaacaagaagagggtcctgctgggagaaactggcaaggagaagctcccgcggtactacaagaacatcggtctgggcttcaagacacccaaggaggctattgagggcacctacattgacaagaaatgccccttcactggtaatgtgtccattcgagggcggatcctctctggcgtggtgaccaagatgaagatgcagaggaccattgtcatccgccgagactatctgcactacatccgcaagtacaaccgcttcgagaagcgccacaagaacatgtctgtacacctgtccccctgcttcagggacgtccagatcggtgacatcgtcacagtgggcgagtgccggcctctgagcaagacagtgc

SEQ ID NO: 19478 - DNA, 512 bp, Homo sapiens
  misc_feature (1)...(512): n = A,T,C or G
atgggnnnnnnnnnnattgattggctgtacgtgggactgcctggccgacgtggacaccaagccagcttaccaaaacctgaggcagaaagtggataattttgtgtcaacacatctggacaagcaggaatggaatcctacgatgaacaaaaaccagttgcgaaatggtctgaggcagagtgtggttcagtcagggatgttggaagctggagtagacaggattatttctcaggtggtggatccaaaacttaaccacatcttcaggccacaaatagaacgagcaattcatgagttcctggcggcccagaaaaaagcagctgtgccagcaccccctccagagcccgaaggccaggaccctccagctccatctcaagacacttcctaagaatacgccagacaccttttgaaagctaatttttggtgaagaaatggattcggctacataagagtgcaacttcagactgaagataggccaaggtcgtcactgatctcaagatttcaaccttgaccatggg

SEQ ID NO: 19479 - DNA, 452 bp, Homo sapiens
attaggaactcgcccccgcgctgcaggaattcggcacgagctgggtgatgtctgtctgctgccaggatggagcagaggagcgccacacatggaggaaagcccctgtaacgttacctaccttaaactccactcatcaaatctgagaaaagtatccactggtccccagggtttcagtcatgcttttgggggtcattgggtattagagaagtaagtatcttttctgagagagggggagtcaccccccctactggggattcctctgggctttattcactcccagccctggccctgacctttgtgggcctccctaatgcccagggcatggatggcttcagaggagtttttgaatcgaagcccagggtccttgttgatgtttcttctccgagccacacttggaggaaagttgcaggtgggttgggcagggagcaggcatggttctgctttgctggttg

SEQ ID NO: 19480 - DNA, 496 bp, Homo sapiens
  misc_feature (1)...(496): n = A,T,C or G
tggggtgnnnnnnaatcgcctgcctgtacgattcggcacgagtgggcatctctcgggacaactggcacaagcgccgcanaaccgggggcaagagaaagccctaccacaagaagcggaagtatgagttggggcgcccagctgccaacaccaagattggcccccgccgcatccacacagtccgtgtgcggggaggtaacaagaaataccgtgccctgaggttggacgtggggaatttctcctggggctcagagtgttgtactcgtaaaacaaggatcatcgatgttgtctacaatgcatctaataacgagctggttcgtaccaagaccctggtgaagaattgcatcgtgctcatcgacagcacaccgtaccgacagtggtacgagtcccactatgcgctgcccctgggccgcaagaagggagccaagctgactcctgaggaagaagagattttaaacaaaaaacgatctataaaaattcagaagaaatatgatgaaag

SEQ ID NO: 19481 - DNA, 444 bp, Homo sapiens
  misc_feature (1)...(444): n = A,T,C or G
aggggnngnncnntttcgtttgcaccggctgcaggaattcggcacgaggtcaagctcaccgttgtgcgtggcaagtacgactgtggccacgtgcagaagaagtgacggctgggggcacagtgggctgggcgcccctgcagaacatgaaccttccgctcctggctgccacagggtcctccgatgctggcctttgcgcctctagaggcagccactcatggattcaagtcctggctccgcctcttccatcaggaccactattaagccataggagtcctgggggtgcaaagggtgcccctctgtcaacacccttggctcctgtgtttagaggggtggcctgaaggaccttttctgctgggacaagacactgtactgccctctgctgggaaggggttttaataaacagaccctggcgcttgtgatgtaaaaaaaaaaaaaaaaaaaaaa

SEQ ID NO: 19482 - DNA, 532 bp, Homo sapiens
  misc_feature (1)...(532): n = A,T,C or G
ggggnnnnnnnnnaagggagggccnngnnttttgannnccaatagatcggctgtangaattcggcacgaggggaagtatgcattagccttcccattttgcagttgaggaggctgagtagcctcagaagggtttaggcgaccttctgaaactcacagaagtcacgtgatggagagaggattcaaagccagggcctcagaccctcacacacttgtctgtgctatgatgtatgcaggatcccagcattgatacccaatgacaaactatggagaacaagcaaagtatgcaggccccctgcagcctcccaggacaggctggcaagggaggagggccggccagcatttggtgggccatcagtctggccatctgtcacgtcacagaagcaaaccgtgccttctggctctgcgccccatattcccagcatcatagacatccaacagcaccagcaggagagtgggctagcctgctggatgctgttcgtgcctgtccctgctctgcctcccacccagttgcctgaatcatcccagctcagat

SEQ ID NO: 19483 - DNA, 496 bp, Homo sapiens
  misc_feature (1)...(496): n = A,T,C or G
ncctagacccgcgctgcaggaattcggcacgagattactagttgtattatttatcctatgattcattcattcaataagcttttactgcataaactttacatccagcactgtagttaagtacccaaaattgaatagaaataatggcttttgaaaattgcacaaagcatgccaggcacggtggctcacgcctgtaatcccagcactttgggaggccgaggcaggcggatcacgaggtcaagagatccagaccatcctggctaacacggtgaaaccccgtctctaataaaaatacaaaaattagctggacatggtggcacgtgcctgtaatcccagctactcangaggctgaggcaggagaatcgcgtgaacccgggcccggtggaggctgcagtgagacgagatcgtgccactgcactccagcctggcgacagagcgagacaccgtctcanaaaaaaaaaaaaaaatatggcgcaaagcataggaaatattttccttt

SEQ ID NO: 19484 - DNA, 394 bp, Homo sapiens
  misc_feature (1)...(394): n = A,T,C or G
naattgannccttgtcgngcgctgcaggaattcggcacgagcccagcgaccgggagcctgagtgcacgcagcccgagcccacgggcgactgacagctctgcaggagagattgcaacaccatcccacactgtccaggccttaactgagagggacagaagacgctggaaggagagaaggaagcgggaagtgtgcttctcagggaggaaaccggcttgccagcaagtagattcttacgaactccaacttgcaattcagggggcatgtcccagtgttttttttgttgtttttagatactaaatcgtcccttctccagtcctgattactgtacacagtagctttagatggcgtggacgtgaataaatgcaacttatgttttaaaaaaaaaaaaaaaaaa

SEQ ID NO: 19485 - DNA, 495 bp, Homo sapiens
  misc_feature (1)...(495): n = A,T,C or G
aggcagngcccggcagncccccaattgaaaacctatagtaccgcntgtcggaattccgcacgagcctaccccaagcccgtgcgagtgtgcgacagctgccacaccctgctcctgcagcgctgctcctccacggcctcctgaacgtccgtcctcaggagcacagcctcacggacagtgccaaaccctgtgggtctccaggggcttgggaaatgtgttctttcccaagagaatcaaaggaaagaatcaaatttcttgcccggtcactggcactccagaagacagcgtgccggaaccggcagctctcacctttctgtgacttgttcggaattaactcgtctggatggaaacttccatcttacttggttacatcacggctctggttcagatacaacttcatgattttgctactatcatttttcacttttcaaagaatttaacctattttacagcagttcagttctgctagtgagtagttttcctctcctaccttccttc

SEQ ID NO: 19486 - DNA, 514 bp, Homo sapiens
  misc_feature (1)...(514): n = A,T,C or G
ggggtnnnnnnaaggatggnnnnnnaattgannnncatcgatcgcctgcggaattcggcacgaggtgcccagggtggtgacagttgaacaaagtgtatagtacgtgcccagtggtagcgatggaaaaaagtataccaaatggactttgaaggaccaaaggttttaaaagtcaattggtatcacctccacactgactagggtagtggggtgcatttggttttcaaattgggtacttttaacactttagtgcctgactgctgttctttactgacttgattcagtcactcgtagctttattggtgtgaaccaactacttgttcccaggttacagacctgcctatcggtccaataatcctgtttcacttgaatgaagggagtatgtcttaaatgtaaaggttgtggttctcacactgtactctgaggtccaaatactgtctgtcaatgtgtaacctgatgtctcaaccccctgtgagaaagagccattatttggtgtcaccaacgtgggagacttcac

SEQ ID NO: 19487 - DNA, 510 bp, Homo sapiens
  misc_feature (1)...(510): n = A,T,C or G
tcggagggattttatatatgggggttatananggggaaaaaaaaggattgaanncccattttgacccgcgctgcaggaattcggcacgagagcaggcgctggtgctccttctgcctcatgggaccagtccagcttccagccgctctggctcgagggtggtctgagcacttccttctgagtgggcttctctgggagctctccagtggcactgctggacctgcccacgtttctgtaaaatcaggatacgtggctttagtaagcagaccaagcgcttcgtggcagggaaagcagcgtgcggggaagtcactgaaaagtgctgcctaaggaagtttggaaatagtccccgttccagattgccttgaattttaaaacattttgctttgggaaagtaggtcagcagcacctaagatcaaggatgcgttccattttcacacttcacagtcatgaaaactgagaagactgtcttcagcgtgaactaaagttcacaggcagatcactgatccagaacac

SEQ ID NO: 19488 - DNA, 477 bp, Homo sapiens
cgattggcaccgcgctgcaggaattcggtacgagcccagtcagacaagccagccgagaagaaggaagatgaaagccaaatggaagatcctagtacctccccctctccggggacccgagcagccagccagccacctaactcctcagaggctggccggaagccctgggagcggagcaactcggtggagaagcctgtgtcctcgattctgtccagaaccccgtctgtggcaaagagccccgaagctaagagcccccttcagtcgcagcctcactctaggatgaagcctgctgggagcgtgaatgacatggccctggatgccttcgacttggaccggatgaagcaggagatcctagaggaggtggtgagagagctccacaaggtgaaggaggagatcatcgacgccatcaggcaggagctgagtgggatcagcaccacgtaaggggccggcctcgctgcgctgattcgtcgagcccatccg

SEQ ID NO: 19489 - DNA, 512 bp, Homo sapiens
  misc_feature (1)...(512): n = A,T,C or G
aggggngnnnnnnntttgatcgctcggctgcangaattcggcacgagccgcggtggcggttgctatcgcttcgcagaacctactcaggcagccagctgagaagagttgagggaaagtgctgctgctgggtctgcagacgcgatggataacgtgcagccgaaaataaaacatcgccccttctgcttcagtgtgaaaggccacgtgaagatgctgcggctggatattatcaactcactggtaacaacagtattcatgctcatcgtatctgtgttggcactgataccagaaaccacaacattgacagttggtggaggggtgtttgcacttgtgacagcagtatgctgtcttgccgacggggcccttatttaccggaagcttctgttcaatcccagcggtccttaccagaaaaagcctgtgcatgaaaaanaagaagttttggaattttatattactttttagtttgatactaagtattaaacatatttctgtattcttaaaaaaaaaaaaaaaaa

SEQ ID NO: 19490 - DNA, 503 bp, Homo sapiens
  misc_feature (1)...(503): n = A,T,C or G
gggaggccctttcacggctgcggaaatcgaccggctgtangaattcggcacgagcgaaaactatgaccccccctggttgcccctgacctctcaatgttggaacaagccacaaccgtggagttatccttgatgactccccattcattatcccttctgtcccaccaccacagctgtcatctgttcaccagaacgttcttttggttacactccatgtgacatcctgaggctgttgcttctctccagcttttctgttaccatcctggtcctggctactgtcacctagtgggccactataatatggcttcctaatggatcttcctgcttcctctgttgcctcattacttttctatatagcagaatgatcttttgaaaatgtgaaccagatcacattattccctagttaaaaccccccaaggcttcccatcacacttggaataaaatccaaaagaatttttctaaaccaaaaaaaaaaaaaaaaaactcgggggggggcccggacccca

SEQ ID NO: 19491 - DNA, 453 bp, Homo sapiens
  misc_feature (1)...(453): n = A,T,C or G
ggtgtccnnnattanaatacgacgcgtgcatgttcgcacgagaaagcttctggcagaaatgaagatgaaaaaggatttatttcctgttgggagagaaattgctggaattgtattagatgttggaagcaaggtatcattctttcaaccagatgatgaagtagttggaattttgcccctggactctgaagaccctggactttgtgaagttgttagagtacatgagcattacttggttcataaaccagaaaaggtcacatggacggaagcagcaggaagcattcgggatggagtgcgtgcctatacagctctgcattatctttctcatctctctcctggaaaatcagtgctgataatggatggagcaagtgcatttggtacaatagctattcagttagcacatcatagaggagccaaagtgatttcaacagcatgcagccttgaagataagcagtg

SEQ ID NO: 19492 - DNA, 508 bp, Homo sapiens
  misc_feature (1)...(508): n = A,T,C or G
agcggatnnnnnntttgcctggctgccgtggaaatctatgcaaactctaaaaaaagattacaggttggtagaatacttgcaagctatgaggaattttttcttaatggaaggaggagataccatgtatgacttctacacgtcaatttttgataaaataagagaaaaggaaacatggcagaatgtgtcttttcttaatgtccaactccaagaagcagtaggacagcgttatcctgaagatagttcacggtaaaatatggacgccacctttatttaaattagtgtaacatgaactatgtgccagtaagtcttctatggattacacatattattttatcctcactattcctatgagttttactaatattattttacttattagaaaatggaggccgggcacggtggctcacacctgtaatgccagcactttgggaggcagaggcggtggatcacctgaggtcaggagttcgagaccagcctggccaacatggtgaaactctgtctctactan

SEQ ID NO: 19493 - DNA, 472 bp, Homo sapiens
  misc_feature (1)...(472): n = A,T,C or G
cggtgttatnaaccctgcnagcatccgaaatctttacgagaagaaacatagcagcgatggtattcgatctgtgccatgactcttctgaatgtttggacaggttagagttggggacccctgttggccacttgttgacctctcatagtggtgcttgggccaggtcttctcaatggaaggggaatcccttataggggagagggaacagagcccagtgaaatggcagtcagaatgttaaccctggatccatctctaagtagagagagggtgcccattgcctaggtgagtgtgccaagctcaggattccaactggtgcctctgagcttcccaatcaatacttcctggagccagccccacccacccctgagaacagaggtcagacacagctgcgtaacatccatcctgctacaactcttccaccccaaacaaaagggctcaggctacacacgaccatgatttatgttttcaggggatg

SEQ ID NO: 19494 - DNA, 470 bp, Homo sapiens
  misc_feature (1)...(470): n = A,T,C or G
nnnaacactgatcgccnctagaatccgtccgagnccacgctttaggtatcaccactaaaatctgcaggggcaccattgaaatcctgagtgatgtgcagctgatcaagactggagacaaagtgggagccagcgaagccacgctgctgaacatgctcaacatctcccccttctcctttgggctggtcatccagcaggtgttcgacaatggcagcatctacaaccctgaagtgcttgatatcacagaggaaactctgcattctcgcttcctggagggtgtccgcaatgttgccagtgtctgtctgcagattggctacccaactgttgcatcagtaccccattctatcatcaacgggtacaaacgagtcctggccttgtctgtggagacggattacaccttcccacttgctgaacaagtcaaggccctcttggctgatccatctgcctttgtggctgctgcccctgaggctgct

SEQ ID NO: 19495 - DNA, 518 bp, Homo sapiens
  misc_feature (1)...(518): n = A,T,C or G
gggtgtncncnaggattgnnnnnnaattgatnngctatctgacagctctgaggaattcggcacgaggcggaggccgcacgatgcctggagttactgtaaaagacgtgaaccagcaggagttcgtcagagctctggcagccttcctcaaaaagtccgggaagctgaaagtccccgaatgggtggataccgtcaagctggccaagcacaaagagcttgctccctacgatgagaactggttctacacgcgagctgcttccacagcgcggcacctgtacctccggggtggcgctggggttggctccatgaccaagatctatgggggacgtcagagaaacggcgtcatgcccagccacttcagccgaggctccaagagtgtgggccgccgggtcctccaagccctggaggggctgaaaatggtggaaaaggaccaagatggcggccgcaaactgacacctcanggacaaagagatctggacagaatcgccggacaggtggcaactgccaacaagaagcattaa

SEQ ID NO: 19496 - DNA, 470 bp, Homo sapiens
  misc_feature (1)...(470): n = A,T,C or G
nattgaaggccccttgaccgccntgcggaagacacgcggacggcgctctgcgatccaaggcacactggggtctttcatccggtgtttttaaaaaggaggaaacaaaaggctcacaggcagggccccaggtgcgctcgcccgcgggggctgcggcgcggacgaccgaagaaaaccacgacttcctggaaaagtcttcaccgtaaatattaatctctttggcatgaagaggaaaacactgcagctaatttttcatgggataacaaaaatataaactgcaatttcttttattttttccctttcgatggtctttttaaacgaggagtaaagatttcaacgccaggtccattttccaaattttgtaccataaccttgaggatgcttgtctctcgcgcgcttctacgcagaccgaaccctctcacgaactcagagctgttcacccaagtcagcggaggaggcctcctgggacttgg

SEQ ID NO: 19497 - DNA, 489 bp, Homo sapiens
  misc_feature (1)...(489): n = A,T,C or G
tggacggacggggccgccttgaaatccctaaactagagtcctgactgaattcggcacgagaccaatttctggcctgttcaggagcctcagataagtatttgtacttgagaccacctcacacaatctgtatgggcccaaccctgatctcaaacctccttccctctgcccaaagctgtccttcctatggcaggaggggtgggggtcccaggacgtgcctcatacatgacttgagcttgtcagtccactgagtttccttctacgagatcaacgcgaggggcctgtatcttgaattaaaacctactcgcttcctttctnaaaaaaaaaaaaaaaaaaaaaaaaaaaaaaaaaccctgggggggggggcgggcccccaattcccctttaaggggggggataaaaaattccggggccggggttttaaaaccgggggggggggagaaaaannnnnnnnnnnnnnncctgnntntngtgngatggtgttggtaacag

SEQ ID NO: 19498 - DNA, 461 bp, Homo sapiens
  misc_feature (1)...(461): n = A,T,C or G
agaactcgacccgcctgcaggcttctgtgttgaccacttgggaagctaaggctctcaaaacgggcatcacccagttgacccatctctcagcctctctgagcttggaagaagcctgttctgagcctcaccctatcagtcagtagagagagatgtccagaaaaaatatctttcaggaaagttctcccctgcagaatgttttttccttggtaaatatcaggaatataggccgggtgcgggggctcacacctgtaatcccatcactttgagaggctgaggcgggcggaacacctgaggtcaggtgttcgagaccagccaggccaacatggtgaaaccccgtctctactatgaatacaaacaaaaatgagccgggcatggtagcaggtgtctgttatcccagctaggaagctgtggccagagaatctcttgcacctgacatgctgagggtgcagagagccaagatn

SEQ ID NO: 19499 - DNA, 472 bp, Homo sapiens
  misc_feature (1)...(472): n = A,T,C or G
ngagtgtctcancgctgatgaattcggcacgagtttaaaccatgcagctttattactctcctcccccaaagaatgtagtttgaaattttctcatttccatagtagaggccctaactgccattgtattactaataatgcaacatgaaattgaaggtgcctaactgctcaaaaaacaaaatcagccatcatactgtaactctgagaggaatgagaggtggcacaggcacgagtgggctcaccccgtgtgagtgaggagaactgaggaatcctanggtgcgcatcctgcatcctggctgcacgtttgctgcagagtatgtttttctttcttgcctcccttcagaaatcttcacttgcgttcagtgtatcttctggaaccaatagtgccctgtgttctcaagtctctaaaatgctaagatctgagcaaagtcaagcagcttacactaggcttttttacagctgtgcttgagaacat

SEQ ID NO: 19500 - DNA, 482 bp, Homo sapiens
  misc_feature (1)...(482): n = A,T,C or G
ccccgccgcnccggattgaatcccaactgaagggctgatgaatncgcacgaggaactgatgcattatgtattagccaagtagagggcacagtaaggatgttcagtgtctacttcaagttactcctctcacccccctccacccccgcaatcgccagacatcttgggaaaagagtcattcagcccctcatttggggcgtgctagttctgtagacagtgacagaaaagctattgcacaaccaattctggatattgggttcattcttgtgccaaataaattttggttaagggagtatatgtggccttcaggtgagggaaggagaacctgcgtaggggctgggggctcagagtcctctcctcctctgcctccccgaagagccctggagctggtggttgtgcagactccatttggcctgagtgactgctcctgacagtgttcagccacacgccgttggactgccgccagaggcctttggaatcttggt

SEQ ID NO: 19501 - DNA, 485 bp, Homo sapiens
  misc_feature (1)...(485): n = A,T,C or G
agggcgtgngnnnncnaaattgacgnccctaactgagnagtctaggganannncacaaagnaaagaagnttggccaaatgtgcatgagaagatcagagctatttatgcagatctcaatcagaatgactttgccatcagcaaagaggacatgcaggagcttctctcctgtacaaacataatatttcactgtgcagccactgtacgctttgacgacactctcagacatgctgtgcaacttaacgtcactgccacccggcagctcttgcttatggctagtcagatgccaaagctggaagcctttatacatatctctactgcctattcaaattgtaacctgaagcacatcgatgaagttatctatccgtgccctgtggagccaaaaaaaatcattgattcccttgagtggttagacgatgctattattgacgagattacacccaagctgatcagagattggcccaatatttatacctacaccaaggcct

SEQ ID NO: 19502 - DNA, 472 bp, Homo sapiens
  misc_feature (1)...(472): n = A,T,C or G
naattggaccgcgctgcaggaattcgatcggagcccatcagcatgtaaggtgaataataactggttttgccagacagcaggttgtctgaccttcaaccactgggcaattgcctggcagatgcacacagtagctccctggcttctggctctgagtgttcctctcagcacctctgagtaagctgctgccaagcacatatccctatgacaacactttgtaaaagccgcggggcccccatacagcgagtgaccttgcaactgtgcagggttgccattggtcactttctcaccttgggaaggtgtcagtgttttcagttctaaggtaagaggtgtagagctgttcccaccagggctctgggacagactggaaaggaccacagacctggccatccctgggcagcagggccagtgtcacctgctgacctctagtatttcctttgccctagagctagagtcatgatagctgagggtcact

SEQ ID NO: 19503 - DNA, 480 bp, Homo sapiens
  misc_feature (1)...(480): n = A,T,C or G
cggcgtcgggcccactgaatccancctaggggngccagcanangcacgagaacaangctgagtgctgcacaagagcagtttggtggtaatccatttgcttccttggtgagcaatacatcctctggtgaaggtaggcaaccttcccgtacagaaaatagagatccactacccaatccatgggctccacagacttcccagagttcatcagtttccagcggcactgccagcactgtgggtggcactactggtagtactgccagtggcacttctgggcagagtactactgcgccaaatttggtgcctggagtaggagctagtatgttcaacacaccaggaatgcagagcttgttgcaacaaataactgaaaacccacaacttatgcaaaacatgttgtctgccccctacatgagaagcatgatgcagtcactaagccagaatcctgaccttgctgcacagatgatgctgaataatcccctattt

SEQ ID NO: 19504 - DNA, 494 bp, Homo sapiens
  misc_feature (1)...(494): n = A,T,C or G
tggagatataataatgggggtataaagggaagaaangtttgatcgcctgtggaanccgctcgaggactatatccacaccgcagcctgcttacatagcctggctttagaagagcccacagtcatcataaagtacctattgaaggttgctgagctatttgaaaaactaaggaaagtagagggtcgagtttcatcagatgaagatttgaagctaacagagctcctccgatactacatgctcaacattgaagctgctaaggatctcttatacagacgcaccaaagccctcattgactatgagaactcaaacaaagctctggataaggcccggttaaagagcaaagacgtcaagttggctgaggcacaccagcaggagtgctgccagaaatttgaacaactttccgaatctgcaaaagaagaactgataaatttcaaacggaagagagtggcagcatttagaaagaatctaattgaaatgtctgaactggaaataaaan

SEQ ID NO: 19505 - DNA, 466 bp, Homo sapiens
  misc_feature (1)...(466): n = A,T,C or G
ncctggaccgcgattgatcagcgctgcaggaattcggcacgagcgaacccctcgctgctggagcggcactgtgcctacctctaagccaagatcacagcatgtgaggaagacagtggacatctgctttatgctggacccagtaagatgaggaagtcgggcagtacacaggaagaggagccaggcccttgtacctatgggattggacaggactgcagttggctctggacctgcattaaaatgggtttcactgtgaatgcgtgacaataagatattcccttgttcctaaaactttatatcagtttattggatgtggtttttcacatttaagataattatggctcttttcctaaaaaataaaatatctttcttannnaaaaaannnnnaaaaaaaaaaaaaaaaaaaaaaaaacttctggggggggggccgggccccaattccccttttgggggggggttttaaatttcc

SEQ ID NO: 19506 - DNA, 492 bp, Homo sapiens
  misc_feature (1)...(492): n = A,T,C or G
attgcccgccttgangaattcggcacgagccggccagggcagggggctcgttgctgtggcaccccctctctgccagcaccaagagattatttaatgggctatttaattaaggggtaggaaggtgctgtgggctggtcccacacatccaggaaagaggccagtagagaattctgcccactttttataaaaacttacagcgatggccccaccaaggcctagacacggcactggcctcccaggagggcaggggcattgggaatgggtgggtgccctccagagaggggctgctacctcccagcaggcatgggaagagcactggtgtgggggttccaccgagaaggggacctcatctagaaaagaggttacaaacctaccattaaactatttttcctaaaccgggggnnnnnannnnnnnnnnnngnnnnnnnnnnnnnnnnnnnnnnnnnnnnnnnnnnnnnnnnnnnnnnnnnnnnnnnaaaaaaaacccctgga

SEQ ID NO: 19507 - DNA, 502 bp, Homo sapiens
  misc_feature (1)...(502): n = A,T,C or G
ngagaggcanaatcgncggctgcangaattcggcacgagagatctcaggactccgtgtcatctccttcgccacagaagcagaagtcagcctcggccctcacctacactgcttcctccacatctgccaaaaaggcctcgggccctgccacaaggagccctttcccacctgggaagagcaggacttcagaccacagcttgagtagagagggctccagacaaagcttgggttctgacagagccagcgccacctccacctccaaacccaattcccctcgggtgagccaggcccgagcaggggagggcaggggggccgggaagcacgtgcggagctcctccatggccagcctgcgctcccccagcacaagcatcaagtctggtttgaagagggacagcaagtctgaggacaaggggctgtccttcttcaaatcagccttgagacagaaggaaacccggcgctcgacggatcttggcaagacagccttgctctctaaaaaggctggtg

SEQ ID NO: 19508 - DNA, 472 bp, Homo sapiens
  misc_feature (1)...(472): n = A,T,C or G
cgattgcccgcctgagttagctgtttcagatgaagctgaacatctccttcccagccactggctgccagaaactcattgaagtggacgatgaacgcaaacttcgtactttctatgagaagcgtatggccacagaagttgctgctgacgctctgggtgaagaatggaagggttatgtggtccgaatcagtggtgggaacgacaaacaaggtttccccatgaagcatggtgtcttgacccatggccgtgtccgcctgctactgagtaaggggcattcctgttacagaccaaggagaactggagaaagaaagaganaatcagttcgtggttgcattgtggatgcaaatctgagcgttctcaacttggttattgtaaaaaaaggagagaaggatattcctggactgactgatactactgtgcgtcgccgcctgggccccaaaagagctagcagaatccgcaaacttttcaatctctc

SEQ ID NO: 19509 - DNA, 480 bp, Homo sapiens
  misc_feature (1)...(480): n = A,T,C or G
ngattgaccgccntggngaanncaactgatccgcgctgcaagaattcggcacgaggaaggaactgggcatatgggagccattggctgtgaagctgcagacttataagacagcagtggagacggcagttctgctactgcgaattgatgacatcgtttcaggccacaaaaagaaaggcgatgaccagagccggcaaggcggggctcctgatgctggccaggagtgagtgctaggcaaggctacttcaatgcacagaaccagcagagtctccccttttcctgagccagagtgccaggaacactgtggacgtctttgttcagaagggatcaggttggggggcagcccccagtccctttctgtcccagctcagttttccaaaagacactgacatgtaattcttctctattgtaaggtttccatttagtttgcttccgatgattaaatctaagtcatttgaaaaaaaaaaaaaaaaaaaacttcgg

SEQ ID NO: 19510 - DNA, 502 bp, Homo sapiens
  misc_feature (1)...(502): n = A,T,C or G
gtgaggcccattcacggctgtggaaatcgaccggcctcggaatncgtgcgaggtccaaccctcggagctggcctcggactgctgaggcgctaccccttcggccacccccgctgaccatggcagcgtttcatgacgaggtggaaatcgaggacttccaatatgacgaggactcggagacgtatttctatccctgcccatgtggagataacttctccatcaccaaggatcagtttgtgtgtggagaaacagtcccagccccttcagccaacaaagaattagttaaatgctgaagaagccttcaggaatccaaatcctgaacatttggaatgagcccagatagaaatatcgaatgcaaagctactggcttcacagagacaaccatttatgatttgctgttctgtaagagtgtggattctttctatcaactgctgatatcatcttcaagaagcaagtccataacatgacatatctggattttgtgcttagaaccttaaattggaag

SEQ ID NO: 19511 - DNA, 458 bp, Homo sapiens
  misc_feature (1)...(458): n = A,T,C or G
nctgaccggctgagagcctgcagattcagccgagctgcctccagctagatatttcgtcctcttccgttcttcacccctacaccttggaggtgaacttctcacctgagggctgtaaagactcgtttgaaaatggagagccaagaaccaacggaatcttctcagaatggcaaacagtatatcatttcagaggagttaatttcagaaggaaaatgggtcaagcttgaaaaaacaacgtacatggatcctactggtaaaactagaacttgggaatcagtgaaacgtacaaccaggaaagagcagactgcggatggtgtcgcggtcatccccgtgctgcagagaacacttcactatgagtgtatcgttctggtgaaacagttccgaccaccaatggggggctactgcatagagttccctgcaggtctcatagatgatggtgaaaccccagaagcagctgctct

SEQ ID NO: 19512 - DNA, 505 bp, Homo sapiens
  misc_feature (1)...(505): n = A,T,C or G
ngagcggttnnnnnaaaattgatcgactgcaggaactctgcacgagcacagctacaaaggtgtagctaagaagatggcccattggtgggagcaatgtcaccctgcctccagctagctatgggcccagagtttctccctgagtcgctgttgctagcagggagatttctcttcctgccctcacttctttcaccttgaacttggataagaactcgtgtctcctgagtgaggtagcgcctcccatctgctccccaattcttgatctctcccaccccatccctctccccagtcttggatactaataaaatataagcattctggttctcanaaaaaaaaaaaaaaaaaaaaaaaaaaaggggggggcggggggtcaaaaacccttgaataaaaatcccccccccccccaagggggccccaaaaattccccggaaaatcctttaaagaataaaaacccccccaaaaaaaagggccccccccggggttttataaggcccgcccccaaaaacat

SEQ ID NO: 19513 - DNA, 356 bp, Homo sapiens
  misc_feature (1)...(356): n = A,T,C or G
catagaccggccttagancggctgcaagaattcggcacgagcagaaatggactccttttgggtccccgaggtggggtcccctcccagccctgcatcctccgtgccgtagacctgctccccagaggaggggccttgacccacaggacgtgtggtggcgcctggcactcaaggacccccagctgccccagccctggtctctggcgcatctcttccctcttgtcccgaagatctgcgcctctagtgccttttgagggggtcccatcatccctccctgatattgtattgaaaatattatgcacactgttcatgcttctactaatcaataaacgctttatttaaaaaaaaaaaaaaaaaaa

SEQ ID NO: 19514 - DNA, 426 bp, Homo sapiens
  misc_feature (1)...(426): n = A,T,C or G
ngtgctcgccggctgctgaattcggcacgagctgtgattggaaccaggctgcatgctgctgtggcaattgcttgtgttgtaatggccttttacgtcctgtttataaaatgaattccaaagcacccaagtcatcaactgccaaccaaggggacggggatgaagaacctgttggagacctgaacccagtgtaggagagttcagctgaaatcatcggtccccaggatgacaccacagcatctgcccctgctatatgtggggaaaactcatggtcacgaacattatttatgcttcaggggactacagaaagccagcttcctttgatctatgtgtaaatcagtccttggcagagtgcatataatgtccggataaattacacccctcggtgataagattacatacctccttcataaaaaaaaaaaaaaaaaa

SEQ ID NO: 19515 - DNA, 448 bp, Homo sapiens
agaacttggccccgcccctgaagagaaaaaattttgccccgcgctgcaggaattcggcacgagaattaatgcccctctcttacagaacactcctatttgtacctcaacaaatgcaaattttccccgtttgccctacgccccttttggtacacctagaggttgatttcctttttcatcgatggtactatttcttagtgttttaaattggaacatatcttgcctcatgaagctttaaattataattttcagtttctccccatgaagcgctctcgtctgacatttgtttggaatcgtgccactgctggtctgcgccagatgtaccgtcctttccaatacgattttctgttgcaccttgtagtggattctgcatatcatctttcccacctaaaaatgtctgaatgcttacacaaataaattttataacacgcttaaaaaaaaaaaaaaaaaa

SEQ ID NO: 19516 - DNA, 491 bp, Homo sapiens
  misc_feature (1)...(491): n = A,T,C or G
gtgaggccaatcacggctgcagaattcggccgcgcctgtctccattgtgtgatccagccctggttctggctgtggtcagcagatgccagtgaagggttttgtgtgtttaggcctcatttctttgtctttttcctactccgttcctggcatttgctgatttctagtgtatactctgtagtctcagttcgtgtttgattccattccatggaaataaaaagtatgttgtacatactgccgaagaattgtcttgcaagttaaggcttccccctttactataagactataaataaaaacttattttatccttcaaaaaaaaaaaaaaaaaaaaaaaaaaaaaaaaaagttctggggggggggcccggcccccaattcccctttaggggggggtaataaaaaatccggggcccgtttttaaaaccgggggggggggggaaaaggnnnnnnnnnnnnnnnnncnnttttgnggccgccgcgggcgcctttctcttggg

SEQ ID NO: 19517 - DNA, 476 bp, Homo sapiens
  misc_feature (1)...(476): n = A,T,C or G
ntttgatccgcgctgaggaattcttgcgagccgtaccctgcacccgcagagatgttgatgcctaagaagaaccggattgccatttatgaactcctttttaaggagggagtcatggtggccaagaaggatgtccacatgcctaagcacccggagctggcagacaagaatgtgcccaaccttcatgtcatgaaggccatgcagtctctcaagtcccgaggctacgtgaaggaacagtttgcctggagacatttctactggtaccttaccaatgagggtatccagtatctccgtgattaccttcatctgcccccggagattgtgcctgccaccctacgccgtatccgtccagagactggcaggcctcggcctaaaggtctggagggtgagcgacctgcgagactcacaagaggggaagctgacagagatacctacagacggagtgctgtgccacctggtgccgacaagaaagccgaggn

SEQ ID NO: 19518 - DNA, 471 bp, Homo sapiens
gcacgagccaggatggagccctcctgagctggcatctcagacagcacccgggcccgccacccctcaccaagagagatggccatggggctcagggcctctttaccatgtgcagtgaccatttctcagagcaggacttgcaaagaggctttaatttcaaaagtgaaggaaggaggccaggcgccgtggctcacgcctgtaatcccagcactttgggaggctgaggtgggcagatcacctaggtcaagagtttcaaaccagacgggccaacatggtgaaaccccatctctactaaaaatacaaaaaaaaaaattagctgggcatggtggtgggtgcctgtaatcccagctactcgggaggctgaggcaggagaatcgtttgaacccgggaggcggaggctgcagtgagccgagatcatgccactgcactccagcctgggcgacagagactccatctcaaaaaaaaaaaaaaaaa

SEQ ID NO: 19519 - DNA, 498 bp, Homo sapiens
  misc_feature (1)...(498): n = A,T,C or G
catgcgcccgcctttgcaccgcgctgcaggaattcggcacgagagactggagtcctgcttataatcatgcatataacctttactttgatggatctggccagaggggtgttggagcccagcccacccacataccagtcaagctcttaggggagcagaagaaaagcaggaagaatttaaatgtttaattttttttttaaattgacttttctagttattaaaagttgcttgtttcagcagtgatattgtataaagaacatcttgtaagatactcctgacatcttgctttagcacatgtacagtacagtttctatgataatgtgtttgctctaacttccctggcttctccttcagcccatccactctcctctagagcagttgggttggaggctcattgaggcaagcagcaacattggagggggagcagggcagtgctgtgtctgctgcctcccatgcccgttctgacctcagccttggaacnntctcagaacctgnagattn

SEQ ID NO: 19520 - DNA, 471 bp, Homo sapiens
gaggattgcgctctgcccggctgtacgaattcggcacgaggagagagagagagagagagagagagagagagagagagagaccccaggacacacacagctgtctcccggtgcgagaagaacacccccgcttgagagagagagggcgtttaatgattgctttagtttgaactaccctggcaacctctgcccaggggacttgatcgaagtgttccgttctgtctatcaacactgcgccctgtacttgggtgatggttactttatcaacataacacctgtatatggcattcctgcgttctttacaagcgccaagtctgtattcttcagtagggccctggagaaaacgcatctcttgaaagatgttgtgggaagtgacacatacagaataaactatatatgctatgaaacgctcccctctctctctgtggaagaaattataacgcggtcagagtttgtaattggacaggaggcgtt

SEQ ID NO: 19521 - DNA, 486 bp, Homo sapiens
  misc_feature (1)...(486): n = A,T,C or G
gggagttcnnnnnnatttgaacgccatggagaactctccacgagctgccctgagcttcaggcagcagtgttcatctctggccagttgtctggtttccatgtattctatgccaggtaggcaacacagagccaaggcgggtgctggaagccagacggaacagtgttggggcaggaaagtggatgctgttgtcatggagctgtgggagttggcactctgtctgctggtggccctctcggctcacatgttcacagtgcagtttctggcagacttgggttttctctttggtggattctaaagtgccttatctgcaaacaacttcttttctccttcaggaactgtgaatggctagaagaaggagctcagtaaactagacagccaaggttgcttaggttactgggttataagaaatctgaaagcacctctgacattccttttattaactcacctctcagccgaaagatttcgtgtttgaaaggtcaagaccgn

SEQ ID NO: 19522 - DNA, 502 bp, Homo sapiens
  misc_feature (1)...(502): n = A,T,C or G
agagcggggncnnccnnaaggggagctgaggancngcnccgagaacagngnacagaccctagactcagaaacacaacagatttgagctaagacagctctggtgaaacagtaatagagggaggaggaacacgaggtattcatgtctgggccagagctgccatccagggccccacaccccacctttggtccagatggcccattggcccaggtgtccctgctgccagaacaccgtggactggggtacaggagttgttgcatattccatgaggctggtgtcgggaagcagggactcacagttgccaggttgtccatctctgagccaatttccctccacaacccaggggtttcagtctcatatcaactatcatgtttgaaacagaaaacaggcaaaatgtttggctaaaataaaatgaaaacactgcagggaagagaactgagtgtgctggtggacaggagccctgctcacctgtgggaagggcagggccagcaagggcagcagagn

SEQ ID NO: 19523 - DNA, 495 bp, Homo sapiens
  misc_feature (1)...(495): n = A,T,C or G
ntttcccccgcgctgcaggaattcggcacgagctgctctcctccttttcccaccctgattccccatcttcctcatctccaccatccacccaggaggcctctcccactggtgatatggctgtaggatcccccttgatgcaagaggtaggctccccgaaagaccctggaaagtccctgccacctgtaccaccaatgggcctgcccccaccccaggagtttggccgggggaacccattcatgctgttcctctgcctggccatcctgctggagcaccgcgaccacatcatgcgcaatgggctggattataatgagctggccatgcactttgaccgccttgtgcgaaaacaccacctggggcgcgtcctgcgccgggctagggctctctttgctgattacctgcagtcagaggtgtgggactcaaaggagggggctgaggccacagccgcatcttgatcaagctttctcaagccctccatcggccccaccagatctccat

SEQ ID NO: 19524 - DNA, 490 bp, Homo sapiens
  misc_feature (1)...(490): n = A,T,C or G
aggaggtgtngcgggngttttnnnaaactgagagcaagtagataancgntccgaggaaccttgcagagggcattgttcagctattagaattactggggtggcagttccccttttcccagttcattgtggaccaaactacaggctcttctgatcttactgctttctgaagcagccagcagcgtagataattccttgacttgttttatttaaaaaatatcactggagatttagtaggagtgttgtatcacaccaattctcattctgttttcaaccaaggattctggagtactctgatagcattggtttcatttctcatgtcgtcctggcaagcataattttgtagtttatctcagtttcaggtagaagctgcagaagcagagagcagcctacccacaaaaggggtccagttggttctctagcccctgagctgagtggcaggcagtctatatgtttgctcatctctgcactgtgcctggtgctgtgcttaaag

SEQ ID NO: 19525 - DNA, 488 bp, Homo sapiens
  misc_feature (1)...(488): n = A,T,C or G
nggggattganctcctgcggcattcggcacgagctggaacaacacggtgttcatcttttctacagataacggagggcagactttggcagggggtaataactggccccttcgaggaagaaaatggagcctgtgggaaggaggcgtccgaggggtgggctttgtggcaagccccttgctgaagcagaagggcgtgaagaaccgggagctcatccacatctctgactggctgccaacactcatgaagctggccaggggacacaccaatggcacaaagcctctggatggcttcgacgtgtggaaaaccatcagtgaaggaagcccatcccccagaattgagctgctgcataatattgacccgaacttcgtggactcttcaccgtgtcccaggaacagcatggctccagcaaaggatgactcttctcttccagaatattcagcctttaacacatctgtccatgctgcaattagacatggaaattggaaactcc

SEQ ID NO: 19526 - DNA, 473 bp, Homo sapiens
  misc_feature (1)...(473): n = A,T,C or G
ngagtgctcgacgctgatgtttacacacaataatgctatttctgaaagtgtgcctctgcctattcaaatcatattctatggcatcatgggaagctttacggtgatcaccccagtgctgcttccctttattacaaaaggctatgcgcctcgattgtaccatgagggcacaacagacacttataaagccattacctacaatgctatgcttgcagaaacgagtacagtgtttcaccacaatgatgtgaagattccagatgctaaacatgtatttaccacattttatgctaaaacaaaatcactgttagttaatccagtgctctttccaaaccgtgaagactatatccatctaatgggttatgacaaagaagaaactattctgcatatggaagaaaccaccgaagagaaacggcataaagatgacaaatgagcctatttgttagtgttcgtgcttaaatgtgatttacgttgtaatg

SEQ ID NO: 19527 - DNA, 464 bp, Homo sapiens
  misc_feature (1)...(464): n = A,T,C or G
nattgcccgcctgcggaattcgttgcgagacggatttccctctgtgggtaagcccaagaaaggtggtggcatctcctttaactcgacagtcacgctgacccagtgctcggaaaagctggtgcagctcatcctgcacgaatacaagatcttcaatgcagaagtgcttttccgagaagactgctccccggacgagttcatcgatgtgatcgtgggcaaccgggtgtacatgccctgcctgtatgtttataacaaaatcgaccagatctccatggaagaggtggaccgcctggcccgaaaacccaacagtgtggtcatcagctgcggcatgaagctgaacctggactatctgctggagatgctttgggagtacttggccctgacctgcatctacaccaagaagagaggacagaggccagacttcacagacgccatcattctccggaaaggggcctcagtggagcacg

SEQ ID NO: 19528 - DNA, 478 bp, Homo sapiens
  misc_feature (1)...(478): n = A,T,C or G
ngagagatcgannncntttcgcccggctgcaagaattcggcacgagctccatcgtccccgtgcgcagaggctactgggggaacaagatcggcaagccccacactgtcccttgcaaggcgacaggccgctgcggctctgtgctggtacgcctcatccctgcacccaggggcactggcatcgtcttcgcacctgtgcctaagaagctgctcatgatggctggtatcgatgactgctacacctcagcccggggctgcactggcaccctgggcaacttcgccaagggcacctttgatgccatttctaagacctacagctacctgacccccgacctctggaaggagactgtattcaccaagtctccctatcaggagttcactgaccacctcgtcaagacccacaccagagtctccgtgcagcggactcaggctccagctgtggctacaacatatggtttttatacaagaaaaataaagtgaat

SEQ ID NO: 19529 - DNA, 508 bp, Homo sapiens
  misc_feature (1)...(508): n = A,T,C or G
agaggaggggncncccnnaagggaggcattgatanctncngaaanncctcaccagcaccaaacagactttctcctccacctggagcccctagcatttccttgtcccctcttccccaaaacctctgtaaagggtacgagagggaccccctgccgagccgcccgccactcagggcagtccgatctaagaagcagaagctggttggaggctggctgggcctctgtccagtccccagatggataaactgccttttctcacatcccctcttggtgcctgatcttctctgcccccggggccagacccactgtgctgttttctgtcagtctgtggcacagcaccaagctctgccagcaccagtccctgacagggctaggaggacagcctggtcagcagggctgcagtcccccagtgccgtgtttcgggggtcaagggatgtaagtggagtcattgcacagagacagaccagtcaggagaaggagctggaatctggcctcttgtcctaacctcagg

SEQ ID NO: 19530 - DNA, 475 bp, Homo sapiens
  misc_feature (1)...(475): n = A,T,C or G
attcgcaccgcctgcgngattcggcacgcggagcaattgaagcgaattaataaaatgtctccaacatctctaaagatcacactaaggcaactcatggaggggtcttcaaagaccttgcaagaagtactaactatggagtatcggctaagtcaagcttgtatgagaggtcatgactttcatgaaggcgttagagctgttttaattgataaagaccagagtccaaaatggaaaccagctgatctaaaagaagttactgaggaagatttgaataatcactttaagtctttgggaagcagtgatttgaaattttgaggtgacaggcttttaaggtatattttgtagcatgggttggcaatctacagcatgtgggccaaatccagcctgctgcctgtttttatataccctgtaagctaagaatggtttccgcatttttaaatggttgggaaaagaaatcacagactaataattcatgacg

SEQ ID NO: 19531 - DNA, 489 bp, Homo sapiens
  misc_feature (1)...(489): n = A,T,C or G
agtgcgcnnnnttttgacctcgatcgcatgtcggaattcggcacgagggcctggagaacaataacaaactcacgatgttggacattgcatcaaatagaatcaaaaagattgaaaatatcagccatctaacagagctgcaagagttctggatgaacgacaatctccttgagagctggagcgacctcgacgagctgaagggagccaggagcctggagacagtgtacctggagcggaaccccttgcagaaggacccccagtaccggcggaaggtcatgctcgccctcccctccgtgcggcagatcgatgccacgttcgtcaggttctgagtccttcttggctcctcatgtggtccctctcctcggaagaactgcccagccacgggtttttaacccacctgttgctcctgaggtcgtcactatatcaacagtcacaaacccaatggcaataaaggcactgacgatagctggcgcgcgcgacgtcacacaccat

SEQ ID NO: 19532 - DNA, 362 bp, Homo sapiens
  misc_feature (1)...(362): n = A,T,C or G
ggtttgtcncccctnnnnnnnnnccattgacccgcgctgcaggaattcggcacgaggcggtggccaggacaacgggctggagggtctgggcaacgacagccgagacatgtacatggagtctgagggcggcgacggctacctggctccggagaatgggtatttgatggaggctgcgccggagtgaagaggtcgtcctctccatctgctgtgtttggacgcgttcctgcccagccccttgctgtcatcccctcccccaaccttggccacttgagtttgtcctccaagggtaggtgtctcatttgttctggccccttggatttaaaaataaaattaatttcctgttgaaaaaaaaaaaaaaaaaa

SEQ ID NO: 19533 - DNA, 476 bp, Homo sapiens
  misc_feature (1)...(476): n = A,T,C or G
agattgatcccccntngnnnnnnnaattgacccgcgctgcaggaattcggcacgagccggtcctatcttagagcccctgagcttcagggaaggggcgggcgtgtcgccgcctctggcatcgcctccggttgccttacaccacgccttcacctgcagtcgcctagaaaacttgctctcaaacttcagggttttttcttccttcaaattttggaccaaagtctcatttctgtgttttgcctgcctctgatgctgggacccggaaggcgggcgctcctcctgtcttctctgtgctctttctaccgcccccgcgtcctgtcccgggggctctcctaggatcccctttccgtaaaagcgtgtaacaagggtgtaaatatttataattttttatacctgttgtgagacccgaggggcggcggcgcggttttttatggtgacacaaatgtatattttgctaacagcaattccaggctcagtat

SEQ ID NO: 19534 - DNA, 504 bp, Homo sapiens
  misc_feature (1)...(504): n = A,T,C or G
agagcggnttnntnacatcagatactatctgataactactgcaangacacacctcgcaaacacctcatttttgtacttaacaaatgtgaccttgttccaacctgggcaacaaaacggtgggttgctgtcctctcccaggattatccaacacttgctttccatgcaagccttactaacccgtttggcaagggagcattcattcagcttctgcggcagtttggaaagttgcacactgacaagaaacagatcagtgttgggttcattggctatccaaatgttggcaagagctctgtgataaatacattgcgttctaagaaagtttgcaacgtggctcccattgcaggtgaaacaaaggtctggcagtatattactttgatgcgtcggatattcctgattgactgtccaggtgtggtttacccctctgaggactccgaaaaaagttggtgtgcgctactatgaaacacacaacgtgaaaaataggaacaggaacaaaaagaagaccaa

SEQ ID NO: 19535 - DNA, 505 bp, Homo sapiens
  misc_feature (1)...(505): n = A,T,C or G
agtgcggnnnncnccancctgggancctagnnagcatcgggaanncgcacgagctgaaaactaaatccatacagggtgtcatccttctttccttcaagaaacctttttacacatctccattccttattccacttggatttcctatagcaaagaaacccattcatgtgtatggaatcaactgtttatagtcttttcacactgcagctttgggaaaacttcattccttgatttgtgtttgtcttggccttcctggtgtgcagtactgctgtagaaaagtattaatagcttcatttcatataaacataagtaactcccaaacacttatgtagaggactaaaaatgtatctggtatttaagtaatctgaaccagttctgcaagtgactgtgttttgtattactgtgaaaataagaaaatgtagttaattacaatttaaagagtattccacataacttcttaatttctacattccctcccttactcttcgggggtttcctttcagtaagn

SEQ ID NO: 19536 - DNA, 470 bp, Homo sapiens
  misc_feature (1)...(470): n = A,T,C or G
tggggannnnnntttgcactggatgcgcgatttcggcacgagccacaaccccactggacgtttgcaaaacactgctcaacacccaggagtccttggctttgaactcacacattacaggacatatcacaggcatggctagtgccttcaggacggtatatcaagtaggtggggtgaccgcctatttccgaggggtgcaggccagagtaatttaccagatcccctccacagccatcgcatggtctgtgtatgagttcttcaaatacctaatcactaaaaggcaagaagagtggagggctggcaagtgaagtagcactgaacgaagccaggggttcagatgacactgctgcatcctggtcacattctctgtctcctggaatgctcccacctcaagtggagttagaaggaaggtagaggggctctcccccaggattttggtgttttgactaacaccagttcctgccaacctctgn

SEQ ID NO: 19537 - DNA, 473 bp, Homo sapiens
  misc_feature (1)...(473): n = A,T,C or G
catcgcaccggctgcangtatgcggcacgagccgaaaggttcggcgcaaggagcccaagagccaggatatctacctgaggctgttggtcaagttatacaggtttctggccagaagaaccaactccacattcaaccaggttgtgttgaagaggttgtttatgagtcgcaccaaccggccgcctctgtccctttcccggatgatccggaagatgaagcttcctggccgggaaaacaagacggccgtggttgtggggaccataactgatgatgtgcgggttcaggaggtacccaaactgaaggtatgtgcactgcgcgtgaccagccgggcccgcagccgcatcctcagggcagggggcaagatcctcactttcgaccagctggccctggactcccctaagggctgtggcactgtcctgctctccggtcctcgcaagggccgagaggtgtaccggcatttcggcaaggccccagga

SEQ ID NO: 19538 - DNA, 491 bp, Homo sapiens
  misc_feature (1)...(491): n = A,T,C or G
cgggcaccgcgcattgagacgcccnnaanaattgcaccgcatgcacgaattcggcacgaggcagaatggaatgagcagtaatcagtgaaaatccttaatgcattgtttctaagcaaaaggcactatttgctcacatctcaaattaaactgtattttaaaagcaattactcatttgaacaaacagataaaaatttagttttgctgtttattattctccaccaatctcaggggagtaaaaagttaaatagatacattctggccggatgcaatggctcactcccgtaatcccagcattttgggaggccaaggcaggcagatcacttgaggccaggagttcgaaaccagcctggccaacatggtgaaaccctgtctctactaaaaatacaaaaaaaaattcgctgggcatagtggctggtgcctgtaatcccagctactcgggaagctgaggcaggagaatcacttgaacctgggaggcagaggttgcagtgagc

SEQ ID NO: 19539 - DNA, 501 bp, Homo sapiens
  misc_feature (1)...(501): n = A,T,C or G
ntttgcaccgcctgcaggaatttcgcacgagcacatctgccccagtgcctttgtccttcccttggggcttgccggccagacttctctcccctgcggctcccacctctgcctgaccccagccttaaacatagcccctggccagaggccttgctgggtggagcctctgtgtgactccatactcctcccaccacaacactcatctgtcaaacaccaagcactctcagcctccccgccttcagctgtcagctttctggggctaacttctctgcctttgtggttggaggcctgaggcctcttggaactcttgctaacctgttcagagccaggaaggagactgcacagttttgaaagcacagcccgtcaggtccggctctgcgtctccctctctgcagcctgtgtaagctattataattaaaatggttttccgggaaaaaaaannnnnnaaaaaaaaaaaaaaaaaaannannnnannanannnttccttgggggggggcccggccc

SEQ ID NO: 19540 - DNA, 472 bp, Homo sapiens
  misc_feature (1)...(472): n = A,T,C or G
tgtggaaaaaanntttgattttgattcgcgctgcaggaattaggcacgagattttaagtagagacagggcttcaccatgttggccaggctggtctcgaactcctgaccttcaggtgatccacctgcctcagcttcccaaaatgctgggattacgggcgtgagccaccgcacccagctggagcaacaggatttaatatagagcaaatgtttagttttatcatctgtaaaatggagataagtattgtcagagtaaacatgaagattagaaagaacacttaatgtgctgggccttttataggttaacactgacatctcaggctgaactatatacattttccttcacaaccatatcaatccttataaactatggatttatgctccttaaaacaatatataatgctgatcactactataaatgcgtggttttaaccaactgtactgaaacagctttgagtttatattctgtttggat

SEQ ID NO: 19541 - DNA, 456 bp, Homo sapiens
  misc_feature (1)...(456): n = A,T,C or G
natgacgcctttgggactcgacacttctttagtatttaaccccaatatttcctcatctttttgttgttgtcattgattttggtgacatggacttgtttgtagaggacaggtcagctgtctggctcaatggtctacattctgaagttgtctgaaaatgtcttcatgattaaattcagcctaaacgtttcatcaagaacactacagagtcgatactgtgagtttccaacctcagcccatctgtgggcagagaaggtctagtttgtccatcagcattatcatgatatcaggactggttacttggttaaggaggggtctaggagatctgtcccttttagagacaccttacttatgatgaagtatttgggagagtggtttttcaaagtagaaatgtcctgtattccagtgatcatcctctanacgttttatcatttattaatcatccctgcctgtgtctat

SEQ ID NO: 19542 - DNA, 477 bp, Homo sapiens
  misc_feature (1)...(477): n = A,T,C or G
nacttgacctgcgctgcacgaattcggcacgaggaanacggcagctcttaccatgctctgaagactgcccacccagaatgtacagcctcatgacagagtgctggaatgagattccttctaggagaccaagatttaaagatattcacgtccggcttcggtcctgggagggactctcaagtcacacaagctctactactccttcagggggaaatgccaccacacagacaacctccctcagtgccagcccagtgagtaatctcagtaaccccagatatcctaattacatgttcccgagccagggtattacaccacagggccagattgctggtttcattggcccgccaatacctcagaaccagcgattcattcccatcaatggatacccaatacctcctggatatgcagcgtttncagctgcccactaccagccaacaggtcctcccagagtgattcagcactggccacctcccaagagtn

SEQ ID NO: 19543 - DNA, 500 bp, Homo sapiens
  misc_feature (1)...(500): n = A,T,C or G
cggggtgagcnaggccnnnnnnnttttganttttcgaccgcctgtaggaattcggcacgagaagatcttcacagagaacttcttatgaatcaaaaaaggggtcttgctcctcagaacaaaccagaattgcagaaggtgatggaaaaaagaaaacgagaccaagtaataaagcagaaggaagaagaagcacagaagaagaaatctgacttggaaatagagctattaaaacggcagcagaagttggagcagcttgaacttgagaagcagaaattgcaagaagagcaagaaaatgcccccgagtttgtgaaggtgaaaggcaatctcaggagaacaggccaagaagtcgcccaagcccaggagtcctaggctgaggctgcaccaagacctcgtgtgtcaccccacagagctgtctgtgggtgccttctcaatctcagggcaaaagcccctggagaatatttcagccagcagagaattttgacttgcagtaggatttggtttga

SEQ ID NO: 19544 - DNA, 465 bp, Homo sapiens
  misc_feature (1)...(465): n = A,T,C or G
nttagaccgcctgcggatttcgcacgatgctctgggcaccgcggtggtggcgggagatgtgtttgagcgagatggggacgaggattcgtggcaggcactgagtgaagaccccgcagcccaggagcggagccggaagagggtcctggtcgttgccgacgtggtcgtacctggtcacgggcccccctttcgagtgttaagggaagcctcgcagcccgagacggagggtggagggaacagccagcaggagccggtggtcggagacgaggagcccgccctgcactaatcagcctcgagagggactgcactcttgtcagggaagccctaacagcgaagagctgctggagacagagtcagagcagtcaagggggggagcttccagcccttccaggaggccagttttctagtgaagacagagtgcacctgacactggcatcacatcgtcagtatcactggctgtctctgcag

SEQ ID NO: 19545 - DNA, 487 bp, Homo sapiens
  misc_feature (1)...(487): n = A,T,C or G
gcggtnnnaattgaattgatcgcatgcggaattcggcacgagtggaaaagaaaacaaagaaacccaaggcagcagagtctgtttcaaaaccagatgtcagtgaagaagccccagggccatcaaaagttaagacagggaagcctgaagaagccagccttgattctagagagaagaaaaccaacttggctcccaaaagcacagcaatgaatgagagctcttctggaaaagctgggaagcctccgtgtggagccacaaagaggtccatcgctgacagtgaagaatcggaggcctacaagtccctctttaccactcacagctccgccaagcgctccaaggaggagtctgcccactgggtcacccacacgtcctactgcttctgaagcccgcactgccaccgctcctgccccagaagggtgtttagtttccacgtaggcaggtcgctttgtgcctctgagtgcgctgctgtgtgttctctctatagntctgn

SEQ ID NO: 19546 - DNA, 492 bp, Homo sapiens
  misc_feature (1)...(492): n = A,T,C or G
gtgggtaaaaagantttgatncccctnnnnannnncttttgatcgccntgcggaattccgcacgagtctagatcaagatgctgactattagggggcagtgattgccatctggggacctgtcaggctttgtcatttcccagtttgttggtggtgcctttagtggttccctaatttgggaacactgatggggccttggacagggctttctctcaggtaggagaaatgggcccatgatctcctcacagtcgcccccagtccttggccctgcttccctgtgtctcatgcactggcacatatggtcaccttggagggcagacctaggagcccctctgaccactgaatccgtctccacaccccttctgccaagggaagccccttcaggaaggaccccccaaagctgaggggctgaatgtagccttttcaacagagaaggctcccacttgagagcagcctctacctgaccccctggaccacagagagccactctgaccc

SEQ ID NO: 19547 - DNA, 504 bp, Homo sapiens
  misc_feature (1)...(504): n = A,T,C or G
tggnanatggagncccccggccgccccnnaattgatcggccatagaaaggcctgcacgaattcngcacgagatttcaacagctgaggcaagccaagtgatcattaataaagcttttcttggttccttcagtggtgctggcagtaaaatggtaggtaaaagttaggctgcaagttcaataaatcatgagatttcccatcgttacacccttgtgtattcacatttcttggatcaaacattttgagtgaactaggggtttttattaaagacatttgttgtatttatggttgtaactgtacatgcttatcatgatgagactgaaagaaggtagggcaaaaatggttgaatctattttcagatagtagttcatacttgagtgaagtgtcttgtctgcattatgaagcctggtatgtatccagtactaaataggtgggttaaatgtggtaattctagttcagtgtcttaccctgaagagaaagttgtaggttggctgttgaaattcattc

SEQ ID NO: 19548 - DNA, 497 bp, Homo sapiens
  misc_feature (1)...(497): n = A,T,C or G
atagaccgcctgcaganttcgccccagcgctgcaggaattcggcacgagggaaattgttcgctccctggataagatggaaaatgccaacattccttctgtgtccctgtccaagcgagagttctgttttcagaatgtgaagtacatgcaattgaaagtagaatcctttacaattcataatggacaagtaccctgtcattttgaattcatcaacaagcctgatgaagagtcttactgtaagcagtggctgaatgccaaccccagcagaggcttcctcctgccagattctgatgttgagattgacttggagctcttcgtaaataagatgacagctacaaagctcaactcgggtgaagacaaaattgaggacattctggttctgcacttggacaggggaaaggattactttttgtctgtgtctgggaactacctgcccagctgttttgggtctcccattcatacactgtgttacatgagagagccaatcttggacctaccn

SEQ ID NO: 19549 - DNA, 469 bp, Homo sapiens
cctatgccccgcgctgtaggaattcggcacgaggtggccccaaccgcaccagcacagaaagtcgaggcacagacacagagagctcaggtgaagataaggactctgacagcatggaggacactggtcattactccattaatgatgaaaatcgagtccatgaccgctcagaggaagaggaagaggaggaagaagaggaggaagaagagcagcctcggcgccgtgtacagcgcaagcgggctaaccgtgaccaggactcatcagatgatgagcgggccctataggactgggtgtcctcagaaacatcagctgtaccccgacctcgctggcaagccctccctgcccttcgggagcgggagctgggttcaagtgcccgctttgtctatgaggcctgtggggcaagagtgtttgtgcagcgtttccgcctgcagcatgggcttgagggccatactaggtgtgtcaataccctgca

SEQ ID NO: 19550 - DNA, 489 bp, Homo sapiens
aagaaaaatttgacgcttgggaattcgcacgagcttgtatgcagtgcgtctgaagtgctaatcagttgtaacagtagcacaaatcgcacttaggattcgatccttctcttctgtgtttcgatttttgatcaattctttaattttggaagcctataatacagtgttctattcttggagataaaaactaaatggatcactgatattttagacattctgcttctcatctaaatatttccatattctgtattaggagaatattaccctcccagcaccagcccccctgtcaaacccccaacccaaaaccaagcattttggaatgagtctcctttagtttcagagtgcggatcgtataacccatatactcttcgatgcacttggttcggttggtattaatttgactgagcatgacagcggcaatcttttctttggtcaaagttgtctgtttattttgcttgtcatattcgatgtactctaaggtgtctgtatgaa

SEQ ID NO: 19551 - DNA, 471 bp, Homo sapiens
  misc_feature (1)...(471): n = A,T,C or G
ttggaaggccctnaaacttgaccccgctgcaggaattcggcacgaggctctgggcaccgtggtggtggcgggagatgtgtttgagcgagatggggacgaggattcgtggcaggcactgagtgaagaccccgcatcccaggagcggagccggaagagggtcctggtcgttgccgacttggtcgtacctggtcacgggcccccctttcgagtgttaagggaagcctctcaacccgagacggacggtggagggaacagtcagcaagaaccggtggtcggagacgaggagcccgccctgcactaatcagcctcgagagggactgcactcttgtcatggaagccctaacagcgaagagctgctgtagacagagtcagagcagacaagggtgggagcttccagccctttcaggaggccagttttctagtgaagacagagcgcacctgacactgccatcacatcgtcagtatcactgc

SEQ ID NO: 19552 - DNA, 486 bp, Homo sapiens
  misc_feature (1)...(486): n = A,T,C or G
gtgggaaaaaagaatcggagagccttaggaanngcncctgagaaccgtcgaaagagacgnggacgccctcaaccgacgcatccagcttgttgaggaggagttgtacagggctcaggaacgactggccacggccctgcagaagactggaggaggcagaaaaagctgcatatgagagtgagagaggaatgaaggtgatagaaaaccgggccatgaaggatgaggagaagatggagattcaggagatgcagctcaaagaggccaggcacattgcggaagaggctgaccgcaaatacgaggaggtagctcgtaagctggtcatgctggagggtgagctggagagggcacaggagcgtgcggaggtgtctgaactaaaatgtggcgacctggaagaagaactcgcgaatgttactaacaatctgaaatctctggaggctgcatctgaaaagtattctgaaaaggaggacaaatatgaagaagaaattaaac

SEQ ID NO: 19553 - DNA, 504 bp, Homo sapiens
  misc_feature (1)...(504): n = A,T,C or G
cgtctnncgggcgcccccccgnnccccnnnnaattgatcgccatagaacgcctgccgacaccattatttactgtttcctcttaggaaatagtaaatggatataagaatctcttaaaaattctgttcacgaacctgtccaacatccaccaagtgggcatatttccgagcagtggctccattggtggtgaagatggcagttccatttccatatgggttggtatttacaatctggatggcttcatccaatgtttctgtctccagaaccacaagaactggaccaaaaatctcctctttgtaacaggtcatatttggctgccaggagtgatgcatccagaaaagaagtcagctttttggattctgagtattttatgcttatttggtactttcacttactacacatcatttacgtggacaactttcatattactaatctcttttcatttcaaatcacctatttaaaaaaaaagtcctctctcaagtgtattccgtcttccaagttaccaa

SEQ ID NO: 19554 - DNA, 493 bp, Homo sapiens
  misc_feature (1)...(493): n = A,T,C or G
nttagacccgcgctgcaggaatttggcacgcggtcattatgagattcctcataagtatcaacatattttaaccacaactcttttaaagtgtttttacagatttagggggtataagtgcaaatttcttacatgcatctattgcacagtggtaaagtctgggcttttggtgaacccatcacccaaatagtgaacattgtacttaacagggaatttttcaaccgtcactcttctcccactctcccaccttttggagtctccaatgtctatttttccactctgtatgtctgtgtgtgcccattgcttagctcccacttataaatgagaatatgtggtatttgactttctagttcaaggttatttcccttaagacaatggcattcggttccatccatgttgctgcaaaagacatgatttcattnttttttttaagactgagcagtaatatatgatttaatcaccactttgagaatatgttatctcatattctgagagg

SEQ ID NO: 19555 - DNA, 474 bp, Homo sapiens
  misc_feature (1)...(474): n = A,T,C or G
ntttgatcgccttaggaattctgcacgagcagatgctgnggacacacattctgccttggattcctagattacatctgccttaaaaaaacactgaagcacagttggaggtgggacgatgagactttgaaactatctcatgccagtgccttattacccaggaagattttaaaggacctcattaataatttgctcacttggtaaatgacgtgagtagttgttggtctgtagcaagctgagtttggatgtctgtagcataaggtctggtaactgcagaaacataaccgtgaagctcttcctaccctcctcccccaaaaacccaccaaaattagttttagctgtagatcaagctatttggggtgtttgttagtaaatagggaaaataatctcaaaggagttaaatgtattcttggctaaaggatcagctggttcagtactgtctatcaaaggtagattttacagagaacagatatcggg

SEQ ID NO: 19556 - DNA, 473 bp, Homo sapiens
  misc_feature (1)...(473): n = A,T,C or G
aggcggaaannnnttttgcattgcatccgcgctgcaggaattcggcacgagtgaacatgtcctgtgtactctgaaggtggatagcaatggtgtgatcacagtaaagcctgacttcacgggcctcaaaggaccctacaggattgagacggagggggagaagcaggagctgtggaaatatacgatcgacaatgtttccccccacgcacagccggaggaggaggagcgggaacggcgagtgttcaaggatctttatggccggcacaaggagtatctcagcagcctcgtaggcaccgactttgagatgactgtcccaggtgccctccggctctttgtaaatggagaggtcgtttcagcccaaggctatgagtatgacaatctctacgtccacttctttgtagaattgccaactgctcactggtcaagcccagcattccagcagctctcaggagtaacacagacctgcaccaccaagt

SEQ ID NO: 19557 - DNA, 497 bp, Homo sapiens
  misc_feature (1)...(497): n = A,T,C or G
ngtgggtnnnnnnaaattgagcgcctgaggagctctccgcgaggagagatagagagacagagacatagacagagagagatagcgtgtctcccagtaacacggctcccattatagaggccatgtacttctctcggtaaacgagaccccacttgcctagagtaggaaaaactgagggctttaaacctggaggctcttcctgaaagtatgttcatgaataccccaagcatcaaggtctaaataattttcagaagattagaattgggtagatatactgttggatatagccatggtaaatttaactgaggaattaaatccttgtaattttggtgtaaagatttgtatcctggcctgtttattcaggtgggagatgttctgtaaattttgaggtatagcttgaactcctagaacaagagttaaaagttctttttagctcattcacaatcacttgtgtgttaagtgttaatatctgtcatgaacctgccaatttgtacgtgtta

SEQ ID NO: 19558 - DNA, 480 bp, Homo sapiens
  misc_feature (1)...(480): n = A,T,C or G
gcgcggganaattgaaaatcgatcggcatgccgaatacgccacgagccgcggtgtgaggatgtccctggaaattggtcttctgtgactttcttgatgggggcagatgagatctttgtactgcattaagtggatagcgctcaggtcctttgggcttggcgctttggcaatctccaggcagctcactttggcctctgttcctggatcccctttgctcttttctgcgcctgcattcatagtccactgtgtgcagaggcatgggagttgtcatgttgggaacatgctagacctcagtatccttgagggatgctgccttgggtctggaaactgttagaggaaaccccaagaggtgcaggcactgagcctctcaggacaatgacctggggtcccagctcccctggaggggcctcctcatgattgtttgggggttgatcacagaccaagagtgacgagtgatgtcaccctgtgactcatggccggac

SEQ ID NO: 19559 - DNA, 495 bp, Homo sapiens
  misc_feature (1)...(495): n = A,T,C or G
tgggannnncnattgcctgcctgcacgaattcggcacgaggagcaaaacacctccgttctgggtttaatgggcaggtctggaggtgaggtatgccgtccgcactcaataattacttgcaggatcggattgtttctccagtgggtggggactgcaggatgtagcattgagtgagcctggcagattggaagataaaacaagggtgatgataaaaacaattacacactaacccatttcctcctccgtgaaatgagggaatggcccagacattttccagacctcttctgtcctaagagtggagctgggtgacagagcaggtgcaagccggcctttccctgcctccccggggaacgcactctgttcggtgagagcaactcagctcgcattgacacctttcagctgcaggagtggtggccgtcagttctcatttgaactgttgagcacagttgtcttctgagaatcatgagttagagcctccctttaggcttctgactccc

SEQ ID NO: 19560 - DNA, 499 bp, Homo sapiens
  misc_feature (1)...(499): n = A,T,C or G
agtccngnnnnnnnatttgattcctccggctgcaggaattcggcacgagctcagaagagcttaaggcattggggatccccttcttgagtcgtggggctggcttcttcatctgggttgacttgagaaagtacctgcccaagggcacctttgaggaggaaatgctgctctggcgccgctttttggacaacaaggtgctgctgtcctttggcaaggccttcgagtgtaaagagcctggttggtttcgctttgtcttctcagaccaggtccaccggctttgcctggggatgcagagggtccagcaggtgcttgcaggcaaatcccaagtggcagaagacccccgtccctctcagagccaggagccaagtgaccaacgcaggtgagctggtcattgtctcgtggccagagggcccagcagccactgtggaccttgggcgttctggggctgcagaagactgactggtgatgtgccatttgccaggaaggtatctaacttggcttt

SEQ ID NO: 19561 - DNA, 483 bp, Homo sapiens
  misc_feature (1)...(483): n = A,T,C or G
ggggaataaatttgancgccttgagattgacgacacatgacgcctgncgggatgcaaaagagaagcgctctacaagccaagatgcagattcacctggaagttctggggcccctgaaaacttgacattcaaggaacgccagcgtcttttttcacaaggtcaagatgtatccaataaagtgaaagcttctcgtaaattaacagaactggagaatgaactgaacacaaagtgaaagaaaatgaggagaacactttgtatttaccccaaaatcttttcagttgtgggtttgtaggtgcgagtttgaagaggaaaagaggaagggggttatatttctaagtgatttacaatttctgtttctaaaattgttgggatttagaaatgtttcaattccaagaaattttattttactttaccatgagattgccatttatgtaatttaaacactgtctagtttcttaattatctaactcacacgagggtaagtt

SEQ ID NO: 19562 - DNA, 410 bp, Homo sapiens
  misc_feature (1)...(410): n = A,T,C or G
nattggcctgcgctgcacgaattcggcacgagccgctccctgaggaggacctgtccaaactcttcaaaccaccacagccgcctgccaggatggactcgctgctcattgcaggccagataaacacttactgccagaacatcaaggagttcactgcccaaaacttaggcaagctcttcatggcccaggctcttcaagaatacaacaactaagaaaaggaagtttccagaaaagaagttaacatgaactcttgaagtcacaccagggcaactcttggaagaaatatatttgcatattgaaaagcacagaggatttctttagtgtcattgccgattttggctataacagtgtctttctagccataataaaataaaacaaaatcttgactgcttaaaaaaaaaaaaaaaaaaaaa

SEQ ID NO: 19563 - DNA, 475 bp, Homo sapiens
  misc_feature (1)...(475): n = A,T,C or G
gggggcnnncnnnaattgacatcgatgccgcgctgcaggaattcggcacgagcgatattgtgtgttttcccacgatgagatgatctgcaagatggcttccaaggctgatgtattagatgttgtagtggcttcaactgttcagaaagacatggccattatgattgaggatgagaaagctttaagagaaactgtccgtaaattgggagtgattgattcggaaagaatggattttgagctgttgccagatgatgaacgtcagtgtgtaaaatgcaaaactacatgcttcatgtctgccatctcctgttcttgtaaacctggccttcttgtttgcctgcatcatgtaaaagaattgtgttcctgtcctccttacaaatataaattgcggtataggtacacgctggatgatctctaccctatgatgaatgcattgaagcttcgagcagaatcttacaacgaatgggccttgaatgtgaat

SEQ ID NO: 19564 - DNA, 471 bp, Homo sapiens
  misc_feature (1)...(471): n = A,T,C or G
cttagcccgcccttttagccccgctgcaggctggaaccaatcccctatgtaaaccaagggataactactacattttaacctacttctgtttgaacatatggtatggttattgcttttgcctcgttttcctaacagtttgaagtttaaaaaaacctaacccacctttcttacccagtcttctataatgtgcctaccaaaaagcactagtcctagcccatctggctcaactcctctcccttttatgttcgacggaacaggccggagtgtacagtatattatatcttctgtcccccttatgccaacaagatggccttcccctctgaaacaaagtaaaactgcaacactgtgacttcttaaatgagggatatgtgaaaaggctatgaaaaatacaaaggctttcctaggaaatgtgttataatgcagcgggaagctaattcttgaaatatgcacattatagttactcagtctcan

SEQ ID NO: 19565 - DNA, 493 bp, Homo sapiens
  misc_feature (1)...(493): n = A,T,C or G
agcgggtnnnccttgacngccgtgcagcaattcggcacgagctcactgcctcatggcatcatccattctctctgcccaagttgctctgtatgtgttcgtcagtgttcatgcgaattcttgcttgaggaaacttcggttgcagattgaagcatttcaggttgtgcattttgtgtgatgcatgtagtagcctttcctgatgacagaacacagatctcttgttcgcacaatctacactgccttaccttcacttaaaccacacacacaaggtgctcagacatgaaatgtacatggcgtaccgtacacagagggacttgagccagttacctttgctgtcactttctctcttataaattctgttagctgctcacttaaacaatgtcctctttgagaaaatgtaaaataaaggctctgtgcttgacaaaaaaaaaaaaaaaaaaaaaaaacttggggggggggccgggccccaattcccccttatagggagccgtataat

SEQ ID NO: 19566 - DNA, 472 bp, Homo sapiens
  misc_feature (1)...(472): n = A,T,C or G
atgcggganannntttgaccttgcctcgcgctgcaggaattcggcacgaggggaaatcgagccccacgggaaacatacctcagccggggtgacagcagttccagccaaagaactgactaccaaaaatcaaatttcgaaacaactagaggaaagaattggtgtgcttatgtacataccaggttatctcccacagtgatattggacaaccaggtcacttatgtcccaggtgggaaaggaccttgtggctggaccggtggatcctgtcctcagagatctcagaagatatccaatcctgtctataggatgcaacataaaattgtcacctcattggattggaggtgctgtcctggatacagtgggccgaaatgtcaactaagagcccaggaacagcaaagtttgatacacaccaaccaggctgaaagtcatacagctgttggcagaggagtagctgagcagcagcagcagcaaggct

SEQ ID NO: 19567 - DNA, 459 bp, Homo sapiens
ctttgccccggctgtatgaattcggcacgagcagcagaattctttgatgaagagtgaaaagaaacttcatccacggaaacttcaggataattttgaaacagatgctgtatatgacttgcctagctccagtgaagaccagttgctagaacatgccgagggacagcccgtggcatgtaatggacattgcaagttccccttttcatccagagcctttttgagtttcaagtttgaccataatgctataatgaaaatcttggacctttgatagcagcacatgtattgtaaatgtcaccaggatcagagacctgttgaattcgaggcattttaatgcttggagaaagactataagtgaatctacttcaagggattctgttcatggtggtatacagttcttggtgctcttttggaaattgtcaaacatttactgatagcagaaaaggaaccccaaaacacctgtaa

SEQ ID NO: 19568 - DNA, 503 bp, Homo sapiens
  misc_feature (1)...(503): n = A,T,C or G
aggggnnnnnnnnnnnaattcgcctcggctgcacgatttcggcacgagcgttggcggtttgtgcagcaatggccaagatcaaggctcgagatcttcgcgggaagaagaaagaggagctgctgaaacagctggacgacctgaaggtggagctgtcccaactgcgcgtcgcctaagtgacaggcggagcggcctccaagctctctaagatccgagtcgtccggaaatccattgcccgtgttctcacagatattaaccagactcagaaagaaaacctcaggaaattctacaagggcaagaagtacaagcccctggacctgcggcctaagaagacacgtgccatgcgccgccggctcaacaagcacgaggagaacctgaagaccaagaagcagcagcggaaggagcggctgtacccgctgcggaagtacgcggtcaaggcctgaggggcgcattgtcaataaagcacagctggctgagaaaaatctgaaaaaaangagggtaataaa

SEQ ID NO: 19569 - DNA, 474 bp, Homo sapiens
  misc_feature (1)...(474): n = A,T,C or G
agatttcgccccgcgctgcaggtannnagcttgacccgcgctgcaggcaaacttgatcctaaaacgaagagaatcttgactctccagaaagctaatagctggttcaactgcaggaaaaattgaacattactaatttgaatggaaaacacatggtgtgagtccaaagaaggtgttttcctgaagaattgcctattttctcagtcatttttaacctctagagtcactgatacacagaatataatcttatttatacctcagtttgcatatttttttactatttagaatgtagccctttttgtactgatataattcagttccacaaatggtgggtacaaaaagtcaagtttggtgcttatggattcatataggccagagttgcaaagatcttttccagagtatgcaactctgancgtgatcccagagagcagcttcagtgacaaacatatccctatcagacaganagagacggttgac

SEQ ID NO: 19570 - DNA, 462 bp, Homo sapiens
  misc_feature (1)...(462): n = A,T,C or G
agggcnnnnnnnnnattcgtttcgctcggctgcaggaattcggcacgagcggagacttcaggcggccttctgatctgtttaccacgtgagcaagcagctcggttctgtgcagagataaagtcccccaaatatggtgaaggccaccaagcatggattattgggattgtagagaagggcaaccgcacagccagaatcatagacaaaccccggatcatcgaggtcgcaccacaagtggccactcaaaatgtgaatcccacacccggggccacctcttaatctatacagaaatagctgtttggttttgtttttaaatagatctatttcccttatcacttcaattaaagactataaacaacaaaaatctcattgtgtctacacatcggggtgaccttaggtcgcgttgtaagtggatacaattaataaaataaaatccattgccttttaaaaaaaaaaaaaaaaaaa

SEQ ID NO: 19571 - DNA, 498 bp, Homo sapiens
  misc_feature (1)...(498): n = A,T,C or G
aggggnnncccccaattgcctcgcctgcacgattcggcacgagagttcattgatgtcgaaggatatatacagtgttagaaattaggactgtttagaaaaacaggaatacaatggttgtttttatcatagtgtacacatttagcttgtggtaaatgactcacaaaactgattttaaaatcaagttaatgtgaattttgaaaattactacttaatcctaattcacaataacaatggcattaaggtttgacttgagttggttcttagtattatttatggtaaataggctcttaccacttgcaaataactggccacatcattaatgactgacttcccagtaaggctctctaaggggtaagtaggaggatccacaggatttgagatgctaaggccccagagatcgtttgatccaaccctcttattttcagaggggaaaatggggccctaaagttacagagcatctatctggtgcgctggcacccctggcctcacacagactnc

SEQ ID NO: 19572 - DNA, 495 bp, Homo sapiens
  misc_feature (1)...(495): n = A,T,C or G
agggcggnnnnnnattgatcgctcggctgcagaattcggcacgaggtcctggcttccatctctgtctcagcgaccattcagccctgcgcaggaacacatgttgcttagaaaagccaaatccagccttgtctctgcctcctctggtctcatgatgtgcatctgttaccttgaaactggaaaccagtctatcaatgtctgtgccaattttttattccctccccaacctccttccccataggactttttatttatgtaggatgtgtgctgtctaatgatgggatgaccacacttttccatgttctaaaagtgctcctctcctgcagggtcccagggctggtggttgctttgggtctacagctacgtcttacccgcctcctgcctcaacagcctgtgtggtggcaaagccggtgtggggctggggaacgcaacgttctccacgaaggggacctggctctccttctgcaatgcaggcgaaggcctatatgccagtgtgac

SEQ ID NO: 19573 - DNA, 492 bp, Homo sapiens
gggggcatttgatcggctgtggatagcggcacgaggaaagctggtaatagatgtctgacaaactaaagaaagacttgtgttacgatgcaaagtattgttcctgggtgtgtctgtgagagtattgccaaaggagagcagtgaactgggaaaagcagacccacctcaatgtgggtgggcaacatccaatcggctgccagctagaataaaccaggcaggagaagatggaagagccgacttgctgaatcttccagccttcatctttctcgtgtgctggatgcttcctgccctcaaacatcagactccaggttcttcgtcttttggactctcggatttacatcagtggtttaccaggtgctctcaggccttcagccacacactgaaggctgaattgtcggcttcccgacttttgagattttgaaacttggactgagctactgctggcttccttgcttctcaacttacagatgggacttcacctatagatcatgtgag

SEQ ID NO: 19574 - DNA, 477 bp, Homo sapiens
  misc_feature (1)...(477): n = A,T,C or G
agggggggattgccactgcccgcctgcangaattcggcacgagttaagacatgcctattttattaatttacttccaaacgcaacgaaaggtccatggacaatttgtgggccatttaattcagggcccccaattcgtacgtggagaagtgggaatgcaaaagtactttgacctttaaccttcggtccggcgcggtggagggaaacgcctccgtctctatataaggaattttccggtctcttcgggtcctttttcctctcttcagcgtggggcgcccacaatttgcgcgctctctttctgctgctccccagctctcggatacagcctgccaggagtgaagaaagctttgggcaaatatggtcctgccgatgtggaagacactacaggaagtggagctacagatagtaaagatgatgatgacattgacctctttggatctgatgatgaggaggaaagtgaagaagcaaagaggctaaggg

SEQ ID NO: 19575 - DNA, 493 bp, Homo sapiens
  misc_feature (1)...(493): n = A,T,C or G
agccnnnnnnnnattgcctggctgcagaattcggacgaggcctctctaaaattaaattttacataaaagttagttttattcacctttacgctttccaagtgaattgtgactaattttttcaatcttacatagatctttcacccattagcattacttacgtagataattctttatgcctagctattatacatattaatttttaaggtatacatttaaattacacaattgttcattgtggcttgtatcccagaatgtgttggggcttttaaaagatgcataatagctgaatgtatgcatgactttgaaagaagttaaaatggtgattctttttcacctcttggacattttaaaaccaggccaaatctatttgccaagcagtgtatcactaataagaaaagcaggtcttccttttattgcagattttgtttatctgccatagaatttccttatactgtggcttgcgattattcaagattagctatttcgctgggat

SEQ ID NO: 19576 - DNA, 499 bp, Homo sapiens
  misc_feature (1)...(499): n = A,T,C or G
aaggggnnangnngnagggnnnnnnnnnaactgatcgtattgcggacttccgcacgaggtcatcgctaatattacacgcaccttctcacttaatcctcacgacaagcctgtgaggcagatgctcattgttcccatcttgatgaaacttgagtctcagggaagtgaagtgacttgcccagggtcactcaggtagagttgagattcaaacccacatgtggctccaaagtctgcatctggatttgggggtgttttttggcatggcaccctcacctctctccctgcctgttttccccaaagtggaaaggaaggcctttcaaaccagagtgtctcactcccctctgacctccagaccagatggggcatgagccagccagctcagccaggctccctgtgtcctggngagaagtgtacccatcccccatgccccttatggggaagggaggcgtctgatgctctctctctgcctcccccccatcctgtcaggcacaggtgacggggg

SEQ ID NO: 19577 - DNA, 487 bp, Homo sapiens
  misc_feature (1)...(487): n = A,T,C or G
gtgggttannngaaatcgatcgccttcggaattccgcatgtgctccgctagttccagacacctccacgcccacctggtcctctcccatcgcccacaaaagggggggcacgagggacgagcttagctgagctgggaggagcagggtgagggtgggcgacccaggattccccctccccttcccaaataaagatgagggtactaaagttgtcttgggttttattttattattatttttttctttttccagtatactagcttgtcttttaagaaaggggatattaaaaaaaaaaaaagacaaaagtgtttttaaaaaaaaagcaccccccacacctgtgtctgtatatagccagcttatctcgggttcaatcgtctgatctttacagaaagaagtggaaaatgctgtttcaagggtgggcttaactgtgcctttccaataaagatgtgagaagcttcaaaaaaaaaaaaaaaaacctgggggggggcccgg

SEQ ID NO: 19578 - DNA, 478 bp, Homo sapiens
  misc_feature (1)...(478): n = A,T,C or G
cgggccgcaattgaccgcattgatgactctgcagaagtcagcacgagggactgcctgtaggcaggagtgaaggcagttttgaaggcatgactacaatctgctctgtccacaagagctaagagttgccaggtgtggtggctcaaacactttgagatgccaatcccaacactttgagaggccaaggcaggaggattgcttgaggctaggagcttgaaaccagcctgggcaacacagtgagaccccatctctacaaaaaataaaaaaacaggccaggcgcagtggcacttagggaggccaaggtgggtggatcacctgaggtcaggagttcgagaccagcctgaccaacatggagaaaccccgtctctacaaaaaatacaaaggttgccagtggggggcacatgcctggtatccagctactcaggaggctgaggcaggagaatcgtttgaaccnaaagggagaggttgcatgagtggagac

SEQ ID NO: 19579 - DNA, 503 bp, Homo sapiens
  misc_feature (1)...(503): n = A,T,C or G
aggggnnnagnatgnccgggnnnnnnnnnaattgaccgactgacgcgcctgcaggaattccgcacgagttcagctccagtatcaaatgattttttcaatatggctcctggcattcagtcctcacatgtgtgaacacctgcggcgctataatatcattccagttctgtctgatatccttcaggagtctgtccaagacaaagtaacaagaatcattcttgcagcatttcgtaactttttagaaaaatcaactgaaagagaaactcgccaagaatatgccctggctatgattcactgcaaagttctgaaacagttggagaacttggaacagcacaagtaccatgatgaagatatcagcgaagatatcacatttcttttggaaaaacttggagagagtgtccaggaccttagttcatttgatgaatacagttcacaacttaaatctggaagggtggaatggagtcctgtgcacaaaactgagaaattttggagagagaatgctgtgc

SEQ ID NO: 19580 - DNA, 490 bp, Homo sapiens
  misc_feature (1)...(490): n = A,T,C or G
aggggnangngnncggnnnnnnnnnaatgaccattcgagcttcgcacgagccccctccatgagggacccgccaggccgatcaggccccctcccaccacctcctccagtaagcagaaacggcagcacatctcgggccctgcctgctacccctcagatgccatccaggagtggagtagacagtcccaggagtggacccaggcctccccttcctcctgataggcccagtgctggggcacctcccccacctccaccatcaacatctattagaaatggcttccaagactctccatgtgaagatgagtgggaaagcagattctacttccatccgatttccgatttgccacctccagagccatatgtacaaacgaccaaaagttattccagcaaactggcaagaaacgaaagccggagtggatccaaccgaagagaaaggggtgctccaccactccctcccatcccgaggctattgcttgcttcagctgcagcctgc

SEQ ID NO: 19581 - DNA, 476 bp, Homo sapiens
  misc_feature (1)...(476): n = A,T,C or G
ggggccattgaaaaagtcangcctgcaggaattcggcacgagctaagaaggagctgatgtggaggagcagctgagacagttcaagatgacgaccacagtagccacagactatgacaacattgagatccagcagcagtacagtgatgtcaacaaccgctgggatgtcgacgactgggacaatgagaacagctctgcgcggctttttgagcggtcccgcatcaaggctctggcagatgagcgtgaagccgtgcagaagaagaccttcaccaagtgggtcaattcccaccttgcccgtgtgtcctgccggatcacagacctgtacactgaccttcgagatggacggatgctcatcaagctgctggaggtcctctctggagagaggctgcctaaacccaccaagggacgaatgcgcatccactgcttagagaatggcttgttcttgagaactttcccatcaagaatttagtagaagcagg

SEQ ID NO: 19582 - DNA, 457 bp, Homo sapiens
cctttgcccctcgctgcacgattcggcacgagaacactgcagcagttcctaaatgattctcacaagcaaccctgagagagacagtcttgtgagggagatctgggggaggcaggaagctcctcagattttctcacagacccttcccaattccatcaccactgccaacaactcctcccccagagatctggctggagcccagaaaaagaagcatgtggtttaaaaaatgtttaaatcaatctgtaaaaggtaaaaatgaaaaacaaaaacaagcaaacaaacaaaaaacaatggaaaagatgaagctggagagagaggaaccagttgccaaggtagagagctgcccgctcctgccctctggatgacataggggacatcaacaagacggctgccaacctgagaagtcaccaaaccacaaaaataaccttacagccttcagggaaagactaccagctctgtc

SEQ ID NO: 19583 - DNA, 476 bp, Homo sapiens
  misc_feature (1)...(476): n = A,T,C or G
nggtggctttgccctcctgcaggcattcggcacgaggagttacagaaacatagagctggcaattccatgcttattcctagcatgtctgttacgatggaaacaagcatgattatgagcaacatccaccgaatcattcatgaaaatgaaagattgaagcaagagatccttgaaaagagcaatcggatagaagaacagaatgacaagattagtgaactaattgaacgaaatcagaggtatgttgagcagagtaacctgatgatggagaagaggaacaactcacttcagacagccacagaaaacacacaggccaaggtgacagaggagttagcagcggccactgcacaggtctctcatctgcagctgaaaatgactgctcaccaaaaaaaggaaacagagctgcagatgcagctgacagaaagcctgaaggagacagatcttctcaggggccagctcaccaaagtgcaggcaaagctctc

SEQ ID NO: 19584 - DNA, 384 bp, Homo sapiens
  misc_feature (1)...(384): n = A,T,C or G
aatgccccctgcggattcggttgagcacgctgccggtnggcgacgcacagcaatgtgtgataccagctctctgccagactgagagggcaagccgtgttgtttggtgcagggatgcttttgaggctggacaggagggtctggtcctgcctttggggccaacgctggctctgaagtgtctttttcagaggaattggactggagtgaatgggcacaggggtggagcgcagggcagccccagtcaccacgagctgtttcatttgtgtaaatacgatgctgaattttatgaggctgagttaagagtgggcactgacgggcccctaatatgtgacatgacgatttggcatagatagggatgtgagagtggagtaccttcctttctcaagt

SEQ ID NO: 19585 - DNA, 502 bp, Homo sapiens
  misc_feature (1)...(502): n = A,T,C or G
gaggtnnnnnnaatagacgtctgtagacttcggcacgagctcaggtgcagttggtgaataatcggtttaaaggagtcaagtatttccgcttgaataccctagcctctctaggttatgtggttgtagtgatagacaacaggggatcctgtcaccgagggcttaaatttgaaggcgcctttaaatataaaatgggtcaaatagaaattgacgatcaggtggaaggactccaatatctagcttctcgatatgatttcattgacttagatcgtgtgggcatccacggctggtcctatggaggatacctctccctgatggcattaatgcagaggtcagatatcttcagggttgctattgctggggccccagtcactctgtggatcttctatgatacaggatacacggaacgttatatgggtcaccctgaccagaatgaacagggctattacttaggatctgtggccatgcaagcaagaaagttcccctctgaaccaaatcgtttact

SEQ ID NO: 19586 - DNA, 476 bp, Homo sapiens
  misc_feature (1)...(476): n = A,T,C or G
agtggannnnnnaatgaaatcgatcccgctgcaggcctcgcccgcgggaagccttctgggagcccacatccagtgatgaggggggagctgcaagtgatgacagcatgacagacctgtacccacctgagctattcaccagaaaggaccttggaagcacggaggatggggatggcactgatgactttttgacagacaaagaggatgagaaggcaaagcccccaagagagaaggccactgatgagggcaggagagagacgaccgtgtaccgagggctggtccagaagcgcgggaagaagcagttgggctcgttgaaaaagaagttcaagagtcatcaccgcaaacccaagagcttcagctcctgtaaacagtcaggttaataaaagcacatgccgtgaagaaaaaaaataaaaaaaaaaaaaaaaatcctggggggggggccgggcccccaattccccttatagggaggcgtataacaa

SEQ ID NO: 19587 - DNA, 495 bp, Homo sapiens
  misc_feature (1)...(495): n = A,T,C or G
tgtgaggcaggngcnnnnattgaccgccttcggaatccgtacgagcttgacgaggctgcggngtctgctgctattctccgagcttcgcaatgccgcctaaggacgacaagaagaagaaggacgctggaaagtcggccaagaaagacaaagacccagtgaacaaatccgggggcaaggccaaaaagaagaagtggtccaaaggcaaagttcgggacaagctcaataacttagtcttgtttgacaaagctacctatgataaactctgtaaggaagttcccaactataaacttataaccccagctgtggtctctgagagactgaagattcgaggctccctggccagggcagcccttcaggagctccttagtaaaggacttatcaaactggtttcaaagcacagagctcaagtaatttacaccagaaataccaagggtggagatgctccagctgctggtgaagatgcatgaataggtccaaccagctgtacattttgaa

SEQ ID NO: 19588 - DNA, 404 bp, Homo sapiens
  misc_feature (1)...(404): n = A,T,C or G
ggggaattgatncncccctnnnnnnnnnccnaatggatccgcgctgcaggaattcggcacgagctctccttccttccacctgtcagcttctctgcttctgagataagaaccatttgtgtaacaccaacacttaacttcagaaagacatgcattatgtggtgtaatcaaacccgatgctttcagatgacctacttacatcttcaatgtggataagataaagaacaaaacacatgcatctaaactgctgggcaatccagttgacttttaaatgtaagaatggaattccaaacacttaacacattcagctatatgacagaaagtaaatctatggatatggtattttgtgaatgatcttttaaataaaagaaaaccttacgtaatatttaaaaaaaaaaaaaaaaaaa

SEQ ID NO: 19589 - DNA, 478 bp, Homo sapiens
  misc_feature (1)...(478): n = A,T,C or G
tgtggggnnnnnaattgaaattgatgcgcgctgcagcgaaaacgttagattatccacttcagatttcatgttttcatttgtaaggataaacttttcccacaaattttcaacaatcattgtagaaactaagggggagaaagtaatctcagttgttttagaaacgaaaaagttaagcattgtttacttgaagtgggcagggaagcagcactgagtaaagttcaattgagtggttacagtctagggcagtggttcccaactctccgatcagaatcatctgggaagcattttcaaacagcaaagtactttgaaaaccattattaaatagaattatgcatgaattactgtttcagatcctttaatgtggtagttggtaataataagatgaaattcctctgttgttagtaaaattatgaaattgaagttctgcagcatgtcaggccaggattattagggagattcctcgaaactagtgtgtgtn

SEQ ID NO: 19590 - DNA, 477 bp, Homo sapiens
  misc_feature (1)...(477): n = A,T,C or G
aggggccnattgaccctcgtccctctgcaggaattcggcacgagagataatggaaaagaaataccacaatgttggtcttagtaaatgtgaaataaaagtagccatgtcgaaggaacaatatcagcaacagcaacagtggggatctagaggaggatttgcaggaagagctcgtggaagaggtggtgaccagcagagtggttatgggaaggtatccaggcgaggtggtcatcaaaatagctacaaaccatactaaattattccatttgcaacttatccccaacaggtggtgaagcagtattttccaatttgaagattcatttgaaggtggctcctgccacctgctaatagcagttcaaactaaattttttgtatcaagtccctgaatggaagtatgacgttgggtccctctgaagtttaattctgagttctcattaaaagaaatttgctttcattgttttatttcttaattgctatgct

SEQ ID NO: 19591 - DNA, 510 bp, Homo sapiens
  misc_feature (1)...(510): n = A,T,C or G
tggngttccnaagggggggnnnnnaattgattncccccattgacccgcgctgcaggaattcggcacgaggcgccgtccacgccgctcttgacagtccgaggatcagaaggactgtacatggtgaatggaccaccacattttacagaaagcacagtgtttccaagggaatctgtgaagaattgcaaagtctgtatctttagtaaggatgggaccttgtttgcctggggcaatggagaaaaagtaaatattatcagtgtcactaacaagggactactgcactccttcgacctcctgaaggcagtttgccttgaattctcacccaaaaatactgtcctggcaacgaggcagccttacactacttctaaagatggcacagctgggatacccaacctacaactttatgatgtgaaaactgggacatgtttgaaatctttcatccagacaaaaatgcaaaattggggtccatcctgggcagaagatgagactctttgtgcccgcaatggtaacaag

SEQ ID NO: 19592 - DNA, 496 bp, Homo sapiens
  misc_feature (1)...(496): n = A,T,C or G
cgtnattanagganggtgacccggngtaannnnnaccttgatcgccnctagtaatccgctccgagcacccgttgacagcctgctaggtgatggtttatgaggattctgggtttcattgctcctagtttcatctgcttcatctgttgtaaactcttcttcctttatttcagtggtgaagggatagagagtgggataggaaaatatttactcaggatatgtgatttaaccttatactctatgttgaagtaaggtattaagtgacagatactaaagtgaatatgcaggaggaatgctgtctccgatatctcaccgtgggaatgagtgcactgattcaaacgttgctgcactgaagctcagacacacttgaaactccaaatttgaaattacctacagttctgtgcacatacttttcaatactccccgacggaagagcaagggtggatttaattttttaacaagtggacagtccagctgaagacaaatcagaagataaatt

SEQ ID NO: 19593 - DNA, 484 bp, Homo sapiens
  misc_feature (1)...(484): n = A,T,C or G
nggcttgacngcctgagngaanncatagatacgcgctgcaggcgccgacggaggaggccttttaactacggcctctccatcgaagaaaaaaatgataatgatgaaaactcattaagcagttcctccgacagtagtgaagacaaggatgaaaaaataagtgaagaatgtgatattgaagaaaagactgaagtgaaagaagaaccggagcttcaaacaaaaagggaaatggaagaaagaacagtaactctagaaatccctgaagttctgaagaggcagctggaggatgattgttactacattaatcggaggaaacggttagtgcaacttccatgccacaccaacatcataacgattttggaatcctatgtgaagcattttgctatcagtgcagccttttcagccaatgagaggcctcgtcaccatcacgctatgccacatgccagcatgaacgtgccttatatcccagcagaaaagaatattgacn

SEQ ID NO: 19594 - DNA, 493 bp, Homo sapiens
  misc_feature (1)...(493): n = A,T,C or G
nagggcggagccggtgaaattgaagattgacggcttcgaatncgccgagctccccctccctagccattaacttctctgaactttgcctaacacagctgtaaaatggggaccattccactactttattcacctctaaggaggatcagagaagggggtatgcaaaaccacaaagggctaatccaagattaaattcttcccctcctcccctatgtgagataaggcaaacagatgtccatcacaaaccagttgtttctgtcagagggtgggttttcatgatgtgattcagtaatcgcggttctttcagtcttgtggctctgctgtcttcacacatctgctaaggtcactgtggtcttttgcatcaagctattgaaggggacaaagcatggaggggtgtgtgaggaaggtggtacatatctgtttaagttccgttagctagaactcagtcactgctttgcctcatgacaaaagaggcagaggaatatagtctagccat

SEQ ID NO: 19595 - DNA, 506 bp, Homo sapiens
  misc_feature (1)...(506): n = A,T,C or G
ggatanaatnanagcnacaacncccgccaacaccccaatcgaccgcctgatgaatnccgccgaggagaagtaccaactaaagtggcagtgtttcttctgaaattctcaggcagtcagactgtcttatgcacatcttgataaaatagcccttatccaggtttttatctaaggaatcccaagaagactggggaatggagagacagtcaagggttatgtcagaaaaggatgagtatcagtttcaacatcagggagcggtggagctgcttgtcttcaattttttgctcatccttaccattttgacaatctggttatttaaaaatcatcgattccgcttcttgcatgaaactggaggagcaatggtgtatgacaagccgccgaaatttgccatgtcacgagagcaaatgtcacagtcatgttctcacacggcacataatgcaagtctgttgacagatgcgggtccattgtcatgtggggagtcgagggcgagctgtttgtttttgtaatga

SEQ ID NO: 19596 - DNA, 473 bp, Homo sapiens
  misc_feature (1)...(473): n = A,T,C or G
gtggtgtnnnaattgacctcatgcgcgatttccgcacgaggtgaagtggacatgttgaaaattaggtctgaattcaagagaaagtacggcaagtccctgtactattatatccagcaagacactaagggcgactaccagaaagcgctgctgtacctgtgtggtggagatgactgaagcccgacacggcctgagcgtccagaaatggtgctcaccatgcttccagctaacaggtctagaaaaccagcttgcgaataacagtccccgtggccatccctgtgagggtgacgttagcattacccccaacctcattttagttgcctaagcattgcctggccttcctgtctagtctctcctgtaagccaaagaaatgaacattccaaggagttggaagtgaagtctatgatgtgaaacactttgcctcctgtgtactgtgtcataaacagatgaataaactgaatttgtactttaaaaaa

SEQ ID NO: 19597 - DNA, 497 bp, Homo sapiens
  misc_feature (1)...(497): n = A,T,C or G
aggnnagnncncnattcgcctggctgcagcaattcggcacgaggaacacagaagctgtagctgaacacaggctggctggtgggcttcctaggccagcccagcttgtatgggttctggctacaccagagcaccaagagcccacttgcctgggatggccccacactgtcactcagctgttctttgatcatttttttctagattgatgctcctttctcccatgcattgagctcccatctagcttcagcagggcagaacccttctccagatgtgtgtaacttatgtctgagtatctgggagtagttgaagaacagataattccttccaaacatcaagccttgggattcttggagcaagcagaaagccagtaacttcgctctgttagaggtggaggattttcctatggttccccccatttcctgatttgtatttttagatggattaaatagtctcctgtttttaaaaaaaaaaaaaaaaaaaaactcgggggggggcccggc

SEQ ID NO: 19598 - DNA, 475 bp, Homo sapiens
  misc_feature (1)...(475): n = A,T,C or G
attgagtccatgggaaatncnaattgatccccctgcangaattccgcacgagaattagtgtacgcgatgcccggaatggactgctcctcagaactctggagggccatagcaaaaccattctttgcatgaaggtggtgaatgatctcgtgttcagtggctccagtgatcagtcagtccatgctcacaacattcacactggtgagctcgtgcggatctataaaggtcacaatcatgcagtgactgtggtgaatatcctaggaaaagtgatggtgactgcttgcctggataaatttgttcgtgtctatgaattacagtctcatgatcgattacaagtttatggaggacacaaagacatgattatgtgtatgaccatccataaaagcatgatttacactggctgttatgatggcagtattcaggccgtgaggcttaatctgatgcagaattaccgctgttggtggcatggttgctctcn

SEQ ID NO: 19599 - DNA, 458 bp, Homo sapiens
  misc_feature (1)...(458): n = A,T,C or G
nattgcccgcctgctgtgcccgccagccagtggccgaaccccccactccctgccaccgtcacacagtatttattgttcccacaatggctgggagggggcccttccagattgggggccctggggtccccactccctgtccatccccagttggggctgcgaccgccagattctcccttaaggaattgacttcagcaggggtgggaggctcccagacccagggcagtgtggtgggaggggtgttccaaagagaaggcctggtcagcagagccgccccgtgtccccccaggtgctggaggcagactcgagggccgaattgtttctagttaggccacgctcctctgttcagtcgcaaaggtgaacactcatgcggcccagccatgggccctctgagcaactgtgcagcaccctttcacccccaattaaacccagaaccactaaaaaaaaaaaaaaaaaaaaaa

SEQ ID NO: 19600 - DNA, 576 bp, Homo sapiens
  misc_feature (1)...(576): n = A,T,C or G
tgtcacgtttgtcgtgaatcgttagttcgtatacacagacatccttaataataactctctcaatcattatatcaccggtggaataccacaaaagaaagaattggaanaccattaagatttgcatcgcgctcgcagaaanaccgcacgagccaggtccagcaggccctgggcatgtacagcgcagccttggcctcggggcagctgggccccctcatgtgccagttcggtctgcctgcagaggctgtggaggccgccaacaagggcgatgtggaagcgcttgccaaagccatgcagaacaacgccaagcccgagcagaaagagggcgacacgaaggacacgaaggacaagaaggacgaagaggaggacatgagcctggactgagccacgcgccgtcctccgaggaactgggcgcttgcagtgcgttgcacaccctcacctcccacccactgattattaataaagtcttttcttttacctgccaaaaaaaaaaaaaaaaaaaacttggggggggggccgggccccaatttgcccttatgggggggttaaaaaaaactgggggcgggcgtttaaacagtg

SEQ ID NO: 19601 - DNA, 479 bp, Homo sapiens
  misc_feature (1)...(479): n = A,T,C or G
ntttgacccgcgctgtaggaattcggcacgagatttcttaggggatggtagacctttattgggtatcaagacatagcatccaagtggcataattcaggggctgacacttcaaggtgacagaaggaccagcccttgagggagaacttatggccacagcccatccatagtaactgacatgattagcagaagaaaggaacatttaggggcaagcaggcgctgtgctatcatgatggaatttcatatctacagatagagagttgttgtgtacagacttgttgtgactttgacgcttgcgaactagagatgtgcaattgatttcttttcttcctggctttttaactcccctggttcaatcactgtcctccacacaagggaaggacagaaaagagagtggccattctttttttctttggcccctttcccaggccctangctttgggacccaaggaaactgcatggagacgcatttcggtgagaag

SEQ ID NO: 19602 - DNA, 462 bp, Homo sapiens
aatagaccgccttcggaattcggcacgaggagaaactgaaacgacaggggaaaggaggtctcactgagcaccgtcccagcatccggacaccacagcggcccttcgctccacgcagaaaaccacacttctcaaaccttcactcaacacttccttccccaaagccagaagatgcacaaggaggaacatgaggtggctgtgctgggggcaccccccagcaccatccttccaaggtccaccgtgatcaacatccacagcgagacctccgtgcccgaccatgtcgtctggtccctgttcaacaccctcttcttgaactggtgctgtctgggcttcatagcattcgcctactccgtgaagtctagggacaggaagatggttggcgacgtgaccggggcccaggcctatgcctccaccgccaagtgcctgaacatctgggccctgattctgggcatcctcatgaccatt

SEQ ID NO: 19603 - DNA, 492 bp, Homo sapiens
  misc_feature (1)...(492): n = A,T,C or G
nagaggcnnaattgacgtctgaggacttcgcgcgagcggttttaagcggaagatggaggagccggaggaaccggcggacagtgggcagtcgctggtcccggtttatatctatagtcccgagtatgtcagtatgtgtgactccctggccaagatccccaaacgggccagtatggtgcattctttgattgaagcatatgcactgcataagcagatgaggatagttaagcctaaagtggcctccatggaggagatggccaccttccacactgatgcttatctgcagcatctccagaaggtcagccaagagggcgatgatgatcatccggactccatagaatatgggctaggttatgactgcccagccactgaagggatatttgactatgcagcagctataggaggggctacgatcacagctgcccaatgcctgattgacggaatgtgcaaagtagcaattaactgggtctgagggtggcatcatgcanagaaaga

SEQ ID NO: 19604 - DNA, 488 bp, Homo sapiens
  misc_feature (1)...(488): n = A,T,C or G
aggntccnnnnnnttagacggctcgaccagcttcagaatgcgcactagcatccacacgtgctgggactacaggtgtgagtcaccacacccggcctatatagatttgaaagcatactctatatatagatatgggcctagggacaggcatcctcagcatctgatttaggagatgatggccaagctagctaactatgaattaaacattcacatatccagtctacctggtccagtaataatacaagcaaatcttgtatttcaggaacaaatcaagggtctcttaattttttggcttatatacaatgaagtaaaaacttgataaacatggtttcaaattgaggaggagagtcttggatgtatgttttaatatgtataccttataattctgcctctagccaaatgctatgtttgcaaaatgtggcatctgttagtttttattgtctgtgtcttctatgttactataccttgggtaattntgtgttaccaaaaaa

SEQ ID NO: 19605 - DNA, 469 bp, Homo sapiens
  misc_feature (1)...(469): n = A,T,C or G
attgtgccctcgctgcacgactgcaggantgacagcacgagatacggctggcatctgttccaggaagtcagaccgtggtcgttgaagaaatcactattcacactaagctccctgccaaggatgtgtacgagcggctgattgacaaatgggatgaactaaaggaggcaggggtcagtgacatgaagctaggggaccaggggccaccggaggaggccgaggaccggttcagcatgcccctcatcatcaccatcgtctgcatggcgtcattcctgctcctcgtggcggccctctatggctgctgccaccagcgcctctcccagaggaaggaccagcagcggctaacagaggagctgcagacagtggagaatggttaccatgacaacccaacacttgaagtgatggagacctcttctgagatgcangagaagaaggtggtcagcctcaacggggagctggnggacagctggat

SEQ ID NO: 19606 - DNA, 502 bp, Homo sapiens
  misc_feature (1)...(502): n = A,T,C or G
agcccnnnnnnnnnattgaattcgcccgcgctgcaggaattcggcacgagcccgtcctctttccgccatctttccacgccgccacaatggcgcgcatgaatgtcctggcagatgctctcatgagtatcaacaatgcctaacagagaggcaaacgccatgtgcttattaagccgcgctacaaagtcatgggccgggttctcactgtgatgatgaagcatggttacattggcgaatttgaaatcattgatgaccacagagctgggaaaattggtgtgaaccttacatgcaggctaaacaagagtagggggatcagccccagatttgacgtgcagctcaaagacctggaaaaatggcagaataatctgcttccatcccgccagtttggtttgattgtactgacaacctcagctggcatcatggaccatgaagaaacgagacgaaaacacacaggagggaaaatcctcggattctttttctaaggatgtaatacatatatttacaa

SEQ ID NO: 19607 - DNA, 471 bp, Homo sapiens
  misc_feature (1)...(471): n = A,T,C or G
attagaccaaccttttgccccgccctgcaggaattcggcacgagcagatttgaaggagccgctgaaagttcttggcattactgacatgtttgattcatcaaaggcaaattttgcaaaaataacaacagggtcagaaaacctccatgtttctcatatcttgcaaaaagcaaaaattgaagtcagtgaagatggaaccaaagcttcagcagcaacaactgcaattctcattgcaagatcatcgcctccctggtttatagtagacagaccttttctgtttttcatccgacataatcctacaggtgctgtgttattcatggggcagataaacaaaccctgaagagtatacaaaagaaaccatgcaaagcaacgactactttgctacgaagaaagactcctttcctgcatctttcatagttctgttaaatatttttgtacatcgcttctttttcaaaactagttcttatgaacagn

SEQ ID NO: 19608 - DNA, 470 bp, Homo sapiens
  misc_feature (1)...(470): n = A,T,C or G
ccttgcttcgcctgccgttttttttggaaagaggttttagtgcggccgcagggagcaccacctcagcctcaggcgctagtgaggacacaggccgtcctccggcggggagcacggtggggtcagggtgctgtgtggtcccgcaaagaggcagctgagcttgggcctcaggtcgttccacaccttgctcatctccttgtgcccttggatctgagagttgacgaaggcgcggaggatgtgggaggtgaggggcaggtagacgtggatgagctgcgtctcctggtgcaggcagtacagggagaagtagttccgcagctccatcgtctgaatcgcgttctcctgctccacgatgcgggactccagctgctccacggactccggcttgcggatctaggcggtggcgctcatcatctgcctcttcatcaggctgtacttgtgcagggcccgctggtgcttgtgcaacacgcccttcn

SEQ ID NO: 19609 - DNA, 496 bp, Homo sapiens
  misc_feature (1)...(496): n = A,T,C or G
cgcgcccccattgccactgacgngcntgcaggaattccgcacgagagcgggagcgcgcttaagtaactagtccgtagttcgagggtgcgccgtgtccttttgcgttggtaccagcggcgacatgacggggtacactccggatgagaaactgcggctgcagcagctgcgagagctgagaaggcgatggctgaaggaccaggagctgagccctcgggagccggtgctgcccccacagaagatggggcctatggagaaattctggaataaatttttggagaataaatccccttggaggaaaatggtccatggggtatacaaaaagagtatctttggtttcactcatgtacttgtacctgtctggattattcattattacatgaagtatcatgtttctgaaaaaccatatggcatagttgaaaagaagtccagaatattccctgggtgatacantctggagactggagaagtantnncaccnatgaaagaattttctgan

SEQ ID NO: 19610 - DNA, 345 bp, Homo sapiens
  misc_feature (1)...(345): n = A,T,C or G
aatcaggctgcagccccctccccgctcccacctccctgctgggaaaccacagcattatcacagcattattgtgacagccacgaacccattgcccacaacccctccaccctcggtcaccccaacctctggctctgagccctgttctgaccaaatcatgatgatgagtatttgggggtgggtgggtaagggggggagtgggaggngacggaaccaactntttctgtattttgtattgaatgttttcttcaacatgtaaccaatcagtatcttgcaatatagtcagccgatcgatcgacaaaaaaaaaaaaaaaaatctcgggggggggcccgggccccatttcccct

SEQ ID NO: 19611 - DNA, 465 bp, Homo sapiens
  misc_feature (1)...(465): n = A,T,C or G
aatggaccgccannatatcccccgcgctgcaggaattcggcacgagctgcggtggagccgccaccaaaatgcagattttcgtgaaaacccttacggggaagaccatcaccctcgaggttgaaccctcggatacgatagaaaatgtaaaggccaagatccaggataaggaaggaattcctcctgatcagcagagactgatctttgctggcaagcagctggaagatggacgtactttgtctgactacaatattcaaaaggagtctactcttcatcttgtgttgagacttcgtggtggtgctaagaaaaggaagaagaagtcttacaccactcccaagaagaataagcacaagagaaagaaggttaagctggctgtcctgaaatattataaggtggatgagaatggcaaaattagtcgccttcgtcgagagtgcccttctgatgaatgtggtgctggggtgtttatgg

SEQ ID NO: 19612 - DNA, 509 bp, Homo sapiens
  misc_feature (1)...(509): n = A,T,C or G
agggggaaattgatcggcccgtgganattgatcggcgttaggatntggacctgtntataagggtaaatggcacggagatgttgcagtaaagatcctaaaggttgtcgacccaaccccagagcaattccaggccttcaggaatgaggtggctgttctgcgcaaaacacggcatgtgaacattctgcttttcatggggtacatgacaaaggacaacctggcaattgtgacccagtggtgcgagggcagcagcctctacaaacacctgcatgtccaggagaccaagtttcagatgttccagctaattgacattgcccggcagacggctcagggaatggactatttgcatgcaaagaacatcatccatagagacatgaaatccaacaatatatttctccatgaaggcttaacagtgaaaattggagattttggtttggcaacagtaaagtcacgctggagtggttctcagcaggttgaacaacctactggctctgtcctctggatggccccag

SEQ ID NO: 19613 - DNA, 494 bp, Homo sapiens
  misc_feature (1)...(494): n = A,T,C or G
atagataccccntnaanantttgacccgcgctgcaggaattcggcacgagcatgggttctgacttcagccaaacaaaacaatcaaaacctaccaaaaagggactggattgtaatgtcctctccatcatcctcagtgtgagtcctcagagcctccatctgccaagaacattcagttggattccatcgtttggtttagcttgcttgcacgggttgtaggaaatgtctaatttgtaaatgttaatagatacctttggaaagaaaaaaaaaaaaaaaaaaaaaaaaaaaaaaaccctggggggggggccgggcccccattcccccttttgggggggggtttaaaattcccggggcggggttttaaaaagggggggaggggaaaaaaannnnnntnnnnnnnnnnnnnnccnntntctcctctccttcctnncnctccttcctccccctccttttttctttttttctttttctcccctcctctcttctcttttccctcc

SEQ ID NO: 19614 - DNA, 500 bp, Homo sapiens
  misc_feature (1)...(500): n = A,T,C or G
gggnncgcnnnnnntttcgacttacatgcacgccagcatctaagcaaaccctgggcttgcccgcagctgtgccctccctccctccatttggttctctctacctgaaatttcctccttccctatctttgatcttgcctaagctccctaaaagccttaaatgccactctctccatgcctggagtctcttccagtcatggagccagaagcattatctgtccttaggaagctcactcactctctctctgcttttactttggaattcttttatacctgccattagagtggggctgtgcgtctcacatcttggcttttccaggagattataagttcctgaaggcggggactccgtgtctggctcatctgtgtccgtagaggcttaatacatgttctgatgattgactgggttttcttgttagtaatgagctgatgtattgcattatgggagaaggatctgggaattctgcattcaattccagaactggttctaattcccttacact

SEQ ID NO: 19615 - DNA, 504 bp, Homo sapiens
  misc_feature (1)...(504): n = A,T,C or G
cgccattgaccccgctgaggcaaantgctcgcgctgcaggaattcggcacgagtgcaactgtgcagtgttcccactgcaaactacggatggggtaaaagactgctcacctcctatttctcatctaatctcacacactctgtttgatgaggctatggagaaacaggtcttctcatacactaaaggtgggagtacaaacaattcaagccctgtgcaggacaattaggcaatacctatcaaaattatacatgatttttcctgctgacccagcaattccacttctgggaataattgacagatataggtgcatatgtacaaaatgatggaaagctctctggtatatattagtaagtgataaaacaaggtgtaaaatagtgtatatatggctactaccttttgttttaaaaatgggggaaaatggtggagcttgcggtgagccgaaatcgtgccactgcactccagcctgggcgacagagcgagactccgtctcanaaaaaaaacagggg

SEQ ID NO: 19616 - DNA, 410 bp, Homo sapiens
gaattccgcacgagggaattacctgccctaacccctccctcaataaatacattactgtactctggaatttaggcaaaaccttaaatctccaggctttttaaagcacaaaatataaataaaagctgggaaagtaaaccaaaattcttcagattgttcctcatgaatatcccccttcctctgcaattctccagagtggtaacagatgggtagaggcagctcaggtgaattacccagcttgcctctcaattcattcctcctcttcctctcaaaggctgaaggcagggcctttccagtcctcacaacctgtccttcacctagtccctcctgacccagggatggaggctttgagtcccacagtgtggtgatacagagcactagttgtcactgcctggctttatttaaaggaactg

SEQ ID NO: 19617 - DNA, 472 bp, Homo sapiens
  misc_feature (1)...(472): n = A,T,C or G
gtggtgannnaatgagaccaagagcatttgcgcacgagggctggaggacccgtcccggctgcggagtcgctacctgggaagaagagaatttatccatttattataacttgaagcaacccttaatgtgcatgatgggtgtgttaatacaatctgttggaatgacactggagaatatattttatctggctcagatgacaccaaattagtaattagtaatccttacagcagaaaggttttgacaacaattcgctcagggcaccgagcaaacatatttagtgcaaagttcttaccttgtacaaatgataaacagattgtatcctgctctggagatggagtaatattttataccaacgttgagcaagatgcagaaaccaacagacaatgccaatttacgtgtcattatggaactacttatgagattatgactgtacccaatgacccttacacttttctctcttgtggtgaagatggn

SEQ ID NO: 19618 - DNA, 465 bp, Homo sapiens
  misc_feature (1)...(465): n = A,T,C or G
gtggttctnnattccatgcggcttggcaaattncgccgaggcggcggtagcatggagggggagagtacgtcggcggtgctctcgggctttgtgctcggcgcactcgctttccagcacctcaacacggactcggacacggaaggttttcttcttggggaagtaaaaggtgaagccaagaacagcattactgattcccaaatggatgatgttgaagttgtttatacaattgacattcagaaatatattccatgctatcagctttttagcttttataattcttcaggcgaagtaaatgagcaagcactgaagaaaatattatcaaatgtcaaaaagaatgtggtaggttggtacaaattccgtcgtcattcagatcagatcatgacgtttagagagaggctgcttcacaaaaacttgcaggagcatttttcaaaccaagaccttgtttttctgctattaacaccaagn

SEQ ID NO: 19619 - DNA, 476 bp, Homo sapiens
  misc_feature (1)...(476): n = A,T,C or G
cggtgcccaaattgaccgtctgtangcgcctatgtgcctggaaactctctcctgtgcctggagaggtgggaggcagctataatcttggcggaatgaatacctactaggagcaaccttcatccaatgactaacaggagctggggtatcaattccccagctcccagtgctcaggcccactgagatgttcctctgtctgccatgcctcacggcctgactgaccgtaccagtgaacccagcgtacccctggccctggcagccggacggctgatgcatgcaaagcgggcatctccttgcccagccgcctgaccgccctggcgcggccgaatctgaaagctaatgacattattgtgcagagacacaatgtctgtgggcatttgctgacccgagctttggtgagagcttaatccagcattctcaccctgcttttcgcaggagcacagncgtcactcatcttggcacccgcactttctgggaag

SEQ ID NO: 19620 - DNA, 468 bp, Homo sapiens
atttgccccgcgctgcaggaatttggcacgaggtgatacacgtgtacattgtttaagagcatagtctagtgtgagtaggccattaaggggaaggatattcatgaaagaatttacgcaacctgttatttacaaagccttcacgtctgtaaggtgcttggcctacttttttttttaaattagtatacatgcataaaaccttgtatcatcaatatacaaattattctgttaggggacatgtttttgttctccatgtttctgtttctattggggaatgagttgtatttgtatcactgagataacctattgttatattctaattcattgataatatgttttggaagaaaagctgacatccttcattgcaagtgaagaacaggtttaccatgaaatgaatgcctttattcaacttagagtcctaatgtttctgatttcacattcttgttgctgaaatgcagaagaaacagctac

SEQ ID NO: 19621 - DNA, 462 bp, Homo sapiens
  misc_feature (1)...(462): n = A,T,C or G
aatagaccgccttcggaattcggcacgagtcgccctggagcctgccctggcgtcccccgcgggcgccgccaacttcttggccatggtagacaacctgcagggggactctggccgcggctactacctggagatgctgatcgggacccccccgcagaagaaattgcaggtgctgcagtgtctgaaatttccgggcctttctcaacagaggatgtagccagcaactgtgtccccgctcagtctttgagcgagcccattttgtggattgtgtcctatgcgctcatgagcgtctgtggagccatcctccttgtcttaatcgtcctgctgctgctgccgttccggtgtcagcgtcgcccccgtgaccctgaggtcgtcaatgatgagtcctctctggtcagacatcgctggaaatgaatagccaggcctgacctcaagcaaccatgaactcagctattaagaaaatcn

SEQ ID NO: 19622 - DNA, 503 bp, Homo sapiens
  misc_feature (1)...(503): n = A,T,C or G
aattagccncgcgctgcaggaanatttgcaccgcgctgcaggaattcggcacgagctcaagctatggctttatcatgagagtagcttgatcagattgtattttggagactctgtgcttcctagtgtgtggaggccagcttaaaagcctggagtcccaacttaattgatgactttggagaaaaacaagagaactgaggataataaataaccaagaaagctaggtgaataactgtaagatataggtgagagcagaagtcagatcttcagattttaatgacagaatgtcaccttttcaatcagcaacaaagtagccgagtataatcttcaaccatctgctctctgggagaggagagaggagaggggaaggagcgaggaatgaggagccagagagattgatttagctaatcacttctaactctttcattaaatttttatggagaattaatacaggctgggcgcagtgggtcgtgctgtaatcccagcactttgggaggctgaagtgg

SEQ ID NO: 19623 - DNA, 478 bp, Homo sapiens
  misc_feature (1)...(478): n = A,T,C or G
nttgatcgccctcggnaantttgaccgcctgcggtgaattcgagtcgaaagcccgtgtcgggctggaaagaagaaaccgccaacctgagaacgctttcggcgagttactggcgggggaaatggggacagggaagtgggcaggcggggagactgcagccgcagatctccctggcggggaggtcgtggccactctttcctttgactctgcctcatttcattttgaatcctgatgtgacagaggcaattgcttgcttggataccatataggtaaaagtaacagttttcaactcgactcttgactacaccctgtacattcttggccggtgttggttttcttaggttatggatcatgttaaaggtacaccgatgtggtaaccgcacagtggccgatggtggcctgaggctcatatttatgggaattatctgatgaaagtacatccatcagaattggatttgtgcgtctgtgcctttattttgg

SEQ ID NO: 19624 - DNA, 498 bp, Homo sapiens
  misc_feature (1)...(498): n = A,T,C or G
atgggtgntnnnnaactgcgcgcctgcatgaattcggcacgagacaatttgtgcttctgagttgaggagccttcacctctgttgctgaggaaatggtagaatgctgcctatcacctccagcacaatcccagtgaaaaaggtgtgaagcacccaccatgttcttgaacaatcaggtttctaaataaacaactggaccatcaaaaaaaaaaaaaaaaaaacttgggggggggcccgggccccaatttccccttatagggaggcgaataaaaatccatgggccggggtttaaaaacggggggatggggaaaaaacggnnnnnnnnnnnnnnnnncnnnncncnnnnnnnnnnnnnnggnnctcncnctnnnntccctcnncccccncccccccctttccnnccnnncnngggccctgctttccncnctgncntgngccctttgggcctctgggtctggnngggncgggggtgtttttttttgtctggccgtcgtttggggg

SEQ ID NO: 19625 - DNA, 504 bp, Homo sapiens
  misc_feature (1)...(504): n = A,T,C or G
atgganatnnnnaattgaagcacgtcttgatgaattccgcacgagacaatttgtgcttctgagttgaggagccttcacctctgttgctgaggaaatggtagaatgctgcctatcacctccagcacaatcccagtgaaaaaggtgtgaagcacccaccatgttcttgaacaatcaggtttctaaataaacaactggaccatcaaaaaaaaaaaaaaaaaaacttggggggggggcccggcccccatttccccttatagggagtggaataacaattcatgggccggcttttaacaacgtggggactggaaaaaaanggnnncccnncncncctntnnntnangccttcccactgaagcgcttcctggtgcccatcgagagcattgagcggtctttcgggctgctctttgtgccaaacatcctggctcgggcaggcagcctcaatgccatcacggcgggcagtaaatgaaggtggaacccattgatactgtgggtgtttcacgccgg

SEQ ID NO: 19626 - DNA, 499 bp, Homo sapiens
  misc_feature (1)...(499): n = A,T,C or G
tcgaataatatatatggggaaaaaagggggaaaaanggttgaccgcctgttgaattccgcacgaggtttctccctctcaaaatgtgttactgtactcacctatctttggtccatggttgtctgtgggtgactgaaactgcatataaggcaggggactactgtaaccacaggtgttggaaggcagcatagcagagtagttagggtcaggactgcggaggaagactgcctaggttcatattatgatgtaaactctccatgcctcacttttcttatctaatgcggagataataatagtaactcatttgtaaagttattataagtattaaatgagaaaatacatgtaagacacttagagtatcacaggtcatcacttacttagtatgtagtaagtatttgatgaggttagttactattcttattgagcagtgaatcagttaggaatgctttcggctgcaaggaggagaatactgatttacagtggcctcagtgagaagcctgg

SEQ ID NO: 19627 - DNA, 460 bp, Homo sapiens
  misc_feature (1)...(460): n = A,T,C or G
nattgacccccgctgcatgaattccgcacgagagacgacgtgcagaaatggcacctcgaaaggggaaggaaaagaaggaagaacaggtcatcagcctcggacctcaggtggctgaaggagagaatgtatttggtgtctgccatatctttgcatccttcaatgacacttttgtccatgtcactgatctttctggcaaggaaaccatctgccgtgtgactggtgggatgaaggtaaaggcagaccgagatgaatcctcaccatatgctgctatgttggctgcccaggatgtggcccagaggtgcaaggagctgggtatcaccgccctacacatcaaactccgggccacaggaggaaataggaccaagacccctggacctggggcccagtcggccctcagagcccttgcccgctcgggtatgaagatcgggcggattgaggatgtcacccccatcctctctgn

SEQ ID NO: 19628 - DNA, 478 bp, Homo sapiens
  misc_feature (1)...(478): n = A,T,C or G
ngagggattgcnccctttcgcacggctgcaagttgctgtagagcatctgaccccttattaccaccttaagcaatgtatatgccatgcattaccatgcactaattcaatcacaggtgtttctatctagatttaaatatatttgtcaatgaatgtggaatagaaaatctaaacatgacaataatagacatatctttgtatggtaccagttagttttgccgtggatcagatggtttataaaagtaataaccataaagcaaaaaataatttgaaagcccgtctattcctatgctcaataaagttaagtttttcttcattagaacagttttatgatttatttgtctaggagtatgtcagaaaaatcaggcttttagtaggaattactcctattccccctgaagtcaggaccagtgcctgtgatctccattactttattttcctggaggtattagccaacacacgntagatcagagaaagcatt

SEQ ID NO: 19629 - DNA, 408 bp, Homo sapiens
  misc_feature (1)...(408): n = A,T,C or G
cagctccgcagtgcgggagattgtaaggaagcggtggcggctggtgaagcaagtctcacatgtcggtgttcttggccaatggatacaaagataaagaaaatgttgcctttttctaggaactgtcagaaatcctcatgcctttcaagacttctgtgaatgacttgaattttttattccctgcctagggtctgtgaacgaggcctgtctcttccctggggtttctttccatggcctttatttctcctcttccagtgggagttttgcaggctcttctctgtggaaacttcacgagcgttggctgggcctcggcttcgctggagtgtactccanggtgaaggcagagtgggatttgagacccangttaggcatgacccangctgagaaaggacgtttccatcattcacagtg

SEQ ID NO: 19630 - DNA, 462 bp, Homo sapiens
  misc_feature (1)...(462): n = A,T,C or G
ctcgaccccccnnattgaccccgctgcaggaattcggcacgagctcagctctcggcgcacggcccagcttccttcaaaatgtctactgttcacgaaatcctgtgcaagctcagcttggagggtgatcactctacacccccaagtgcatatgggtctgtcaaagcctatactaactttgatgctgagcgggatgctttgaacattgaaacagccatcaagaccaaaggtgtggatgaggtcaccattgtcaacattttgaccaaccgcagcaatgcacagagacaggatattgccttcgcctaccagagaaggaccaaaaaggaacttgcatcagcactgaagtcagccttatctggccacctggagacggtgattttgggcctattgaagacacctgctcagtatgacgcttctgagctaaaagcttccatgaaggggctgggaaccgacgaggactctctn

SEQ ID NO: 19631 - DNA, 437 bp, Homo sapiens
aggcggtgttttaaattgatggccgtttgatcgcactagctcagactcacaagtctgcgccttctgtcacactagcaccctggctgctatgaaactgatgacctccctggtaagagttgccctccaactgagtctgcacgaagatatcaatcagcgtcagtatgaggctgaaagaaacaaggggccagggcagagggcacctgagcggctggagagcctgttggagaaacacaaagagctgcattaatactacattgtcaaagacaaagacgaacatgagacatgcgatatgagttttaaaaggagagaagagcaaaaaaacaatacagctatccaaggagcaagtgctgagcttgtgaaaaaacagcttctattttattaaataatagtgttcctgcagggatgtctgaagtactctgcaaggctaattagcggca

SEQ ID NO: 19632 - DNA, 485 bp, Homo sapiens
  misc_feature (1)...(485): n = A,T,C or G
gctgcngttttaattgacngcactgaccgacctgcggaattcggcacgaggatagggtcgggattggctggctctggaggcgcaggtggtccttcttctactgtcacatggtgcgcgctgtttcctaatcacgtggctgccacccaggcctctctgctcctgtcttttgtttggatgccggcgctgctgcctgtggcctcccgccttttgttgctaccccgagtcttgctgaccatggcctctggaagccctccgacccagccctcgccggcctcggattccggctctggctacgttccgggctcggtctctgcagcctttgttacttgccccaacgagaaggtcgccaaggagatcgccagggccgtggtggagaagcgcctagcagcctgcgtcaacctcatccctcagattacatccatctatgagntgaaagggaagatcgaggaagacaaggaggtgctgatgatgattaaaacccanaa

SEQ ID NO: 19633 - DNA, 487 bp, Homo sapiens
  misc_feature (1)...(487): n = A,T,C or G
tgggccnnnncagcccccattgcccgcctgcggaattctgcccggctgcggctcctgggtgtgtcagcttcaattgaccaatcacataacagttatatgtttggggggaaaaagaaaagtttctaaaaaatgtagcccattacatatatgggtatgaaagcagaaaagtggaggaggcagggatatcattgacaaacacctttgccagtttctttgtattcgtgattttttgtgctattaaatgcagtattaaaacaagaaaagcccacctgggctagtgaaaggagaggaaataagggggcttgtaaaaggggagccgtcgctccaaaagtagagaagacaagaaatgctgtaagataagcaaccaacgcagacaggcctcagctaagagtatagtgtgtgtgtgttnnnnnnnnnnnnnnnnnnngaannaaaaaagctgtttgatatacttgagcaaatcaaggaacctttttgcgatggttta

SEQ ID NO: 19634 - DNA, 479 bp, Homo sapiens
  misc_feature (1)...(479): n = A,T,C or G
gggctgatcgccntgaggaannncactggaaggccnctgcggaattccgcacgaggtgcttcagaccaagcggagctcccggaggcaaagcctggagctgcagaagtgtgaagagatcctccacaagatcgtgaagtaccgcttcagctggcccttcagggagcctgtgaccagagatgaggccgaggactactatgatgtgatcacgcaccccatggactttcagacagtgcagaacaaatgttcctgtgggagctaccgctctgtgcaggagtttcttactgacatgaagcaagtgtttaccaatgctgaggtttacaactgccgtggcagccatgtgctaagctgcatggtgaagacagaacagtgtctagtggctctgttgcataaacaccttcctggccacccatatgtccgcaggaagcgcaagaagtttcctgataggcttgctgaagatgaaggggacagtgagccagagg

SEQ ID NO: 19635 - DNA, 509 bp, Homo sapiens
  misc_feature (1)...(509): n = A,T,C or G
agtggtnnnnnnnaatcgctcggctgcaggaattcggcacgagattttgcactctacaattcgtaagatgaacaaacatgtcctgaagatccagaaagagctggaagaagctaaagagaaacttgctaggcaacacaaacggcgaagtgatgatgacgacagaagcagtgacaggaaagacggggttcttgaggaacaaatagaacgacttcaggaaaaagtggaatctgctcagagtgaacaaaagaatcttttcctcgttatatttcagcggtttatcatgatcttgaccgagcacctagtacgatgcgaaactgatgggaccagtgtattaacaccatggtataagaactgtatagagaggctgcagcagatcttcctacagcatcaccaaataatccagcagtacatggtgaccctggagaaccttctcttcactggctgattagaccctcatatctttgccgtgtttcagcnagtctgtgccctgcaggccttangggcatttt

SEQ ID NO: 19636 - DNA, 470 bp, Homo sapiens
  misc_feature (1)...(470): n = A,T,C or G
cctcgaccccccnttgattagcctgcaggaattcggcacgaggcaagaccttggagaaggccagcttcatgtgctggtccactgtcttcaataggaagtacttggtattaaagaacatgagggtggtcagcaaggtggagggggagtgagccccaagctgcttgcactcccatagcatctcctcagtcacgtggctgggcaagacatagccaagtggagtgacccggggctgaacatccttcagaacttcatgtagccactccgtgaaccgaacataataaagatcggagaaaatgtcatctacccttccattttcaaaaagatacttttgaatacacaggaaaatatagtagagcacatctgggtcatagggttcaccttctccatttcgagcttcccgtgtcattagacagagcccataattcaactctgccacagcagaggagatgagatcttcctggaatcgcagn

SEQ ID NO: 19637 - DNA, 450 bp, Homo sapiens
  misc_feature (1)...(450): n = A,T,C or G
nactgttttcgtcgcantgcgaagcgggacattcccacattagagggtcttccaagacttggttggagagctgaacaggctggtactgaggataggataaaccccgatattgggacctcacagtgggtgtctgaaaggacagatcactccggagtatcagggattgtggggacaggagtgagacaaccccccaggtacagcactggcttttcttttcagcccctgacaggccacccccactcctctgcatgtcttggagagcgctagttacacattggcttgtcccctttactttttcccagccacccctccccctgaaatttctgcccctctctaccaccctcactccatgacctgtgagatcacaaagtgaagatgaaccctttctgtgcaggagcagagccaggtgggccctggacattttttttttttttaatataacgagagatt

SEQ ID NO: 19638 - DNA, 468 bp, Homo sapiens
cttgaccccccttgatccggctgcaggtcgggcttggcccccagccccgctcacgccagtccctcttcctctgccgggagggtgttttcaactccaaaccccagagaggggttgtagattgggtccagctttgcttcagtgtgtggaaatgtctcgtggggtggcatcggggctgcggggtggggaccccaaggctttctggggcagacccttgtcctctgggatgatgggcactgctatccacagtctctgccagttggttttatttggaggtttgtgggctttttttaaaaaaaaaaagtcctcaaatcaggaagaaacatcaaagactatgtcctagtggagggagtaatcctaacacccaggctggccgccagctggcacctgcctctatcccagactgccctcgtcccagctctctgtccaactgttgattatgtgatttttctgatacgtccattctcaaag

SEQ ID NO: 19639 - DNA, 484 bp, Homo sapiens
  misc_feature (1)...(484): n = A,T,C or G
cgcggcttttnaattgangttctgaccggctgtccgaattcggcacgaggcaaactgactacagcctccaatggaggggtcattgaggagttatcttgtgttagatccaataactatgtgcaggaaccagagtgcaggaggaatcttgttcagtgcctccttgagaagcaggggactcctgtggtacaagggtccttggagctagagagggtcatgagttccctcctggacatgggtttcagcaatgcccatattaatgaattgctcagtgtacggcgaggtgccagtcttcaacagttgctggacatcatttcagaatttattctcttgggtctgaatccagagcctgtgtgtgtggtcttgaagaaaagtccccagttattgaaactgcctattatgcaaatgaggaagcgctccagttacctgcaaaagcttgggcttggagaaggactaatttattattgtgcaactgccagtcctgcgg

SEQ ID NO: 19640 - DNA, 486 bp, Homo sapiens
  misc_feature (1)...(486): n = A,T,C or G
cccccccccattgacgccctcggtagacgccccgaggagaagccagcctctaagaaggaacggatagctgatgtgaagaagatgtgggaagaatatcctgatgtttatggggtcaggcggtcaaaccgaagcagacaagaaccatcgcgatttaatattaaggaagaggcaagtagcgggtctgagagtgggagcccaaaaagaagaggccagaggcagctgaaaaaacaagaaaaatggaaacaggaaccctcagaagatgaacaggaacaaggcaccagtgcagagagtgagccagaacaaaaaaaaagtaaaagccagaagacctgtccccagaagaacagtgcccaaacctcgtgttaaaaagcagccgaagactcagcgtggaaagagaaaaaagcaagattcttctgatgaggatgatgatgatgacgaagctcccaaaaggcagactcgtcgaagagcggctaaaaacgttagttacan

SEQ ID NO: 19641 - DNA, 456 bp, Homo sapiens
  misc_feature (1)...(456): n = A,T,C or G
naattgaccngcgctgcacgaattcggcacgagcagatattagaattaggtcacactattgaggttataatctgaaggttgtgttacatagaaaccactttagattattatcaacttggactaggctttattttataatagcatagtaagtaatatctattgtgtcatttcttcaaccattttattctaagatccatgaagcttcttgaggccaaataaaataataagtttagacaagaagtagattgtgactttttttcccttagagatactatttactatctcctatcctgataggtggaaggtttactgaattggaaattggttgactattagtttttaactaaaatgtgcaataacacattgcagtttcctcaaactagtttcctatgatcattaaactcattctcagggttaagaaaggaatgtaaatttctgcctcaatttgtacttcat

SEQ ID NO: 19642 - DNA, 478 bp, Homo sapiens
  misc_feature (1)...(478): n = A,T,C or G
nagaatgacgctcatgaatatgcgttgagcgccanctgctgatgattcctgtacgctgcttcacttgnggcaagatcgtctgcaacaagcgggaggcttacctggggctgctgcaggccgagtacaccgagggggatgcgctggatgccctgggcctgaagcgctactgctgccgacggatgctgttggcccacgtggacctgatcgagaagctgctcaattatgcacccctggagaagtgaccacgctgtaacgcacccacccgctgtgctgaccatgggccctgagcgtactgccccgaattcacgaggctgaggcatacgggagctggcgtaatgcctggccgcagtgtgtgtgtatcccataccccactctggaaggaaccatccagtgaaggtctttcaaaaccactaaggtcccagccctcactaggatgtcaggagccaggtctaggcccagctttcacactgtggcagac

SEQ ID NO: 19643 - DNA, 491 bp, Homo sapiens
  misc_feature (1)...(491): n = A,T,C or G
ggaggggattgaaattcatcggcntcnngcacgagcacagannatcagacagaagcccgtcgacctcctgaagtacaatcaaaagggcctgacccgcgtctactcaaagggacaaagagttgactcttcaaactacgaccccttccgcctctggctgtgcggttctcagatggtggcactcaatttccagacggcagataagtacatgcagatgaatcacgcattgttttctctcaacgggcgcacgggctacgttctgcagcctgagagcatgaggacagagaaatatgacccgatgccacccgagtcccagaggaagatcctgatgacgctgacagtcaaggttctcggtgctcgccatctccccaaacttggacgaagtattgcctgtccctttgtagaagtggagatctgtggagccgagtatgacaacaacaagttcaagacgacggttgtgaatgataatggcctcagccctatctgggctccaa

SEQ ID NO: 19644 - DNA, 481 bp, Homo sapiens
  misc_feature (1)...(481): n = A,T,C or G
cgctgcgtgnncctgangaactgacgacntccgaattcggcacgagatttcctcccgccagtctccattgaatcaatggtgcaggacagaaagccagtcagactaatttccttctttcctcgcacttctccccactcgtcatcttttaactagtgtttcacaaggatcctctgaaaccctctctgtgccccaagtacagatcccattacttctgctttcgtatctcctcaggcaaaagtggagggtgccttatgggccctcctcataggttgtctctgcatacacgaacctaacccaaatttgctttggtgccagaaaaactgagctatgtttgaacaaagatgtcgtgcaaactgtactgtgaacaacagttggtttaaaatatgaggggcaaggaggaggatgcatttcanaagcttgattgatgtgttcagagctaaattaagaggagttttcagatcaaaaactgggtaccattntn

SEQ ID NO: 19645 - DNA, 457 bp, Homo sapiens
  misc_feature (1)...(457): n = A,T,C or G
nactgaccttcgatgagcgatgcagaannncgnacgaggttnntgatcactgccatcctggtgaaagtgcacctggatactttgccataaatattgaatactatgagcaaaatcgtgcttattgatccaataggtgccatcctgcagggcatcacagaacggtctggctggccttatgcctgccagctacacggcccccatcatgagtggccagggcctagcaggcttctttgcctccgtggccatgatctgcgctattgccagtggctcggagctatcataaagtgccttcggctactttatcacagcctgtgctgttatcattttgaccatcatctgttacctgggcctgccccgcctggaattctaccgctactaccagcagctcaagcttgaaggacccggggagcaggagaccaagttggacctcattagcaaaggagaggagccaagagcg

SEQ ID NO: 19646 - DNA, 472 bp, Homo sapiens
cgccccccccccttttgccccgcgctgcatgaattcggcacgagcagccgcagagatgttgatgcctaagaagaaccggattgccatttatgaactcctttttaaggagggagtcatggtggccaagaaggatgtccacatgcctaagcacccggagctggcagacaagaatgtgcccaaccttcatgtcatgaaggccatgcagtctctcaagtcccgaggctacgtgaaggaacagtttgcctggagacatttctactggtaccttaccaatgagggtatccagtatctccgtgattaccttcatctgcccccggagattgtgcctgccaccctacgccgtagccgtccagagactggcaggcctcggcctaaaggtctggagggtgagcgacctgcgagactcacaagaggggaagctgacagagatacctacagacggagtgctgtgccacctggtgccgacaagaaa

SEQ ID NO: 19647 - DNA, 477 bp, Homo sapiens
  misc_feature (1)...(477): n = A,T,C or G
gcagtcccattgctcgcctgcggaattcggcacgaganagactgatgtctcagagcatgtcttcagtatcttcaaggcattctgaaaagatagctattacagattttcaggtgggagatttggtactcatcatcctagacgaacgccatgacaattatgtgttatttactgttagtcctactttatattttctacattcagagtctctacctgccctggatctcaaaccaggtgagggtgcttcaggtgcatctagaagaccctgggtacttggaaaagtaatggaaaaagaatactgtcaagccaaaaaggcacaaaacagatttaaagttcctttggggacaaagttttacagagtgaaagccgtatcatggaataagaaagtataacttatggacaaaattaatacattctatgacattnttttctgatttgtcctgcagggctcattcatcactccaaaaacagcaggccatc

SEQ ID NO: 19648 - DNA, 472 bp, Homo sapiens
  misc_feature (1)...(472): n = A,T,C or G
nttggaaccgctagacncgcgctgcaggaattcggcacgagctgaatcttccttcacaactggctcatagacttgcagagaagtcttgtagaaatctcagaaaagccctgcttatgtgtgaagcctgcagagtgcaacaatatccttttactgcagatcaagaaatccctgagacagattgggaggtgtatctgagggagactgcaaatgctattgtcagtcagcaaactccacaaaggctccttgaagttcgtggaaggctgtatgagcttctaactcattgtattcctcctgagataataatgaagggccttctctcagaactgttacataattgtgatggacaactgaaaggggaggtggcacaaatggcagcttactatgagcatcgtctacagctgggtagcaaagccatttatcacttggaagcgtttgtggccaaattcatggcactttataagaagttcatgga

SEQ ID NO: 19649 - DNA, 492 bp, Homo sapiens
  misc_feature (1)...(492): n = A,T,C or G
nacggggattganattcgcaccgcctgcaggaattcggcacgagcccagaccatggtgctggccagtggaggacaagatggggccatctgcctgtgggatgtactgactggcagccgggtcagccatgtgtttgctcaccgtggggatgtcacctcccttacctgtaccacctcctgtgtcatcagcagtggcctggatgacctcatcagcatctgggaccgcagcacaggcatcaagttctactccattcagcaggtagaggggatggggatcataggattcttgggattttagggaaggactcaggactgagcttgtcatgtccttgcctccaggacctgggctgtggtgcaagcttgggtgtcatctcagacaacctgctggtgactggcggccagggctgtgtctccttttgggacctaaactacggggacctgttacagacagtctacctggggaagaacagtgaggcccagcctgcccgccagatc

SEQ ID NO: 19650 - DNA, 475 bp, Homo sapiens
  misc_feature (1)...(475): n = A,T,C or G
nctcgaacgttgtgaggacttcggcacgagccatgatgaagacatttgaggaattgccgatgaccccatcgacctacaaaggctctgtggaccaccagacagacagtgggatggtgctggcctctgaggagtttgagctgatagagagcaggcatagacaagaaagcggcttcaggtagctgaagcagagagagagaaggcagcatacgccagcattttcttctctgcacttataagaaagatcaaagactttaacactttagctatttcttatactgctatctactacaaacttcaaagaggaaccaggaggacgagaggagcatgaaagtggacaaggagtgtgaccactgaagcaccacaaggaggtgttaggcctacggatgactgcggacatgcctgggtaatatccagcctcccacaagaagctggtggagcagagtgatacctgactcctgcaaggacagggagacgc

SEQ ID NO: 19651 - DNA, 477 bp, Homo sapiens
  misc_feature (1)...(477): n = A,T,C or G
atcgacgccnnanatcgcccgcctgcagttttggactcgatgagtttccaccgaaatgtcggagaagtcaggccagagcacaaaagcaaaggatgggaaaaagtatgcaacactcagtttatttaatacttacaaggggaaatcattagaaacacagaaaaccacagttgcagctcgacatggattacagagtcttggaaaagtcggtatttcacggcgtatgcctccacctgctaacctcccaagtcttaaagcagaaaacaaaggcaatgatcctaatgtaaacattgtacctaaagatggcacagggtgggcatcaaaacaagagcaacatgaagaagaaaaaacaccagaagtgccaccagcacagccaaaacctggggttgcagctcccccagaagtagcacctgctcccaaatcatgggccagtaacaagcaaggtgggcaaggagatggaatccaagtgaatagtcagtn

SEQ ID NO: 19652 - DNA, 477 bp, Homo sapiens
  misc_feature (1)...(477): n = A,T,C or G
ggcccgcccccaatggccccgcgcngtttgaccccgcgctgcaggaattcggcacgagtctacgccgagtgacagagacgctcaggctgtgttctcaggatgaccgagtgggagacagcagcaccagcggtggcagagaccccagacatcaagctctttgggaagtggagcaccgatgatgtgcagatcaatgacatttccctgcaggattacattgcagtgaaggagaagtatgccaagtacctgcctcacagtgcagggcggtatgccgccaaacgcttccgcaaagctcagtgtcccattgtggagcgcctcactaactccatgatgatgcacggccgcaacaacggcaagaagctcatgactgtgcgcatcgtcaagcatgccttcgagatcatacacctgctcacaggcgagaaccctctgcaggtcctggtgaacgccatcatcaacagtggtccccgggaggactccaca

SEQ ID NO: 19653 - DNA, 483 bp, Homo sapiens
  misc_feature (1)...(483): n = A,T,C or G
nggcggcgtttacactgatggcgttcagataggcntagcaannacccngangcttctaagatgatgagggtgagctgtgacagatgctgtgggaggggagttcacatacattccatgtcaaggcatttagctgataaatccatcctcagaaaagcacctttttaaaaagaagtccattttgtatattagaagatgatgatgatgatgaagatgaagaaagccctggcagatacaaagttcctcagtatttaaggagaaggatctcttccatgtccccttgacatgactgtggctattgcccaaacctcagcttgagaacatcatataatactgagagcggaagatttttttaaagagatatggtagtttaaataggtttgtttaaagaactcttgggaaatttcttaacaaattgtaattgtttttataaaccttcctacagagttgtgtaccattcatcatcaccatcatttaatatctgta

SEQ ID NO: 19654 - DNA, 495 bp, Homo sapiens
  misc_feature (1)...(495): n = A,T,C or G
tggggnnnnnnagaggggnattgattccatggctgcagaattcggcacgagctgagaggagcgtggctgtctcctctctccgccatggcgtgtgctcgcccactgatatcggtgtactccgaaaagggggagtcatctggcaaaaatgtcactttgcctgctgtattcaaggctcctattcgaccagatattgtgaactttgttcacaccaacttgcgcaaaaacaacagacagccctatgctgtcagtgaattagcaggtcatcagactagtgctgagtcttggggtactggcagagctgtggctcgaattcccagagttcgaggtggtgggactcaccgctctggccagggtgcttttggaaacatgtgtcgtggaggccgaatgtttgcaccaaccaaaacctggcgccgttggcatcgtagagtgaacacaacccaaaaacgatacgccatctgttctgccctggctgcctcagccctaccagcactggtc

SEQ ID NO: 19655 - DNA, 483 bp, Homo sapiens
  misc_feature (1)...(483): n = A,T,C or G
gaattgaccgccctgcggaatncgatagacacgcgctgcaggaattcggcacgagaaaattaattgtagttgttgccactattaatggcaaaaaccgcaattatctttgtaccactcataatacacctttcatattatgtattatcttgcttaatgggttttatcttgattatccagttacttccatcctcttcccaatgttaatttgcaatagttttaaaatgggaacaaatgaatcaatcatcagatagttaaaatgaaattaaatcagctgcctaataatttatggaattcattggaatgtgcttaaaatgctaaagtgtatgtcattgaacatgaaatcttttttcaggcacatacattgttggtattgatgactttttaaaacctgtgggataaacttgcactgcacacggaagttttattcttgtatatttagatttgtatgcttgtgagtaaaaatgtgcatttgtaaatactggg

SEQ ID NO: 19656 - DNA, 486 bp, Homo sapiens
  misc_feature (1)...(486): n = A,T,C or G
cgcaagcgccattgcccgcctgcgatagtagcgcgtagatctgcacgggccccctccagtggctggataaagttcttactcaaatgggttcacctcataatcctatttcatctgtatcttaaatggccccaggcatctgcctctggaaaactattgagccttgcatgtacttgaaggatggatgagtcagacacgattgagaactgacaaaggagccttgataatacttgacctctgtgaccaactgttggattcagaaatttaaacaaaaaaaaaaaaaaaaaacttgggggggggcccggcccccatttccccttatggggggccgaataacaattccctgcccgcggtttaacaacgccgggacgtgaaaaacantnnntnnnnncnccctaatttctctacattattcaaaaatcttgcaaatgcctccccggacacttttccatttatggccgataaagcgattttctggagctctgttcg

SEQ ID NO: 19657 - DNA, 475 bp, Homo sapiens
cgccccccccccaatatgcaccgcgctgcatgaattcggcacgagtgtccttttaccatcgagctacttcccataataaccactttgcatccaacactcttcacccacctcccatacgcaaggggatgtggatacttggcccaaagtaactggtggtaggaatcttagaaacaagaccacttatactgtctgtctgaggcagaagataacagcagcatctcgaccagcctctgccttaaaggaaatctttattaatcacgtatggttcacagataattctttttttaaaaaaacccaacctcctagagaagcacaactgtcaagagtcttgtacacacaacttcagctttgcatcacgagtcttgtattccaagaaaatcaaagtggtacaatttgtttgtttacactatgatactttctaaataaactctttttttttaaaaaaaaagaaaaggaaaaaaaaaaaacttcgggg

SEQ ID NO: 19658 - DNA, 493 bp, Homo sapiens
  misc_feature (1)...(493): n = A,T,C or G
natgggnattgaaatcgattcgccgtgcggaattcgccacgagcagaaacaacacccttgaaagagagctataaggaggaatctacaaattctggactgtccattcttcttgagagcattgtatctgatcttgaaaaatctcttggaacaggtttatcttcaatattacaaacagaaatgaaaattgcttttggaaacctttggatggagatcctgtacctgaaaccaccatggactctactacatttactacagtgctttaaaaaacattggttggctgtatttggattacttatggaaaagaacttgcttttaactattgagagcctatacaaaaatctacgcagagctaataaggcagtggattttacaacagtcaaattcttgcttcaggattctagaagtttgttacatgctttcagtacaaggtcaaattatgatggtattcttccacagacctttgctcaagtaaacaacctccttcagacatttg

SEQ ID NO: 19659 - DNA, 441 bp, Homo sapiens
  misc_feature (1)...(441): n = A,T,C or G
nggttgaccgcgtgaggaattcgatagagagccagtatggatgtcctctttgtagccatctttgctgtgccacttatcctgggacaagaatatgaggatgaagaaagactgggagaggatgaatattatcaggtggtctattattatacagtcacccccagttatgatgactttagtgcagatttcaccattgattactccatatttgagtcagaggacaggctgaacaggttggataaggacataacagaagcaatagagactaccattagtcttgaaacagcacgtgcagaccatccgaagcctgtaactgtgaaaccagtaacaacggaacctgtggaagaaggctgctatgactctttggatgggagtctggcaagaggaaattggaagataaaataaataataagtgaaataannnnaannaaaaaaaaaaaaaac

SEQ ID NO: 19660 - DNA, 463 bp, Homo sapiens
  misc_feature (1)...(463): n = A,T,C or G
natagaccccgctggatgaactctgcacgagtacaagaaggggtctcattggaagaaactggagggacaaatcagactctgaacaaaactagcaggactgctgatggagcaaagggattgaatactcgatatatgaatgatgtaaaatttacaggccatggtgactatttggacacgggacatggagagaagactgctctggcagcctagggatgggaagacatacaagaaagcaaccagttactggattatatgaggaaggctgtgacagaggccataccggatgccgcaggaacacagaaaaagaaggatctacgccctttgatgaattcccaggaagccttcccagatgtgtcagtgggctcttgaagggagctcatctactggaaaggctgtaactctcaccttagctgatgacgttccagtcccagtctgcccaatctgaattcttcctcagcctctg

SEQ ID NO: 19661 - DNA, 488 bp, Homo sapiens
  misc_feature (1)...(488): n = A,T,C or G
ggggtttnnnnnnaatcgcatcgtctgcggacttcggcacgagccccacgccagccatgcccctccccaggactcccactattgcctctgtgattggcccaggaggaaaacacgaccaagctcaagacccttcccctgccctgggctgtgggggtctgagtctagagcccccaaccctaggccccgtgccagaggggaagaggctgactcccaggggaagaggggaagcactgtcatcttccacgtcatcttcacaccagcccatcctgccctttagatctgggcaccaataaaggcgtcttttgtgcttggcnnnnnnnaaaaaaaaaaaaaaaaaaaaaaaaaaaaatccccggggggggggcccggccccccctccccccttagggggggggaaataaaattcggggggcgggttttaaaaacggggggggggggggaacnnnnnnnttnnntngnggnnnnnnnntnttttnttgtgtgttttg

SEQ ID NO: 19662 - DNA, 520 bp, Homo sapiens
  misc_feature (1)...(520): n = A,T,C or G
gggatggcccnagggttnnnnnnnaatcngangcccatcgagagacctgtcacgaattcggcacgagaaatgcctatgccataaatgtctctcagaagaggaagtacaggcagtacatgaatcgaaaaggtggattcaacagacctttggatttcattgcatgagaattgaagtggtgaaggatgattttttttcccctcatcttggtcagagagtggattttgtattttgtatttaacttgcattcaaaaaacaggatctcagttctcctttcttgtaaagtaagaaaatcttatttatgatatatgcagttaacttaccttgcctcaacagaagaaaggctaaatattacattgttttcttttacgaaatatcatttgtggcaggcgtgaaccccattttatttgtccttattcctgtggaagcagaatatgtcttcttcctgaatgctcattaggacttcttaacaaacatgaaagtaatttggaagtaangttatccaataaagcagtatttctac

SEQ ID NO: 19663 - DNA, 469 bp, Homo sapiens
  misc_feature (1)...(469): n = A,T,C or G
attggacctctgccccggctgcaggaattcggcacgaggagatgttgattttgagattaaatctcttgatgaacagtgtgtggttggcaaaatttccaagcactggactggaattttgagagaggcatttacagacgctgataactttggaatccagttccctttagaccttgatgttaaaatgaaagctgtaatgattggtgcctgtttcctcattgacttcatgttttttgaaagcactggcagccaggaacaaaaatcaggagtgtggtagtggattagtgaaagtctcctcaggaaatctgaagtctgtatattgattgagactatctaaactcatacctgtatgaattaagctgtaaggcctgtagctctggttgtatacttttgcttttcaaattatagtttatcttctgtataactgatttataaaggtttttgtacatttttttaatactcattgtcaatn

SEQ ID NO: 19664 - DNA, 483 bp, Homo sapiens
  misc_feature (1)...(483): n = A,T,C or G
gcgggtcnnaattgatatcgatctcaattcgccacgagatgtattgngtcctaccatgagttcactccatgctagccacattggcctgtatggctattccttggactcacctaggatgttcttgcctcttagctggcctacctttctctcatcattggggcctcagcgaggatatcatctcctcagagaagccttctgtgaccatgctatctaaaatactccagcacttcagtcaccctttatcccattactctgctttttcagaaacattggtgctccctgaaacgtatttgtttacttgcttagcgtcttttctcccgcactaccatgtaagcttcttgagggctaaggaccttgttagggataaccactgtatccttagagtgtgacacatagtagggtctcaatacatatttttgaaactctaccctgatgcaaaagagatatcacataattatagcttttgcattataaatgtgcttg

SEQ ID NO: 19665 - DNA, 474 bp, Homo sapiens
  misc_feature (1)...(474): n = A,T,C or G
atttgancccccctnnnnannnctgattcgccctgcggaattccgcacgagctgcaggaacttgaacaagagtatggggaaccctttctggctgccatggaaaagctgctttttgagtacttgtgtcagctggagaaagcactgcctacaccgcaggcacagcagcttcaggatgtgctgagttggatgcagcctggagtctctatcacctcttctcttgcctggagacaatatggtgtggacatggggtggctgcttccagagtgctctgttactgactcagtgaacctggctgagcccatggaacagaatcctcctcagcaacaaagactagcactccacaatcccctgccaaaagccaagcctggcacacatcttcctcagggaccatcttcaaggacgcacccagaacctctagctggccgacacttcaatctggcccctctaggccgacgaagagttcagtcccaatgg

SEQ ID NO: 19666 - DNA, 500 bp, Homo sapiens
  misc_feature (1)...(500): n = A,T,C or G
gggggcgnnnngggattganncccctcgaccgcctgcggaattcggcacgagctgggttctactttattttttaaaatctttacagttctcaccatttcacgtaccttaatccaatctttataaaagaggcagtctagagaactaggactgctcagccttatcctggagtggagcatttagcccaggtcttaattctccaagaggaggaatacatagtatggtaaggcaaggaactgggtggaatgtcaggttgcctgcccaatgggagaggtagggtttttctagcttgtgtgacagaagtagcaaaatctggtcctcccccctcccagtgtagctgtggctcagagttttttctttttgttgtcacttactcccttgtgattgaattttttctcctgcatccatggcaggatccccagccagtatagagacttggttggcatcttctgctgcagggactaaaagtatttgactggggcacatgtggctgttgtcattc

SEQ ID NO: 19667 - DNA, 472 bp, Homo sapiens
  misc_feature (1)...(472): n = A,T,C or G
attgcncgccctgattagagcaccatgcagacatatgaagaagttggagatgatgcattggaagaccccatgccacagctggatgtgactgaggccaacaaggagttcatggaacagagtgaggagctgtatgacgctctgatggactgtcactggcagcccctggacacagtgtcttcagagatccctgccatgatgtagccaggccaaaggacaagccaggttgcatgatgtgagggagatgagagactcctttttaaaaattgtgaaacctttttggaaatatgatttgtaagattttaataatgactgtttttggagatcanannanaaaaaaaaaaaaaaaaaatttgggggggggcccgggccccaattcccccttaaggggggcggattaaaattcccgggcccgggttttaacaccggggggaggggaaaaaaancnnncnnnnccnnttttccttcctttttg

SEQ ID NO: 19668 - DNA, 490 bp, Homo sapiens
  misc_feature (1)...(490): n = A,T,C or G
ggccacnnaattgacgactgaggacctaggaaanaccacgagctggcatggacacccgtgggggcagggggctggctctgttggcaggaggctgtaaatgaaggttgtcaggctgagcaggcagcagggtggggaccacggggcactagacctggcaaggtctggatggggactgggccaccattgtagaggagaggcctctgtggacatcccctcctcctaccccaagctcactactgcccatcctgggtcactctcatgttgcccccatcctgatattccacacccctccccacatatgtgcgcttgtgtttacatacaagtccatgtccagctgcgataaaaaaggacaaaaaaagacacttggggggggggtccgtaccaaaatctccccatgagggggggaaatataaatacatgggccgggactaaaaaacagcgaggtggtgataaaattncgngaagagacngcaaagcatcagtacaggag

SEQ ID NO: 19669 - DNA, 498 bp, Homo sapiens
  misc_feature (1)...(498): n = A,T,C or G
natagtcgccataagaatncgcacgagctcctgngtggcctctcaaggattggggttacaggcaagagccactgcacctggccactttacacttacctcctattcatagtagttccccaaggtaggtgttattagactcttcattttaccaatggacaaaatagagcttaaagaagttgagcaagctgccgtaagcatatagctggtgagaaaaggaattgtgatatttaatctcatcatgctttttccattacaactcattacccctctctattgctaagntgtatgattatgatcaattcattaaataatgctatcacattaacactctttttctgttttcagagatgcttttgcttatgttcaagaaagaagattttgtattaatcctaatgctggatttgtccatcaacttcaggaatatgaagccatctacctatgcaaattaacaatacagatgatgtcccacttcagatagaaagtcattatctgttcatt

SEQ ID NO: 19670 - DNA, 447 bp, Homo sapiens
  misc_feature (1)...(447): n = A,T,C or G
ncctggaccgctctgcaggacttggcacgagcagcaaaggctctcgcgacaccctgtacgaggcggtgcgggaagtcctgcacgggaaccagcgcaagcgccgcaagttcctggagacggtggaggtgcagatcagcttgaagaactatgatccccagaaggacaagcgcttctcgggcaccgtcaggcttaagtccactccccgccctaagttctctgtgtgtggcctgggggaccagcagcactgtgacgaggctaaggccgtggatatcccccacatggacatcgaggcgctgaataaactcaacaagaataaaaaactggtcaagaagctggccaagaagtatgatgcgtctttggcctcagagtctctgatcaagcagattccacgaatcctcggcccaggtttaaataaggcaggaaagttcccttccctgctcacacacg

SEQ ID NO: 19671 - DNA, 393 bp, Homo sapiens
  misc_feature (1)...(393): n = A,T,C or G
catcgacgnncnnntttgcccggctgtggattcggcacgaggaanatgccactctctccaccccattttacagaggagaacaccaaggcccagaggaagttaagggagagtcaatgggcagagccagggctaggccctggtggtgtgtggagcacccaggcagacccagtcctggttgggatcacacccacgggtgctactgcacgtaacactcctccttaggcctggaggccaaggtgtgggtccccacgcctgatctttgaaaacactacacagggctgctgtcacttcccagggcccaggcctcagcccaggcctcgggaccaactctttgtataacctacctgaatgtattaaaaactaattttggagaaaaaaaaaaaaaaaaaaact

SEQ ID NO: 19672 - DNA, 230 bp, Homo sapiens
aattgacatcgctccgcgctgcaggaattcggcacgagattcccttgaggagggggagctgagagatcactgcatggagatcacaataaggaactccccgtatagaagagaagactcaatggaagacagaggagaagaagatgattctttggccatcaaaccaccccagcaaatgtctcggaaagaaaaagttcatcacagaaaagatgaaaagaaaaaaaaaaaaaaaa

SEQ ID NO: 19673 - DNA, 537 bp, Homo sapiens
  misc_feature (1)...(537): n = A,T,C or G
aggannnnncaaggggtgncccccnnaataggatcncccatagcaccgcctgtacgaattcggcacgagatccaaactgtccaccgaacagattaacagtcagatagcacaaaccaagtcaccgtcagaaaaaatggtgacgtcctcccccgaggaagacctggggacttcctatcagtgcaaactttgcaatcggacctttgccagcaagcacgctgttaaacttcaccttagcaaaacacacgggaaatctccggaagaccaccttctgtatgtctctgagttagagaagcagtagcatttgcttttgatagaaaggactgcagtttgctttgagggaaactgtggaaggcaccttcaggccccctctgacttgttgttcttggcacatgttcttattttaactgcagagaatcactctgggctggactgttttgtataactgtacagtgtttaatagaggtgcataatcagctgttgttactggtaaaatatgaaggttaaaatgcagtggtaagtgtttggaactttgtgtaa

SEQ ID NO: 19674 - DNA, 474 bp, Homo sapiens
  misc_feature (1)...(474): n = A,T,C or G
gaaaaactgatnccctnnnnaanctgaccgcctgcggaattccgcacgagggttcacgaaatacacagaaatggactacgcccgagctggtaacaaagcagctttcactgtgagcctggatccagggcccctggagcagttcccccactccatggagccacagctcaggcagctgggcctgcccaccgccctcaagagaggtgtggtgactctgctgtctgactacgaggtgtgcaaggagggcgatgtgctgaccccagagcaggctcgcgtcctgaagctttttgggtatgagatggctgaattcaaggtgaccatcaaatacatgtgggattcacagtcgggaaggttccagcagatgggagacgacttgccagagagcgcatctgagtccacagaagagtcagactcagaagatgatgactgaaagggactcgggactgaaggtctcctggaagcttctgggtctcactg

SEQ ID NO: 19675 - DNA, 463 bp, Homo sapiens
  misc_feature (1)...(463): n = A,T,C or G
natgaccgcctgcggaattcgttcgagacccacttgtccctgaacaagacaattcagtaacatctattcctgagattcctcgatggggatcacagagcacgatgtctacccttcaaatgtcccttcaagccgagtcaaaggccactatcaccccatcagggagcgtgatttccaagtttaattctacgacttcctctgccactcctcaggctttcgactcctcctctgccgtggtcttcatatttgtgagcacagcagtagtagtgttggtgatcttgaccatgacagtactggggcttgtcaagctctgctttcacgaaagcccctcttcccagccaaggaaggagtctatgggcccgccgggcctggagagtgatcctgagcccgctgctttgggctccagttctgcacattgcacaaacaatggggtgaaagtcggggactgtgatctgcgggacagagc

SEQ ID NO: 19676 - DNA, 496 bp, Homo sapiens
agggcggcggccccaattgacggctgtggtatacggcacgagctcggaggcgttcagctgcttcaagatgaagctgaacatctccttcccagccactggctgccagaaactcattgaagtggacgatgaacgcaaacttcgtactttctatgagaagcgtatggccacagaagttgctgctgacgctctgggtgaagaatggaagggttatgtggtccgaatcagtggtgggaacgacaaacaaggtttccccatgaagcagggtgtcttgacccatggccgtgtccgcctgctactgagtaaggggcattcctgttacagaccaaggagaactggagaaagaaagagaaaatcagttcgtggttgcattgtggatgcaaatctgagcgttctcaacttggttattgtgaaaaaaggagagaaggatattcctggactgactgatactacagtgcctcgccgcctgggccccaaaagagctagcagaatacgcaac

SEQ ID NO: 19677 - DNA, 477 bp, Homo sapiens
  misc_feature (1)...(477): n = A,T,C or G
ggttgaccgcctgnggaannncacttgacccgcgctgcaggaattcggcacgagagtcactgaaaagtgctgcctaaggaagtttggaaatagtccccgttccagattgccttgaattttaaaacattttgctttgggaaagtaggtcagcagcacctaagatcaaggatgcgttccattttcacacttcacagtcatgaaaactgagaagactgtcttcagcgtgaactaaagttcacaggcagatcactgatccagaacacttcaagaactcgtcaaacagctcgataagcctttttgactgtgtacatctgtaccgggaataacattcctaggctgaaatttccacaaagaatagaacctgtacccagttcttcaggctgatttccctgacctcttgggcatttgtatttgtagtaaagtattgcagagattcctaagtattttatagcagccatcaaaattggactttgtatt

SEQ ID NO: 19678 - DNA, 518 bp, Homo sapiens
  misc_feature (1)...(518): n = A,T,C or G
tggatggcccnaggtggggnnnnaattgannnctactgatagaccttcacgaattcggcacgaggaaaagctcggacctaccctgtggtcccgggtttctgcagagtctacttcagaagcggaggcactgggagtccggtttgggattgccaggctgtggttgtgagtctgagcttgtgagcggctgtggcgccccaactcttcgccagcatatcatcccggcaggcgataaactacattcagttgagtctgcaagactgggaggaactggggtgataagaaatctattcactgtcaaggtttattgaagtcaaaatgtccaaaaaaatcagtggcggttctgtggtagagatgcaaggagatgaaatgacacgaatcatttgggaattgattaaagagaaactcatttttccctacgtggaattggatctacatagctatgatttaggcatagagaatcgtgatgccaccaacgaccaagtcaccaaggatgctgcagaagctataaagaagcataa

SEQ ID NO: 19679 - DNA, 489 bp, Homo sapiens
gatccgacgccgtcgatagaccggctgtacgaattcggcacgaggcccaccaacgaggtgatctagcagatacatggcaacgtgtgaactgcaacaacgcctggtgccccagcaccaaccttccaagtgtaaaaacaatgagctgctgcttcacttccgccctccggatatcaagcaaaatgtctcttgtggcccatcttactggaagagagttccgggaaacatagcctcaccaaggtgacacattacaaagccaccctaccatgaatccgctcccaagggtctcactgctcacctgaggataactcaatataactatgttgctgaaaatgcaaagctgaataccatggatttcatggcgattccagcaagtacagagattctatgaagcccacccagaaaaaacttgctggccctggctatttttgtgtcattgattcaagaattgagaacctggcctgtggtaagcactgtacttaatactacgaa

SEQ ID NO: 19680 - DNA, 461 bp, Homo sapiens
  misc_feature (1)...(461): n = A,T,C or G
nactgtcgcgtgggaattcgtcgagaactgctaggactgctgtggacagtttggttgcatactcggtcaaaatagaaaccaacgagaacaatctggaatcagccaagggtttactagatgacctgaggaatgatctggataggttgtttgtgaaagtggagaagattcacgaaaaggtctaaatgaattgcgtgtgcagggcgcggatttaaagtccaatttctcatgaccaaaaaatgtgtggttttttcccatgtgtcccctaccccccaatttcttgtcccctcttaaagagcagttgtcaccacctgaacaccaaggcattgtattttcatgcccagttaacttatttacaatatttaagttctctgcttctgcatttggttggtttcctgaagcgcagcccctgtgaataacaggtggcttttcatggatgtctctagtcagagaaaaatgataaa

SEQ ID NO: 19681 - DNA, 492 bp, Homo sapiens
  misc_feature (1)...(492): n = A,T,C or G
agcgggtnnnaattgacncccgtgcggcatgtcggcacgagcaggagtcccacctgttggcggcctcctggagccgcagccggcgctcctccatctttctctggagctgggtgcagagtcaaggggccgagcgtgggatctgagcgggccctcggttcccaaccccgtcccacacccggagaggccgggacgtcccagggacctcctctcggtgaggggctgtccccagcttctgattctgcagggaggcctcctccagtggcgtcagctctctggaaatgtgacaagctgctgtctagaccccaggaagcccagtggtgtctggacaccagaggagtctctctcatcctcccggattgctctgaggccaggagtagagacggngtttcaccgcattaaccaggatggtcttgatctcctgacctcgtgatccacccgcctcggcctcccaaggtactgggattacaggcgtgagctaccgcgcccggccga

SEQ ID NO: 19682 - DNA, 454 bp, Homo sapiens
  misc_feature (1)...(454): n = A,T,C or G
natttgacctcgatgcgcgaattcggcacgaggtgagttggagaatctggtccttaaggatatgtcagatggctttatctctaacctaaccattcagagacagtactttcctaatgatgaagatcaggttggggcagccaaagctctgttacgtctccaggatacctacaatttggatacagataccatctcaaagggtaatcttccaggagtgaaacacaaatcttttctaacggctgaggactgctttgagttgggcaaagtggcctatacagaagcagattattaccatacggaactgtggatggaacaagccctaaggcaactggatgaaggcgagatttctaccatagataaagtctctgttctagattatttgagctatgcggtatatcagcagggagacctggataaggcacttttgctcacaaagaagcttcttgaactagatccn

SEQ ID NO: 19683 - DNA, 479 bp, Homo sapiens
  misc_feature (1)...(479): n = A,T,C or G
agatagaccnccntnngnnnnnnnccttgatccgcgctgcaggaattcggcacgaggaaggaactgggcatatgggagccattggctgtgaagctgcagacttataagacagcagtggagacggcagttctgctactgcgaattgatgacatcgtttcaggccacaaaaagaaaggcgatgaccagagccggcaaggcggggctcctgatgctggccaggagtgagtgctaggcaaggctacttcaatgcacagaaccagcagagtctccccttttcctgagccagagtgccaggaacactgtggacgtctttgttcagaagggatcaggttggggggcagcccccagtccctttctgtcccagctcagttttccaaaagacactgacatgtaattcttctctattgtaaggtttccatttagtttgcttccgatgattaaatctaagtcatttgaaaaaaaaaaaaaaaaaaaaactc

SEQ ID NO: 19684 - DNA, 491 bp, Homo sapiens
attcgccccgccccgattcgccccgcgctgcaggaattcggcacgagctgaggcccaagggcaccatgaagatgctcgtttctggcgctggagacatcaaacttactaaagacggcaatgtgctgcttcacgaaatgcaaattcaacacccaacagcttccttaatagcaaaggtagcaacagcccaggatgatataactggtgatggtacgacttctaatgtcctaatcattggagagctgctgaaacaggcggatctctacatttctgaaggccttcatcctacaataatcactgaaggatttgaagctgcaaaggaaaaggcccttcagtttttggaagaagtcaaagtaagcagagagatggacagggaaacacttatagatgtggccagaacatctcttcgtactaaaggtcatgctgaacttgcagatgtcttaacagaggctgtagtggactccattttggccattaaaaagcaagatgaacct

SEQ ID NO: 19685 - DNA, 509 bp, Homo sapiens
  misc_feature (1)...(509): n = A,T,C or G
agggggaaattgatcggctgtagganattgcaccgcctgcaggcanaaattcagctcagggcaatgtgtatgtgaagtgcccatcaattgctgcagctattgctgctgtcaatgcattgcatggcaggtggtttgctggtaaaatgataacagcagcatatgtacctcttccaacttaccacaacctgtttcctgattctatgacagcaacacagctactggttccaagtagacgatgaaggaagatatagtcccttatgtatatagctttttttctttcttgagaattcatcttgagttatcttttatttagataaaaataaagaggcaaggatctactgtcatttgtatgcaatttcctgttaccttgaaaaaataaaaatgttaacaggaatgcagtgtgctcattctccctaaatagtaaatcccactgtatacaaaactgttctcttgttctgccttttaaaatgttcatgtagaaaattaatgaactataggaatagctctan

SEQ ID NO: 19686 - DNA, 502 bp, Homo sapiens
  misc_feature (1)...(502): n = A,T,C or G
ngggggaaatcggatcgccttaggaattcggcacgctgtccgcagcaggtgcaggcccagttgtcacccctccagaacatctccccatggattctggcggtattgactcttcagattcagagtctgatatcctgttgggcattctggacaacttggacccagtcatgttcttcaaatgcccttccccagagcctgccagcctggaggagctcccagaggtctacccagaaggacccagttccttaccagcctccctttctctgtcagtggggacgtcatcagccaagctggaagccattaatgaactaattcgttttgaccacatatataccaagcccctagtcttagagataccctctgagacagagagccaagctaatgtggtagtgaaaatcgaggaagcacctctcagcccctcagagaatgatcaccctgaattcattgtctcagtgaaggaagaacctgtagaagatgacctcgttccggagctgggtatctcaan

SEQ ID NO: 19687 - DNA, 491 bp, Homo sapiens
  misc_feature (1)...(491): n = A,T,C or G
ntactgacgcctgggtattgcacgcctcattatatttcccttaaggtctggatgagacttctttgnggagcctctaaaaaaatttttcactgggggccacgtgggtcattagaagccagagctctcctccaggctccttcccagtgcctagaggtgctataggaaacatagatccagccaggggcttccctaaagcagtgcagcaccggcccagggcatcactagacaggccctaattaagttttttttaaaaagcctgtgtatttattttagaatcatgtttttctgtatattaacttgggggatatcgttaatatttaggatataagatttgaggtcagccatcttcaaaaaagaaaaaaaaattgactcaagaaagtacaagtaaactatacacctttttttcataagttttagggagctgtagtaatgtggcttataaagtataatggccctaatggtttcacaaatgaagttcccgtggagaagaa

SEQ ID NO: 19688 - DNA, 478 bp, Homo sapiens
  misc_feature (1)...(478): n = A,T,C or G
attgaccgcctgtggacttccctcgagaagagacggcgtttcaccatgttggccaggctggtctcgaactcctgaccttaggtgatccactcgccttcatctcccaaagtgctgggattacaggcgtgagccaccgtgcctggccacgcccaactaatttttgtatttttagtagagacagggtttcaccatgttggccaggctgctcttgaactcctgacctcaggtaatcgacctgcctcggcctcccaaagtgctgggattacaggtgtgagccaccacgcccggtacatattttttaaattgaattctactatttatgtgatccttttggagtcagacagatgtggttgcatcctaactccatgtctctgagcattagatttctcatttgccaataataatacctcccttagaagtttgttgtgaggattaaataatgtaaataaagaactagcataacactcanaaaaaaggg

SEQ ID NO: 19689 - DNA, 504 bp, Homo sapiens
  misc_feature (1)...(504): n = A,T,C or G
nttggaaatccattttgaatttgtcccgncctgcaggcgccatcatgaacgacaccgtaactatccgcactagaaagttcatgaccaaccgactacttcagaggaaacacatggtcattgatgtccttcaccccgggaaggcgacagtgcctatgacagaaattcgggaaaaactatccaaaatgtacaagaccacaccggatgtcatctttgtatttggattcagaactcattttggtggtggcaagacaactggctttggcatgatttatgatttcctggattatgcaaagaaaaatgaacccatacatagacttgcaagacatggcctgtatgagaagaaaaagacctcaagaaagcatcgaaaggaacgcaagaacagaatgaagaacgtcagggggactgcaaaggccaatgttggtgctggcaaaaagtgagctggagattggatcacagccgaaggagtataggtgctgcaatgatgttagctgtggccactgtggt

SEQ ID NO: 19690 - DNA, 485 bp, Homo sapiens
  misc_feature (1)...(485): n = A,T,C or G
nggccccatagatcgcttgattgattcgcntcgaggatcgcgccgagctgagacgcaggaatggaaagcggagttcctaacaggatgaaagttcccccatcagttcccccagtacctccaagcaagtagctttccacatttgtcacagaaatcagaggagagacggtgttgggagccctttggagaacgccagtctcccaggccccctgcatctatcgagtttgcaatgtcacaacctctctgatcttgtgctcagcatgattctttaatagaagttttattttttcgtgcactctgctaatcatgtgggtgagccagtggaacagcgggagacctgtgctagttttacagattgcctccttatgacgcggctcaaaaggaaaccaagtggtcaggagttgtttctgacccactgatctctactaccacaaggaaaatagtttaggagaaaccagcttttactgtttttgaaaaattacagcttn

SEQ ID NO: 19691 - DNA, 501 bp, Homo sapiens
  misc_feature (1)...(501): n = A,T,C or G
aggggnnnnnnnnnccgnnnnnnnnnnaattgatcgtcgtgaggacttccgcacgaggaaattaaataaacataattactaggtccttaaggaatgaattttatttttgtgtttccagttcctgtaactatgtgcctagtacatagcatgtgctcagtgtttgttgaaaggaaaaggtctgaagttgattctatcgtcaaagaaaatatttcagtatacagcatgtagtttataccaacaagcctttttaaacttaaggtctcttttttcataacatgtacatataaattttaaaagaaaacttaaaaatacagtagctgcttctaaatgcagatattgtaacttagctattattttcagaattccacaaggcatatgcccagttggtcgatcttggcactcactaacaccagtttcttcagatcatctttttctctttggaggatttaccactgataaacagccactaagtaagtccttgaaaaatatgataatgaaatc

SEQ ID NO: 19692 - DNA, 510 bp, Homo sapiens
  misc_feature (1)...(510): n = A,T,C or G
gaggggntannnnnnnnagnngnnnnnnnnnnattgaccaattgatccgcgctgcaggaattccgcacgaggtggaacgcgtggcctatgcaggtggattccttcaggtctttcctttggttctttgagcatctttgctttcattcgtctcccgtctttggttctccagttcaaattattgcaaagtaaaggatctttgagtaggttcggtctgaaaggtgtggcctttatatttgatccacacacgttggtcttttaaccgtgctgagcagaaaacaaaacaggttaagaagagccgggtggcagctgacagaggaagccgctcaaataccttcacaataaatagtggcaatatatatatagtttaagaaggctctccatttggcatcgcttaatttatatgttatgttctaagcacagctctcttctcctattttcatcctgcaagcaactcaaaatatttaaaataaagtttacattgtagttattttcaaatctttgcttgataag

SEQ ID NO: 19693 - DNA, 471 bp, Homo sapiens
  misc_feature (1)...(471): n = A,T,C or G
naattgagngcccattgatgcngcntgcaggaanncggcacgagccaaacctcggcttcttcctggaacagtgggtgcagcttccttccaggcggggcctagttggcttcggggacgccacccttcgccaggagtccccaacgctgatggctgatggggtaccccagccgcattctccaccttggccccttcttcatgtgccctgttctagctcccttttaagtcacctcgcttttcttaagttcatttgaaaggaaactttagatttgagaaccagaaacccaggtgagaataaaaggtgtccctgaaaattaattaaacataagttttcccctgtgaaaaaaaaaaaaaaaaaaaaaaaaaaccctcggggggggcccgggccccaaattccccttaaaggggggggaataaaaatacccggcccggcgtttaacaccgccgggaggggggaaaaaggctgggcttnag

SEQ ID NO: 19694 - DNA, 510 bp, Homo sapiens
  misc_feature (1)...(510): n = A,T,C or G
aaggggnnnnnnnnnnncagnnncnccnnnnnnatttgaccgatctgcangcactcggcacgagccaccgaccaactgccctaagcccccagggcctccagggcccaggttcgagacccaaacccccaaaatgcaaaacttctcttgaaaagttcagggaccgtccaggggagatggggaggagatatggagtgagtcacctgctccagaagatgccagcttctctctccagggtgcttagttggctttgcccacccctcactccccatggagctctggggacagctttctcacacccctgtgccacccacacagctgccctagctgaccccgagaagtgctcttggctgacccctctggtgtgtggtgaggggctttctcttccccttcctgtttcagacccccccatttcccgcacatggtgtggggggctgggggaggtccaagcagagtgttgtattattatcgctttatgtttttggctattgggttttttgtatagaccaaagc

SEQ ID NO: 19695 - DNA, 465 bp, Homo sapiens
  misc_feature (1)...(465): n = A,T,C or G
nattcacccgtctgcangaattcggcacgagcgcggccggagctgtgggctgggagatgctgctgaagccacatagccgtgtccaggtattcgagggtgcggaggacaacctcccggaccgcgatgcgctgcgggctgcactggccatccagcaactggctgagggactcacagctgatgacctgctgctcgtgctgatctcaggtgggggttcagctctgctgcctgcccccatcccacctgtcacactggaggagaagcagacactcactagactgctggcagcccgtggagccaccatccaggagttgaacaccattcggaaggccctgtcccagctcaagggtggggggctggctcaggccgcctaccctgcccaggtggtgagcctcatcctgtcagatgtggtgggggaccctgtggaggtgattgccagtggccccaccgtggccagttcccacaatg

SEQ ID NO: 19696 - DNA, 499 bp, Homo sapiens
  misc_feature (1)...(499): n = A,T,C or G
agaacatcgtcgcctgtggaanattgcacgagcgttcatattgactaaccaggtgatgaggaacaaactcattttattttttaaaagaagaaatcatgcaagaaaacaaagggaacaaaaaatctgtcagcgttatgatcagctcatggaggcatgggagaaaaaagtggacagaatanaaaataatcctctgtggaaagctaaagaaagcaaaacaagggaatactatgaaaagcagcttccagaaattcgaaaacaaagagaacagcaagaaagatttcagcgagttgggcataggggagctggtctttcagccaccattgctaggagtgagcatgagatttctgaaattattgatgggctctctgagcaggagaataatgagaaacaaatgcggcggctctctgtgattgcacctatgatgtttgatgcagaacaaagacgaggccagttcattaacatgaatgggcttatggaggaccctatgacagtgtataat

SEQ ID NO: 19697 - DNA, 466 bp, Homo sapiens
  misc_feature (1)...(466): n = A,T,C or G
natttgaccctggctgcacgaattcggcacgagacgcccccgctatacccccagtgccccgatggacaccaacctcttgagcaatatccagaagctattctctgaacgtattgatgtgttcagccctgtggagttcaacaaggtgtcggtgctgaccggcatcatcaagatcagcctgaagacgctgctggagtgtgtgcggctgcgcacctttgggcgcttcgggctgcagcaggtgcaagtggactgccactttctgcagctctacctgtggcgttttgtggccgacgaagaactcgtgcacttgctgctggacgaagtggtggcctctgctgccctgcgctgcccagaccctgtgcccatggagcccagtgtggttgaggtcatctgcgagcgcggctaggcgcagccgctgccatgcaccggtctgtccctgcaccccatggcacccaggatctggtctcgt

SEQ ID NO: 19698 - DNA, 502 bp, Homo sapiens
  misc_feature (1)...(502): n = A,T,C or G
ggcccgnaactgacggccgtggattgtaccgcctgtcggaattcggcacgagcccgcttctgtggactgttcgaacgcccaggggtgggccaaacccgtttcttaggaaaccaggaatccagggaaggcagaatggcttcctttgggtggaagaggaaaattggtgagaaggtctcaaaggtcacttcccagcagtttgaagctgaagctgctgatgagaaggatgtagttgacaacgatgaagggaactggcttcatgccattaaacgtaggaaagaaattcttcttgaaggctgtgctgagaaaagtaaacagctgaaggatgaaggagccagtttggctgaaaataaaagatatcgggaggcaattcagaagtgggatgaagcactacagttaactccaaatgatgctaccctatacgagatgaaatcacaggtgctaatgtctcttcatgaaatgttcccagcagtacatgcagcagaaatggccgtccagcaaaatc

SEQ ID NO: 19699 - DNA, 466 bp, Homo sapiens
  misc_feature (1)...(466): n = A,T,C or G
agatggtnnnnnaattgacttcggtgacgaattccgcacgagggaaaggtggacagtgttcaagggtctgctgtggtacattgttcccttggtcgtagtttactttgccgagtatttcattaaccagggactttttgaactcctctttttctggaacacttccctgagtcacgctcagcaataccgctggtaccagatgctgtaccaggctggcgtctttgcctcccgctcttctctccgctgctgtcgcatccgtttcacctgggccctggccctgctgcagtgcctcaacctggtgttcctgctggcagacgtgtggttcggctttctgccaagcatctacctcgtcttcctgatcattctgtatgaggggctcctgggaggcgcagcctacgtgaacaccttccacaacatcgccctggagaccagtgatgagcaccgggagtttgcaatggcggccacctgg

SEQ ID NO: 19700 - DNA, 493 bp, Homo sapiens
  misc_feature (1)...(493): n = A,T,C or G
aggagggcaatcgacgccttagaagaggccgatggaatctgaagatcatttgaaagagaacactgagaaaacggagcagcagccacagccttatgtgatggtagtgtccagttccaatggatttacttctcaggtagctatgaaacaaaacgaactgctggaacccaactctttttagttaatataccaaagcttatgaataattgtttgttaattgaacattttcaattatatgcagactgactgattctaagataaattctaaggaggtttctaattttgtaattgttaaaaatagagttaattttgactttgttagatgagggaggaaaactcaactgtttctctttgttatctaaatgtttcagaattcaatcgtgaaggaacaggcattttacactatgaagacattcttttgagatttttatttcagttgctatatcataagcatttttaaggtttcttttctaattttacattgtattagattttn

SEQ ID NO: 19701 - DNA, 500 bp, Homo sapiens
  misc_feature (1)...(500): n = A,T,C or G
gagggggnnnnnnnnaatggaagcccattgagaggcntcaggaattcggcacgagcgacaccgtaactatccgcactagaaagttcatgaccaaccgactacttcagaggaaacaaatggtcattgatgtccttcaccccgggaaggcgacagtgcctaagacagaaattcgggaaaaactagccaaaatgtacaagaccacaccggatgtcatctttgtatttggattcagaactcattttggtggtggcaagacaactggctttggcatgatttatgattccctggattatgcaaagaaaaatgaacccaaacatagacttgcaagacatggcctgtatgagaagaaaaagacctcaagaaagcaacgaaaggaacgcaagaacagaatgaagaaagtcagggggactgcaaaggccaatgttggtgctggcaaaaagccgaaggagtaaaggtgctgcaatgatgttagctgtggccactgtggatttttcgcaaga

SEQ ID NO: 19702 - DNA, 459 bp, Homo sapiens
aattagacccgcttttgcaccgcgctgcaggaattcggcacgagctgcaatttaaaaatgaaaacttacgtagattgactcttctgcatgtttctcatagagcagaaaagtgctaatcatttagccacttattgatgtcagccagaagcatatgagataaaacccccactgagatgcctctcatgcctcagatgggacccaccgtgtagacacacgacatgcaagagttgcagcggatgcttcaactcactgctcaccctcttttgtgagcaggaatagaaccctactgacatgcatggtttaactttctcatgagagctctggccttccttctgttcttttgtgctttcaaataactaacacgaactttcagaaaatttacatttgaacttagctgtaattctaaactgacctttccccgtactaacgtttggattccccgtgtggcatgttttctga

SEQ ID NO: 19703 - DNA, 473 bp, Homo sapiens
  misc_feature (1)...(473): n = A,T,C or G
nattgccttcgctgcacgaattcgacgaggtctcctctctccggtccgtgcctccaagatgacaaagaaaagaaggaacaatggtcgtgccaaaaagggccgcggccacgtgcagcctattcgctgcactaactgtgcccgatgcgtgcccaaggacaaggccattaagaaattcgtcattcgaaacatagtggaggccgcagcagtcagggacatttctgaagcgagcgtcttcgatgcctatgtgcttcccaagctgtatgtgaagctacattactgtgtgagttgtgcaattcacagcaaagtagtcaggaatcgatctcgtgaagcccgcaaggaccgaacacccccaccccgatttagacctgcgggtgctgccccacgtcccccaccaaagcccatgtaaggagctgagttcttatagactgaagacaggctattctctggagaaaaataanatggaaatggtactn

SEQ ID NO: 19704 - DNA, 471 bp, Homo sapiens
  misc_feature (1)...(471): n = A,T,C or G
cattgcattcatccgcctgcacgaattcggcacgagctggccggacctttgttcttatctacatattggaagatttggtcctgatgtcctttgaggcttctttagctctagttctctgacacttcagcctatatcacagctaacttcttcagtctcatctattccttatgctccagcccctggcaatttgcctcaagatgggggtttgaaaataactttacctgactcaaggagtgtctggagcacctcctagtctaagtctgcaagctccagttcttgcctaaaaccatgccagtggccacccttgggctcagacagctctgggccttttgaccacaagccagcccctcgccctctctgtggcatagtcttctctgccccaggactgcagggcggcttcctccaaggcttccaaggctcanaagaaatttggctccatccaagaaggctccagctcccctactggccccn

SEQ ID NO: 19705 - DNA, 455 bp, Homo sapiens
  misc_feature (1)...(455): n = A,T,C or G
natgagnccagccgcctcncgaaanncttacgagcagaaancctgaggaaaaatctgtgatcaccaacttaaaaaggagatactcgtttagattacacattggtaggaacattgcccggccctggagacttatatactatcgagcaaagaagatgttcgatgtcaacaattacaaaggcaggtatagcgaaggagatactgagaagttaaagatgtaccattctctccttgggaatgactggaagacgattggtgagatggtggcccgaagtagcctctccgtggccctcaagttctcacagatcagcagtcaaagaaatcgtggtgcttggagtaagtctgaaacccggaaactaatcaaggctgtcgaagaagtgattctgaagaagatgtctccccaggagttaaaagaggtggattccaaactccaagaaaatcctgaaagttgcctatcn

SEQ ID NO: 19706 - DNA, 471 bp, Homo sapiens
  misc_feature (1)...(471): n = A,T,C or G
atttgccctcgccncccggctgcaggaattcggcacgaggcgagagagagagagagagagagagagagagagagagagagagagagagagagagagagagagagatactcactcttttttacatggctgaaccaatctcgccatgatgtgagggatatgacaattcccggttaggccgtcaggtcctactctggccagaacagggacctcgcccctggcccttatattaggaacttggtcctgtgcaggtcaggacactatcacatgagttctggagagcaaaagccacagatggaactgaaggttagggagtgatacattttctgaattagagctcatgaacattaagatggttaaatatgacaaatagaaattactgtctagaattaaaataaaaaaaatggcaagataacaaaagacttgtgaaaatgcctaacataggtgtaagttcaatataggctaaatgatgtg

SEQ ID NO: 19707 - DNA, 471 bp, Homo sapiens
  misc_feature (1)...(471): n = A,T,C or G
gggggcncggcccgnaaatgagnnccttgacaagcttcgcggaanacggcacgagtgtaccaacactggatggaagaaacatacctatgtcagtaaatgatattgtgaaacccggaatgaggagaagaattattggatatgggctgccatttccaaaaaatcctgaccaacgtggtgaccttctaatagaatttgaggtgtccttcccagatactatatcttcttcatccaaagaagtacttaggaaacatcttcctgcctcatagaatgaagaactttgttacacatattttgataaggcactgaaaatataaaaggactggtagtttactgatgtagatgtgaattctgtataaagatgtgtaaattcttttgagggttcattaaattgcatgaatagagacgggtcaaataaataggcaaaagggatttttacagttagagataaaagagaaaaccattcactgtatt

SEQ ID NO: 19708 - DNA, 470 bp, Homo sapiens
attgcccgcctgcggaattcgtacgagccggccaacccccaggaacagtccttttcatgggccaagtgatggaaccctgaccctggggaaagacgccttcatctgggacaaaactggagatgcatcgggaaagaagaaactccgaagaaaagaattttagtgttaatgactctttctgaaggaagagaagacatttgccttttgttaaaagatggtaaaccagatctgtctccaagaccttggcctctccttggaggacctttaggtcaaactccctagtctccacctgagaccctgggagagaagtttgaagcacaactcccttaaggtctccaaaccagacggtgacgcctgcgggaccatctggggcacctgcttccacccgtctctctgcccactcgggtctgcagacctggttcccactgaggccctttgcaggacggaactacggagcttacaggagcttttgt

SEQ ID NO: 19709 - DNA, 468 bp, Homo sapiens
  misc_feature (1)...(468): n = A,T,C or G
aggggcnatagacctcgtgaggcattcggcacgagccgaggaggctttggtggaggaagacgaggtggccctggggggccccctggacctttgatggaacagatgggaggaagaagaggaggacgtggaggacctggaaaaatggataaaggcgagcaccgtcaggagcgcagagatcggccctactagatgcagagaccccgcagagctgcattgactaccagatttattttttaaaccagaaaatgttttaaatttataattccatatttataatgttggccacaacattatgattattccttgtctgtactttagtatttttcaccatttgtgaagaaacattaaaacaagttaaatggtagtgtgcggagtttttttttcttccttcttttaaaaatggttgtttaagactttaacaatgggaaccccttgtgagcatgctcagtatcattgtggagaaccaag

SEQ ID NO: 19710 - DNA, 249 bp, Homo sapiens
aatcgcaccgcctgcaggaattcggcacgagggaagatggccgcactctttctgactacaacatccagaaagagtcgaccctgcacctggtcctgcgcctgaggggtggctgttaattcttcagtcatggcattcgcagtgcccagtgatggcattactctgcactatagccatttgccccaacttaagtttagaaattacaagtttcagtaatagctgaacctgttcaaaatgttaataaaggcggca

SEQ ID NO: 19711 - DNA, 495 bp, Homo sapiens
  misc_feature (1)...(495): n = A,T,C or G
aggagaaaaantttgatcgccttcggaattcggcacgaggggaaatggcggcttcaggagagagcgggacttcaggcggcggaggcagcaccgaggaagcatttatgaccttctacagtgaggtgaaacaaatagagaagagagactcggttctaacttcgaaaaatcagattgaaagactgacccgtcctggttcctcttacttcaatttgaacccatttgaggttcttcagatagatcctgaagttacagatgaagaaataaaaaagaggtttcggcagttatccatcttggtgcatcctgacaaaaatcaagatgatgctgacagagcacaaaaggcttttgaagctgtggacaaagcttacaagttgctactggatcaggagcaaaagaagagggccctggatgtaattcaggcaggaaaagaatacgtggaacacactgtgaaagagcgaaaaaaacaattaaaaaaaaaaaaaaaaactcgaggggggg

SEQ ID NO: 19712 - DNA, 471 bp, Homo sapiens
  misc_feature (1)...(471): n = A,T,C or G
agagtnnttttttatgactacatagcattcggcacgaggtctgcacatgtgaccgtgtctgggggcaccccaaaaggcgaggctgtgcttgggacacacaaattaaagaccatcacggggaattctgctgctgttattaccccattcaagttgacaactgaggcaacgcagactccagtctccaataagaaaccagtgtttgatcttaaagcaagtttgtctcgtcccctcaactatgaaccacacaaaggaaagctaaaaccatgggggcaatctaaagaaaataattatctaaatcaacatgtcaacagaattaacttctacaagaaaacttacaaacaaccccatctccagacaaaggaagagcaacggaagaaacgcgagcaagaacgaaaggagaagaaagcaaaggttttgggaatgcgaaggggcctcattttggctgaagattaataattttttaacatcttg

SEQ ID NO: 19713 - DNA, 502 bp, Homo sapiens
  misc_feature (1)...(502): n = A,T,C or G
atgcgccccattgaaaaatgatgagcctgcggggatcgccgcccgatcagagttttgagggggaaggtggcggngtgggaaccgtgtcattccagagtggatctgcggtgaagccaagccgcaaggttacaaggcatcctcaccaggggccccgcctgctgctcccaggtggcctgcggccactgctatgctcaaggacctggaaacccatgcttcgagacaacgtgactttaatgggagggtgggtgggccgcagacaggctggcagggcaggtgctgcgtggggccctctccagcccgtcctaccctgggctcacatggggcctgtgcccacccctcttgagtgtcttggggacagctctttccacccctggaagatggaaataaacctgcgtgtgggtggagtgttaggacccccnnnnnnnnnnnnnnnnnnnnnnnnnnnnnnnnnnnnnnnnnnnnnttctgggggggggggccccccccccaatccccctttaaa

SEQ ID NO: 19714 - DNA, 468 bp, Homo sapiens
  misc_feature (1)...(468): n = A,T,C or G
natttgccccgcgctgcacgaattcggcacgagccgagatggacaaagtgtgtgctgtttttggaggctcccgaggcattggcagagctgtggcccagttaatggcccggaaaggctaccgactggcggtcattgccagaaacctggaaggggccaaagccgccgccggtgacctcggcggagatcatttggcatttagctgtgatgttgctaaagaacatgatgttcaaaatacatttgaagagatggagaaacatttaggtcgagtaaatttcttggtaaatgcagctggtattaacagggatggtcttttagtaagaacaaaaactgaagatatggtatctcagcttcatactaacctcttgggttccatgctgacctgtaaagctgccatgaggactatgattcaacaacagggagggtctattgttaatgtaggaagcattgttggcttaaaaggcaactctt

SEQ ID NO: 19715 - DNA, 489 bp, Homo sapiens
  misc_feature (1)...(489): n = A,T,C or G
cgccccccccatcganccctgggcnanatagaccgcctgcggagttaacgtaccacatacttcagtataggcatttgttcttgagtgtgtcaaaatacagctagttactgtgccaattaagacccacctgtatttcacccatctgtttcttcttggctaatctctgtacttctgccttttaattactgggcccttattccttattttctgtgagaaataatagatgatatgatttattacctttcaattatatttttctcagatatactacaaaatttcataatcctgggatatatgtaccattgtcagctatgactaaaaatttgaaaaagataaaaatttctagcacgcctttgaagtttaccaagtatagtcacattcagtgacagcccattcattccagtaaagaatcatttcattcactttgggagaggcctataattacatttatttgcaatgtttctcttcgctagattgttacatagctcc

SEQ ID NO: 19716 - DNA, 454 bp, Homo sapiens
  misc_feature (1)...(454): n = A,T,C or G
aattgcaccgctttgcccggctgcaggctttttggaggtgcttaagcagaagcattaacttctctggaaaggggggagctggggaaactcaaacttttcccctgtcctgatggtcagctcccttctctgtagggaactctggggtcccccatccccatcctccagcttctggtactctcctagagacagaagcaggctggaggtaaggcctttgagcccacaaagccttatcaagtgtcttccatcatggattcattacagcttaatcaaaataacgccccagataccagcccctgtatggcactggcattgtccctgtgcctaacaccagcgtttgaggggctggccttcctgccctacagaggtctctgccggctctttccttgctcaaccatggctgaaggaaaccagtgcaacagcactggctctctccaggatccagaaagggggtggn

SEQ ID NO: 19717 - DNA, 452 bp, Homo sapiens
  misc_feature (1)...(452): n = A,T,C or G
attgcacgctttgcccggctgcagaattcggcacgagccaacccaggatacatcccttcctcagaggctaacaggccaagccatctgtccagcactggtaccccaggcgcaggtgtccccagcagtggaagagacggaggcacaagcagagacacatttcaaactgttccccccaattcaaccaccatgagcctgagcatgagggaagatgcgaccatcctgcccagccccacgtcagagactgtgctcactgtggctgcatttggtgttatcagcttcattgtcatcctggtggttgtggtgatcatcctagttggtgtggtcagcctgaggttcaagtgtcggaagagcaaggagtctgaagatccccagaaaccctggagttcagggctgtctgaaagctgctccacagccaatggagagaaagacagcatcacccttatctccatgan

SEQ ID NO: 19718 - DNA, 498 bp, Homo sapiens
  misc_feature (1)...(498): n = A,T,C or G
acgtctcctaatgaggactgagtgacntgccacgaggacgaaagaaaatcacttataagatgaaccctgctgtaagacagagatgtctcttgttttgttttcagcagaagctgatcctgtctcattttttcctgctacaggttcctcagtggtgtgctgaatattgtctttccatccactaccagcacgggggcgtgatatgcacacaggtccacaagcagactgtggtccagctcgccctgcgggtggcggatgaaatggatgttaacattggtcatgaggttggctacgtgatccctttcgagaactgctgtaccaacgaaacaatcctgaggttggtttgtggggttcagtccgctccctgctgatgattcttggcttaggttctacaattctgaaggagcattattctggcattctacctgttaagcatctatgctgtgcagtagcaactggtctctgtcatcagccagccagcaacagttgctttcccacact

SEQ ID NO: 19719 - DNA, 507 bp, Homo sapiens
  misc_feature (1)...(507): n = A,T,C or G
gggtnnnnnagggtnnnnnnttctgaccggctactggatccgtccgagagccaagtgtctgggagcacagtgaagaccatgggagcaccctggcacctgggagcacagtgaagaccctgagagcatcctggcacctgggagcgcaggttggcccctgaactgttctttgtttacaggactctgctaacttctcacttggaacagactgcgtaagagccaggtgggataaggtaaagcaactcagctgctacagggcttttaatggagaacaaagtctatttactgatagtttggctgcactgtggaaaagcctgctggaagtctccctgccgtgggctctcattgccaatatggaacagagcccagggccagggcgactggggcagtgactggaaaaggaaaactaaaggtcagaatccgggatcaggaactgtttttatccagcagtgaagctcttgagctcttangaagggttcccgtggttggaaagaacatannttggggggg

SEQ ID NO: 19720 - DNA, 467 bp, Homo sapiens
  misc_feature (1)...(467): n = A,T,C or G
ngggggcnggngnnnnaaatgagngcatgatgactntccacgagctcaagaccaaaagactgtcaggaaggcagagtgcagagcaatccactgtccaagaccacacgacttcgagaacggggaatactggccccggtctccctactacaatgtgagtgatgagatctctttccactgctatgacggttacactctccggggctctgccaatcgcacctgccaagtgaatggccgatggagtgggcagacagcgatctgtgacaacggagcggggtactgctccaacccgggcatccccattggcacaaggaaggtgggcagccagtaccgccttgaagacagcgtcacctaccactgcagccgggggcttaccctgcgtggctcccagcggcgaacgtgtcaggaaggtggctcttggagcgggacggagccttcctgccaagactccttcatgtacgacacccctc

SEQ ID NO: 19721 - DNA, 475 bp, Homo sapiens
  misc_feature (1)...(475): n = A,T,C or G
cgatgggggnnnnnaaattgattttcgatccgcgctgcaggaattcggcacgagctgatcatctcatcaatcagggttacagagccatcacggtgcggaagctcatgcagggcatgggccttggcctctccagcgtctttgctctgtgcctgggccacacctccagcttctgtgagtctgtggtctttgcatcagcctccatcggcctccagaccttcaaccacaggtgagggccgactgctccatccaccagagcgccgtgctgcccgcacggccgaggcccgcacatgtgaagagggagctctgtccgcctctctcagtctcttcctcacacttcacccccttcccaagctgctgggcagtgactgcactgaagacccagtagttctttaggaaccagcaattcacttcagtgagcagcacgtgcgcgtgatttgtgcgaacatgctttccccacagcactttaaaaaaaaaa

SEQ ID NO: 19722 - DNA, 476 bp, Homo sapiens
  misc_feature (1)...(476): n = A,T,C or G
nattggcctcgctccgcgctgcaggaattcggcacgaggcgacttcgatattaacaaggatggcggcggccgcagcaagtcgaggagtcggggcaaagctgggcctgcgtgagattcgcatccacttatgtcagcgctcgcccggcagccagggcgtcagggacttcattgagaaacgctacgtggagctgaagaaggcgaatcccgacctacccatcctaatccgcgaatgctccgatgtgcagcccaagctctgggcccgctacgcatttggccaagagacgaatgtccctttgaacaacttcagtgctgatcaggtaaccagagccctggagaacgttctaagtggtaaagcctgaagcctccactgaggattaagagcaacagccccagagcctgggctctgctggacttagtataatgtgaaaaaaatgtgttctcctattcctcataaagcttgtgctggaaaatacttt

SEQ ID NO: 19723 - DNA, 505 bp, Homo sapiens
  misc_feature (1)...(505): n = A,T,C or G
aggcgngnncaattgancaactgatgcgccctgcggaattcggcacgagcaggagcaacggttggtcctgcggctgtgatgtcggtgttgaggcccctggacaagctgcccggcctgaacacggccaccatcttgctggtgggcacggaggatgctcttctgcagcagctggcggactcgatgctcaaagaggactgcgcctccgagctgaaggtccacttggcaaagtccctccctttgccctccagtgtgaatcggccccgaattgacctgatcgtgtttgtggttaatcttcacagcaaatacagtctccagaacacagaggagtccctgcgccatgtggatgccagcttcttcttggggaaggtgtgtttcctcgccacaggtgctgggcgggagagccactgcagcattcaccggcacaccgtggtgaagctggcccacacctatcanagccccctgctctactgtgacctggagggtggaggctntanggccaccatgg

SEQ ID NO: 19724 - DNA, 405 bp, Homo sapiens
  misc_feature (1)...(405): n = A,T,C or G
gagatttttcctctgttacaaactacctctggacagttgtgttgttttttgttcaatgttccattcttcgacatccgtcattgctgctgctaccagcgccaaatgttcatcctcattgcctcctgttctgcccacgatcccctcccccaagatactctttgtggggaagaggggctggggcatggcaggctgggtgaccgactaccccagtcccagggaaggtggggccctgcccctaggatgctgcagcagagtgagcaagggggcccgaatcgaccataaagggtgtaggggccacctcctccccctgttctgttggggaggggtagccatgatttgtcccagcctggggctccctctctggtttcctatttgcagttacttgaataaaaaaaatatcctttn

SEQ ID NO: 19725 - DNA, 506 bp, Homo sapiens
  misc_feature (1)...(506): n = A,T,C or G
gagtgcggnnnnaattganaatcgatcgccttcggaattcggcacgagtgttggttttatttctggctcccgagtaagcatgaaaccagaatttcttcacttgactccaggagttcagttggaagcaggaggagataatcttggccaacagtacaatagcccacaagaagttattggcaaacgaggttccgatatcatcattgtaggtcgtggcataatctcagcagctgatcgtctggaagcagcagagatgtacagaaaagctgcttgggaagcgtatttgagtagacttggtgtttgagtgcttcagatacatttttcagatacaatgtgaagacattgaagatatgtggtcctcctgaaagtcactggctggaaataatccaattattcctgcttggattcttccacagggcctgtgtaagaatgggttctggagttctcatggtctttaggaaatattgagtaatttgtaatcaccgcattgatactataataagttcatt

SEQ ID NO: 19726 - DNA, 496 bp, Homo sapiens
  misc_feature (1)...(496): n = A,T,C or G
cggatggcccaattgatcgccttcggcanaaatagatccgcctgcacgaattcgccacgaggcaaaatgaaagcattgaggtgaatttaggttatatggcatttatctggtaatgtgtttcagaaaagctagaatgaaaatgtgatgtaagggatagcaagtgtaggttgattcataattcttggtataaaaccaagttttccttagtcttgaggaatttgaagaaaggtaaaatgttggattttaagcaaagtaggattgaccagagactgttctgactttgacattcagacctttcagatgttcttccttcagaccagtccaagacactcagcatttccagccaagttgtcttttttttctgccaataaagtattcattagttgatgtttgtttgtattttaagtaaagtcaattttttttaaagcattaatttaattcacgggtatgcctttcatttctctggccttcagttggtttaaaaaaaaaaaaaaan

SEQ ID NO: 19727 - DNA, 513 bp, Homo sapiens
  misc_feature (1)...(513): n = A,T,C or G
gggtgtncncnagggttnnnnnnttactgatcgccactggaattcgtcacgagaataaatccagatagatatatcattgtggtggaacatgatctaagtgtattagactatctctccgacttcatctgctgtttatatggtgtaccaagcgcctatggagttgtcactatgccttttagtgtaagagaaggcataaacatttttttggatggctatgttccaacagaaaacttgagattcagagatgcatcacttgtttttaaagtggctgagacagcaaatgaagaagaagttaaaaagatgtgtatgtataaatatccaggaatgaagaaaaaaatgggagaatttgagctagcaattgtagctggagagtttacagattctgaaattatggtgatgctgggggaaaatggaacgggtaaaacgacatttatcagaatgcttgctggaagacttanacctgatgaaggaggagaagtaccagttctaaatgtcagttataagccacagaaa

SEQ ID NO: 19728 - DNA, 474 bp, Homo sapiens
  misc_feature (1)...(474): n = A,T,C or G
naactgccctgcgtgcagcgaattcggcacgagatatagataaaattaaacccagtgaatctaatgtgactattcttgggcgatttgattacagccagtgtgacatttggtacatgaggttttctatggatttctggcaaaagatgcttgcattgggcaatcaagttggcaaactttatgtttgggatttagaagtagaagatcctcataaagccaaatgtacaacactgactcatcataaatgtggtgctgctattcgacaaaccagttttagcagggatagcagcattcttatagctgtttgtgatgatgccagtatttggcgctgggatcgacttcgataaaatacttttgcctaatcaaaattagagtgtgtttgttggctgtgtaaaatagaattaatgtatcttgctagtaagggcacgtagagcatttagagttgtctttcagcattcaatcaggctgagctgaatg

SEQ ID NO: 19729 - DNA, 484 bp, Homo sapiens
  misc_feature (1)...(484): n = A,T,C or G
cggcccccattgacgctgcggttgaaacacatcattatctagtaggatccctattcgtattttactaccactattagactattccaaataaactaataatcctgtaagactggctagctgacacctatttggtctaaaagtaatgagacttaagattggtggattttgattataagaagacagaaagggctgggttttaaattctgttcctttgcactcctagagcctctggcaagaataaggaagaaaccaatcaggtgcacctcaggttacccacacttgcttcagcctgagcagtcctgcttttatctgttttagacagtctcataaaatttcatctgcaaaaagatccctcaaaaaaagaaaagaaaatgaaagctattggcttagagtactgggtagtgttcctcaaagggtggtcagggtgaaaaatgcgtgaagtcttgagcagcangaggaaagctaaagactctgcttcaggaan

SEQ ID NO: 19730 - DNA, 502 bp, Homo sapiens
agcccccccaattgacatcgatcggctgtagaattcggcacgaggacgagtgccgctaccgctactgccagcaccgctgcgtgaacctgcctggctccttccgctgccagtgcgagccgggcttccagctggggcctaacaaccgctcctgtgttgatgtgaacgagtgtgacatgggggccccatgcgagcagcgctgcttcaactcctatgggaccttcctgtgtcgctgccaccagggctatgagctgcatcgggatggcttctcctgcagtgatattgatgagtgtagctactccagctacctctgtcagtaccgctgcgtcaacgagccaggccgtttctcctgccactgcccacagggttaccagctgctggccacacgcctctgccaagacattgatgagtgtgagtctggtgcgcaccagtgctccgaggcccaaacctgtgtcaacttccatgggggctaccgctgcgtggacaccaaccgctgcgtggagcc

SEQ ID NO: 19731 - DNA, 477 bp, Homo sapiens
  misc_feature (1)...(477): n = A,T,C or G
ngggtgggggaggccgggaatttgaggntccatgagatgtactgcggattccgcacgagcaaggatttaataactattatgatcaaggatatggaaattacaatagtgcctatggtggtgatcaaaactatagtggctatggcggatatgattatactgggtataactatgggaactatggatatggacagggatatgcagactacagtggccaacagagcacttatggcaaggcatctcgagggggtggcaatcaccaaaacaattaccagccatactaaaggagaacattggagaaaacaggaggagatgttaaagtaacccatcttgcaggacgacattgaagattggtcttctgttgatctaagatgattattttgtaaaagactttctagtgtacaagacaccattgtgtccaactgtatatagctgccaattagttttctttgtttttactttgtcctttgctatctgtgn

SEQ ID NO: 19732 - DNA, 498 bp, Homo sapiens
  misc_feature (1)...(498): n = A,T,C or G
aggggggnncnncaatcgcctggctgcagattcggcacgagatgaggtcaagctgaggaccaggccagtgggaagggaaggagggagaattagcgtctataaagcacaggagactatttttgatattcatagctatatattaaggcacctgccacaagagctctcaggatggggacagccttcttagtggagccatggcagcaaggcctgagggcatgagcagaaccactcttcttgtcacatacgaacctgagaaaagggaagccaggagggaggtcacaccatggctcaaaagggaaaggccttcccacttgtccttagcccctcaaacctcacacggtcaacagtttccattccagggcaggagaatgctgccgccactgcgctgttgagttgaagttggtaccaaatacacatttaccacttttatatctgggaagtcaacttgccatcgtttcatgataacaaccatttataagagaaaaagacaggacacgc

SEQ ID NO: 19733 - DNA, 358 bp, Homo sapiens
tttgccctcctgcggaattcggcacgagcccttttggggataatgtcccagagtccccccactagacacaggtcactgccaagcatcagggccactcgggctcagaggtcactcagggtcaatactcagggtcagtgcaggttatgagatccttggggtccaccctagtctctgacacctgggacaggggtgcttttgctactttggttgtggtcactcccccacacctgcctgcctccttcacggactcgaagtgaccttcctggaggaggtgggcagctcagactccacatgctggtggtgcctgaggtctgatggcctctaataaactgtgtcctataaaaaaaaaaaaaaaaaa

SEQ ID NO: 19734 - DNA, 484 bp, Homo sapiens
  misc_feature (1)...(484): n = A,T,C or G
gtgatggcnaaatgatcgctgagcaganatggagatcatccatgagctgaacgcggctgaaggcaggtccttcatgcacgtcaacaccaatgccaacttctacaaggactccggcatcacatacctgggcatcaaggccaacgacacacaggaggtcaacctcagcgcttactttgaaagggctgccgacttcattgaccaggctttggctcaaaagaatggccgggtgctcgaccactgccgggaaggttatagccgctccccaacgctagttatcggctacctcatgatgcggcagaagatggacgtcaagtctgccctgagcatcgtgaggcagaaccgtgagatcggccccaacgatggcttcctggcccagctctgccagctcaatgacagactagccaggaggggaagttgaaaccctagggcacccccaccacctctgctcgagaggtccgtgggggaggccgtgggcaaaggaagn

SEQ ID NO: 19735 - DNA, 480 bp, Homo sapiens
  misc_feature (1)...(480): n = A,T,C or G
tgcggcgnnnnnnnaattgaattgcttngctgtggaattcggcacgagctcagcgtgctggagaagaccgccttcgaggttgcactggactgcaagcacagggaccttgtagactacctggacccgctgaccaccgtcaggcccaaaacagatgaggagaaaaggcgacctgatattttccatgcattgaaaatgggaaacttccagctggtcaaagagattgccgatgaagaccccagccacgtgaacttggtcaatggggacggggcgacgccactgatgctagcagctgttacggggcagctggctctggtgcagctgctggtggagaggcacgcggatgttgacaagcaggacagcgtgcatggctggacggccctcatgcaggcaacctaccatgggtcagtgccagccccacgccctcagcgacaaggccagacagatgctctggcctgagatggaggttcccaatgggctctt

SEQ ID NO: 19736 - DNA, 498 bp, Homo sapiens
  misc_feature (1)...(498): n = A,T,C or G
agcgatcnnnnnttttgtgcgcctcatgantcagcacgagccgcattgnggtgctggatgagggcaagatgaagctggattacatcctgggcctgaagatagaggatttcttagagagacgcctgcagacccaggtcttcaagctgggcttggccaagtccatccaccacgctcgcgtgctgatccgccagcgccatatcagggtccgcaagcaggtggtgaacatcccgtccttcattgtccgcctggattcccagaagcacatcgacttctctctgcgctctccctacgggggtggccgcccgggccgcgtgaagaggaagaatgccaagaagggccagggtggggctggggctggagacgacgaggaggaggattaagtccacctgtccctcctgggctgctggattgtnctcgtttcctgccaaataaacaggatcagcgctttacaaaaaaaaaaaaaaaaaacccgngtaaacccatccttttggttttttt

SEQ ID NO: 19737 - DNA, 465 bp, Homo sapiens
  misc_feature (1)...(465): n = A,T,C or G
gcctgatcgcctgcggaatccgctgaagaccntcccctgatgcctctgtaaaaatcctcactctttcccagattggaagaattgttgaaaattctgatgctgttactgagattctaaataatgctgaattactaaaacaaattgtttattgcattggtggagagaatctatctgtagcaaaagcggctatcaaatccctgtcaagaatatcactaacccaagctggactggaggctttatttgaaagcaatctgctggatgatttgaaaagtgtaatgaaaacaaatgacattgttcgatacagggtgtatgagctaattatagagatttcttccgtgtcaccagaatctttaaactactgtaccacaagtggattggtaacccagctcctgagagagctgactggtgaggatgtgttggtcagagccacctgtatagaaatggtgacatcactggcatatactc

SEQ ID NO: 19738 - DNA, 478 bp, Homo sapiens
  misc_feature (1)...(478): n = A,T,C or G
ggtttctaaaaactgatcgcctgggtgttccgcctaggnangnggctgcaatggtctctctgtaaggaaaatcactgacagcagctccttctggacccagtctggaaggtctagagggggatagaatttttatttcatatccttatgtggtgcttggaaaatgtttttaaccttgaccatgtattatgtttataattaaaaacccaaagaaccagctcatgtttggaaaaggaatcttccactgaaacatttggatacccgacgttctccctggacacttggcccggcaatagttggggtctcctgggaagctgagtgctggcttctagcctctccagttccctcagactctgtcttcagctcgggcccctccgttctgtctccctcgactccaagtcaggaataccgtgggcttcctgccctcaccccacacctcaagaccatcccactgcttgcctgcttgccccctgccatctcg

SEQ ID NO: 19739 - DNA, 482 bp, Homo sapiens
  misc_feature (1)...(482): n = A,T,C or G
cgcgggangntttttaattganctgctgtagcaattcggcacgagcagagatacagttcttttagtgaccagatactgccaaattgatgtgttcttgctttccaggtgagctttttgttcttaagattaagaaacctatgaaggatctgcagccaggcatggtggctcaggcctataatctcagcactttgggaaatcgaggtgggtggatcgcttgagcccaggagtttgagaccagcctgggcaacataatgaaaccctatctttacaaaaaaatacaaaaattagctgggcgtggtggtgcacacctgtagtcccagctactcgggaggctgaaatgggaggattgcttgagcctggcaggtcaaggctgcgatgggacatggtcatgccactggacgccagcctgggccacagagggagaccctgtctcanaaaaagaaaagaaaaaagaaaaaggtctgcccacaaaatcactagct

SEQ ID NO: 19740 - DNA, 492 bp, Homo sapiens
  misc_feature (1)...(492): n = A,T,C or G
ccccccccccatgcncgcttcggaannnatagatccgcctgcaggaattcgccacgagtgaaatatttatttattcatctgtctaattcacccttttcttttaaaagccccagtttcagaatgtgaatcacggatattcctgttactaaaatggaaatgtaattccaagtttcttttttaattttttaaatttatgtcattgtattggactatgcttatatttaaaactacttaatttagagttaactacctgcttaggccccagaacattacttatgcccttcagttaccaaaagatttgtgcaaggttttgtaccctggtaaatgatgccaaagtttgttttctgtggtgtttgtcaaatgttctatgtataattaactgtctgtaacatgctgtttccttcctctgcagatgtagctgctttcctaaatctgtctgtctttctttaggttagctgtatgtctgtaaaagtatgttcaattaaattactc

SEQ ID NO: 19741 - DNA, 495 bp, Homo sapiens
  misc_feature (1)...(495): n = A,T,C or G
atagaaaaccctnnaannttttgccgcgctgcaggtttagagctaatgctattgcaagcctttttgcttggactggagcacaagctatgtatcaaggattctggagtgaagcagatgttactcgaccttttgtctcccaggctgtgatcacagatggaaaatacttttcctttttctgctaccagctaaatactttggcactgactacacaagctgatcaaaataaccctcgtaaaaatatatgttggggtacacaaagtaagcctctttatgaaacaattgaggataatgatgtgaaaggttttaatgatgatgttctacttcagatagttcactttctactgaatagaccaaaagaagaaaaatcacagctgttggaaaactgaaaaagcatatttgattgagaactgtgggaatatttaaattttactgaaggaacaataatgatgagatttgtaactggcaactattaaatacattgatttttgagacaaa

SEQ ID NO: 19742 - DNA, 466 bp, Homo sapiens
  misc_feature (1)...(466): n = A,T,C or G
ntttgccccgtgctgcaggaattcggcacgagagccagccctggtcctgcctttctgtgcacaggctccaccgagcatcctggctgcacccggggggtcctggccacaccgagggtcctggctgcaccgcccctgtggtgtgtttttgggacagtgcaggcaggcgtaggcacggcttcacactcggtgtcagggcagccgtgctgggacctattgggcatctgtatcggggtccaggataaagtgctgtcccctctcgacgtcttcacgcactgctgtagtttgagaagttgaccacagaaaagtacagaaaataactcaggcacggagctgaccgacgggcattgtctgtgttccgtgagtgtgtactgggcctaaagagcaagcattgcagagccctgctgttccctttcccggcctcacctcagctccccaggccacgtggcgggaattgaggcgntccggt

SEQ ID NO: 19743 - DNA, 486 bp, Homo sapiens
  misc_feature (1)...(486): n = A,T,C or G
aggatgtgccnnagntgcncccaactgaacgcgcgtggaatngcntcgagaccaagccttcctaggttttctaggcagtcagctgttaaccactcacttagtaaaagtcatttctacacctgctccaggaccaatcagtgaaacctgctcggaattaaaggcttcctctgggtgcctgctgaacaactgagctcatgtcatgggcatgtggaggtttctctgttgcctgaaagagccattaaagtcagtcgtgcgtgaagcatctctcttctaaaggatgtgtatttccataaatgctttctgaggatgcggtacaaaatgatttcccaaagttctgaagtgccttgagaacatgtgggtccgagtgttataacagactcctcccccgggtcaccttttgcctggtcatcctgttagagtacatctttggaaatccagggtaatattctctttcagagatgctcattgagtaactctgtgtacgga

SEQ ID NO: 19744 - DNA, 474 bp, Homo sapiens
  misc_feature (1)...(474): n = A,T,C or G
nattgatcgcctgcggaattcggttcgagcaacgaactgcccctttcaactttgctctccatacgtcccccaaaatattacacatacaagtttgcagaaggcaaactgtttgaggaaactgggcatgaagacccaatcacaaagactagtcgcgttttacgtctagaagccaaaagcaaggatggaaaattagtgccaatgactgttttccacaaaactgactctgaggacttgcagaagaaacctctcttggtacatgtatatggagcttatggaatggatttgaaaatgaatttcaggcctgagaggcgggtcctggtggatgatggatggatattagcatactgccatgttcgaggtggtggtgagttaggcctccagtggcacgctgatggccgcctaactaanaaactcaatggccttgctgatttagaggcttgcattaagacgcttcatggncaangctttctcagc

SEQ ID NO: 19745 - DNA, 488 bp, Homo sapiens
  misc_feature (1)...(488): n = A,T,C or G
cgcacccccattgaccgcctgcggtagaccgccntagcttatgaccatgaagcacggacagaagatgacctgagttttcacaaaggagaaaaatttcaaatattgaacagctcggaaggagattggtgggaagcccgctccttgacaactggagagacaggttacattcccagcaattatgtggctccagttgactctatccaggcagaagagtggtactttggaaaacttggccgaaaagatgctgagcgacagctattgtcctttggaaacccaagaggtacctttcttatccgcgagagtgaaaccaccaaaggtgcctattcactttctatccgtgattgggatgatatgaaaggagaccatgtcaaacattataaaattcgcaaacttgacaatggtggatactacattaccacccgggcccagtttgaaacacttcagcagcttgtacaacattactcagagagagctgcaggtctctgctg

SEQ ID NO: 19746 - DNA, 480 bp, Homo sapiens
  misc_feature (1)...(480): n = A,T,C or G
nattgtcgcgtcggaannngtttgacccgcctgcaggaattcggcacgagatcgaataaaaagacacctaaaactatctcatattcgcttagcccttggggtggggagaaccttagagtctcaagtcaaagtcgtggccctgtgtgctggttctgggagcagcgttctgcagggtgttgaggctgacctttacctcacaggtgagatggcccatcatgatattttggatgctgcttcccaaggaataaatgtcatcctctgtgaacacagcaacactgaacgaggctttctttctgaccttcgagatatgctggattctcacttggagaataagataaatattatcctatcagagactgacagggaccctcttcaggtggtataattgcagaaacatcaggataacacattctacaaatcagctggatgccaacttagatttgtaacatgagtcagtgggactggtggcttccagagagn

SEQ ID NO: 19747 - DNA, 483 bp, Homo sapiens
  misc_feature (1)...(483): n = A,T,C or G
nattgacgcctgcggaatcgaattgagcgcctgaggaattcgcacgagaagaaacgtgctgggatggcaagatgcccattctacagagtttgaccctacgaccagtcattccgtggtacgtacacatgccagaacacaacccagggcagatgggcggaaccatgaggctgggcaagaggagaaccctgttccagaccaagaactcagtcatgaggaaactctatggagacgcagactacttggaagagaggcaccgccaccgatttgaggtgaatccagtctggaaaaagtgtttggaagaacaaggcttgaagtttgttggccaagatgttgaaggagagagaatggaaattgtggagttagaagatcatcccttttttgttggggttcagtaccaccctgagttcctgtccaggcctatcaagccctccccaccatactttggcctcctcctggcctctgtggggcggctctcacattacg

SEQ ID NO: 19748 - DNA, 496 bp, Homo sapiens
cccccccccatttgccccggctgcaggaattcggcacgagataagatcagcatcaccactccaccctgagcattacttctctaatctcatttcctatcagtcattctccaatatgtcctaaccttcccgacctcttttcttgtccctagaagatgccagccatgctcccaagttagggcctctgcactggctgtgccctctgccttgtacatgtttcccccagatatctgcattgccaactctctcacctcctttggtcaaaagttacctcattgaagcctatcttgaccttttaaaaatcacagcccattcttaactctcacagtacacccaaagcccctttaccccgctttctgttttactatagcacttctgacatactatatgatttacttatgtgttgtgtttattgtttattgcctattaccccccgctagaatgtaagctccatgagggcaaggatttatctgtagtggttaccagtgtatcccaagtg

SEQ ID NO: 19749 - DNA, 486 bp, Homo sapiens
  misc_feature (1)...(486): n = A,T,C or G
aggagtgcccnaggagggcngtatgaagccttacgatcgcctgcggccagtggtggttctcgacgggctacccgtgggccccgcctgccccacggcacaagcacccatggcaaagatggatgctcccggcataactgaagggccctgcctggaactggctctctcacctcccaagactgaatggggtctagcagggcatgggaggtggaggctgggcagatggagatgaccaggaagtaagctcaggatctcagcaggccagggctcctgagacccaggaactggggtctctgcccaaccctcccatgctttcagtgccactggggaaaagaggtgaggccaggggacatggccaggacggctgggctccctggcttcccagccctggacagaatgctgttgccaaaacctgcacagccctgaggccagcctcggccttggtaacgggggaaagtagctgacagtgagacggggctcctggcccac

SEQ ID NO: 19750 - DNA, 488 bp, Homo sapiens
  misc_feature (1)...(488): n = A,T,C or G
aggatgtgccnaggttgnnnnaactgatcgccnatggaattccntcgaggcgcgaggtgctgcggcgctgcgtacaagtatcaatcagccggttgcttttgtgagaagaattccttggactgcggcgtcgagtcagctgaaagaacactttgcacagttcggccatgtcagaaggtgcattttaccttttgacaaggagactggctttcacagaggtttgggttgggttcagttttcttcagaagaaggacttcggaatgcactacaacaggaaaatcatattatagatggagtaaaggtccaggttcacactagaaggccaaaacttccgcaaacatctgatgatgaaaagaaagatttttgagactgcagcctattaataaagttaacataactgagaaaaaaaaaaccacacaaaacctaaaaaaaaaaataaaaattaatctcggggggggggcccggcccccattcccccttttagggggcgc

SEQ ID NO: 19751 - DNA, 500 bp, Homo sapiens
  misc_feature (1)...(500): n = A,T,C or G
gggatgtccccnaagggagggccnngtactgannncccctatcgtacagccttgcangcgcgaacagacagtttacaaaattattttctgcaaaaaagaaaaaaaagttacgttaaaaaccaaaaaactacatattttattatagaaaaagtattttttctccaccagacaaatggaaaaaaagaggaaagattaactatttgcaccgaaatgtcttgttttgttgcgacataggaaaataaccaagcacaaagttatattccatcctttttactgatttttttttcttctatctgttccatctgctgtattcatttctccaatctcatgtccattttggtgtgggagtcggggtagggggtactcttgtcaaaaggcacattggtgcatgtgtgtttgctagctcacttgtccatgaaaatattttatgatattaaagaaaatcttttgaaatggcaaaaaaaaaaaaaaaaaaaactcgaggggggcccggcccccat

SEQ ID NO: 19752 - DNA, 490 bp, Homo sapiens
  misc_feature (1)...(490): n = A,T,C or G
cgaggtcnccattgaccgctgcagtagaccgcctgcggaagaccgacgagaagaaatgcaagtacaagaatgtgaacctgagaaggtggaaatcatagagaggtgtgaatttagtgaaaagatgttgtctgcatgcaacttactgaaaaatactataaatgaccccaaagctttgaccagcaaagatatgaggttctgtctgaacaccctccaacacgagtggttccgcgtgtccagtcagaagtcagccattccagccatggtgggggactacatagctgcttttgaggccatttccccagatgtcctccgctatgtcatcaacttggcagacggcaacggcaacacagccctccattacagcgtgtcccactccaacttcgagattgtgaagctgctgttagatgccgatgtgtgtaatgtggatcaccagaacaaggcaggctacacccccatcatgttggcggccctcgccgctgtggaagcagag

SEQ ID NO: 19753 - DNA, 489 bp, Homo sapiens
  misc_feature (1)...(489): n = A,T,C or G
attagcccccgctgcaggaattcggcacgagagatctcaggaaacaggctcgacagctggaaaatgaacttgacctgaaactagtttccttcagcaaactatgtacaagttacagtcatagcagtacccgagatggaagacgcgacagttctgatacaacaccccttttaaatggatcaagccaagacagaatgtttgagacaatggcgattgagattgaacaacttttggcaaggcttacaggggtaaatgataaaatggcagaatataccaacagtgcaggtgtcccctccttgaatgcagccctgatgcatacattacagcggcatagagacatattgcaggattatacacatgaattccataaaaccaaagcaaactttatggcaatacgggaaagggagaatcttatgggatcagtacgaaaagatattgagtcatataaaagtgggtctggagtaaacaacagaagaactgagctatttttgn

SEQ ID NO: 19754 - DNA, 491 bp, Homo sapiens
cgaggtgccccaattgacgcccttcgttagatccgcctgcaggaattccgcacgagcctagactgagatttagggaaaggcaagagtggcctctccccatgctgcaggccctggagccacctcctgtcatcgcctgtcaacccagaggtgcagtgctcctggggtgctggcagccctgggtgaaccgggctcagtctctgcctcagccagcgccccatcaggagaagcccaagcccagcttggagaaagggtctattgtcctcagctgcgccccgccctgagcaccttgagtgcctcttcggagtgtgtggtttgcagttcactgtgcgatgaatggcagcaggcatagaggagtggccgtgagccacttgtgtgggagaaaggggcagcgtacgaagtgaagggccaaagtgaagcctttcctgtccctgccctccaggagccacagggacttcagcacaacttcaggtctgtcccaaagccggctccag

SEQ ID NO: 19755 - DNA, 486 bp, Homo sapiens
  misc_feature (1)...(486): n = A,T,C or G
ctcgcccgccctcgcgaatagacccgcatgcaggaattccgcacgagcggagctggtcgacataatctctgtattatatactttgcagttgcagacgtctgtgcctagcaatatttccagttgaccaaatattctaatcttttttcatttatatgcaaaagaaatagttttaagtaactttttatagcaagatgatacaatggtatgagtgtaatctaaacttccttgtggtattaccttgtatgctgttacttttattttattccttgtaattaagtcacaggcaggacccagtttccagagagcaggcggggccgcccagtgggtcaggcacagggagccccggtcctatcttagagcccctgagcttcagggaaggggcgggcgtgtcgccgcctctggcatcgcctccggttgccttacaccacgccttcacctgcagtcgcctagaaaacttgctctcaaacttcaggggtttttcttccn

SEQ ID NO: 19756 - DNA, 401 bp, Homo sapiens
gtgagaccgctgaggccgggcagcgcctatccacctccccacccactttttctcagatcacaggcctgggatcttggtacagtccaaatggtggggaaagagcatggagaataacaaatacagaacacttcttgttgacttcttcagtgcttgtcacggattggattccctgggaagcagatgctgtgttggagatgtgcacatcacaatgttattgcaggagcatgttcttgggaatacaaatgtgggggagtgaagagaagcaagcaggatgaagcagaaggaaaagaggagctgcaatccagtgcccaaagagctgtagaactgagatcactctgaagaactgtcccaaactggaagaagaggggcaagtaattataataccctattgataatcattg

SEQ ID NO: 19757 - DNA, 494 bp, Homo sapiens
  misc_feature (1)...(494): n = A,T,C or G
cttggcccgcctgcangatttcggcacgagatgttcttcaccaccttcatgcaaacgtaaagttggtggtacatcagggaggaaaaacagtaacatgtccgatgaattcattagtctttcaccaggtacaccaccttctacattaagtagttcaagttacaggcgagtgatgtctagtccctcagcaatgaagctgttgcccaatatggctgtgaaaagaaatcatagaggagagactttgctccatattgcttctattaagggcgacataccttctgttgaataccttttacaaaatggaagtgatccaaatgttaaagaccatgctggatggacaccattgcatgaagcttgcaatcatgggcacctgaaggtagtggaattattgctccagcataaggcattggtgaacaccaccgggtatcanaatgactcaccacttcacgatgcagccaagaatgggcacgtggatatagtcaagctggtactttcct

SEQ ID NO: 19758 - DNA, 483 bp, Homo sapiens
  misc_feature (1)...(483): n = A,T,C or G
gggggcgggnnnnnaattgaattgcgcggctgtangaattcggcacgagggaagatgctgccagaaccagttcccccaccaaagctgtggaaaaccaagaagccctgaagaccggtgcactggtcagccagcttgcgaattcggtccaacacaaggtcaatgatctccttgccaatggtgtagtgccctcgggcatagttattggcagcatcttccttgcctgtgatgagctgctcagggtggaagagctggcggtaggtgccagtgcgaacttcatcaatgactgtgggttccaagtctacaaacacagcccggggcacgtgcttgccagcgcccgtctcactgaagaaggtgttgaaggagtcatctcctcccccaatggtcttggntnttttttttttttttttcttctcccccttctccctttnctttcttctttcttctgggccctaatccttcttcttttcttcttcaatcttcttt

SEQ ID NO: 19759 - DNA, 481 bp, Homo sapiens
  misc_feature (1)...(481): n = A,T,C or G
aatgatcgccctcggaannnattgagccgccctgcaggaattcggcacgagagccaattggtgggttcctggtctcactgacttcaagaatgaagccacggaccctcgcaatgctgatacgaacttcccttagaatcaacccatttgtgaaacaccacattactaagagcagaatctttggagattggagagtccaccaaggatgcccactggctccctacaaagctttttatgtgaggactcgctctcacgtcaatgatgcttacaattaaatcatgaagcattattcttgctgaaaaagaggctcacaagtggaacagatgtgccttgactcaaatgagactttggacttggacttttgagttaattctggaatgagttaaaactttaggggactgttgggaaggcattattgtgttttaaatgtgaaaagaacatgagggatgggaggggtcaggggtggaatgatatgattaggctt

SEQ ID NO: 19760 - DNA, 325 bp, Homo sapiens
gagaaaaagattgatcgcctttggaattccgcacgagcagggcgaagccagaggaaactctggtggaggtccgtagcggtcctgacgtgcaaatcggtcgtccgacctgggtataggggcgaaagactaatcgaaccatctagtagctggttccctccgaagtttccctcaggatagctggcgctctcgcagacccgacgcacccccgccgcgtgtggccaagtccaaccgctgattttcccagctgctgcccaataaacctgtctgccctttggggcagtcccagccaaaaaaaaaaaaaaaaaactcgggggggggccgggcc

SEQ ID NO: 19761 - DNA, 495 bp, Homo sapiens
  misc_feature (1)...(495): n = A,T,C or G
tgcnnnnnnnnagaggggnattgattccttcggcttccggcacgaggtactattagccatggtcaaccccaccgtgttcttcgacattgccgtcgacggcgagcccttgggccgcgtctcctttgagctgtttgcagacaaggtcccaaagacagcagaaaattttcgtgctctgagcactggagagaaaggattcggttataagggttcctgctttcacagaattattccagggtttatgtgtcagggtggtgacttcacacgccataatggcactggtggcaagtccatctatggggagaaatttgaagatgagaacttcatcctaaagcatacgggtcctggcatcttgtccatggcaaatgctggacccaacacaaatggttcccagtttttcatctgcactgccaagactgagtggttggatggcaagcatgtggtgtttggcaaagtgaaagaaggcatgaatattgtggaggccatggagcgctntgg

SEQ ID NO: 19762 - DNA, 329 bp, Homo sapiens
  misc_feature (1)...(329): n = A,T,C or G
aggagtncccnnaggagggccngattgatnnccntactgatcgccntgcatgaattcggcacgagaaggcctgtagcctggcaaaaacggcatttgatgaagcaattgctgaattggatacgctgaatgaagagtcttataaagacagcactctgatcatgcagttacttagggacaatctcactctgtggacatcggaaaaccagggagacgaaggagacgctggggagggagagaactaatgtttctcgtgctttgtgatctgttcagtgtcactctgtaccctcaacatatatcccttgtgcgataaaaaaaaaaaaaaaaaaaaa

SEQ ID NO: 19763 - DNA, 532 bp, Homo sapiens
  misc_feature (1)...(532): n = A,T,C or G
aggagatcgacgnccgtnaattcancggctgcangaattcggcacgagcctgcgccgtgtgaaccaggccatctggctgctgtgcacaggcgctcgtgaggctgccttccggaacattaagaccattgctgagtgcctggcagatgagctcatcaatgctgccaagggctcctcgaactcctatgccattaagaagaaggacgagctggagcgtgtggccaagtccaaccgctgattttcccagctgctgcccaataaacctgtctgccctttggggcagtcccagcnnaaaaaaaaaaaaaaaaaaaaaaaaaaaaaaaccccggggggggggccgggcccccaattcccccttagggggggggaaaaaaaattccgggggcggggtttaaaaacggggggggtggggaaaagnnnnnnnnnnttngnntntnnnttttttttttttntnttttnnttttgtttttttttttttntgttttttttntttttttttnnttggttttttttttttttttttttttttggtggg

SEQ ID NO: 19764 - DNA, 491 bp, Homo sapiens
  misc_feature (1)...(491): n = A,T,C or G
agtgtnaaattgaactcgatgcgcctctggcaangaacnacgagaagagactacccgcccccggcagctttcctgagccctggaggacaggcttgaaatgacttttaggcttctggagacccttgtcacctaggtaatgcgtgacctatccaatccttcctctcatggaaacaccaactcatccatgccctctgtgctgaaacttcgtctcagcctgctggaatcacctgcaccccatgggaactgtagccatatcttcagtcctgtgagcccccgtcatggcctgtcacaggagtaaatgaggagtaaggcccagaatactcagtacctctcaatgaccctcatacgctgtaggaagaggattggttcaccttttaacccacaatttctcacattgaatggacaggatgcattccaagaggccagagaatgcgcatctcagctcctgatgagttgcaccaccaccattactttctctatgtcaagatacg

SEQ ID NO: 19765 - DNA, 489 bp, Homo sapiens
  misc_feature (1)...(489): n = A,T,C or G
ggggnnnnaaaggggnannnattgttattgatcgctctgccgaattcggcacgagcgccgccacaatggtgcgcatgaatgtcctggcagatgctctcaagagtatcaacaatgccgaaaagagaggcaaacgccaggtgcttattatgccgtgctccaaagtcatcgtccggtttctcactgtgatgatgaagcatggttacattggcgaatttgaaatcattgatgaccacagagctgggaaaattgttgtgaacctcacaggcaggctaaacaagtgtggggtgatcagccccagatttgacgtgcaactcaaagacctggaaaaatggcagaataatctgcttccatcccgccagtttgggttcattgtactgacaacctcagctggcatcatggaccatgaagaagcaagacgaaaacacacaggagggaaaatcctgggattctttttctagggatgtaatacatatatttacaaataaaatg

SEQ ID NO: 19766 - DNA, 497 bp, Homo sapiens
cttggcccgcttttcccccgcgctgcaggaattcggcacgagctctctccatctgtcgcatatctcaccgcacctgacctggccaggtgtccagcccagagggcagccgacttcctctgcccggagctctacaccacggcctgggcacatgtggcagtaaggctcataaaggactcagtgcagcatttacagaccctgacgcaatccggagctgaccagcacgaggcttggaaccagaccactgtcatacacctccaggctgctaaggtgcactgctactatgtcactgtgaagggttttacagaagctctggagaaactagaaaatgaaccagcgattcagcaggtgctcaagcgcctctgtgacctccatgccatacatggaatcttgactaactcgggtgactttctccatgacgccttcctgtctggtgcccaagtggacatggcaagaacagcctacctggacctgctccgcctgatccggaaggattgcat

SEQ ID NO: 19767 - DNA, 488 bp, Homo sapiens
aagaaaaaattagatagccgtagtatgcgtacgagagaggctctcatattttagttctgttgaaactctcccattctttctgaaacttggattttttttgtgaaaacttgagtcttaaaaacacatccatagttcaccctgaagatggaagacctcacttgactgatggagcgagagccccgctaacctgcactctggtctctaaggtgcagtcatcgagaagtcctgagcggccgtgcaggtttcccgatctggaaaagagaaatgttgctgaggacaggatgaggtagataaggggctgccctttgttttggaccagttgcatttgcactgaggttagaactggcagctatgttgatttttatatcaaaatccaagatcgtgcttccataactaaaagctttataaacaacttaaaaattggcagtgttggtaggaagaaataaaggcacaatccacaattgagaggtgatttgtgtcctttatgg

SEQ ID NO: 19768 - DNA, 479 bp, Homo sapiens
  misc_feature (1)...(479): n = A,T,C or G
tggggnnnaaggggnnaattgccggcttggcatttcggccaggcgttagctgcttcagatgaagctgaacatctccttcccagccactggctgccagaaactcattgaagtggacgatgaacgcaaacttcgtactttctatgagaagcgcatggccacagaagttgctgctgacgctctgggtgaagaatggaagggttatgtggtccgaatcaatggtgggaacgacaaacaaggtttccccatgaagcacggtgtcttgacccatggccgtgtccgcctgctactgagtaaggggcattcctgttacagaccaaggagaactggagaaagaaagagaaaatcagttcgtggttgcattgtggatgcaaatctgagcgttctcaacttggttattgtaaaaaaaggagagaaggatattcctggactgactgatactacagtgcctcgcccgctgggccccacaagagctagcagaa

SEQ ID NO: 19769 - DNA, 483 bp, Homo sapiens
ctttgagcgcctgcaggaattgaccaccactccggaggggcttccaggtatataagcaagtgtgcgcctcctgccacagcatggacttcgtggtctaccgccacctggtgggcgtgtgctacacggaggatgaagctaaggagctggctgcggaggtggaggttcaagacggccccaatgaagatggggagatgttcatgcggccagggaagctgttcgactatttcccaaaaccataccccaacagtgaggctgctcgagctgccaacaacggagcattgccccctgacctcagctacatcgtgcgagctaggcatggtggagaggactacgtcttctccctgctcacgggctactgcgagccacccaccggggtgtcactgcgggaaggtctctacttcaacccctactttcctggccaggccattgccatggcccctcccatctacacagatgtcttaaagtttgacgatggcaccccac

SEQ ID NO: 19770 - DNA, 489 bp, Homo sapiens
  misc_feature (1)...(489): n = A,T,C or G
aatcgccccgcgctgcangaattcggcaccaggaactttcagtcctctaggcctcgcacgtgctgtcccatcaatacctgaaatgtcaccttcctttcaactcctttcccctcgttacctccaagcacctatagagaaggaaaaataatcttccttctaccagtttgagttctcagctgggactcctgtaacaacagacagaatgaagagaaaaacaagggtattaacatgtgcatttcatatatacatgggacatacccagggaatgagtaattctaaaggtgtggctgagaactccattttatacagcatcgtcaacaaagaacaatacgtttttggagaagtgacaacacaaaggaaaaggaccttaaaggctgggcgcggtggctcacgcctgtaatcccagtactttgcgaggccgaggtgggcggatcacctgaggtcaggagnatgagaccagcctgaccaacatgtggtgaaacctcgtct

SEQ ID NO: 19771 - DNA, 448 bp, Homo sapiens
  misc_feature (1)...(448): n = A,T,C or G
agattgaccgcctgangaannaatcgaccgcgctgcaggaattcggcacgaggttactctccttccccctacctgggccagtgaaatagaaagcctttctattttttggtgcgggagggaagacctctcacttagggcaagagccaggtatagtctcccttcccagaatttgtaactgagaagatcttttctttttcctttttttggtaacaagacttagaaggagggcccaggcactttctgtttgaacccctgtcatgatcacagtgtcagagacgcgtcctctttcttggggaagttgaggagtgcccttcagagccagtagcaggcaggggtgggtaggcaccctccttcctgtttttatctaataaaatgctaacctgccctgagtttccattactgtgggtggggttcccctgggccaaacagtgatttgtctccctcaatg

SEQ ID NO: 19772 - DNA, 452 bp, Homo sapiens
  misc_feature (1)...(452): n = A,T,C or G
agggaanccaattgacccccctnnatagacccgcctgcaggaattcggcacgaggttaagcccaagatcccaaagggtgtcagccgcaagctcgatcgacttgcctacattgcccaccccaagcttgggaagcgtgctcgtgcccgtattgccaaggggctcaagctgtgccggccaaaggccaaggccaaggccaaggccaaggatcaaaccaaggcccaggctgcagccccagcttcagttccagctcaagctcccaaacgtacccaggcccctacaaaggcttcagagtagatatctctgccaacatgaggacagaaggactggtgcgaccccccacccccgcccctgggctaccatctgcatggggctggggtcctcctgtgctatttgtacaaataaacctgaggcaggaaaaaaaaaaaaaaaaaaactcgagggggggccgggac

SEQ ID NO: 19773 - DNA, 492 bp, Homo sapiens
  misc_feature (1)...(492): n = A,T,C or G
cgaggtgcnnccaattgaccgccctgcacgtatatccgccgaggtgaggcacctctcagaaggagtcaacagacacctcatataggagagctctggctgacatctggagggtgcccctctgggatgaagcttccagaggaaggaaaaggcagcaatctttgccattctgcagcctctgctggtgatactcaggcaaacatggtctggagtggacctacagcagtctccagcagacctgcagcagaggggcctgactgttagaaggaaaactaacaaacagaaaggaataatatcaacatcaacaaaaacaaccacaccaaaaccccatccaaaggtcaccaacatcaaagaccaaaggtagacaaatctataaagatagagagaaacaagcgaaaaaaggctgaaaattgcaaaaactagaaggcctcttctcctccaaaggatcacaattccttttcagcaagggaacaaaactgaacagagaatgaattt

SEQ ID NO: 19774 - DNA, 533 bp, Homo sapiens
  misc_feature (1)...(533): n = A,T,C or G
aggagattcggcggctgctgaattcggcaccaggcgcagtgtccatcagtatcactgcctgcctgagttatgaaaattacattcctggttctgtattgaggagaaggatgtataaagcaacatgaaacattagccctccttttattttaaagactaatgttaattgttcttaaaactggattttttttccttaaagcaatatttttcttttcgatttaatgaagcattgctagctgaagccagtttgacatagagagatgtcagattgatttgaaaggtgtgcagcctgatttaagaccaaaccctgaacccttttaaagaacaataaaacatattttacaataagctctagttcttaacaaccgacactcctacaagatttagaaaaaagtttacgacataatctagtttacagaacaatcttgtgctggaacactctctaaaaggtattttgaatacccataaaactggtttttttgttgcagaaagaaaccacccaggtttagattttnntaaatctttggaaaactcag

SEQ ID NO: 19775 - DNA, 460 bp, Homo sapiens
  misc_feature (1)...(460): n = A,T,C or G
atcgacttctganccgcgctgcaggaattcggcacgaggtcaaggacaggcggacagggctggcctcccccagtccccaagccccactgtgccttgttgtctgctggggggccatagctggcactgcccaccgtaaaggccctcgcacattttcccccttcctgtacacctcggggccagcatcctcaccttcttcaactgaccagtcgtggttactccctgctgccagggccttccccttcccgggggtattctgtgaccatgaataaagttaccattctctttcaaaaaaaaaaaaaaaaaaatttggggggggggccgggaccccatttcccctaatggggggcggaataacaatcaacggcccggggtttaacaacgcggggagggggggaaaaaanngtnnnngnncnngctttttttggngggagagacaccatcgaggagcacaggcagggtg

SEQ ID NO: 19776 - DNA, 467 bp, Homo sapiens
  misc_feature (1)...(467): n = A,T,C or G
cgcccccattgacgtgtgcggacttcggcacgaggataaatcatcctgagctacacatggtactcagtaatctagctgcagttttgatgcacacaggatcatgagactagtagatggtatatcacagaaataaagcagatcgtcctttcctcagctgccaccacagtgcttggtccttccaaggaagctaaggccacgttgggatgaggccctcacttcatccggcaactaccaccatgtccggcagcgccagccccacacttgcccataccatgtcctctgtctccgagctcgcctgcatctactcagccctcactctgcatgacaatgaggtgaccatcacggaggataagatcaatgccctcgttaaagcagctggtgtaaatgttgaacctttttggtccagcttgtttgcaatggccctggccaatgtcaacattgggagcctcatctacaatgtaggggcn

SEQ ID NO: 19777 - DNA, 474 bp, Homo sapiens
  misc_feature (1)...(474): n = A,T,C or G
gtggcngnnnnnaattgaaactgatgcgcgctgcaggctgntcccggcgaggggtggctttgatttcggcgatgagctcccagaaaggcaacgtggctcgttccagacctcagaagcaccagaatacgtttagcttcaaaaatgacaagttcgataaaagtgtgcagaccaagaaaattaatgcaaaacttcatgatggagtatgtcagcgctgtaaagaagttcttgagtggcgtgtaaaatacagcaaatacaaaccattatcaaaacctaaaaagtgtgttaaatgtttacaaaagacagtgaaggattcttatcacataatgtgcaggccatgtgcctgtgaacttgaagtttgcgcaaaatgtggaaagaaagaagacattgttattccgttgaataaagaaacagaaaaaatagaacatactgaaaataatctaagttccaaccatagaagaagctgcagaagaaatg

SEQ ID NO: 19778 - DNA, 485 bp, Homo sapiens
  misc_feature (1)...(485): n = A,T,C or G
agggaccgngnattgacnngcattgaccagcgctgcaggaattcggcacgagccgccgtctcagacgagctgcgccagtggtaccagcgttccaccgcctcgcacaaggagcacagccgcctgtcgcacaccagctccacctcctcggacagcggctcgcagtacagcacctcctcccagagcaccttcgtggcgcacagcagggtcaccaggatgccccagatgtgcaaggccacgtcagctgccttacctcaaagccagagaagctcgacaccgtcaagtgaaattggagccacccccccaagcagcccccaccacatcctaacctggcagactgggagctacaatgatagctgtttcctggattcctccctctatccagaactagctgatgtccagtggtacgggcaggaaaaagccaagcccgggaccctcgtgtgagccagcccggcctaatctgaccgcctcaacgccattctgagatc

SEQ ID NO: 19779 - DNA, 392 bp, Homo sapiens
  misc_feature (1)...(392): n = A,T,C or G
aggagatcgannncnnngattcatcggctgcatgaattcggcacgaggcattgctggtggtcagggcaggaggccttggcgtgactggaggccggacagacaagcgccagcgtgctccaacacatagggccaccaggggcctcagccccaggaggtcccttctctgtgccctcaccagcctctcaacacctcggggacccctgctgctcctgcccccacctgtcactgtgcttagggctgcaacatccctggagcagcttccaacactacttcagggtggcagtgtttggggcactgggcgagcctgccggcctctagatggcctcatctcttccttccacaaactgtctagaaccaataaaaggaaacctgccaaaaaaaaaaaaaaaaaa

SEQ ID NO: 19780 - DNA, 515 bp, Homo sapiens
  misc_feature (1)...(515): n = A,T,C or G
agtnnnnnnnnnnaaggagnncccnnnaggggggggnnngtactgaccgcctgtctgaattgcgctcgagctaccaagtacgatgtcttcagacaactttctctggaagggtctggactaggtgttgaagacctgaaagataacactccttcaggaaaaagtgatgatgattttgctgacttccactccagtaaattttcttccataaactcggacaaatccctgggagagaaagcagtggctttcagacacaccaaagaagactctgcatcagtgaagtccttagatctcccttccattggtggcagcagtgttggcaaggaggactctgaagatgcactctctgttcagtttgacatgaaattggctgatgtgggaggagatcttaagcatgtcatgtctgatagctctttggatttaccaacagttagtggccagcatcctcctgctgcagatatagaggacttaaaatatgctgcttttggaagctacagtagcaattttgcagtgagcac

SEQ ID NO: 19781 - DNA, 513 bp, Homo sapiens
  misc_feature (1)...(513): n = A,T,C or G
aggggnnnnnnnaaggagggcccnnaggggnnccnctctgatnccccttcatgaccgcctgcaggaattcggcacgaggagatggggagaggagtctgaactaaacccctggcttttgtgcacactgcatacgtttcagaactcctggatggtaaccatctctggagtgcagcgcttgctgcagtggaaatgatcaggaatactgaccgtgtttctcttgcctccgaggttcttgggcacactctatagccatactggacaggaaccaggtgccccgtgtaggcatcgtcggtcggtttgccgtcagagatggcgcatctcgctgcatcccccgagagtacaccggttgctctagccacctgcggcccgcccatctgcgctagctggccttcacgctcttgatcgtctttcctttgtattggagaaggactgggtcagagatctgttggagagagagaataaagagattatttttcattatttttaaaaaaaaaaaaaaaaaaactcgagggg

SEQ ID NO: 19782 - DNA, 460 bp, Homo sapiens
  misc_feature (1)...(460): n = A,T,C or G
gcncgcgccattgacccccctnaattgaccnccgctgcaggaattcggcacgagctcatatctccttgatgtgcatgagggagcactgggtctaatttttgggggctgagaaggtaagaaggtgaggtcagtttttcccaggagtcctaaaaaattctggtaccttacattgagggtgtgggagaaagggtgtcatagttctgaaaataggcagtagcatgaagcaccagacctgtctcattccttattagatgtctatctcaaatgacagagtttgaaaaatattggttttatcatttgatatttccatgcctgactcgggaaaataacattttctgacttttttctattttcttgccctgcacagaccctacctggtacaattttctatttcttagctcaaagtgtctatacaatgggttgcctggtatgtcagctgccctcactcttgtgtaataga

SEQ ID NO: 19783 - DNA, 487 bp, Homo sapiens
  misc_feature (1)...(487): n = A,T,C or G
atgggggccttgacttctgtangacttcggcacgagagaataagaaggagtatgtacacctggtatgccagatgagaatgacaggagccatccgcaagcagttggcggctttcttagaaggcttctatgagatcattccaaagcgcctcatttccatcttcactgagcaggagttagagctgcttatatcaggactgcccaccattgacatcgatgatctgaaatccaacactgaataccacaagtaccagtccaactctattcagatccagtggttctggagagcattgcgttctttcgatcaagctgaccgtgccaagttcctccagtttgtcacgggtacttccaaggtacccctgcaaggctttgctgccctcgaaggcatgaatggcattcagaagtttcagatccatcgagatgacaggtgcacagatcgcctgccttcagctcacacatgttttaatcagctggatctgcctgcctatgn

SEQ ID NO: 19784 - DNA, 489 bp, Homo sapiens
  misc_feature (1)...(489): n = A,T,C or G
tggggnnnnnaaggggnnnntttgatatgcccggctgcaggaattcggcacgaggacgaccgcgtccacctcgcaggtgcgccagaactaccaccaggactcagaggccgccatcaaccgccagatcaacctggagctctacgcctcctacgtttacctgtccatgtcttactactttgaccgcgatgatgtggctttgaagaactttgccaaatactttcttcaccaatctcatgaggagagggaacatgctgagaaactgatgaagctgcagaaccaacgaggtggccgaatcttccttcaggatatcaagaaaccagactgtgatgactgggagagcgggctgaatgcaatggagtgtgcattacatttggaaaaaaatgtgaatcagtcactactggaactgcacaaactggccactgacaaaaatgacccccatttgtgtgacttcattgagacacattacctgaatgagcaggtgaaagccat

SEQ ID NO: 19785 - DNA, 477 bp, Homo sapiens
  misc_feature (1)...(477): n = A,T,C or G
tgggggaagggggnnaattgattgcttgtgcattggacgaggcggtttgaagaccacgaaggactgcccacagtggtgaaactggtagacagaaacaccttattattagagagagaagaaaagagacgggttgaagaggagaagaggaagaagaaagaggaggcggcccggaggaaacaggaacaagaagcagcacagctggcctagatgaagattccccccagtgagatgttcttgtctgaaaccgacaaatactccaagtttgatgaaaatggtctgcccacacatgacatggagggcaaagagctcagcaaagggcaagccaagaagctgaagaagctcttctaggctcaggagaagctctacaaggaatatctgcagatggcccagaatggaagcttccagtgagggggcacaggactgactttttaaaccattggggactatgggctgctgtctgcctcagtgacaatgtcc

SEQ ID NO: 19786 - DNA, 477 bp, Homo sapiens
  misc_feature (1)...(477): n = A,T,C or G
cgccccattggcccgcgctggcagnnatttcccccggctgcaggaattcggcacgagggttgctgccgaaatgggcaagttcatgaaacctgggaaggtggtgcttgtcctggctggacgctactccggacgcggagctgtcatcgtgaagaacattgatgatggcacctcagatcgcccctacagccatgctctggtggctggaagtgaccgctacccccgcaaagtgacagctgccatgggcaagaagaagatcgccaagagatcaaagataaaatcttttgtgaaagagtataactacaatcacctaatgcccacaaggtactctgtggatatccccttggacaaaactgtcgtcaataatgatgtcttcagagatcctgctcttaaacgcaaggcccgacgggaggccaaggtcaacgttgaagagagatacacacaggcnagaacaagtggatcttccagaaactgcggctt

SEQ ID NO: 19787 - DNA, 474 bp, Homo sapiens
  misc_feature (1)...(474): n = A,T,C or G
gtgggctnnnnnnnaattgacatcgctgcaggaattcggcacgaggtggcgccgccaggcctgtcctcttaggactcaaacccagaccctggactgattttccagtccccaccgttctgcgggacagccagcgtatgctaatgttgcaaacccatgataatgtatgtggaatatcctgccattggggttttacattaaaaccccacaatggctgcagaggggtgaacaggccccaatatttggggtgctgtgatacccctcttctacccacaaggagccctcttgatgatttactgtgaaatcgaggccccttgattgtttctgtgaaacaccctgcacccctagtcctttccccactgagatctttcgggatctctcccctaactcagctcttcgttcccagaaacccagatgtaatccccctacgtggtgcttggggcatcccgataccatctcagtagatctcctacaatg

SEQ ID NO: 19788 - DNA, 497 bp, Homo sapiens
  misc_feature (1)...(497): n = A,T,C or G
aggcggcnnattgacaactgagcgcctgcggaattccgccgaggcctgcagaagtgctgtcttaccttgagcacgtaagatcagggagagaggctcgctggctcccacggagaggatcggggaagggctgtgatccgctgctggcaaggcttatttgacaaggaagttcctgcgctgcctgtcctctgagcatccagaggccccttttgagacttcggcagcattaaagtaaatccagcaacggggaggattcgcgtggacttgcttgtggagacaggaacctcagaaccagcctgggtcttccagcatctgcttatgtaacgtaggatttcagagctctctgccctctggttattttcggtatttaaaacactctcattcctaacaatcggaaaacgtcttggtgccacagttctttctcagtgtgtcttanacattaagagaggattcaaccaacaagtggctaaaggatcagtctgaaattactaagaaatgca

SEQ ID NO: 19789 - DNA, 409 bp, Homo sapiens
ttcctgtccgagctgcagtattacctcaccacggaggtgcatcctgagctctacgtggacaagtcgcggggagataaactgaagatcaacatcgatgtactttttccgcacatgccttgtgcctatctgagtattgatgccatggatgtggccggagaacagcagctggatgtggaacacaacctgttcaagcaacgactagataaagatggcatccccgtgagctcagaggctgagcggcatgttttatcattcgttgtttcagcagattaatgcaggacaccagtggaaccaacataatttgctataggactggatgtggagtggaggagagcaaagtcatggttgttgattccaacgctttcagcctgagcaaatgaatgacttgagatggagatgactggaggag

SEQ ID NO: 19790 - DNA, 479 bp, Homo sapiens
  misc_feature (1)...(479): n = A,T,C or G
tggggaatnnaattgacccgccttgaagaactctgcacgagactgcgcctcccctctgagcgctggcggccgggcaggcgctctgtaacttgccgtacacacctttctcattgaatattcctgaccgcccttaagctggtcatattatcctccccatcttacacggggaaaactgagctacagaactgaaatgactggcccaaggtcactcgggtgattccagcatgttcctctgaggtcacctttatttagttcttaccagtggtgaaatgctttgtgttaaacgtgcagcagatagtgatgatagttgcatggccttggatatgctaagaactactgaagtgtatgctttaaagaagacaagaggactgagacctttttttttcttctatatgtcttatatgtgggctctctgtttactctcttaatttttaaagagtttgtagtgttttatcttatctacacatgggggactgaag

SEQ ID NO: 19791 - DNA, 531 bp, Homo sapiens
  misc_feature (1)...(531): n = A,T,C or G
ggcgttcgcggctgagattcgccgagctggagcagcctttggtgatggctttttcttcccttttcctcccgcgggcctgttttcaggtgttcctagcatttctgcctccaggcaggacggcaggggtgagcagctttgggagagacacctggcctttttctcctggagcctctccctcccggccctgggaagtgggcgcagccctgtgttcccccagcttggcagatgggctgcatgcggcgctcccttccttcccacgctcagcggccccggccagaccctggcagacttcacacctcattgctttaccccctggggcctggggaaatgtctgtactttgggaagtcacagaaatacatttttgtgcaaaatggggnaaaaaaananaaaaaaaaaaaaaaaaaaaaaaaaaaaaaannnttcctgggggggggcccgggcccccattccccccttggggggggtaaataaaatcccggggcgggggtttaaacaagggggggggggggaggagaaagggnangtnnntg

SEQ ID NO: 19792 - DNA, 475 bp, Homo sapiens
  misc_feature (1)...(475): n = A,T,C or G
aattgcccgcctgctgaattcgccacgagcaggaaagcaatggtacctggaggtgcaaggtgtgcgccaaggaaatagagttgaagaaagcaactggggactggttttatgaccagaaagtgaatcgctttgcttaccgcacaggtagtgagataatcaggatgtccctgcgccacaaacctgcagtgagtaaaagagagacagtgggacagtccctccttcatcagacacagatgggtgacatctggccaggaagaaagatcattcaggagcggcagaaggagcccagtgtgctatttgaagtgccaaagctgaaaagtggaaagagtgcattggaagctgagagtgagagtctggatagcttcacagctgactcggatagcacctccaggagagactctctggataaatctggcctctttccagaatggaagaagatgtctgctcccaaatctcaagtagaaaaggaaactcn

SEQ ID NO: 19793 - DNA, 481 bp, Homo sapiens
  misc_feature (1)...(481): n = A,T,C or G
aatanganagccctgtttgatccgccctgcaggaattcggcacgagctggcataaagtaaccacaaatggcagtcctctggaaaatactgagactgagaacattactttctgggaacgaattcctacttcacctgctggtagattttttcaagagaatgcctttggtaatccattagagactacagcagtgttacctgtgcaaatacaacttactacttctgttaccttgaacttggaaaaaaacagtgctctaccgaatgatgctgcttcaatgtcagggaaaacatctctaatttgtacacaagaagttgagaagttgaatgaggcttttgacattttgctagcttttttcatcttagcttgtgttttaatcatttttttgatctacaaagttgttcagtttaaacaaaaactaaaggcatcagaaaactcaagggaaaatagacttgaatactacagcttttatcagtcagcaaggtg

SEQ ID NO: 19794 - DNA, 473 bp, Homo sapiens
  misc_feature (1)...(473): n = A,T,C or G
cgccccccattgaccatctgtcncgcgctgcaggaattcggcacgagccctatgtaggactctaagctaaacggagctttgaggctttgtgatgcattcctatgtgaacacatccctggcgaaaggcttttaaaagatacaccccacaaggaagagcctttagagttgaaaggatgtcagatgtcatcagacacactttcccatttaacagatgaggaactaagtcctgatatcccatgatgttttttgttttactttggttttggctatatcctttttctaaaaatagccctctctggggaatgctgagatcttcattctttattagtatcaatttataattatctacatctgtaagcagttattcgaaagtctccagatcttattctatactggcacccatggggactaaaaaaatcaaagacgtcaaatctttgaatgcagccttgacaccacatactgcagtcgacttn

SEQ ID NO: 19795 - DNA, 479 bp, Homo sapiens
  misc_feature (1)...(479): n = A,T,C or G
tgggggncnnnnnnccaattgaccatcgccgccgcgctgcaggaattcggcacgagccaccaggtagccagaggggccctggcgcaaacatttaatcctgggctgtgcggggccgaggctgcttgcttttccttccgggctctacagtggcatcaatgtggaggggtcattccgggcactgcgcgcggcttcgaatcccgactgggattgttggcctgcagacatcccacgcataagagcctaggccagaccgcccgctccgttgaagtcttgtgattggacaagacacagtgtggagaaagacccctaagcctaacagagatgaaggtaggctgggtccagacacggcacctacggagagccacggaccgaagccagagagcctttcctctgcaagtgggactgaaactcttgacagatgctgctcaatctgactggtatagcaggacagttaattccagggacgatatggatgaaaa

SEQ ID NO: 19796 - DNA, 474 bp, Homo sapiens
  misc_feature (1)...(474): n = A,T,C or G
atttgacncgcctgcttgaattcgccacgagaactaagctgtcctcagattttaacttgactcaaacatttttcaattatgacagcctgttaatatgacttgtactattttggtattatactaatacataagagttgtacatattgttacattctttaaatttgagaaaaactaatgttacatacattttatgaagggggtacttttgaggttcacttattttactattatagaccctcttttatagattatcagggattatatatataaatatataaatatacataaaaatgttatggaattaatttattagaaacacttaagaagtacatatttttgtgcagtagatttttgaatcgatactttttttgaaaaccagtttccttgcttttttaagttctttctatatttttctttggaaatgcaaacattacaaaccaatgccatttttcaaatgcactgccatttaagatg

SEQ ID NO: 19797 - DNA, 507 bp, Homo sapiens
  misc_feature (1)...(507): n = A,T,C or G
agagaaaaaaaaannagnaaaatttggaccggctgtangaatttttcgaccgcctgcggtactgtcttagtttgctgaggataatggcctctagctccatccgtgttcctgcaaaagacatgatctcgctgttttttatggttgcacatcttttgttctaacgtttggtctttgaccctggttcctgacacagagctcctaaatcccttggaattttctgggtgataggagtgtcctttgttctcatgaggtgactcttggtgggctccttatttggagactggtcatcaaaaaacctcactatgggtggaagcgttgtgctgtcagccccattccccatcctctggggtaggaaatggagctggagctcaatcatacctacgtgataaagcctccagaaaactccttgaaagacaggacttggagagcttccgggttggcgaacacatccatgttccaggagagtggtgcaccccaactccacaaggacccttccagacctcaccc

SEQ ID NO: 19798 - DNA, 476 bp, Homo sapiens
  misc_feature (1)...(476): n = A,T,C or G
tggcggnnannnnnnaaattgccctcgctgcaggaattcggcacgagagccactcactctgctctgggcctacttctgcttcctcctggccgctctgggtgtgacagctggtgcccatcgcttgtggagccacaggtcctaccgggccaagctgcctctgaggatatttctggctgtcgccaactccatggctttccagttaacccttgaacagaatgggtttgaactgcgcagcttcacttaaatgcatggattttcttctgcctccaccacctctgagacagcaagatcagcccctcctcctctcagcctactcaatgcaaagaagacaaggatgaagacctttatgatgatccacttccacttaatgaatagtaaatatattttctcttcttaaaaaaaaaaaaaaaaaaaaaaactcgggggggggcccggaccccaattccccctatagggaggggaataacaattcacgg

SEQ ID NO: 19799 - DNA, 406 bp, Homo sapiens
  misc_feature (1)...(406): n = A,T,C or G
gagtctatctgtgaggtggagggcctgttagcaagactccatatcactttgctgagaggnttttttccttttttccttttcacccagtaaattcctctctaatcacccttcaacatgtctgtgcacccaatccttcctggtcatgtgacaagaacttgtttttttctacatttttggtggcctgtatggggacatgggaaaagtgtagggcatgagttcctggctgccccataaggaaggaaactgccagaagccctttagaatgaagaaaagtgagaagattcttggaaagtggactgagcttttaactctgcaagggaccctcagccctcttggcatactgaagtgaacactctgcagctaagcaccactgaatccagcaggacttgagacttcatcatctgcc

SEQ ID NO: 19800 - DNA, 409 bp, Homo sapiens
aattccgcacgagcttgtttgtcccttctacaggcatgaggaatctgggaggccctgagacagggattgtgcttcattccaatctattgcttcaccatggccttatgaggcaggtgagagatgtttgaatttttctcttccttttagtattcttagttgttcagttgccaaggatccctgatcccattttcctctgacgtccacctcctaccccataggagttagaagttagggtttaggcatcattttgagaatgctgacactttttcagggctgtgattgagtgagggcatgggtaaaaatatttctttaaaagaaggatgaacaattatatttatatttcaggttatatccaatagtagagttggcttttttttttttttttgggccataggggggggattggggg

SEQ ID NO: 19801 - DNA, 404 bp, Homo sapiens
attgaccgccttgaggaactctgcacgaggagagagagagagagagagagagagagagagacagtgtctggccttgggaagaagtgattctgtccctccaaagaaatagggcatggcttgcccctgtggccctggcatccaaatggctgcttttgtctcccttacctcgtgaagaggggaagtctcttcctgcctcccaagcagctgaagggtgactaaacgggcgccaagactcaggggatcggctgggaactgggccagcagagcatgttggacaccccccaccatggtgggcttgtggtggctgctccatgagggtgggggtgatactactagatcacttggcctcttgccagctcatttgttaataaaatactgaacacactaaaaaaaaaaaaaaaaaa

SEQ ID NO: 19802 - DNA, 487 bp, Homo sapiens
  misc_feature (1)...(487): n = A,T,C or G
gagctgcncccaattgatcgcctgcggtttcggcacgagcggtggcgtcccaagatggcgtcgtggctgccggagactctctttgaaactgtaggacaaggcccgccgcctagcaaagactattaccagttactggtcacccggtctcaggtaatctttagatggtggaagatctctctaaggagtgagtatcgatcaacaaaacctggagaagcaaaagaaacccatgaagacttcctagagaattcacatcttcaaggtcaaactgccttaatatttggtgcaagaatattagactatgtcatcaatttgtgcaaaggtaaatttgacttccttgaacggctctcagacgatttgctcctgactatcatttcttatctggatcttgaagatattgccaggctttgtcaaacatcacacagatttgcaaagctgtgcatgtctgataaactgtgggaacagatagtccagtcgacctgcgacaccn

SEQ ID NO: 19803 - DNA, 485 bp, Homo sapiens
  misc_feature (1)...(485): n = A,T,C or G
cgccccccatcgaccgcctcgatagaccgcctgcagaattcccacgagtttctccgcagcgtttagcacaaatatgatgaattgaccattgatgtgattatttgtttttatttgtgaactctgcgagttcaggagccatgtcagtcaccattgtacccctgtgcctggtggctaacacatattgatcaacaaactgcaggatataattatcattactccatttttcagatgaagaaacagaaactcagagcaactaaacatttgcccaaatgactccaactgtaggtgtcagacaaaagaaaagaaaaggacttttaggtactttgggggattttcaacaaggcatttttttttaaactatagccccaaagaagggaaacaaactggtaaattcggttctagttatgccccactttgaccgggggtggggtctggaagcaggcttttgtgccctggcgcaaagcacctagtgtaagggtagggtn

SEQ ID NO: 19804 - DNA, 495 bp, Homo sapiens
  misc_feature (1)...(495): n = A,T,C or G
gagaaaaaannnagnnantttcgacggctgtagaatnctcgcaaggcactgtgtacacacgcaaaggcattgcacctttgttctttaatacttaaaactagcccaaatgccctgtcagtaagggactggtttaatagatggtacctttatgcaatttgtttctaagtattcgttaagagagtgaggaatgtctggattattagggcaagatttctaaacttgggtaaaaaaaaaagttgtgcaagcatttttgtggacaacttgatgctctaaaatataagtaacaccacattactaacagtggctttgttaggaagcacaattatggaagaactttcatgggtggctttacatatttctataatgctttaattttctataagcatgtatttcgtaaacttaaataaagaaaaaagaacactacacttgcgaaaaaaaaaaaaaaaaaaatttggggcgcccaagggtcccccaagacccggaattactgggggg

SEQ ID NO: 19805 - DNA, 484 bp, Homo sapiens
  misc_feature (1)...(484): n = A,T,C or G
gggccngngnatggacnnccattgacccgcgctgcaggaattcggcacgaggctgctcaggaggctgaggcatgagaatcgcttgaacctaggaggtggaggttgcattcaactgagatcataccacttcattccagcctgggtgacagagcaagactctgtctcaaaaaaaaaaaagggaaaactttgggagggacttttgttaagaaaaccccttcagaattaatccctcttttccccacagaagttttttttcttgtcacctaaaagggaccgggaggtaaaaaaaacatttgggggggactaggccaccccaactttaaataatcccccatttcctttaaactttaaaatttcagggcgggtcccctttgtggcctcaaaaatttgaaaaagttattgggttttccaaaaggcacactgcgggtaatggattggtctttaacaactatggttctaatatttctcacactaaataaatctn

SEQ ID NO: 19806 - DNA, 497 bp, Homo sapiens
  misc_feature (1)...(497): n = A,T,C or G
gagaaaaaaannnngnnnnttttggcggctgcagaatngtcgcaagccttaccagacagctgagaaatccagccctgtgggaactggtgtcttataaccaagttggatacctgtgtatagcttcccaccttccatgagtgcagcacacaggtagtgctggaaaaacgcatcagtttctgattcttggccatatcctaacatgcaagggccaagcaaaggcttcaaggctctgagccccagggcagaggggaatggcaaaatgtaggtcctcgcaggagctcttcttcccactctgggggtttctatcactgtgacaacactaagataataaaccaaaacactacctgaattctgtaatagaaaaaaaattagaataaataaaaaattaaacctgaaaaaatgtttttcagaggcaatgagtggtaatttacagattttatgattagtttggtgggggggggccgcgctcacaatcttcaagtaatgggggaaaaaat

SEQ ID NO: 19807 - DNA, 297 bp, Homo sapiens
  misc_feature (1)...(297): n = A,T,C or G
tgtggggaattgcccgtctgcggcaattcgacgagtagctccgcttctgctttcaccaagagagtgtttcttcactcaactcaggtggcatttggggtgacatctcaaaggccaggaattccgttgacttgttggctgccagtaggggcgggaggaaaggcggaggcgagccctggaggagggaggccacaactccgagctgcccacctggtgctgagctggggccccgcctcctttctgttttatttttgaggaaataaaataaccaagtgcttnnaaaaaaaaaaaaaaaaaaaa

SEQ ID NO: 19808 - DNA, 511 bp, Homo sapiens
  misc_feature (1)...(511): n = A,T,C or G
gtgggtccccnnaatggagggcatcggaancnccncannanaacnnatggctcgcatgcaggaattccgcacgagaaaccattgttttattgcagacgaaggaaaaatgaagagattataaaagtcagctaatgaagtaagagacgtagtaaagtcaggactattcacaaagtaagaaagaaaatttggaaagatgagagaaacaggaaacaaagaatgccgaaaagaatgaaaacagagaaaaaatgtatgtgcttgaaagtaaaatacttacaatagtagcttaactatttcactctttaaataaaaatactaaagaagttcgtatatcctggaataacatgtcatcttcaaaatatttttattttctaatatttttaataataaacattttatagtgttaaagctgtatttttcttaataaataaaggacattacaaatatttctttaaggaagttcaaaaggatgttgtcttgttaacattggaacgaatataaatcttcaaaatac

SEQ ID NO: 19809 - DNA, 511 bp, Homo sapiens
  misc_feature (1)...(511): n = A,T,C or G
gggggggnttttgacgccctnnattgcaccgcctgtcggattcggcacgagaaggacagggagcaggctgtaattctgaagagtggatattcttgatgccacagcagtttccataccagccttcaccaaaaggaaatatgccagacagggaatgccgaagagtaaactttctacaagtgatagtatctaggatccattgtgtcatgaatcaagtttataaactagatttcagtttccttagacctgcactgtttagtatagtagccaattagccacatatgattatttaaatatatcatttaaaatgaaataccattaaatttaagattcattcctcagttacactaaccacctttcaagtgctcaatacctacatctggctagtggctaccatactggatagcccagataaggaataatcctatcattgcagaaagttttcttggtcagtgcagaactagactattttgcgatatcagtgctaaatataatttcctgatgataacatttt

SEQ ID NO: 19810 - DNA, 481 bp, Homo sapiens
  misc_feature (1)...(481): n = A,T,C or G
ctccccgcttnnnnnnnnatagaccgcctgcggaattcgccacgagtggagatgtgtttctagaagtttcctgtggaacctggaggctcctgacgcctttgactccaggctgggcgattccgatgctgacccgtcctcctgggctccccacccccgctccccaagtgtcacacaggcactttgtacacatcctggttttctaagaagggaacttgccatcaagattcctgtaccaggcccacggccgtctcgggcagagccacctgggccccgggtgcagccggagaccccgccgagcccctcctcccagtattcccatccccgcatgcttctagggagcgcctcttttccgttcttgaggaatttctgttctggggcttgtccttcctttgcagctgttttgaatgtagntttccttttctatttatttgcacattaaagttaataattgaatattgaaaaaaaaaaaaaaaaaaaaaaa

SEQ ID NO: 19811 - DNA, 499 bp, Homo sapiens
  misc_feature (1)...(499): n = A,T,C or G
aagaaaaaannnagananttttcacggctgtggaatnctcgataggctgtagaatacccacgaggaaaggtggcaacagaatttgagtccttttcctttgacgctacttttcatgcaaagaaacagattccatgtattgtttccatgctcacaaaagaactctatttttatcactaaagaaatggttggttggtggtttttttttagtttgtatgccaagtgagaagatggtatatttggtactgtatttccctctcattttgacctactctcatgctgcagagggtactttaagacatactccttccatcaaatagaaccactatgaagctacctcaaacttccagtcaggtagttgcaattgaattaaattaggaataaataaaaatggatactggtgcagtcattatgagaggcaatgattgttaatttacagctttcatgattagcaagttacagtgatgctgtgctatgaattttcaagtaattgtgaaaaagt

SEQ ID NO: 19812 - DNA, 475 bp, Homo sapiens
  misc_feature (1)...(475): n = A,T,C or G
nttagattgccctgcagcaattcggaacgaggaaggtttgtggatccgaattagcacgccttgaatcgtcttgcagccactttcttaacgaaacttgcttagaagttatttctgagatgcgtccaaatctacaggccttaaatcactcctcctgtgataagctaccacctcaagctttcaaccacattgccaagttatgcaaccttaaacgacttgttctctatcgaacaaaagtagagcaaacagcactgctcagcattttgaacttctgttcatagcttcagcacctcagtttatgcagttgcgtcatgatcgaagactatgatgtgatagctagcatgataggagccaagtgtaaaaaactccggaccctggatctgtggagatgtaagaatattactgagaatggaatagcagaactggcttctgggtgtgcactactggaggagcttgaccttggctggggcccaactct

SEQ ID NO: 19813 - DNA, 504 bp, Homo sapiens
  misc_feature (1)...(504): n = A,T,C or G
gcgggccccnnanaattgcaccgctctgcaggaattcggcacgaggaggactcctgcaagtgcgtcaacgccagccgctgcatgggtggcgtggctcggctcttcaccaaggttcagcagatccgccgcgccgaacccaacgtgctgctgctggacgccggcgaccagtaccagggcactatctggttcaccgtgtacaagggcgccgaggtggcgcacttcatgaacgccctgcgctacgatgccatggtaagacccgagcccgcgcccgggatagtagttccggactgagagaggagccgggctggaaaagcagcggatggcacagtgtggcaagcctaggttcagggcgcggagagatgtggggataaagtgagacttcggccagtgtgccagctggatgcatagaagtcccttggacgattcgtcttagacggacgttattgcgcccccactatgagatgggagtatttagaggagcaggacccagtcctgcctgcgagg

SEQ ID NO: 19814 - DNA, 439 bp, Homo sapiens
  misc_feature (1)...(439): n = A,T,C or G
atgganatctccccggctgcggtccaccctgagagggtgaataaaaagccacttgtctcaccacccaagacttcctgagcataggcagccaccagccacatggctgatttccatcggcggctatcccaggagccccgggcaggagccccgggcaggagcaccgcatgctggcctccctccctcacaggctcggtgtgccccagcagacctagctgccagcagtgacaacatgcgttaccttcatgtccactgacgggtccccctgcagcagtgcccactcatactggacgatggcgtggtcatctgtgctctcgcggccgtctagaaccaccccgtctgtgggcagatgcagaaccacatcctgcccagccttgctaagtggaggcgcatccttttctgagaaagaaaataaataattcataaaaaaaaaaaaaaaaaa

SEQ ID NO: 19815 - DNA, 459 bp, Homo sapiens
  misc_feature (1)...(459): n = A,T,C or G
ggagtttcgnnnttgnnaaccctgccccgtcggatcgagcncacanggggagctggaccagctgaaggagcatttgcggaaaggtgacaacctcgtcaacaagccagacgagcgcggcttcacccccctcatctgggcctccgcctttggagagattgagaccgttcgcttcctgctggagtggggtgccgacccccacatcctggcaaaagagcgagagagcgccctgtcgctggccagcacaggcggctacacagacattgtggggctgctgctggagcgtgacgtggacatcaacatctatgattggaatggagggacgccactgctgtacgctgtgcgcgggaaccacgtgaaatgcgttgaggccttgctggcccgaggcgctgacctcaccaccgaagccgactctggctacaccccgatggaccttgccgtggccctgggataccggaaagt

SEQ ID NO: 19816 - DNA, 464 bp, Homo sapiens
attgcccggctgcgggttttgtttgttccactcctatatatgattgtttgcacagagggcgctcctgtttttaaaacattttgaaaacccctggctgaacagtgctctgcctctaactccctcctcacactccagaattacccttcctcatctgtgcctgtctgtccaacccctcccccacgtctctctgcctgctgggctcttaactgttgctcgaagactgtgacatcagaagtaactcccactcctaatcaagagtctctccagcctcacagatgctggcctcttggcacctgcctagctcttgggcctgacctccagtcctgctggcctgctcttacttcccccaccctgggtttggcccctggaacctttcccttgtgtgtaccacaccctgcctgctgtggagcccattgtggaggcggtggggggggaaagcctcccctgaggatcccctgtccccc

SEQ ID NO: 19817 - DNA, 477 bp, Homo sapiens
  misc_feature (1)...(477): n = A,T,C or G
ngggggnnattganncccntnncttgtcccgcctgcaggaattcggcacgagcagagaaggtcacatggatgaggagaatgaggattttgcgccggctgctcagaagataccgtgaatctaagaagatcgatcgccacatgtatcacagcctgtacctgaaggtgaaggggaatgtgttcaaaaacaagcggattctcatggaacacatccacaagctgaaggcagacaaggcccgcaagaagctcctggctgaccaggctgaggcccgcaggtctaagaccaaggaagcacgcaagcgccgtgaagagcgcctccaggccaagaaggaggagatcatcaagactttatccaaggaggaagagaccaagaaataaaacctcccactttgtctgtacatactggcctctgtgattacatagatcagccattaaaataaaacaagccttataaaaaaaaaaaaaaaaactcgcggcaca

SEQ ID NO: 19818 - DNA, 406 bp, Homo sapiens
  misc_feature (1)...(406): n = A,T,C or G
ccgagagagagagagagagagagagagagagagagagagagagagagagagagagagagagagagagagagttcgcgcgggggggggcccgacacccaactctatatagagagagttgttacacctctgtctgggcgtccatatacaaccgtgtgagggaaaaacanantgcttttagaaggatctcaccaatgatgtgagctcccttgatcctactctgccaccagttctgctttcctcctctccacctggtcctctcagctcagccaccttcagctttgagcccctaagcagtcccgatggtccagttatcatccagaaccttcgtatcactggcaccattacagcccgagagcacagtggcactggattccacccatacacactctatactgtgaagtacgag

SEQ ID NO: 19819 - DNA, 432 bp, Homo sapiens
attgaccgccttgaggaaccggcacgagcggacttctgctgctgccacctgcgccagccctaccttccaccacagatgtctcccagatgggccttggacacactccttggcttctcccaccgcaagcaacgctgcctgcctctgccgctcctccacatcttgccgctgcccagcagagctggcttctgggtccacctgagcactggacggtgctcccagggcgttggagcaagcggaggggtgtgtggccaggtactacgaggcaccaggaaatcccgcggggtggcccatgcagaccaggcgcacgtggctcatggggcagaattgccaaggacagctcacgacagtgccaccttctcaccattccagccaaggagagatgtgacgttggaatgctctggcacttctgtcaagcctcccccgccccaattg

SEQ ID NO: 19820 - DNA, 474 bp, Homo sapiens
  misc_feature (1)...(474): n = A,T,C or G
attggccctctcccccgcgctgcaggaattcggcacgaggcggcgcgcggggatgggggtctcggtggatgtgcaccaggtgtacaagtaccccttcgagcaggtggtcgccagctttctccgaaagtaccccaaccccatggataaaaatgtcatctcagtaaaaatcatggaggaaaaaagagatgaatcaacaggggtcatctacagaaagaggattgcaatctgtcagaacgtggttccagaaattttaaggaaggtgagcattttgaaagtacctaatatccaattagaagaggagtcatggctcaatcctcgggaaagaaacatggccatacggagtcactgccttacgtggacacagtatgcatccatgaaggaagagtctgtcttccgggaaagtatggaaaacccaaattggacagagttcattcaaagaggcaggatttcaatcacaggggttggatttctcan

SEQ ID NO: 19821 - DNA, 413 bp, Homo sapiens
ctcgcttgcctcgcctgcaggaattcggcacgaggacaagaaggctgctggagctggcaaggtcaccaagtctgcccagaaagctcagaaggctaaatgaatattatccctaatacctgccaccccactcttaatcagtggtggaagaacggtctcagaactgtttgtttcaattggccatttaagtttagtagtaaaagactggttaatgataacaatgcatcgtaaaaccttcagaaggaaaggagaatgttttgtggaccactttggctttcttttttgcgtgtggcagttttaagttattagtttttaaaatcagtactttttaatggaaacaacttgaccaaaaatttgtcacagaattttgagacccattaaaaaagttaaatgagaaaaaaaaaaaaaaaaaactg

SEQ ID NO: 19822 - DNA, 475 bp, Homo sapiens
  misc_feature (1)...(475): n = A,T,C or G
nttcgaccgcctgcaggaatttggcacgacgataatctggctctcaagaacagatttcaggctgtactggatgagctcaaacaaaaggaagaccgagaaaaggagcaactcagctctttgcaagaggagctagaatcactcctagagaagtaaaaagaactgatatttaatttcagtcttcagactggtcagcattagaaaattcttggctttattgtactgggtattaagaccttgctcttcctagtccttttaatgctgtgtgttctgttaagttctttcatttgtttgtaattttgtttttcagcaaatttatattgttttgctaggtgttcatcctataagaagcaggattgtataggcagaaaaatgattgtaggaaagttgcaggattagcggaatgtatggttcaaccttaattatagcttcattgcaggactttactgtttctccattttctagaagctgctgttgc

SEQ ID NO: 19823 - DNA, 507 bp, Homo sapiens
  misc_feature (1)...(507): n = A,T,C or G
ngganaaaaattgatcgccttcggtagtcgcacgatgccgttacagacgtggctactatggaaggcgccgtggccctccccggaatgctggtgagattggagagatgaaggatggagtcccagagggagcacaacttcagggaccggttcatcgaaatccaacttaccgcccaaggtaccgtagcaggggacctcctcgcccacgacctgccccagcagttggagaggctgaagataaagaaaatcagcaagccaccagtggtccaaaccagccgtctgttcgccgtggataccggcgtccctacaattaccggcgtcgcccgcgtcctcctaacgctccttcacaagatggcaaagaggccaaggcaggtgaagcaccaactgagaaccctgctccacccacccagcagagcagtgctgagtaacaccaggctcctcaggcaccttcaccatcggcaggtgacctanagaattaatgaccattcagaaataaagcanaaagcaggc

SEQ ID NO: 19824 - DNA, 476 bp, Homo sapiens
  misc_feature (1)...(476): n = A,T,C or G
ntttgaatcgcactgccagaattcggcacgaggttgggggcagcctgttggtccacacctacttgctcaggcaggtgctctggtctctctcacccctgccccttagagtctaggtgcagcagctccaagcatgggaccaaggaggccagaacctgtcgctggaaaccagggcaaagcagtggctcagggctccttgggtgcatgtgtatcattggagctgcctgtctgcatgtatcctctggcgcgaatgctctctggtggctctgcagtacaatatgtaaccaataaagctccctcgtttccgtatactctgtgcgagtctgtgatgccagttttgtcaatgtcatccctgtgtatcatctggcttctatgcgttggcgcagctctagtatatttatttatttcattggggaatacttaaaatttgggattttacctaaccaattactgatactgcaaggactggaaacnataan

SEQ ID NO: 19825 - DNA, 459 bp, Homo sapiens
attgccatcgctgcacgaattcggcacgagccggaccgaccccaggcggcgacggaatcagtccccaatgcctggaaattcctcattggattactgtgttttaaacagaatttcgtgaacagccttttatctccaagcggaaagaaagatgtggaaagcttcagcaggccacgctgtgtccatcgcccaggatgacgcgggggccgatgactgggagactgaccctgattttgtgaatgatgtgagtgagaaggagcaaagatggggtgccaagacggtgcagggctccgggcaccaggagcatatcaagtaagaggcgtcgccaccacccttccgagggcccctctgcggatggagccccaggtgcaacagggcccatggtcatctgtggagggacagcccgtgtggaaactgcatttatcttcttgacctgagacccatgcagtaaatgaatataag

SEQ ID NO: 19826 - DNA, 467 bp, Homo sapiens
  misc_feature (1)...(467): n = A,T,C or G
cggggccccccngttgatcgccntgcggaattcggcacgaggaacctttggttttaataccacttgatactttggctgcaacgctggattcacactcataggagacagcactctcagctgcagaccttcatgacaatggacagcagtaactccagcatgcagagctgtgaaatgctcaaaactacatgttaataagccaatagcgatgaactgctccaacctctggggaaacttcaggtatggatcaatctgctctttccattgtctagagggccagttacttaatggctctgcacaaacagcatgccaagagaatggccactggtcaactaccgtgccaacctgccaagcaggaccattgactatacacgaagccctgacttactttggtggagcggnggcttctacgataggtctgataatgggtgggacgctcctggctttgctaagaaagcgtttcacacaat

SEQ ID NO: 19827 - DNA, 456 bp, Homo sapiens
  misc_feature (1)...(456): n = A,T,C or G
atggcccgcctgcaggaattcggctcgagctgcaggtaccctgcttgtctattttcctgactcagctcttgcctgcctttttcacatgttgctgcaattagactcaccgtgaggactacagtcaatttcagtctatcttgtgcccaatacaacaaggatttttaatagtaacaacccacacctcacccactaggactcaatgttcacaacaggaaggaccattgctgcatactccttgaccagcaacttttttgaagatatttttaagtgcagagtaggcctctattcctgtatgtaattgttcattttcagcacctggaacctcatctatncggtctggaaggaatacagcagttcgaaagccgcgtccatttctctccttcagtagtgcagaaatgagtccgattcaccagtacacacagaaactgaccagttcaacctagccaaagaagaaan

SEQ ID NO: 19828 - DNA, 436 bp, Homo sapiens
aattgacccgcgcatgaggaatccggcacgaggttgctgtgagcaaggctctgggagagtcacctcaggctcaggattctgaaccattgagatcagaaaccagatacttagccttctactgtagctacggaaccagattctggtgaatttgtccacaatcagccattggcctgtctggggagtttttggaagacagcaaagaggggcaatggctgctttcagctttgaggacagatgctatcctaagggcatggcagtacccatgttgatttgacatctctctagcccatccattgcttacagtagaagagtggggctgtatgcttgataatcttgaacattgaacttaatagatgacttgacaaggtagagatctgatattttgagattttggagaccatttcctgtgccagaatcactgctctattccataccg

SEQ ID NO: 19829 - DNA, 505 bp, Homo sapiens
  misc_feature (1)...(505): n = A,T,C or G
aggcnccnnnnaatagaacgtctgtaagacntcggcacgaggaatgtgtcactactggtcaagcaatactcagaaattcaggctgtgaggggttagattacaggaaagtaatttaggtgagctatccagagctttcaacctcagggtttataggaaaaaaaaaacaaaatacaaaaacccttaggacttctcatactctagccctgaccttgcagtctcctctgaggggcctcctaagacccttaaaataatattacaataggactttgagtgtgcatttcacagtggaaatagcctctggctagcattacttccaaatgctagttccagctaaaaacaagtactttttattagtttcttgtctttcaacattctgccatcaaaatatattcattttattaacttaccgattattgggaacctgcaaaaaaaaaaaaggggggggccgggccccaattcccccttatagggaggggaataaaattacatggcccggggtttaaaa

SEQ ID NO: 19830 - DNA, 479 bp, Homo sapiens
  misc_feature (1)...(479): n = A,T,C or G
atcgcaccgccatagaacggcctgccgaaancgccacgagtaaaactgaactttacagatgaatggagcagtatagcatcaagttctagaggaattgggagccattgccaatctgagggtcaggaggaatctttcgtcccacagagctcagtgcaaccaccacaaggagacagtgaaacaaaagctcctgaagaatcatcagaggatgtgacaaaatatcaggaaggagtatctgcagaaaacccagttgagaaccatatcaatataacacaatcagataagttcacagccaagccattggattccaactcaggagaaagaaatgacctcaatcttgatcgctcttgtggggttccagaagaatctgcttcatctgaaaaagccaaggaaccagaaacttcagatcagactagcactgagagtgctaccaatgaaaataacaccaatcctgagcctcagttccaaacagaagccactgn

SEQ ID NO: 19831 - DNA, 472 bp, Homo sapiens
  misc_feature (1)...(472): n = A,T,C or G
ccttcgcccngcccttggatagacccgcgctgcaggaattcggcacgaggttcggcgagataaaggccagctcagccgtgctgtgcctctcctacctgcctgacatcctggtgactggcacctatgacaagaaggtgaccatctacgaccccagagccggcccagccctgttgaagcaccagcaactacactccagacccgtgctgaccctgctggcggatgaccggcacatcatctcaggcagcgaggaccacaccctggtggtggtggaccgccgagccaacagcgtcctgcagcgtctgcagctggactcctacctgctctgcatgtcctaccaggaaccccagctctgggctggtgacaaccagggcctgctgcacgtcttcgccaaccgcaacggctgcttccagcttatccggtcctttgatgtgggccacagctttcccatcactgggatccagtactccgtggg

SEQ ID NO: 19832 - DNA, 405 bp, Homo sapiens
acgaggagagagagagagagagagagagagagagagagagagagagagagagagagagagagagagagagagagagagagagagagagagagagagagagagagagagagagactctcgcccctttttccgcgagagagtgctctgtgatatcaccacacacacactcttttagagggctatataacgtgcccccttttgggagagagagacacactttttctgtgagatgtctctgtgcgcatgtctgccccctctgcctgtgtgtgtctcatatgagaccccccccgttgtgtggggggcaatatatctctcactctctgtgaaaaaacacagcgcgcaccccccgcgtgtggtgaaaacacctctctctgtgtgggggggggcgcaaaaaaacgccctctct

SEQ ID NO: 19833 - DNA, 497 bp, Homo sapiens
  misc_feature (1)...(497): n = A,T,C or G
aggtcccntttgatcgctgcagacttctgacgaggccccccaatctgtcgaccctgcccccaggcattggcatcaacaaaagtcaaaatgcccgggaactcgaacagaggctgctaaattcccagcaattgctcctttggccttctagggactgacttcaaagaaggaaggaaagaatcaggcagcgcttcctcattctcttttaaaacccgcttcccgctgagtctgcacccaggagaccagagagcaccttgcccttccatggaaactcaggctgatctcgtatctcaagaacctcaggccctgcttgacagagctcttccttcaaaagttcctgccttttccgacaaggacagcctgggggatgagatgttggcggctgcgctcctaaaggccaagtcccaggagctaggaacctttgaggatgtagctgtgtacttcatccggaaggagtggaagcgtttggaacctgctcagagggacctctatagagatgn

SEQ ID NO: 19834 - DNA, 499 bp, Homo sapiens
  misc_feature (1)...(499): n = A,T,C or G
agcggnnaattgancactgatcagcctgcggaannccgacgagaacacacgggcctggatatctacgaaggatatggacagactgaaacggtgctaatctgtggaaattttaagggaatgaaaattaaacctggctcaatgggaaaaccttctcctgctttcgatgttaagattgtagatgtaaatggcaatgttctacctcctggacaagaaggagatattggcattcaagttctacccaaccgaccatttggcctttttactcattacgtagataatccttcaaaaacagcttcaactctacgaggcaatttctatatcactggggacagaggatatatggataaagatgggtatttctggtttgttgcaagagcagatgatgtcatattatcctctggctatcgaattggaccatttgaggtagaaaatgccctgaatgaacacccttcagttgcagagtcagctgttgtcagcagcccagaccccatcagaggan

SEQ ID NO: 19835 - DNA, 414 bp, Homo sapiens
ctcgcccccccctcccatagcacccgcctgcacgaattcgccacgagagccatggaagttttaccttattctgtgagaagtgttcttaaacttattaagtgtctaaactaaggtttagtgcttttttaaaggaaagttgtcccaggattcatcctaaagaaagcaaaagttaattcaactgatccaccaatggaattagatgggtagagttgggttcttgagttttaccaccacttagttcccactgaattttgtaacttcctgtgtttgcatcctctgttcctattctgcccttgctctgtgtcatctcagtcatttgacttagaaagtgcccttcaaaaggaccctgttcactgctgcacttttcaatgaattaaaatttatttctgttctaaaaaaaaaaaaaaaaaaaaa

SEQ ID NO: 19836 - DNA, 564 bp, Homo sapiens
  misc_feature (1)...(564): n = A,T,C or G
cccacctctccatccgtgccccgttgttacctgtgtccgcancttactgggtctcccccacctccccccccagggccgccccgccccccaatagaatcgcctgcggattggaccaccatctgancaaaaccattnccgcaggagaaatgaggaaaccatcactgaaagctttggtaatgatcatagcaccttggatgggtattccagacaaaccaccttgtcttcaaaaatgtatcacaccaaaggacaagaaggctctgtttgtctccggtcatcagactgtgcctcaggattgtgttgtgctagacacttctggtccaagatctgtaaacctgtcctgaaagaaggtcaagtgtgtaccaagcataggagaaaaggctctcatggactagaaatattccagcgttgttactgtggagaaagtctgtcttgccggatacagaaagatcaccatcaagccagtaattcttctaggcttcacacttgtcagagacactaaaccagctatccaaatgcagtgaactccttttatataatagatgctatgaaaaccttttatgacct

SEQ ID NO: 19837 - DNA, 506 bp, Homo sapiens
  misc_feature (1)...(506): n = A,T,C or G
agagcnnnnnnaattgacgatcgatcggccttcggaattcggcacgaggacctccagagcctcccaaacgacgtgatctcttccctgaagaacaggctgaaaaaggtctccacaaccactggggatggtgtggccagagcgttcctcaaggcccaggctgctttcttcggtagctaccgaaacgctctgaaaatcgagccggaggagccgatcactttctgtgaggaagccttcgtgtcccactaccgctccggagccatgaggcagttcctgcagaacgccacacagctgcagctcttcaagcagtttattgatggtcgattagatcttctcaattccggcgaaggtttcagtgatgtttttgaagaggaaatcaacatgggcgagtacgctggcagtgacaaactgtaccatcagtggctctccactgtccggaaaggaagtggagcaattctgaatactgtaaagaccaaagcaaatccggccatgaagactgtctacaagtt

SEQ ID NO: 19838 - DNA, 478 bp, Homo sapiens
catttgccccgcgctgcaggaattcggctcgagaggccctgcacagagtagcactcattaattcttggttaaggaatgaatcaacgaatgaatggctatgcatggacctctgggcagggagacctgggtcttctctggctgagaggggaaggctaaggcatggctgagattcaagccaccattccaggcctctttgcccaagaaagaaacttctgtcacccttgcactctcctgtgttctgagtccctggccaatagcacagccttccatgccccgacccccaccccaagcctctccactaggcctctgccaggatctaagcccatgagcacagggactggctatcccaagacctggcagatgtggctgctcaataaacacttgttgaaccatcaaaaaaaaaaaaaaaaaaactcgggggggggccgggcccccaattccccctatagggagccggataacaattcacggcccggcg

SEQ ID NO: 19839 - DNA, 412 bp, Homo sapiens
  misc_feature (1)...(412): n = A,T,C or G
aggggccngnnnttttgaccgcatggagcggctgtangaattcggcacgagcggcgacatggccaaacgtaccaagaaagtcgggatcgtcggtaaatacgggacccgctatggggcctccctccggaaaatggtgaagaaaattgaaatcagccagcacgccaagtacacttgctctttctgtggcaaaaccaagatgaagagacgagctgtggggatctggcactgtggttcctgcatgaagacagtggctggcggtgcctggacgtacaataccacttccgctgtcacggtaaagtccgccatcagaagactgaaggagttgaaagaccagtagacgctcctctactctttgagacatcactggcctataataaatgggttaatttatgtaacaaaaaaaaaaaaaaaa

SEQ ID NO: 19840 - DNA, 481 bp, Homo sapiens
  misc_feature (1)...(481): n = A,T,C or G
catagaccgtnntccgcaatagacccgcntgcacgaattcgccacgagcacaagcgagatgacgaagggaacgtcatagattgtaaagcgtcgcattaagacgcacacgttgtgccgccgctgcggctctaaggcctaccaccttcagaagtcgacctgtggcaaatgtggctaccctgccaagcgcaagagaaagtataactggagtgccacggctaaaagacgaaataccaccggaactggccgaatgaggcacctaaaaattgtataccgcagattcaggcatggattccgtgaaggaacaacacctaaacccaagagggcagctgttgcagcatccagttcatcttaagaatgtcaacgattagtcatgcaataaatgatctgcgtttatgacataaagacctccaaaccgtctgtgaactgctaagtaagaagagcccagaagtctcctgcttgcggggggggggggcgccctacc

SEQ ID NO: 19841 - DNA, 468 bp, Homo sapiens
  misc_feature (1)...(468): n = A,T,C or G
gctggtactgattacagcactctcacctggattnttcgcggagatggggtcttgccatgttgcccaggctggtctcaaactcctatgctcaggcgatccaccctcctcggcctcccatagtgctagggttataggcaagagccactatacccagactggattagatttcttcacatgacatccgtagagtgcctgtgtgtatgctctgtggatgtaaaatgaacaggcaagagtacagaagtagaatctctagccatgcagtcagacagatggctccaaaattagttacttggttatggagacgatcaagttacttgactttgagcctcagttatgtgccaaatgaggatactaatagtatctatctcaaatgcatatatgggtgttcactgtctctgggagacattttccaaagaaaccaagactaacttgttaagggaatagatttctctcactgatacaggatgt

SEQ ID NO: 19842 - DNA, 471 bp, Homo sapiens
  misc_feature (1)...(471): n = A,T,C or G
cttcgaccgccntgtggtagaaccgcgctgcaggaattcggcacgaggctcctcccaccgcagcccgctgacaccgaagcgctctcgacccctgacctctaacctccgcccggctcttcttgcttcgtgcctcgccccctccccgccaagctggtcgcactgttgccgtttcactgcggctgacggaaggccaaggaagaaagagggtagagacgctgtcgcgaggatcaggctgccctctcctttcccagggaccgtgttggggccttctgaccaccccgccccgcatcctgcgcctcggaggcccaacgtagcccaagacacccatggtcttgatgctctccgcctctgtcccagccaccaaagtccccgcgatggaatggaggacggggtggccttgggcagagaagcgcttcttgtgccggatggaaggaaaccgtagctctggctgtgttcatcgcgaaatgtttt

SEQ ID NO: 19843 - DNA, 462 bp, Homo sapiens
  misc_feature (1)...(462): n = A,T,C or G
ctttgaccgcctgcggtaattcgccgaggctcctcccaccgagcccgctgacaccgaagcgctctcgacccctgacctctaacctccgcccggctcttcttgcttcgtccctcgccccctccccgcctagctggtcgcactgttgccgtttcactgcggctgacggaaggccaaggaagaacgagggtagagacgctgtcgcgaggatcatgctgccctctcctttcccagggaccgtgttggggccttctgaccaccccgccccgcatcctgcgcctcggaggcccaacgtagcccaagacacccatggtcttgatgctctccgcctctgtaccagccaccaaagtccccgcgatggaatggaggacggggtgggcttgggcagagaagcgcttcttgtgccggatggaaggaaaccgcanctctggctgtgttcatcgcgaaatgtggtatggatgtggn

SEQ ID NO: 19844 - DNA, 473 bp, Homo sapiens
  misc_feature (1)...(473): n = A,T,C or G
natttgaacggcttgtangacttcggcacgaggttagatcacacataacaatagggtctatgtcatatcccaagtgaacttgagccctgtttgggctcaggagatagaagacaaaatctgtctcccacgtctgccatggcatcaagggggaagagtagatggtgcttgagaatggtgtgaaatggttgccatctcaggagtagatggcccggctcacttctggttatctgtcaccctgagcccatgagctgccttttagggtacagattgcctacttgaggaccttggccgctctgtaagcatctgactcatctcagaaatgtcaattcttaaacactgtggcaacaggacctagaatggctgacgcattaaggttttcttcttgtgtcctgttctattattgttttaagacctcagtaaccatttcagcctctttccagcaaacccttctccatagtatttcagtcatggaa

SEQ ID NO: 19845 - DNA, 471 bp, Homo sapiens
  misc_feature (1)...(471): n = A,T,C or G
atcgaccgcctgcggaattgacccgccgtgaaaggctcgccaggctttaggccagaagcctaaagctggtactccaacctgctttattcattctagaaaatcttccaagacatcttaaactgacatttaataattggagattttacttaaaaacctgacatttaagaattggaggttttacttaaaaactcagactttgggccaggcccagtggctcacacctgtaatcccagcactttgggagcccaaggcgggtggatcacttgaagtcaggagttcgagaccagccaggccaacatggtgaaaccctgtctctactaaaaatacaaaaattagctggacatagtagtgcgcgcacctgtaatcccagctactcgggaggctgaggaacgacaatcacttgaacccacgangtggaggttgcagtgagctgagatggtgccactgcactccagtctgggtgacagagcg

SEQ ID NO: 19846 - DNA, 544 bp, Homo sapiens
  misc_feature (1)...(544): n = A,T,C or G
aagagaattgacgccttcgacggctgcangaattcggcacgagccaagacccagcaaactgcacaactctaaggtgaacaggagagagacaggccaaactaggagcccatcacctaaaaaagaggtctaccaaaggcgacatgctcccggatacaccagaaaactctctgcagaggaattagagcgaaaacggcaagagatgatggaaaacgccaaatggagggaggaggagagactgaacatcctcaagaggcatgctaaggatgaggaacgggagcagaggctagagaagctggactcccgggatgggaagttcatccaccgcatgaagctggagagtgcatctacttcctccctggaggatcgggtgaagcggaatatctactctttacagagaacttcggtagctctggagaagaactttatgaaaagatgaaaactgtcccctctcttattggttttcctgcattttccagggaagctgctgaccccttaattctctttataagagttcanatgacttctttcacagatgtcaaaccac

SEQ ID NO: 19847 - DNA, 484 bp, Homo sapiens
  misc_feature (1)...(484): n = A,T,C or G
gaggaanannttttganncccttgacccgcgctgcaggaattcggcacgaggacagtcaaagtgtgggcaactcatcgccagaaattcctgttctccctgagccagcatatcaactgggtccgctgtgccaagttctcccccgacgggcggctcatcgtgtctgccagtgatgacaagactgttaagctgtgggacaagagcagccgggaatgtgtccactcgtattgtgagcatggcggctttgtcacctatgtggacttccaccccagtgggacgtgcattgccgctgccggcatggacaacacagtgaaggtgtgggacgtgcggactcaccggctgctgcagcattatcagttgcacagtgcagcagtgaacgggctctctttccacccgtcgggaaactacctgatcacagcctccagtgactcaaccctgaagatcctggacctgatggagggccggctgctctacacactccacggg

SEQ ID NO: 19848 - DNA, 488 bp, Homo sapiens
  misc_feature (1)...(488): n = A,T,C or G
gggcctccnagggannttgatcggctgtggaattcttgcgagccatctacaccttaggattttttcttctttccaaaacattccattgattttataaagactttctatagagaggctttcacttttgagttctttgagtttaaagattgcttttcttgaaatgctctttttttaatgtagaaaaattttactttttcaaatatgcatacaatttttaaaacagtagaagcaaattcattttaatgaccatgtaaagagcgaatgtcagacagtattattaccagtttattcaaattacatacatgttcctaccaaggtggaaagaaattcaaacctcatggtaaaacttaagcacgatttaagataaaagcatagtatttcttcagtgtagacttattaagtgccttattgaacaggatcttaacctgctttttctgtttttttgaaagagttaatgcaattgttgaagcttctaaccaagaaacaac

SEQ ID NO: 19849 - DNA, 449 bp, Homo sapiens
  misc_feature (1)...(449): n = A,T,C or G
nattgaccctggctgcacgaattcggcacgaggccacccctacaacctcaggccactgggagacgcacgaggaggacaaggacacagcanaggacagcagcactgctgacagatgggacgacgaagactggggcagcctggagcaggaggccgagtctgtgctggcccagcaggacgactggagcaccgggggccaagtgagccgtgctagtcaggtcagcaactccgacgcccaaatcctccaaatccccagagtccgactggagcagctgggaagctgagggctcctgggaacagggcttgcaagagccaagctcccaggagccacctcctgacggtacacggctggccagcgagtataactggggtggcccagagtccagcgacaagggcgaccccttcgctaccctgtctgcacgtcccagcacccagccgaggccagactcttg

SEQ ID NO: 19850 - DNA, 498 bp, Homo sapiens
  misc_feature (1)...(498): n = A,T,C or G
agggcncaattgacgcttgaggactntcgccgagtccccgcggccgccgcgatgcagaaatacgagaaactggaaaagattggggaaggcacctacggaactgtgttcaaggccaaaaaccgggagactcatgagatcgtggctctgaaacgggtgaggctggatgacgatgatgagggtgtgccgagttccgccctccgggagatctgcctactcaaggagctgaagcacaagaacatcgtcaggcttcatgacgtcctgcacagcgacaagaagctgactttggtttttgaattctgtgaccaggacctgaagaagtattttgacagttgcaatggtgacctcgatcctgagattgtaaagtcattcctcttccagctactaaaagggctgggattctgtcatagccgcaatgtgctacacagggacctgaagccccagaacctgctaataaacaggaatggngagctgaaattggctgattntggcctggctcgn

SEQ ID NO: 19851 - DNA, 506 bp, Homo sapiens
  misc_feature (1)...(506): n = A,T,C or G
agcgngnnnnattgacaatagtatcgcctgtcggaattcggcacgagcagacatcccttctcccccatacacacatatacactcacagcctctctggcctcttcccttggggaggggccacctgtagtatttgccttgatttggtggggtacagtggatgtgaatactgtaaatagcttgtgctcagactcctctgcgtggagagggtgggtgcaggaggcagaccctccccccaaagccccctggggagatcttcctctctctatttaactgtaactgagggggatcccaggtctggggatgggggacaccttgggccacaggatactggttgcttcaggggtacccatgccccctgccctcgcctggaatcagtgttactgcatctgattaaatgtctccagaaataaagaataattctgccaaannnnnnnnnnnnnnnnnnnnnnnnnnnnnnnnnnaaaaaatcttggggggggcccccgcccccaatcccccttatgaga

SEQ ID NO: 19852 - DNA, 501 bp, Homo sapiens
  misc_feature (1)...(501): n = A,T,C or G
ngggggcnccattgatcgtctgaggacttccgcacgagattgagctgtggaaagtgaagaaggcattgaagatgactattttttggagaggcctgatgcccgaatttcagtttggcacttacagcgaatctgagaggaaaaccgaggagtacgatactcaggccatgaagtacttgtcatacctgctgtaccctctctgtgtcgggggtgctgtctattcactcctgaatatcaaatataagagctggtactcctggttaatcaacagcttcgtcaacggggtctatgcctttggtttcctcttcatgctgccccagctctttgtgaactacaagttgaagtcagtggcacatctgccctggaaggccttcacctacaaggctttcaacaccttcattgatgacgtctttgccttcatcatcaccatgcccacgtctcaccggctggcctgcttccgggacgacgtggagtttctggtctacctgtaccagcggtggctnt

SEQ ID NO: 19853 - DNA, 476 bp, Homo sapiens
  misc_feature (1)...(476): n = A,T,C or G
natttcacccgcgctgcaggactgtgcctgtcagtgctgcttcactgactgtagcttatgcatcacgtggacatcagtggcttgcttctcatggacagttctggcccatcttgatgatttgtaaggtgccatcctgtaaagtggctgtggtggggctgactggtgtggctggggatactaatcttattggtccctgatgccaccaccaagggggtgacaggcctgtgttgtacagcacgatctttagttgtagcccagccgccttacagaaaggaacctggagggccagccagctttttgctctgaccttgggatacgctgtgactgggactgaggcctcagctgccttctaacgtgctttgcaagtcagcacactgtgatgtctgggttatatgtgcctaatgccccagccttacacccttcttgttcattcagatttataagagtggccggggctaccttatcaaggacggcaa

SEQ ID NO: 19854 - DNA, 417 bp, Homo sapiens
catcgacccccctcggtagacccgcctgcaggaattcggcacgaggaaagctctgactctcaggaagttatctggaaagatacctggatgtttactgccttgggacactgtgggatctccatgtttggactatgggacagagaattgaccctaactaactatgaactatttatttcctcctcccctacccctagttaagtgccacaaagactgtgttatgtagtcagtacttttctcatgtatctttctctagaccatttatatacgggtgaaatgaaagcttttttgcatgtacttgatactcagtctgtaaactcagacttcgctttttttgtgagactatcctttcaatatttttataaacttttgtgtgtgctgtggcagggaacagttaaaaaaaaaaaaaaaaaaaactcg

SEQ ID NO: 19855 - DNA, 443 bp, Homo sapiens
  misc_feature (1)...(443): n = A,T,C or G
atttgatcgcgctgcaggaattcggcacgagcggaaacccagaggcattgacaacagggttcgtagaagattcaagggccagatcttgatgcccaacattggttatggaagcaacaaaaaaacaaagcacatgctgcccagtggcttccggaagttcctggtccacaacgtcaaggagctggaagtgctgctgatgtgcaacaaatcttactgtgccgagatcgctcacaatgtttcctccaagaaccgcaaagccatcgtggaaagagctgcccaactggccatcagagtcaccaaccccaatgccaggctgcgcagtgaagaaaatgagtaggcagctcatgtgcacgctttctggttaaataaatgtaaaaactgccaaaaanaataccatcaccaaaacacacaaaactttaccaaattaggggggggggcgccggcct

SEQ ID NO: 19856 - DNA, 501 bp, Homo sapiens
  misc_feature (1)...(501): n = A,T,C or G
agcgnntnnnnntttttacgcccggctgcaggaattcggcacgagtaacggtttggggagcagatggtgcaatatctcattcttaaaagatgaggaaactgagacactggaagaggaagtaacttgcccaatgtcactcagccaggaagaggtggaacccagcattgaaatccagacagtctaactccaaaacaaataaacaataccaccacacttttatcttctaggctatacatttctaatggccaatgaagaaaacaaactgaaaacaaaattcctccttcctgctcttgcttattcctaatggctgttctttttagctcatgtagaaaataaagtagtaacatgtttcagtnnnanaaaaaaaaaaaaaaaaaaaaaaaaaaaaaaaaaaacttgggggggggggccgggccccaattcccccttaaggggggggaataaaaaatccgggggcggggtttaaaaagggggggggggggaaaaaaaaaannnnnnnnn

SEQ ID NO: 19857 - DNA, 484 bp, Homo sapiens
  misc_feature (1)...(484): n = A,T,C or G
cttcgaccccccctccncnnattgactcgccctgcaggantcggcacgagccggacagccctgctccctgcagccaggtgtagtttcgggagccactggggccaaagtgagagtccagcggtcttccagcgcttgggccacggcggcggccctgggagcagaggtggagcgaccccattacgctaaagatgaaaggctggggttggctggccctgcttctgggggccctgctgggaaccgcctgggctcggaggagccaggatctccactgtggagcatgcagggctctggtggatgaactagaatgggaaattgcccaggtggaccccaagaagaccattcagatgggatctttccggatcaatccagatggcagccagtcagtggtggaggtaactgttactgttcccccaaacaaagtagctcactctggctttggatgaaattcgactgcttacaaaggaccttggcttaatagaaatga

SEQ ID NO: 19858 - DNA, 477 bp, Homo sapiens
  misc_feature (1)...(477): n = A,T,C or G
atttgccccgcgctgaggaaancctttttgcccggctgcaggaattcggcacgagccaccagcccttgcccatggtggggaggacatctggtctgagtcagagatctgtgcacactttctaaacagcttgtgatgcaagtgtgagcctattgtgttacttgaccttattttggaagttttgaattggcctaggaggaaacccagaaatgaaccaggggtatgtcatcacttttttcatatcaagtcctcaccctccttccacataatgctctatcctctaaggttggaactctgaagttggagaaggtggaataaagttacacctggaaaaaaaaaaaaaaaaaaaaaaaaaaaactttggggggggggccgggccccaatttccccttataggggggggtttaaaaattcctgggccggggtttaaaaagggggggagggggggagannnnnnnnnnnnnnnnnnnnnnntnnttn

SEQ ID NO: 19859 - DNA, 450 bp, Homo sapiens
  misc_feature (1)...(450): n = A,T,C or G
ataagaattctcccccgcgctgcaggaattcggcacgagcgtgggcgagcgacagcccctgctgggtccccctgagtccatgcgggaacatgtggtcgctgcctccaaggccatgaagatgggtgactggaagacctgtcacagttttatcatcaatgagaagatgaatgggaaagtgtgggaccttttccccgaggctgacaaagtccgcaccatgctggttaggaagatccaggaagagtcactgaggacctacctcttcacctacagcagtgtctatgactccatcagcatggagacgctgtcagacatgtttgagctggatctgcccactgtgcactccatcatcagcaaaatgatcattaatgaggagctgatggcctccctggaccagccaacacagacagtggtgatgcaccgcactgagcccactgcccagcagaacctggn

SEQ ID NO: 19860 - DNA, 353 bp, Homo sapiens
  misc_feature (1)...(353): n = A,T,C or G
gggagccggnnnnnnnnttatgatccgtttgcaggcgctgatgacgnccgaagaggctgagggctcctatgtctaccatccacagctctggctttcgtgacttcctgctcaagccagagttgctccgggccattgtcgactgtggctttgagcatccgtcagaagtccagcatgagtgcatccctcaggccattctgggaatggatgtcctgtgccaggccaagtcgggcatgggaaagacagcagtgtttgtcttggccacactgcaacagctggagccagttactgggcaggtgtctgtgctggtgatgtgtcacactcgggagttggcttttcagatcagcaaggaatat

SEQ ID NO: 19861 - DNA, 347 bp, Homo sapiens
tcacctgttcagtctcatctaaccttccaatgtctgatgtttctgccaaattcctgcctgattctgggtccgtcctgaccttctttggtcagcttggtgcttgatgtctccctgctcttggtgtcagtggtagcattaacagcagcaccagcagtagcagcatcagcagagacctctccactttcccttatcccctctgctgggtagagaggcactttctgggacttacctccagctgcctcttcatctgggaatgagctaagcaaggctgagcctcctcctgttgcttgaaatactgatgatataaaggctggatttggagtttgtatcccctggtccctctgggg

SEQ ID NO: 19862 - DNA, 474 bp, Homo sapiens
  misc_feature (1)...(474): n = A,T,C or G
agcggtnnnnnnaattgtcncgcctgcaggaattcggcacgagaactatacagttacttgtcttctggtttgttgaaacagtaagtcagacaacatttgccacaataatgtctgtcaaagtgacttgccataaacaccccagcaccacattcatcagaagggcactctcgacgaaggcgactaattttgccattctcatccaccttataatatttcaggacagccagcttaaccttctttctcttgtgcttattcttcttgggagtggtgtaagacttcttcttccttttcttagcaccaccacgaagtctcaacacaagatgaagagtagactccttttgaatattgtagtcagacaaagtacgtccatcttccagctgcttgccagcaaagatcagtctctgctgatcaggaggaattccttccttatcctggatcttggcctttacattttctatcgtatccgagggttca

SEQ ID NO: 19863 - DNA, 451 bp, Homo sapiens
attggaacctcgcccccgcgctgcaggaattcggcacgagcaggtgcgccagaactaccaccaggactcagaggccgccatcaaccgccagatcaacctggagctctacgcctcctacgtttacctgtccatgtcttactactttgaccgcgatgatgtggctttgaagaactttgccaaatactttcttcaccaatctcatgaggagagggaacatgctgagaaactgatgaagctgcagaaccaacgaggtggccgaatcttccttcaggatatcaagaaaccagactgtgatgactgggagagcgggctgaatgcaatggagtgtgcattacatttggaaaaaaatgtgaatcagtcactactggaactgcacaaactggccactgacaaaaatgacccccatttgtgtgacttcattgagacacattacctgaatgagcaggtgaaa

SEQ ID NO: 19864 - DNA, 386 bp, Homo sapiens
  misc_feature (1)...(386): n = A,T,C or G
ntttgccctggctgccgaattcggcacgagcccactggcctttcccacctctgctcaccttactgttcacctcatcaaatcagttctgccctgtgaaaagatccagccttccctgccgtcaaggtggcgtcttactcgggattcctgctgttgttgtggccttgggtaaaggcctcccctgagaacacaggacaggcctgctgacaaggctgagtctaccttggcaaagaccaagatattttttcctgggccactggggaatctgaggggtgatgggagagaaggaacctggagtggaaggagcagagttgcaaattaacaacttgcaaatgaggtgcaaataaaatgcagatgattgcgcggctttgaaaaaaaaaaaaaaaaaa

SEQ ID NO: 19865 - DNA, 491 bp, Homo sapiens
  misc_feature (1)...(491): n = A,T,C or G
ggagttcccnnnaaggagnnnnnaattgatnnccntnatagatccgcgctgcaggaattcggcacgagatatgccactgtggaggaggtggatgcagctatgaatgcaaggccacacaaggtggatggaagagttgtggaaccaaagagagctgtctccagagaagattctcaaagaccaggtgcccacttaactgtgaaaaagatatttgttggtggcattaaagaagacactgaagaacatcacctaagagattattttgaacagtatggaaaaattgaagtgattgaaatcatgactgaccgaggcagtggcaagaaaaggggctttgcctttgtaacctttgacgaccatgactccgtggataagattgtcattcagaaataccatactgtgaatggccacaactgtgaagttagaaaagccctgtcaaagcaagagatggctagtgcttcatccagccaaagaggtcgaagtggttctggaaactt

SEQ ID NO: 19866 - DNA, 518 bp, Homo sapiens
  misc_feature (1)...(518): n = A,T,C or G
gagggnnnnnnnnngnnnaattgcccggctgcggaaatcgcacgagccangcttcattgacaccatcgctccccacagcagctccttggggcagggggctcacctgtgcagccacccttactcacagtagcatcccattcttcacactgcaaccccccagcactgtggacccttccagggaggtgacaggagccagcagacacatgacattcccagaaagccccatcttatccagacaggcttccctccatacttctttccacagttttaccctcagaaaaatgttggctgcagtcttcccttccttcacctccaccctggggaagggtcagtaaccaatgccgagggtcggggaaggaggagtcacaggcaagacagggactcagcgcagtgctcccgccatcatcggggacaggtgccagggtcagctgcagctctccttccgggagcagggtgtggtggccctggatggtcccagggagcaaagggaggcaggcagctgtcacagccacagcggc

SEQ ID NO: 19867 - DNA, 480 bp, Homo sapiens
  misc_feature (1)...(480): n = A,T,C or G
nattgannactgatnngcttaggaatnnggacgagggaggctgaggcgggcggatcacccgaggtcaggagttcaagaccagcctggcctatatgggaaaaccccgtctctactaaaaatacaaaaaagagctgggcgtgatggtgcatgcctgtagtcccagctacttgggaagctgagacaggagaatcacttgaacccaggaggcggagatttgcagtgagccgagatcacgccactgcgctccagcctgggcaacagagcaagactctgactgaaaaaaaagaatggcattcatggcctgctatataaacttttctagaatataggttggcaatgtctgtcaagagtcctaacctaagtaaataatcaacaaatatattcaacactggagaaacagctaaataaaatttggtatgtcatcatgatggaatgctatggagtggtttttcttttcttgacttttaataacttaggggn

SEQ ID NO: 19868 - DNA, 452 bp, Homo sapiens
  misc_feature (1)...(452): n = A,T,C or G
ataagaacttcgaccccgcgctgcaggaattcggcacgagccttgcggagactcaccccttcagcgtcgctgcccccagctcagctcttactgcgggccgctccgacggcggtccatcctgtcagggactatgcggcgcaaacatctccttcgccaaaagcaggcgccgccaccgggcgcatcgtggcggtcattggcgcaatggtggacgtccagtttgatgagggactaccaccaattctaaatgccctggaagtgcaaggcagggagaccagactggttttggaggtggcccagcatttgggtgagagcacagtaaggactattgctatggatggtacagaaggcttggttagaggccagaaagtactggattctggtgcaccaatcaaaattactgttggtcctgagactttgggcagaatcatgaatgtcattggagaacctattgn

SEQ ID NO: 19869 - DNA, 460 bp, Homo sapiens
agctgggctttgccttgactgcacgaattcggcacgagcgcacgcgtgagacttcgccgccgcctccgccgcagacgccgccgcgatgcgctacgtcgcctcctacctgctggctgccctagggggcaactcctcccccagcgccaaggacatcaagaagatcttggacagcgtgggtatcgaggcggacgacgaccggctcaacaaggttatcagtgagctgaatggaaaaaacattgaagacgtcattgcccagggtattggcaagcttgccagtgtacctgctggtggggctgtagccgtctctgctgccccaggctctgcagcccctgctgctggttctgcccctgctgcagcagaggagaagaaagatgagaagaaggaggagtctgaagagtcagatgatgacatgggatttggcctttttgattaaattcctgctcccctgcaaataaagcct

SEQ ID NO: 19870 - DNA, 466 bp, Homo sapiens
  misc_feature (1)...(466): n = A,T,C or G
catcgcaccgcctgtagtagaacgtctagctcagttcgacctgagactttccatacaatctgttgttttgttttgtttttagagacagggtcttgctctgtcacccagactggagtacaatgacacaatcatagctcactgcagcctttaactactgggctcaagacatcctcctgcttcagcctccagagagttgggaccataggtgcacaccaccacacctagctaatttttgggggaggtcttgctatgttgcccaggctggtcttgaactcctgggctcatgcaatcctcctgccttggcctcccaaagcgctaggattagaggtgtgagccgctgcaccctgccccagtacaatcttttttgaactcaaatttttgctgacatctgagtgcacacaccacagtgtaaattatgccttatcagaatctaaatgaaaatagcgaacatttaaaagctatcacn

SEQ ID NO: 19871 - DNA, 496 bp, Homo sapiens
  misc_feature (1)...(496): n = A,T,C or G
ggagggtnnnnnaaattgaagactgcaggatatgctaaaanaccttttggaaagaactttcccacaattaactgtttttgagcacctgacaaaatttagtgtttaccttgcgtgccattttgtgtcatccttcattaaaaaagcaattggaggtttgccagttatctcacttccctttttaaatcaatgttgttttaatgcactaatctgaattctgtaaagaggattatcttagtatatactttgtattttataatgttcttgtatagcagctcggtactgaaggcggagtttaacttggcacgctctgagacttcaaatgggaacaaatagtaagtagctaagtaaaccacatctttgcaaccaaaataaagatgagttaaaaggtatctggttaggcctatttcatgaggactatgctctggtgggaccacaggtcacctgatacttagtgctgtgctgcctgaaacctcagcatggagacatcaccacatgg

SEQ ID NO: 19872 - DNA, 500 bp, Homo sapiens
  misc_feature (1)...(500): n = A,T,C or G
agcgcccnnnnaaattaggatcgtcgtgcaggattcggcacgagggacgtgatgaggtactcgtggttctggagctctagaaacacttctgatgcatgaaaaatgtgtgatggtgcaaggaatggattcaggatgttgttggagaaacaagtttgtgattagtccttaaaacttagctccctgggacattcttcaattccacatctgtttctagaaaccagccctttttccccccacttttgagaaataaaaaagccttaggtaaataagtcattctccctagcagagccacttgggtctcctgcatggaagccgtcacacttgggcaggtgttcagtgactggtaggtgtagatacagcaggagtggccatgtggtccacggctttttaccccttcttgatcctgatttcttgggctgaatttagactctctcacagaggtggctcacagagaaggatggcagatggtgcagccaacaatgctgaccggtgcttatcct

SEQ ID NO: 19873 - DNA, 480 bp, Homo sapiens
ctagcccgcctgaggaattagactcggctgcaggaattccgcacgagcagcggcgaggccggccgcgaagatgccagtggcggtgatggcggaaagcgcctttagtttcaaaaagttgctggatcagtgcgagaaccaggagctcgaggcccctggaggaattgctacacccccagtgtatggtcagcttctagctttatatttgctccataatgacatgaataatgcaagatatctttggaaaagaataccacctgctataaaatctgcaaattctgaacttgggggaatttggtcagtaggacaaagaatctggcagagagatttccctgggatctatacaaccatcaacgctcaccagtggtctgagacggtccagccaattatggaagcacttagagatgcaacaaggagacgcgcctttgccctggtctctcaagcgtatacttcaatcatcgccgatgattttgcagcctttgg

SEQ ID NO: 19874 - DNA, 499 bp, Homo sapiens
  misc_feature (1)...(499): n = A,T,C or G
aggaggcacgggggnnnnnnaactgatgactgcaggactgtgcgaannggcacgagtgcaggaataactatataggaagatttttcctaaaatgaaagaacagcaaactcttaggatccttgttgggtggagattctatcactgctaccttggctctccaaggaatgggcttgtgctagaccgctgccctacttaacagctgcctcattgcaagggcagtttttcttgcatgggttctctatattcccagagtatgtggcacaatctgtgttgtttatatgataccagatgccccacaagaacccttattcctctcatttcacattcttcctttaatagcctccttcagatcccatacctgacccctctctaacacaaaacttattgggtaagtgactttgaaaagttttgtggcacctgacccaccccagacactagggctatcagaaggtctcctttttagcccagcacaggcccaggccactttgtcgtgtttgtn

SEQ ID NO: 19875 - DNA, 479 bp, Homo sapiens
  misc_feature (1)...(479): n = A,T,C or G
nattgacncctgatcgactgtggaantgganncaaataaagggccttctctacgtccactcatccagaggtggcccctttcagaggtggcaccttgacgaggtctttttagagctcatggatggtcagcagattcctgtgttcaagctcagtggggaaaacggtgatgaagtgaaaattgagtagagacgacccaaaagacccagcttgcttctagtccatccttgcctcatctctaccatatggccactggggtggtggcccatctcagtgacagacacttctgcaaccccagttttccagccaccagtgggatgatggtatgtgccagcacatggtaattttggtgtaattctaacttgggcacaacgaatgctatttgtcatttttatactgaatccgacagagactcctattataaatttaagataatgtaatgtatttgaaagtgctttgtataaaaaagcacatgataaaagg

SEQ ID NO: 19876 - DNA, 507 bp, Homo sapiens
aaagccccgcctgcggaattttgacacgcgctgcaggaattcggcacgaggagagagagagagagagagagagagagagagagagagagagggatttttaacgccacctgatttcttcctcatgcattcggcattctctaaatgacagatactacatcaatctgcaactatcaaaaatgaggggaaaaggttcacgctgttaacaattccatgcagtatttaaatacatttactttggcagagtatataccctccccttgttttcttgctttattctgcgcaagtttgaaggagaaaatttgcgctgctgttagcgcaactgctgtgtatgttgagccactgttgacatgccagccacgcgcaaaggcagcttatctactgaggtagcgaatgttctgaggacattctacacaacagcttagttcctttctcacgctcatttgcttttgcttttttggagagagattccaatcagaaataacgcttttaataattgtgtgaaaaaaa

SEQ ID NO: 19877 - DNA, 410 bp, Homo sapiens
  misc_feature (1)...(410): n = A,T,C or G
attccccggctgcggaattcggacgagccctggctgccctccggaagggcctggcggnggggatgctgggcatgtgtttccagcgtccttgccccagctgttccagctcagtctccaccaccttcttctctcccaggtggccataaaagacaagcaggaaggaattgagtaggggccagagggggctctgctcggcctgtgagccccgttcctacctgtgcctgaccctccgctccaggtaccacaccgaggagagcggccggtcccagccatggcccgccttgtggccacccctcaccctgacaccgacgtgttggccacccctcaccctgacaccgacgtgtcctgtacatagattaggttttatattcctaataaagtatagcgggagaaaaaaaaaaaaaaaaaaa

SEQ ID NO: 19878 - DNA, 496 bp, Homo sapiens
  misc_feature (1)...(496): n = A,T,C or G
gaaggagaaagaaattagangcctcgaccgcctgcaggaattcggcacgagctttaagggggaaagcacttccatgcattgctgtaaattggtacatcttctactgagaacaatccggcagtagttaacaaaattgtgaatgcatatatctctttctctagaaatttctcttttgggaatttattctacatatatattcaaacatgtgtgaaatacttctatacaggtgattgaatttcactttattcctaagagcagaagactgccaaatagtaaatatatacccaaaagggtctaatggattagtttttggcatatcagcacatgataatactatgaagccataaaaaagagagatctctatatgtattgatgggggaccatctttaagatatactgtggtgttgaacaaaacaacatgctgaaaatgtctcttattcttttagaatcaatataagtctgtgcttgtaaatgcagtaagtatctttggaagtan

SEQ ID NO: 19879 - DNA, 499 bp, Homo sapiens
  misc_feature (1)...(499): n = A,T,C or G
tggagcaggggggggnnntttgatcggctgcatgaactctgcacgagcgggctgcgggagtgccctgctctggcctcgcttgttgctcttcggggactccatcacccagttttccttccagcagggtggatggggagcatcgctggctgacaggctggtcagaaaatgtgatgttctgaatcgtggattttcaggttacaataccaggtgggccaaaattatccttccaagattaatcaggaaaggaaacagtttggacatcccagtagcagttacaattttctttggggccaatgacagtgcactaaaagatgagaatcccaagcagcacattcccctggaggagtacgctgcgaacctaaagagcatggtgcagtacctgaagtccgtggacatccctgagaatcgagtcattctcatcacgccgaccccactttgtgaaacagcctgggaagaacagtgcatcatacaaggttgcaaactaaatcgcctgaactct

SEQ ID NO: 19880 - DNA, 476 bp, Homo sapiens
cttcgcccgcgctgcaggaattcggctcgaggtggacaagtgtccctgtgatgctgaaacagatcaagccccagagggggagaagaaaaatagatagctgctgttaaaacaaaattatcctttaagtctgcttaattacttgaaaattgtacatattactaaagaattatgcaatgagcctactctggttaagatgttcttttcctcaaaggtgccctagtgccatgatttaaatatttttattaccattttgaaatggagaagccattctgcatatgcctttgaattcctgcccctctttaccacctcttcctccccctcaaaggaaaaacatttcatccaagtaagttaacggcattttctgtaggattttcttatgcactgcacactctggacctcacctgcagatacagttccccccttgccaggagcatctgcatgtggtacttctcttttccctcagttgatatttctta

SEQ ID NO: 19881 - DNA, 497 bp, Homo sapiens
  misc_feature (1)...(497): n = A,T,C or G
aggttgctnnaactgacggacctcgtattcggcacgagaattgcagaagctggaagtggtcatatgaactacattcaagtaacacctcaggaaaaagaagctatagaaaggttaaaggcattaggatttcctgaaggacttgtgatacaagcgtattttgcttgtgagaagaatgagaatttggctgccaattttcttctacagcagaactttgatgaagattgaaagggacttttttatatctcacacttcacaccagtgcattacactaacttgttcactggattgtctgggatgacttgggctcatatccacaatacttggtataaggtagtagattgttgggggtggggagggagggatctaggatacagggcagggataaatacagtgcatgtctgcttcaattagcagatgccgcaactccacacagtgtgtaaaatatatacaaccaaaaatcagcttttgcaggtctttatttcttctgtaaaacagta

SEQ ID NO: 19882 - DNA, 487 bp, Homo sapiens
  misc_feature (1)...(487): n = A,T,C or G
attagacccgcgctgcangaannncnattagcccccgcgctgcaggaattcggcacgagcaggcgtgagccaccacacccagctgagtttatcaaaattgaatcagtctaagggcctcttgaaggaaaaagttaatattttaaggacacattttataattaaatgttttgaatttcatttttcagttttcatgattcaaactgagtaattaacatttgtactatatataaagatatttgctaagccaattatagtgtatttttaaatgttactggaatataatatacatatagagaaatgcacgtatgagtgaacagttaaatgaatctgtaaagtcagcatcccctgtgtggtccacacctacattgaaaaatgggatctgaccagggctctggaggcctcctgctccttctgaggcactgccccttccctagggatgagtgcctggctcctggtgccatagactgctctgttagtttcgttcttt

SEQ ID NO: 19883 - DNA, 448 bp, Homo sapiens
atatgaccttcgctgacgattcggcacgaggatagactgggttgtttcaatctaacagtcaaaggtcatgctaaatgtgtagaagttgtaaaaacttttaacttaccattactgatgcttggaggaggtggctacacaatccgtaatgttgctcgatgttggacatatgagactgcagttgcccttgattgtgagattcccaatgagttgccatataatgattactttgagtattttggaccagacttcaaactgcatattagtccttcaaacatgacaaaccagaacactccagaatatatggaaaagataaaacagcgtttgtttgaaaatttgcgcatgttacctcatgcacctggtgtccagatgcaagctattccagaagatgctgttcatgaagacagtggagatgaagatggagaagatccagacaagagaatttctattg

SEQ ID NO: 19884 - DNA, 496 bp, Homo sapiens
  misc_feature (1)...(496): n = A,T,C or G
gggtgcagggggnngnnnttagacggttgtaggacttacgcgaggcctgtggaagctgcagaccatgctgagcaggaaagggaagaagcagcagaaagacctggaagctccccggaagagggacaagaaggaagcggagcctttggtggacatacgggtcacagggcctgtgccaggtgccttgggcgcggcgctctgggaggcaggatcccctgtggccttctatgccagcttttcagaagggacggctgccctgcagacagtgaagttcaacaccacatacatcaacattggcagcagctacttccctgaacatggctacttccgagcccctgagcgtggtgtctacctgtttgcagtgagcgttgaatttggcccagggccaggcaccgggcagctggtgtttggaggtcaccatcggactccagtctgtaccactgggcaggggagtggaagcacagcaacggtctttgccatggctgagctgcagaaaggn

SEQ ID NO: 19885 - DNA, 500 bp, Homo sapiens
  misc_feature (1)...(500): n = A,T,C or G
aggaggcagggnccnnnnnntttgatcgatagtcaggactctgcacgaggcctctcttggaccctgagagtgagggtgggtgtgggtggaagcctcagaggccttgggagctcatccctctcacccagaatccctctaaccccttgggtgcggtttgctcagccccagcttatctcctcctccacgctgtgtaaatgctccagcactcaataaagtgggctttgcaagctaaaaaaaaaaaaaaaaaaaaaaaaaaaaaaaaaaaaaaaaaaaaaaaaaaaaaaaaaaaaaaaaaaaancccgggggggggggccccgcccccaatttccctttaggggggggtggaaaaaacctgggggccgggttttaaaaaagggggggggggggaaaaaccgggcngntggtgtttggnggtcaccatcggactccagtctgtaccactgggcacgggagtggaagcacagcaacggtctttgccatggctgatctgcaaaaaggg

SEQ ID NO: 19886 - DNA, 493 bp, Homo sapiens
  misc_feature (1)...(493): n = A,T,C or G
gctggttttaactgacatccggtcatcgcacagcanaanaaccttactggttaaacttctccggagcatcttggggaatttatattcctttgtgagaaatgttttgatcataagcctacaatgataagctaaagaaataaagataattctactgcttgttctcacccggatacaaagcatgagtttgaagacaataagagccttgtccacattttgcgagagacaacagttaaatactccaaaatacgttcttttcatggtcagtgtcagcttgatttatgtcgacatgaagttcggtatggctgtttaagggaagatgagtgcttttatgcccatagtcttgcggaactgaaagtctggataatgcaaaatgaaacaggtatctcacatgatgctattgctcaagagtctaaacgatattggcagaatttggaagcaaatgtacctggagcgcaggtacttggtaatcaaataatgcctggatttttaatat

SEQ ID NO: 19887 - DNA, 489 bp, Homo sapiens
  misc_feature (1)...(489): n = A,T,C or G
nggctggctttaaattgaatgccgaattgatcggcantcagnaannnggcacgagcaaagctcccctgcggccccgaggaagaagagcaaggttgaggacagcctcgggtcaccagagtagtttggaggcaggcctgcaggcgcgtccccgctcctcagctccaagctgacgtatctacacctgccggcgggcattaagatggctggttatgccactactcccagccccatgcagacccttcaggaggaagcggtgtgtgccatctgcttggattacttcaaggaccccgtgtccatcagctgtgggcacaacttctgccgagggtgtgtgacccagctgtggagtaaggaggacgaggaggaccacaacgaggaggaagatgaatgggaggaggaggaggacgaggaagcggtgggggccatggatggatgggacggctccattcgagaggtgttgtatcgggggaatgctgacgaagagttgttcca

SEQ ID NO: 19888 - DNA, 477 bp, Homo sapiens
  misc_feature (1)...(477): n = A,T,C or G
ccttcgcncgcgctgcaggaattcggctcgagtgacattcagatttgcgaaaacatacagtaggaaaggtggaaatggcagttcaaaattcgatgaagtcttttccaacaaacggactacccttagcacaaaatggggagagaccacatttatggctaaattagggcagaagaggcccaatttcaaaccagatatccaagaaattccgaagaaacctaaagtggaagaagaaagtactggagatccttttggatttgatagtgatgatgagtctctaccagtttcttcaaagaatttagcccaggttaagtgttcctcttattcagaatctagtgaagctgctcagttggaagaggtcacttcagtacttgaagctaatagcaaaattagtcatgtggtcattgaagacactgtcgtttctgataaatgcttccctttggaggacactttacttgggaaagaaaagagcacaaaccg

SEQ ID NO: 19889 - DNA, 472 bp, Homo sapiens
  misc_feature (1)...(472): n = A,T,C or G
nattgacttcgctgacgatttcggcacgagccacctcgcgcgcgcctccaggagcaaggatggagaggctgactctgaccaggacaattgggggccctctccttacagctacactcctaggaaagaccaccatcaatgattaccaggtgatcaggatgcccttctgtcatctgtctacctacagcctggtttgggtcatggcagcagtggtgctgtgcacagcacaagtgcaagtggtgacccaggatgaaagagagcagctgtacacacctgcttccttaaaatgctctctgcaaaatgcccaggaagccctcattgtgacatggcagaaaaagaaagctgtaagcccagaaaacatggtcaccttcagcgagaaccatggggtggtgatccagcctgcctataaggacaagataaacattacccagctgggactccaaaactcaaccatcacctttctggatatcaccct

SEQ ID NO: 19890 - DNA, 507 bp, Homo sapiens
  misc_feature (1)...(507): n = A,T,C or G
agcggggnngnttttgccttgatggctgtcgctcgaacgcacaagtgttggacagccggagtcagtctccatggagattatctttgataacagatttcttctggggaatagctgagtttgtggttttgtttttcaaaactctgcttcagcaagatgtgaaaaaaagaagaagctatggaaactcatctgattccagatatgatgatggaagagggccaccaggaaaccctccccgaagaatgggtagaatcaatcatctgcgtggccctagtccccctccaatggctggtggatgaggaaggtaaatgtctgctctaagaagcagacaaccggacatgcgcattcatagcagaaggaaaccatcaagaagtggaaggctgaccatgatgagcagtagatgaatgtgtatgtctaaacaaggactgctctgtgtcctcacagatgaatgaggtcatgctgggaattccctctgcagggaactggcctgactgacatgcagttccatan

SEQ ID NO: 19891 - DNA, 500 bp, Homo sapiens
  misc_feature (1)...(500): n = A,T,C or G
agtggnttttntttgaattcgtagcttanaaacccacgatccttacatatctttatagctacaaagccctgtgaggttttgaaaaacttccttggtacccaaaaccaggtctgaggcacagtcagtgaatacctgtttaatgaatgcatgcataaatgaatgaatggatgatccagctcttcctggagcaggcacgacttccacagaaacagagcaaacgctagccgtaagcagaagtgagtcttcttcctatgtgaagggatgtgggggtggtacgcccctatcaactttatctttacatagtccttgagcgcccaccgggcaccgtgttccccggactagagggagggagaggggggttagctccacccttaacaagcttaattcttgatgagattaaccatcaaaacccatcagagaacgttatagctccagcgctgaatgagacatctttgattctgtggtgatgcggactntgtgcctctctgtgaagaatactt

SEQ ID NO: 19892 - DNA, 451 bp, Homo sapiens
  misc_feature (1)...(451): n = A,T,C or G
cggagcgtnnannnaattgccccgctgcggaattcggcacgaggcgaagcaaaatcctcctggggctcaacttctatggtatggactacgcgacctccaaggatgcccgtgagcctgttgtcggggccaggtacatccagacactgaaggaccacaggccccggatggtgtgggacagccaggtctcagagcacttcttcgagtacaagaagagccgcagtgggaggcacgtcgtcttctacccaaccctgaagtccctgcaggtgcggctggagctggcccgggagctgggcgttggggtctctatctgggagctgggccagggcctggactacttctacgacctgctctaggtgggcattgcggcctccgcggtggacgtgttcttttctaagccatggagtgagtgagcaggtgtgaaatacaggcctccactccgaaaaaaaaaaaa

SEQ ID NO: 19893 - DNA, 477 bp, Homo sapiens
  misc_feature (1)...(477): n = A,T,C or G
caattgcaccgccatgnattagtcctgccatgcaggaattcggcacgaggagagagagagagagagagagagagagagagagagagagagagagagagagagagagagagagagagagagagagatttatttcttagcgctcttttcacaaaaagggagagtgcacgggttctttaaaacgccgcgcgggggacaaaaaagagagctgctttcaaatagagtgaatactttgtgcacagagtgagcctcatctttgtcttcccactgccagaacatggatccctctgagagagagtgatatatattcccttagagtgagagagccctctcttctggctctgtgactactatgggtgtatagaactactgataatcacgtattgaggtggtgtgcacacacatctgtgttcaccattaaagagcgggaggtatgttacacactctctaaaaaaaaaaaaaaaaaaaaaacgggggggg

SEQ ID NO: 19894 - DNA, 506 bp, Homo sapiens
  misc_feature (1)...(506): n = A,T,C or G
gggggggccnnnnaattgcactggctgcaggaattcgccacgagcagggctgtacccagcctccctggtaagcagagactcaagaaacctctggggtcctgttttctggtcgtgtgatcccaggggtgcacatgggccccttgggtgtctgaacagaagggcatgggagggagggctgcacccctgcagtcttactctgctggtgtagcgggcagctgcccactcccaccccaccctgcaccgcgggctcctgagtcggcagattaagcattttataaattgtattttaaatacatgttttaaacttgtcanaaaaaaaaaaaaaaaaaaaaaaaaaaaaaaaaaaaaaaaaaaancccggggggggggccccgcccccccttcccccttaaggggggggttataaaaattgggggggcggggtttaaaaaggggggggggggggaaaaaaaannnnnntntngtggggccnttttnntcttctgtggctgcgctgtgttttgnct

SEQ ID NO: 19895 - DNA, 468 bp, Homo sapiens
  misc_feature (1)...(468): n = A,T,C or G
nggtgccattgatcgtctgcatgaattcggcacgaggaggcaacttcagtgtccctgttagagcaacacgggtccctccgtggggggctgggtgcggccccctgccgtgtatttcctccccagggagtggggcctccccgggagctgacgccaccaccctgcttagccctcacagggccccaaggtgtccgagtgtgttgggtctgaacgcgaaataaagaaatcctctcagaaaaaaaaaaaaaaaaaaaaaaaaaaaaaaaaaccttggggggggggccgggcccccatttccccttttgggggggggtttaaaatttctggggccgggttttaaaaacggggggggggggggacnnnnnnncnnntttnntnnnccnnttnttnntttcttttcttctgttcncaaaacccctatccttntataccttccttactctcacctcnnnnccttacaccataactctc

SEQ ID NO: 19896 - DNA, 464 bp, Homo sapiens
catggcgggcctgatagacggcctagcaccgcgctcgctccgagtttcaggctcgtgctaagctagcgccgtcgtcgtctcccttcagtcgccatcatgattatctaccgggacctcatcagccacgatgagatgttctccgacatctacaagatccgggagatcgcggacgggttgtgcctggaggtggaggggaagatggtcagtacgacagaaggtaacattgatgactcgctcattggtggaaatgcctccgctgaaggccccgagggcgaaggtaccgaaagcaccgcaatcactggtgttgatattgtcatgaaccatcacctgcaggaaacaagtttcacaaaagaagcctaccagaagtacatccaagattacatgaaatccatctatgggaaacttgaagaacagagaccacacagagtacaaccttttatgacaggcgctgcagaacaaatcag

SEQ ID NO: 19897 - DNA, 507 bp, Homo sapiens
  misc_feature (1)...(507): n = A,T,C or G
agggatgccagggggccnnnnnnnccttgctcggattagagcgacctgtacgaattcggcacgagcgcagaggaacaaagcctgggcccttcttctagaagggtccgtattggctgaacaatctctgcagtggattcaacctggtctggtccccttgggggtttggggtgggatgttatcctggaggactccttcctgaggtctgctgcaggtgtctttgaattcagcagagtgaagttcctcggttattcctgtctgactggggtcaatttcctcttttattaacggaacagctctttcctcaggagaacctatttcatggatttaggtaggactgactcggtagtgtacataactgtttaatggccagctgggggcaggcggaggggacagggaggaaagccttgatttgtagcatttgccaatttccatggtgtaaatactcccccactaccagcttcaagctacagacataacatcactgagacgtcactgaccttggactcn

SEQ ID NO: 19898 - DNA, 406 bp, Homo sapiens
  misc_feature (1)...(406): n = A,T,C or G
agcggggtnnnaattgttactctcggctgtggaattcggcacgagcctgttccctgagttctagaggaagaattgtacctgtctcagtcccggccacctccagaaggcctccctctgcatttctgactttgctgtgccggcagcctggagcctcccaggtccctgctgtcatcttttctagccactacagtctctgtctttcctttcacagccaagcttcttgaaaggcctgtctacacttgctgtcttccttcctcacctccaatttcctcttcaacccactgcttcctgactcgctctactccgtggaagcacgctcacaaagtgcaagagagaatgagtgagagagtgagagagagagaaacaataaaaaatgggaagaaatgtaaaaaaaaaaaaaaaaaaa

SEQ ID NO: 19899 - DNA, 375 bp, Homo sapiens
  misc_feature (1)...(375): n = A,T,C or G
naacgacggctgcaagtagacggcacgaggtcaggggaagaaggcgtcctgttctcgcctctacggacatcagagcttgctgcgctgacctccagtgagacccatgtccttagccatggtcacaggtttagtccagcagtctggccctaggctcctgcctaccactcccaccctaggaggccagtgttaggcggggaagccctggtctctgacctctccgctctaaaatcatatccagccctgatggccacacccaggttaggaggcaccagtaatatcgctgtagagggcccaatgtttgcattttgtactttgccgtccttaactcttgatacaataaaaactattttttcatctaaaaaaaaaaaaaaaaaa

SEQ ID NO: 19900 - DNA, 482 bp, Homo sapiens
  misc_feature (1)...(482): n = A,T,C or G
attagaccgccttgaggaactcggcacgaggggaaaccaaggtcaggaggccgttgcagacataaatctcggcgactcggccccgtctcctgagggtcctgctggtgaccggcctggaccttggccctacagccctggaggccgctgctgaccagcactgaccccgacctcagagagtactcgcaggggcgctggctgcactcaagaccctcgagattaacggtgctaaccccgtctgctcctccctcccgcagagactggggcctggactggacatgagagccccttggtgccacagagagctgtgtcttactagaaacaacgcaaacctctccttcctcagaatagtgatgtgttcgacgttttatcaaaggccccctttctatgttcatgttagttttgctccttctgtgtttttttctgaaccatatccatgttgctgacttttccaaataaaggttttcactcctctaaaaaaaaan

SEQ ID NO: 19901 - DNA, 496 bp, Homo sapiens
  misc_feature (1)...(496): n = A,T,C or G
agcgggtnnnnattgagtacgtcttcgngaaccggcacgagattttcgttggtggtgttcagttgtggcggttgctggtcagtaacagccaagatgctgcggaatctgctggctcttcgtcagattgggcagaggacgataagcactgcttcccgcaggcattttaaaaataaagttccggagaagcaaaaactgttccaggaggatgatgaaattccactgtatctaaagggtggggtagctgatgccctcctgtatagagccaccatgattcttacagttggtggaacagcatatgccatatatgagctggctgtggcttcatttcccaagaagcaggagtgacttcagtcatcccagcaatcgcttggttcagtttcattcagctctctatggaccagtaatctgataaataaccgagctcttctttggggatcaatatttattgacttgtgagaaccgtgccccaataaagcagtctttaccatgaaaaaaa

SEQ ID NO: 19902 - DNA, 474 bp, Homo sapiens
  misc_feature (1)...(474): n = A,T,C or G
nattggcctgcgctgcacgaattcggcacgagccgccctgtcccagggctacaggatgccccgtgtggagaactgcccagatgagctctatgacattatgaaaatgtgctggaaagaaaaggcagaagagagaccaacgtttgactacttacagagcgtcctggatgatttctacacagccacggaagggcaataccagcagcagccttagagcacagggagacccgtccatttggcaggggtggctgcctcatttagagaggaaaagtaaccatcactggttgcacttatgatttcatgtgcggggatcatctgccgtgcctggatcctgaaatagaggctaaattactcaggaagaacaccctctaaatgggaaagtattctgtactcttagatggattctccactcagttgcaacttggacttgtcctcagcagctggtaatcttgctctgcttgacaacatctgagtgcn

SEQ ID NO: 19903 - DNA, 482 bp, Homo sapiens
  misc_feature (1)...(482): n = A,T,C or G
aatagaaaacttgagagcctgcggaattcggcacgagctgaactagtgagatgacccacactggttactgagacttggtcaggtaggtgtggagagctgacccgtggcagaggagtttgttccctttcacagggcagcgcaagtgtttttttcaatagctccacctaggtatctgtctccaggcaatggacagtgctaagcgggaggagctcaggccctgtagtgctgaacccctgtcagtctcattacagatggcaccatgttcaagaggccaagaagagacccagagccagcacacgtgacatggggttttactgcacgggagagtccacaggtggctggctggacaagataactgcatggcccatcaaataaagagccctaaggttcatgatatttcactggcgacatcccattccaatgccctgtagctaatgtgatattcctaattttgtatgatttttctaaagaggacccccaan

SEQ ID NO: 19904 - DNA, 507 bp, Homo sapiens
  misc_feature (1)...(507): n = A,T,C or G
aggggattctgannngcccgtnggattactgccccgcgctgtangaattcggcacgagcggacattcagactgagcgtgcctaccaaaagcagccgaccatctttcaaaacaagaagagggtcctgctgggagaaactggcaaggagaagctcccgcggtactacaagaacatcggtctgggcttcaagacacccaaggaggctattgagggcacctacattgacaagaaatgccccttcactggtaatgtgtccattcgagggcggatcctctctggcgtggtgaccaagatgaagatgcagaggaccattgtcatccgccgagactatctgcactacatccgcaagtacaaccgcttcgagaagcgccacaagaacatgtctgtacacctgtccccctgcttcagggacgatcagatcggtgacatcgtcacagtgggcgagtgccggcctctgagcaagacagtgcgcttcaacgtgctcaaggtcaccaaggctgccggcacc

SEQ ID NO: 19905 - DNA, 511 bp, Homo sapiens
  misc_feature (1)...(511): n = A,T,C or G
tgtggggttttnaattgaccttgcatatgcattcggcacgagctcaggttaaaactacattcactataactcagtaaagcagtcccgcccactctccgacccatgcagaaataggcctagagagtcacatgtctcagttcagaaatctatcgaagtggcagagctggaattcaaacacaagcagccgttctctgctattccaccctggtgtccaagcaacatggtagggcagaaggaagaggatcttacaaagagtaagggaaagggagaggggcagaggctgcttctcagagccaccaaaggacaaaataagacaggtgtgagcccagtggaggaggcacggggcagagaccagccactgttgctggcacgctggtgcacgtagcactgtggcagatggacctggagaggaagcaggagggacagcacaatggagccaagaaaggacttagcatggccgggcgcggtggttcatgcctgtaatcccagcattttgggaggccaaggtggn

SEQ ID NO: 19906 - DNA, 483 bp, Homo sapiens
  misc_feature (1)...(483): n = A,T,C or G
atangaccnccgntgnaagaanncnatagaccccgcgctgcaggaattcggcacgagtcggaacgagactgcacggattgttttaagaaaatggcagacaaaccagacatgggggaaatcgccagcttcgataaggccaagctgaagaaaacggagacgcaggagaagaacaccctgccgaccaaagagaccattgagcaggagaagcggagtgaaatttcctaagatcctggaggatttcctacccccgtcctcttcgagaccccagtcgtgatgtggaggaagagccacctgcaagatggacacgagccacaagctgcactgtgaacctgggcactccgcgccgatgccaccggcctgtgggtctctgaagggacccccccccaatcggactgccaaattctccggtttgccccgggatattatagaaaattatttgtatgaataatgaaaataaaacacacctcgtggcaaaaaaaaaaa

SEQ ID NO: 19907 - DNA, 488 bp, Homo sapiens
  misc_feature (1)...(488): n = A,T,C or G
nagtgggattgacttcgttcgctgtagaattaggcacgagcagccatctccttctcggcatcatggtcgccctcagaccccttgtgaagcccaagatcgtcaaaaagagaaccaagaagttcatccggcaccagtcagaccgatatgtcaaaattaagcgtatctggcggaaacccataggcattgacaacagggttcgtataagattcaagggccagatcttgatgcccaacattggttatggaagcaacaaaaaaacaaagcacatgctgcccagtggcttccggaagttcctggaccacaacgtcaaggagctggaagtgctgctgatgtgcaacaaatcttactgtgccgagatcgctcacaatgttgcctccaagaaccgcaaagccatcgtggaaagagctgcccaactggccatcagagtcaccaaccccaatgccaggctgcgcagtgaagaaaatgagtatgcagctcatgtgcacgtt

SEQ ID NO: 19908 - DNA, 497 bp, Homo sapiens
  misc_feature (1)...(497): n = A,T,C or G
aggagggaggggnngnnnnnnaattgaacgtgtgaggccgctctgcactgngtagagctgggcctagagctcagtcacaggcctgggcttcctggcctgagtgggtagacgcaggcggcagaggtgctggaccacatctccgccaagtcactgcccagcagccttctccgtcctgtccccagcccacgtgctccttgggtgtcagcttcctgtgcctctgtgggagagggcagctgccttgtgttatgtctggggccacagctgctgcaaagtcctggatctgccactcaaccccgggagtggtgttcccagtgtggctcccagagctttgaccagattgtgatcccagctggcccctatgttgtgttctggactgaggcctttgctgtgaactgcagtgtttcatacgaaccatctttcctagtgcatgagaaataaagattatttaagtaatgaaaaaaaaaaaaaaaaaactcctcgtgccgaattcggcacaa

SEQ ID NO: 19909 - DNA, 495 bp, Homo sapiens
  misc_feature (1)...(495): n = A,T,C or G
ggcgagccnnnnnnnttttgaaaaattgatcgccctgcacgaattcggcacgagtttcaaggaaggaaactctggtacggtggcaccctcaggagtggaggacagtgaacttccttgaagagggagtgactaaggtgacctccaacctgccctgagccagctgccctgcaggtgccacgtgagcctgctctggcatccacaggatgctcctggagcctcttctctggctgctacctcagggcatggttgtggccccaccaacacctattttccaaataattattcattcttgtgacagtggcctgaacatgtttttaattttctcaacaagcatttagccagcacttatccagtgaaacaatttgataaggtttcaaggagtatctgatgggttaggaagtcacgaaatgaggagttcttgccacatttgcagagtccctccttgataaggtttggcggtgtccccacccaaatctcatgttgaattgtagttcc

SEQ ID NO: 19910 - DNA, 495 bp, Homo sapiens
  misc_feature (1)...(495): n = A,T,C or G
aggggttnnnntttatcgcaccgctgcaggtgtgggtctgctgggtggcagaaatggttccttccggcttggcgttctctcctggccactcttcctgctgcctctgactactcagccttgttttcggtgtgtaggccccagctgcccactggaactgccggctaatgcttgctctcccaagatctttaactcctcctggctgcacctgggtagggatggtggcatcgatgcccctctgtctgctgaaggacctgttgctgcttctgtcttttcacccctccttggcttgatgacccacagccctctgatgatggcattctcctggcaagagaaaaagacttaactagacttctgaacttgaacagtttcaggttatattttaatttttttttttttgaacaggttctgattctaatacatttcaacatgctttggtcagaaaaaaaaaaaaaaaaattggggggggggccggcaccaattccccctaaatggggt

SEQ ID NO: 19911 - DNA, 503 bp, Homo sapiens
agggggttttaattgacttctgtggacttcgcacgagccaggaggagcagcaggatgacacagtctacatgggcaaagtgaccttctcatgtgcggctggttttggacagcgacaccggctggtgctgacccaggagcagctgcaccagcttcacagtcgcctcatctcctaagcactcctttcccctgctgttcccttcgaccctcagccctctggtgccgctctgcccgatgcacagccacctcagccagcccccaggtagaaacgtgggttaagctcttcctgccccgttcagcttcactcccaccctttcagcgtcctgccccttcaccttgacccgggttcccccactcccattccctggcctctgccataatttgttgttcaactgctccctccttcctgaggggcctcagggcttgtggggggtaggctgagaccccaccaccaaaggttaagtgaggtccccttgattgaggacttcaccccttgattaaagcaa

SEQ ID NO: 19912 - DNA, 485 bp, Homo sapiens
catcgcccgcctgtgccccggctgcaggaattcggcacgagcacctctgagctgcctccctgccaccggaagtgactcccctcagcaaggccaaggtggctcacgtgtcccatcaccctttcatctctgcccttctctctcgagtgacagcatggcgtgacatgagggctctccagccatggccttgcagccctcttggggtcttgctgtcacccaggctggagtgcggtggtaagatcagggctcactgcagccttgaactctgggactcaagggatccttctgcctcagcctcctgagtagctggggccacaagcgcatgccactgtggctggttaatcttttcattttctgtagagactggtctcactatgttgcccaggctggtctccaactagtggcctcaagtgatccctcacctggaccttccaaagtgctgggattacagttgtgggccaccatgcaccgggcctagttctgtttct

SEQ ID NO: 19913 - DNA, 483 bp, Homo sapiens
aggccttccctttgaccgcctgcataattcgcactagggcaaatacacgaaggtctcagactcctatgcctctgtcattaaggctctggagcattctgcactggccatcaaccacaaattggaaatcaagtacatagattctgcggacttggagcccatcacctcgcaagaagagcccgtgcgctaccacgaagcttggcagaagctctgtagtgctcatggagtgctgggtccaggaggatttggtgttcgaggaacagaaggaaaaatccaagcaattgcctgggctcggaatcagaaaaagccttttttgggcgtgtgcttacggatgcagttggcagtggttgaattctcaagaaacgtgctgggatggcaagatgccaattctacagagtttgaccctacgaccagtcatcccgtggtcgtagacatgccagaacacaacccagggcagatgggcggaaccatgaggctgggcaagag

SEQ ID NO: 19914 - DNA, 508 bp, Homo sapiens
  misc_feature (1)...(508): n = A,T,C or G
ggggncgnnnnnnnttttgatcgcccgcctgcaggaattcggcacgagtcgcctcgcccctccgcgagcagggctctggcgcccgcccctgtccgcaccgctggcagcctgaagagagtcgctggccgtggtcgccgctaggtaggatatatctgcatcttgaaaggaagataaaacaaaagccttctttggaatagatggatttttgtcactttctgtgtgaactaaagtgattcaatgtctcttttggattgcttctgcacttcaagaacacaagttgaatcactcagacctgaaaaacagtctgaaaccagtatccatcaatacttggttgatgagccaaccctttcctggtcacgtccatccactagagccagtgaagtactatgttccaccaacgtttctcactatgagctccaagtagaaataggaagaggatttgacaacttgacttctgtccatcttgcacggcatactcccacgggaacactggtaactataanaatta

SEQ ID NO: 19915 - DNA, 324 bp, Homo sapiens
acggactaaaatcacatagtgctagaatcacaggcatgagccaccgtgctgggagggaagtctgtattgttcctgcgttcaacccagtgcatagtgcatgagaagaggaggcagtttatgggcccagaaccaaacggatggggctgcttgaggaacaaagtaaaaaccattctgattgccaacagctgcctacgcaagaaacacccttgcaacctccgtggcggggctcttccaggacacccctcgatcccagagtctcctgcccgtccagagctctcaggatgctacagaccgagcggacaactcttcccttgcaaacttgga

SEQ ID NO: 19916 - DNA, 457 bp, Homo sapiens
  misc_feature (1)...(457): n = A,T,C or G
nggggnacttctgancgccctgtangaatcttgacacgcgtgcagaaactctccaccatgggatctttacttcttcggtttatcttccactgctcatgcctctgtcttcataaatggtaatttcaataactcgcagtcctcgctcaatagggtctgtcaggaggaggccttgtggagcatagatcttctcattctgctcttgaatgtatttggagactttcttcagaaccttctcataatgagtttccatgcataggaagatggtatatgctgttaaacaagccaaacaaccttcgagatatgactggccgccgagcttctctgcttctgcataaaggttatttagagttcgaactgtttcttcaaactgctgcctatcaatccggttctccagctccgcagggaacttggtctggaactggcacgtgtgccactgctgtagtctcgctgaatgaac

SEQ ID NO: 19917 - DNA, 479 bp, Homo sapiens
  misc_feature (1)...(479): n = A,T,C or G
cgggggcanaattgaccgccctgaggaactcggcacgagcaaagacacgacggtgggcactctgtcccagcggatcacaaaccaggtccatggtttgaagggactgaactccaagcttctggatatcaggagctacctggaaaaagtcgccacaggcaagctgcccatcaaccaccagatcatctaccagctgcaggacgtcttcaacctgctgccagatgtcagcctgcaggagttcgtcaaggccttttacctgaagaccaatgaccagatggtggtagtgtacttggcctcgctgatccgttccgtggtcgccctgcacaacctcatcaacaacaagattgccaaccgcgatgcagagaagaaagaagggcaggagaaagatgagagcaaaaaggataggaaagaggacaaggagaaagataaagataaggaaaagagtgatgtatagaaagaggagattaaggagaaaaagtaan

SEQ ID NO: 19918 - DNA, 488 bp, Homo sapiens
  misc_feature (1)...(488): n = A,T,C or G
agcggttntttgatatcgatagcnttcggctagagagcactttgtggagaaagtcgtcttccacttgcacgaaagctttcctaggccaaaaagagtgtgcaaagatccaccttacaaagtagaagaatctgggtatgctggtttcattttgccaattgaagtttattttaaaaacaaggaagaacctaggaaagtccgctttgattatgacttattcctgcatcttgaaggccatccaccagtgaatcacctccgctgtgaaaagctaactttcaacaaccccacagaggactttaggagaaagttgctgaaggcaggaggggaccctaataggagtattcataccagcagcagcagcagcagcagcagtagcagcagcagcagcagcagcagcagcagcagtagcagcagcagcagcagcagcagcagcagcagtagcagcagcagtagcagcagcagcagcagcagtagtaccagtttttcatagc

SEQ ID NO: 19919 - DNA, 465 bp, Homo sapiens
aatagaccgccttaggttagcattagcctaaaattggacattgtcattgatttcaaagaaggtatgaactagcagtcttacagcctaattcttctttggactggtccttggcagcagttccttttcagactcgataaacagaattcagatgatgtaagtcaaaacaaaactttacaaagccaagcgtattatcttttgcattaacctatttttttccatcatacatgctactagtatgtgcattagcatgatattctcatatacattgcattaaaaattaaaaggtggcagctcagggtgagctcttctgttgctcatttgttcctaaatttttaagggctttttctcagtcaatagtttgtacaaactggttagtttaacttcattacccatttcattaaagttgatgggtcgtgtgatgagatgcatttaaggccgatagtgatagatgttttttttatttct

SEQ ID NO: 19920 - DNA, 341 bp, Homo sapiens
gtaacattttcttttgcctcggaaaaaattaatttcttttttgaaaaaaaaaaataaggggggaattttttttggattttccccaaaaaaaaagcattttttattttttttccatttagaaaaaggggggaaaaaaaaaataaatttggggggagggggaacacttttggaacttttaaaagggtttttttttcccctttttttacccgggccttttttttgggaggtttttttttttccaaaaaaacccctttcccaaattaaacttcaagttttgaacaatggcgcccccccatggcccccttacgaatataaaattaaaaattttcctttcttccaaa

SEQ ID NO: 19921 - DNA, 495 bp, Homo sapiens
  misc_feature (1)...(495): n = A,T,C or G
cggnnnnccncccaattcgcccgccttgacgaattcggcacgaggganaaaggctctaagcaagttcttacagcacttgtttgtgacattcagtcagataatggccagaagtttttgttaagagccagttcttagaagaacctgtgccaaggtcacccatagagtccattggtgtgaaagagaaaggcaaagaggtgtggcgggggagcgtaagatttggagtcagaagtctcagttctgtcatttgtcctggagcaggttattgagtctctttgaatcttggttttcacatctgtaaaatggaaagtcctgcttgtttcatgggatgggtgtgggaataaacaataaatgtcaaacgtgaaaaaaaaaaaaaaaaaaaaaaaaaaaaaaaaaaannnnnnnnnnnnnnnnnnncccnnnnncccccccagccaccccaaaacaaaaacaagggccggggggggccgcccgccccccnnnnaacatgnanannna

SEQ ID NO: 19922 - DNA, 507 bp, Homo sapiens
  misc_feature (1)...(507): n = A,T,C or G
tgggcncnnnnnnaattgttcgcncgcctgcaggaattcggcacgagtttactttgagatatgatggaaaaatattacaggtacacatggaaaagacatgatcaccaagtgaaaacaatctaaccagaaagctttaacgtctgtcagttaagctgaagctgaaattctgggagcatgacatgctgcagggccaaaaggaacagcctcggggccagggcatgcctgccaccccctgacaaaaacaggttccacagtgctacccttgcttcctgccccttgaggtgggccaggctggctcctggctatgcagggatctctggtccccaggagaccttgggggccaggcaggtaaggatcaggggtgataggggagagcaattactttgttcactgtatgcacccgcggnggcctgggagtccccatttgcaggtgggtagggcctccagcccacaccacccagacctatggcttcctcttctcaggatccaccacagggttaggggaca

SEQ ID NO: 19923 - DNA, 351 bp, Homo sapiens
  misc_feature (1)...(351): n = A,T,C or G
acatttttgaggatgaccggtgccttgctttccatgacatttcccctcaagcaccaacacattttctggtgatacccaagaaacatatatcccagatttctgtggcagaagatgatgatgaaagtcttcttggacacttaatgattgttggcagaaatgtgctgctgatctgggcctgaataagggttatcgaatggtggtgaatgaaggttcagatggtggacagtctgtctatcacgttcatctccatgttcttggaggtcggcaaatgcattggcctcctggttaagcacgttttggggataattttctcttctttatgcaatgattaagttanggcatttccagtat

SEQ ID NO: 19924 - DNA, 500 bp, Homo sapiens
atcgcccgcctgcggattttgcacgcgctgcaggaattcgacacgagcgggccagtttgccatgcagctttcaaagaaggcaaagtgccatgtaattggaacctgctcttctgatgaaaagtctgcttttctgaaatctcttggctgtgatcgtcctatcaactataaaactgaacccgtaggtaccgtccttaagcaggagtaccctgaaggtgtcgatgtggtctatgaatctgttgggggagccatgtttgacttggctgtagacgccctggctacgaaagggcgcttgatagtaatagggtttatctctggctaccaaactcctactggcctttcgcctgtgaaagcaggaacattgccagccaaactgctcaagaaatctgccagcgtacagggcttcttcctgaaccattacctttctaagtatcaagcagccatgagccacttgctcgagatgtgtgtgagcggagaacctgtttgtgaggtggaccttggag

SEQ ID NO: 19925 - DNA, 470 bp, Homo sapiens
  misc_feature (1)...(470): n = A,T,C or G
ctagcccgcctgattagcccgcctgcaggaattcggcacgagctttatttcagcctcacttgatcaatgttgaaggagttggtgttgctgaattgctttttaacacaattcaggcagctgacattgataccagatctgaattctacaaacacattgtgctttctggagggtctactatgtatcctggcctgccatcacggttggaacgagaacttaaacagctttacttagaacgagttttgaagggtgatgtggaaaaactttctaaatttaagatccgcattgaagacccaccccgcagaaagcacatggtattcctgggtggtgcagttctagcggatatcatgaaagacaaagacaacttttggatgacccgacaagagtaccaagaaaagggtgtccgtgtgctagagaaacttggnggactggtcgataactccaagcttgtcccatcataaaaaaaaaaaaaa

SEQ ID NO: 19926 - DNA, 463 bp, Homo sapiens
  misc_feature (1)...(463): n = A,T,C or G
aatagaccgccttttggattccgccgaggaccattgngaggtagatattttgttctaattttccagatgaggaagctgagaccctaaaaggctgaccggttccctgatgtgttacctgcttctgctactgatccaaactgcagaacttctcattcatccccaaggcctccaggcagtatccaatggggaatcagctctaaaaggaaccagaccaacgttttccagccccttcattctgtagcttccctctgtgtgaggaaaggatagaaatgttcaggacatcatcatacaggctcctcatctacaaagttccagtagcagtgacgcctacacggaagacttggaactgcaaacaggctggggtcacctcagtgacatctgacgctgtccaaccagaagttcgatttttgttctgggggtgaaggaggaaacagactgtactaaaggactaaaataatttgtn

SEQ ID NO: 19927 - DNA, 466 bp, Homo sapiens
aatagatcggcttcaggaattcgtcacgagatggccagcaggcctccgggggacctcgccgaggctggaggccgagctctgcagagcttacaattgagactgctaacccctacctttgaagggatcaacggattgttgttgaaacaacatttagttcagaatccagtcagactctggcaacttttaggtggtactttctattttaacacctcaaggttgaagcagaagaataaggagaaggataagtcgaaggggaaggcgcctgaagaggacgaagaggagaggagacgccgtgagcgggacgaccagatgtaccgagagcggctgcgcaccttgctggtcatcgcggttgtcatgagcctcctgaatgctctcagcaccagcggaggcagcatttcctggaacgactttgtccacgagatgctggccaagggcgaggtgcagcgcgtccaggtggtgcctgaga

SEQ ID NO: 19928 - DNA, 482 bp, Homo sapiens
  misc_feature (1)...(482): n = A,T,C or G
cgggaaggnnattgannccttttgaccgcgctgcaggaattcggcacgagcccatcccttgttcacacgccctgattcacggtgagacattttgccaccttcttgtgtatattacttggcatgagatgatattgtacttgtataggattctagcaattcataataaatatgtaagactaggctttactgtcttatgcttatggacattgtatatttgtattttatgaccaagtagaccaagtcagaaagatctctctcgagcgtaccataaacctgcagagagaagtctcgaaaggctccaccaggtaccaagggcagctgcttttcctgtcttttgtgcatgggcgacccattacagtatgagataagattgagttctgatgcgttaaacggaggtggcagaaatttgtcaagaaggccttatccatttcgattgtgtgacagattgaaatttattggttacattggggaatggatctcan

SEQ ID NO: 19929 - DNA, 500 bp, Homo sapiens
  misc_feature (1)...(500): n = A,T,C or G
cccccccccccccccccccctttggcncgcgctgaggaatcccgcacgaggtttattatttcatattataacattacaggnttgntttttcttgcatgtctgtccacctaatgtttaagtagttctggtagctcttcctattctttattctattcgattccatttctgtgattcttttattaccactgatgttttgcgatagataactatgataaatttaactgatcatgatttatcttctacagtatttaaataatgtctgagtgaccacccaattccaacattaaaagtgtaatctgggcccataatttatagtgaaattgtatcaaaacatagggaaactgtattactgtccattttgaaaatatgaaacttgagtattgaaaatattcacacatggaatggcagtattctaatttcagttagttggatcatgctaatttcttacctgttagatggttaaactgcagagacctttacttgtatctactctgtggcga

SEQ ID NO: 19930 - DNA, 430 bp, Homo sapiens
  misc_feature (1)...(430): n = A,T,C or G
tgtggcggttannaagnanccttgatngccctgnggnaannnncnttttgatacgcgctgcaggaattccgcacgaggttggggcggnggctgatactcctcggcccctccctaccctgccctgtgtgttggctttgtggccgtccaagtgccaattggcttttcgcccaaataagggctggtatttctcctctgtccttggaggtgatttccccctgaccccctcccccaggtgagtgaccacctgggtgccagttacaggtgtttccagagaccatagaaatgtgttttcctgagagttcgtgtcattcgtgacttttttgtaaagaagttgtgttttcagaggtgattttatgacaggaaagtgaaagaattagttttgcaaaaaaacaaaaacaaaaaaagaggaaaaaaaaaaaaaaaaaaaaaa

SEQ ID NO: 19931 - DNA, 452 bp, Homo sapiens
aattgactttcgtgcgcgaattcggcacgagaggctaccaagtccgtgctgtttgtgtgtctgggtaacatttgtcgatcacccattgcagaagcagttttcaggaaacttgtaaccgatcaaaacatctcagagaattggagggtagacagcgcggcaacttccgggtatgagatagggaacccccctgactaccgagggcagagctgcatgaagaggcacggcattcccatgagccacgttgcccggcagattaccaaagaagattttgccacatttgattatatactatgtatggatgaaagcaatctgagagatttgaatagaaaaagtaatcaagttaaaacctgcaaagctaaaattgaactacttgggagctatgatccacaaaaacaacttattattgaagatccctattatgggaatgactctgactttgagacggtgtacca

SEQ ID NO: 19932 - DNA, 466 bp, Homo sapiens
aatagatagccttagagaaccggtccgagaatgaactgcaagcacatgttgaccagataactgaaatggcagcagtaatgaggaaagccatttaaattgacgagcaacagggttgcaaggaacaagaacgaatatttcaacttgaacaagaaaacaaaggcttgagagagatccttcaaataactcgagaatcatttttgaacctaaggaaagatgatgcgtcggaaagtacttctttgtcagcattagtgaccaacagtgatttgagtctgaggaagagctgaagagtttctgagtctgtgagcttcttacatggctccaaatggtcaaataagtgaatgaatgaatggacagaaaattcaatcctttatttttttctctgtaaatatgtacagtgcacgggctatgagatagcaacaaaaaatgcatagttaatggtcatagactttattccaaaacataattg

SEQ ID NO: 19933 - DNA, 467 bp, Homo sapiens
attagaccgccttcaggaattcgtcacgagcatacacgtttgaggactatgatgtctcctttgggagtggtgtcttaactgtcaaactgggtggagatctatgaacctatgtgatcaacaagcagacgccaaacaagcaaatctggctatcttctccatccagtggacctaagcgttatgactggactgggaaaaactgggtgtactcccacgacggcgtgtccctccatgagctgctggccgcagagctcactaaagccttaaaaaccaaactggacttgtcttccttggcctattccggaaaagatgcttgatgcccagccccgttttaaggacattaaaagctatcaggccaagaccccagcttcattatgcagctgaggtctgttttttgttgacgttggttattttttttattcctgcttttgaggacagtcgggctatgtgtcacagctctgtagaaagag

SEQ ID NO: 19934 - DNA, 462 bp, Homo sapiens
attgagcgctataggcggcgcctgcccttccgcccggccgtctctggagagcagcagccatggccctacgctaccctatggccgggggcctcaacaagggccacaaagtgaccaagaacgtgagcaagcccaggcacagccgacgccgcgggcgtctgaccaaacacaccaagttcgtgcgggacatgattcgggaggtgtgtggctttgccccgtacgagcggcgcgccatggagttactgaaggtctccaaggacaaacgggccctcaaatttatcaagaaaagggtggggacgcacatcctcgccaagaggaagcgggaggagctgagcaacgtactggccgccatgaggaaagctgctgccaagaaagactgagcccctcccctgccctctccctgaaaaaagaacagcttgacagaaaaaaaaaaaaaaaaaaactcgagggggggcccggcccccg

SEQ ID NO: 19935 - DNA, 450 bp, Homo sapiens
gcactgcatcaattccgacgagcataaacgcgaggtccctgagcccgatgcaggctagtgcatcacctggcttgagttccttgctggcacagatgatacgttcatgactcgcacattaatgtttgataaggaaagcattttttttttgttaaaattgaattgtcagtactttactttttccccccaaataggttagactgcagaagcttcagtcccatatataaacgttcatgtcattttagaggattatatggttgtctccagagaaattaacttacattatcaaaaaattctttgtctaatatattggagtctttaaaagtgttgaagaataaaatattaattagaacaacttcaaatgctaaggtgatgttttaccgggacttaattaaatacaactttttcctttcgaaaagactgttcacatttgcttccaggtgaattattgct

SEQ ID NO: 19936 - DNA, 464 bp, Homo sapiens
  misc_feature (1)...(464): n = A,T,C or G
actagacagcccgttgaatgcgttcgaggaaatggaagagcaagagtttaaccggttgctagaagctacatcttaccttagtcatcaactagacttcaatgtcctcaataataagcctgtgtcccttggccaggcattggaagttgtcattcagttacaagagaagcatgtcaaagatgagcagattgaacattggaagaagatagtgaaaactcaggaagaattgaaagaacttcttaataagatggtaaatttgaaagagaaaattaaagaactccatcagcaatacaaagaagcatctgaagtaaagccacccagagatattactgccgagttcttagtgaaaagcaaacacagggatctgaccgccctatgcaaggaatatgatgaattagctgaaacacaaggaaagctagaagaaaaacttcaggagttggaagcgaatcccccaagtgatgtatatn

SEQ ID NO: 19937 - DNA, 509 bp, Homo sapiens
  misc_feature (1)...(509): n = A,T,C or G
aggtnncncnggggtnnnnnnaattgtcgccactggaatcgctccgagcccacgctggncttgaagtcctggcttcaggcaattctcctgcctttgcctccagaagcactgggatcacaggtgtcagccattgcacccagcccagattgtcttaatttctatcttgttccaaggccagggacagtaataagaatggaaaagagatatgggaacactggcagactgtgtaaaatgtaatgcaactacccaaaacaagcctggtaggaaagggcaagtctttaggtctttgtaagaactaaagaagatctgtaatttttattttcaccctctgtaccccatgaccttatccttcctctccttccttgttacccatgaaaaactggcaacattccaagaatagcatctgtacaaaggggaaagaacataaaggtaaaacaaaacacaacaacattttgagaacaaagatgaccataaccactgaagggaatcacatcttttgagacaaattc

SEQ ID NO: 19938 - DNA, 484 bp, Homo sapiens
aggtgggtattgacgtcgtcggacattcagcacgaggcggaagtgcccctgtggctggcgattaacctgaaacaaagacagaaatgtcgcctgctccctccacagtggatggatgcagaaaagttggagaagatgagggatcatgaacgaaaggaagaaacttttaccccaatgcccagcccttactacatggaacttacgaagctcctgttaaatcatgcttcagacaacatcccgaaggcagacgaaatccggaccctggtcaaggatatgtgggacactcgtatagccaaactccgagtgtctgctgacagctttgtgagacagcaggaggcacatgccaagctggataacttgaccttgatggagatcaacaccagcgggactttcctcacacaagcgctcaaccacatgtacaaactccgcacgaacctccagcctctggagagtactcagtctcaggacttctagagaaaggcctggg

SEQ ID NO: 19939 - DNA, 498 bp, Homo sapiens
  misc_feature (1)...(498): n = A,T,C or G
agggagtgccccaggnnagngnnnngattgtanngcctgatagtattgcctgtcagaatccgcacgagctcatctgaaaacaggaggcaatttcccatacctgtgcagaagtgcagaggtcaatctttatgtacagatacatttgctgcaattccatggaaccaaatacgcggccattgacccatcaatggtcagtgccgaggagcttgaggtgcagaaaggcagccttggcatcagccaggaggagcagtagtgtgtctctcgctgtcaatgatgagttgacccggtgtgttcttgtatagtcagtggcatcagcacccgtcagccggccttttccttcaggttcgtcaggctcaccggttctcactgtgtctgggaagtaggactgatggtcatcttcatgacaggcggcatctccactaagcctgtgtaactgttccctctttggttttcttagcttttgaatttgaagaagtacttttgaagactcccatttta

SEQ ID NO: 19940 - DNA, 471 bp, Homo sapiens
  misc_feature (1)...(471): n = A,T,C or G
cttgcccgcctgttgaccgcgtgcagctttnttcctgatcattcaaagaacagtttctcaaggttaagccaagtcctccttgcaagttgccaaataatagcttaggaaaagaattagtctgcctgcatgatgatcttcttaagcaaaaacgtcttcacagcccttgaccttggtgaatttttttccccaaaagcatccaaaagaagaattataaaccccagaatgagatggaaataaacaagtattttttttttatgatgtttggcctgaactgtgggctttaattgggggatactgatcgtttggaaagaagtgagaaaattctgaagaaatggcggccttgggctaggcggggtcccctatttcttctgtttctcactggaagcctactgctgagccaagactcagtcactctggaaagagcatgaccgataaagaaaacagttcctttctgatggggagcgtctgagg

SEQ ID NO: 19941 - DNA, 488 bp, Homo sapiens
  misc_feature (1)...(488): n = A,T,C or G
aggatgtnncagggcgggcccctatgaccgccttctgaattcgctcgagcggagctgggcgaagccgatgaagcggagttgcagcgcctggtggccgccgagcagcataaagcgcagtttactgcacaggtgcatcacttcatggagttatgttgggataaatgtgtggagaagccagggaatcgcctagactctcgcactgaaaattgtctctccagctgtgtagaccgcttcattgacaccactcttgccatcaccagtcggtttgcccagattgtacagaaaggagggcagtaggccatcccccaggagaatgacagaagcaaaggacttgttactaagcagatttaagggtcagtgggggaaggctatcaacccattgtcagatcagcatcaggctgttatcaagtctgttggtgctaaaaagtaaaagatgaaatgttcaaaaaaaaaaaaaaaaaacctcggggggggcccgggcccccatt

SEQ ID NO: 19942 - DNA, 504 bp, Homo sapiens
  misc_feature (1)...(504): n = A,T,C or G
nggngggannnnnatttgccccgcgcttctgcaccgcgctgcaggaattcagcacgagacctgttgttacgtggtgatgggaagtcacaggcgtgctctttctagttaatttgatgccacatcttccttgtcttttcagcttgggaaaaaggcggcagtggaggaaggcatggaatgcccacagtggtcagttcaaagaacaaacgtgcaattaaaaaactgtagtcagccaggcacggtggttcacacctgtaatcccagcactttgaaaggccaaggcgggcagattgcttgagctaaggagttcgagaccagcctgagcaacatgatgaaaccccgtctctacaaaaagtacaaaaattagccaggcgtggtggtatgccctggtagtcccagctgctcgggaggctgaggcaggaggatcacctgattctaagaattcgagactgcagtgagccgtgatcttgccactgtagtccangctgggctacggagagaccctgc

SEQ ID NO: 19943 - DNA, 509 bp, Homo sapiens
  misc_feature (1)...(509): n = A,T,C or G
gcgtgnnnaatgacgctgagaatcgccgatgcccgccgtgaccagagtgattttatggtgatgtcactcacctagacaaccagaggctggcattgaggctaacctccaacacagtgcatctcagatgcctcagtaggcatcagtatgtcactctggtccctttaaagagcaatcctggaagaagcaggagggagggtggctttgctgttgttgggacatggcaatctagaccggtagcagcgctcgctgacagcttgggaggaaacctgagatctgtgttttttaaattgatcgttcttcatgggggtaagaaaagctggtctggagttgctgaatgttgcattaattgtgctgtttgcttgtagttgaataaaaatagaaacctgaatgaaaaaaaaaaaaaaaaaaaacctcggggcctttgggggggtgggctttatttgctgccactcaaccaaaggagggacccgggcttttggcttccaaatcactgctaaacaggatacgcc

SEQ ID NO: 19944 - DNA, 474 bp, Homo sapiens
cattgaccgcaatagtaatcgctcacgagctttctttaaaaaagtaggaaccatgtaaagatgatggggacagaataattgtgaagacctctctgctcctcttgcctgcacaccctatatatatatatatcggagctaaagagctctgtgtatatttcaccccgtagacccccgttccacaaacctccagcaacatgcagaggtaccataacatttttaaaacttttattccccccctctttttttttgttttaatcagcagctcctggtagacgaagaggaagacaaacctacagtcgcttccaaactctagagttggaaaaggaatttctttttaacccctatctgaccaggaaaagaagaatcgaggtttcccacgccctagccctcaccgagagacaggtaaaaatctggttccagaacaggagaatgaaatggaaaaaggaaaacaacaaggacaaatttcccgtttcc

SEQ ID NO: 19945 - DNA, 453 bp, Homo sapiens
  misc_feature (1)...(453): n = A,T,C or G
ggggcnncaattgaccngcgctgcaatagttcggcacgagagacactttaccctcagtcactctggtcctctgagatcagctagaagctctcactgggcatcctcgtgatttagtcaaaatacattatctaattaaagtgcttttcaaaagcagctccattataagagtcccccaaaggtctagtaaagatatctagaactggaaaaagcttgggaattctgttagcatttcaaagaaaagcattagaccaaagcaaggtggaaactgcttaaaaactagaaaagttaaatttaaaagccaagttccagaagtttatccaggtagaaaataagttaaaagcataaattggagaggagaaagaggaaggaactactcacctctccccaacattcctgtctttactaaccaaccctgcttcccagagccttaaaacccagactggtcctaatgcg

SEQ ID NO: 19946 - DNA, 241 bp, Homo sapiens
atcaaagccagtgatctctctgactttcaatcagtttgcaagctaaaccagggcaagccatgcacatgcataggcaaggaatgccagtgtaagagatggcatgatatggaagtgtattccttttcaggcctgcagagtgtccctcccttggctccagaacgaagatccacacttgaggactactctcagtcgctgcacgccagaactctgtctggctctccccgatcctgttctgagcaag

SEQ ID NO: 19947 - DNA, 469 bp, Homo sapiens
  misc_feature (1)...(469): n = A,T,C or G
gggtgcncactgccctcctgcagaattcggcacgagaccactctggctcacatcatagccagcaacagcaagaaacatagcataaggtttgtgacattatctgcaacaaatgccaagacaaatgatgtgcgagatgtcataaaacaagctcaaaatgaaaagagctttttcaaaaggaaaaccatcctttttattgatgagattcatcggttcaataaatctcagcaggacactttccttcctcacgtggaatgtgggacgatcactctgattggggcaaccactgaaaacccttccttccaggtcaacgctgctcttctgagccgctgtcgagtgattgttcttgagaagcttccagtagaggcaatggtgactattttaatgcgagcgatcaactccctgggaatccacgtcctagactctagccgtcccactgaccctctgagccacagcagcaacagcagctcaa

SEQ ID NO: 19948 - DNA, 486 bp, Homo sapiens
  misc_feature (1)...(486): n = A,T,C or G
nggttggccccgcgctgcaggaanncnttttccgccgcgctgcaggaattcggcacgagggggtggggagtggtcatcactggaaccgtgatgcctgtgtttcacttggcagctttcgcactgagctcacagagagatggccttaggcgcagaatccagagagcacccctgggaatagagtgcaccctgactctgggtcagggactgagcagggaccagaaccaacttcttttctttcccacacatcatcttgtctgctaataatagagttcatcaccagtgagatttccagaataaagcccacccagctttttcccctaattatatcctctccctggtaattgcagagttgttcagggcctgcatctggcttgtaagagcatttccaggaaaaccagattgagtaccacctctcacttgatagaacaaaaggaaagttgcacactttgaaggctcagcttctccagtagaaagtaacctgtgggg

SEQ ID NO: 19949 - DNA, 486 bp, Homo sapiens
  misc_feature (1)...(486): n = A,T,C or G
aggagttcccagggggccccccatagatcgcctgtggaattccnccgaggatttatgctctgcctcttcccagcattttcttatctgtagccctgcttgcttgagagtatacttggataagaagtattgctgttgagggagctataagaaaaggattcttcttccagaagtaaagaactcatctttagagtacctttaaatgaattttgtttttctttcctattttgaggaggattggtcttctctttttttgggtttccagctcactgggactctcagaccttacctttccagctcaaacaccattagttaaattccttcattctcattataatgcagcctgctgagtatgtgggtttcactgccggagtccatcatttagccagtatacatagaggaactgcttcgaatcaaggcaactggtgaagggcttatcatgttggcagcaatatcccagagattgaatctgtttgcattttcctcatc

SEQ ID NO: 19950 - DNA, 532 bp, Homo sapiens
  misc_feature (1)...(532): n = A,T,C or G
aggggatcgaattgccggctgtangaattcggcacgagcaggatttccgctggcttcaggttccggtcaggcgtcgggacagagcctgatccaggcttcggcggccggtggcagctctcgatcagctctcgcagtcggagaggcggctaaggaaaggtgccacagcagagacgcgaaggagaggccctagaaccttttcaaagaagaatggaagaaaccatgaagcttgctacgatggaagacacagtggagtactgcctgttcctgataccagatgagtcaagggactcagataaacataaagagattcttcagaagtacattgagagaataatcactcggtttgcacctatgctggtcccctacatctggcagaatcagcctttcaatcttaaatataaacctgggaaaggaggtgttcctgctcatatgtttggcgtgacaaagtttggggataacattgaggatgaaatggttattggtatgtaataagcagatcacaaaggaattccagagtagtagcaggattgaa

SEQ ID NO: 19951 - DNA, 503 bp, Homo sapiens
  misc_feature (1)...(503): n = A,T,C or G
aggggaccttggcggctgtngaatcgcccggctgcggaattcggcacgagaaatcattttggctcctggggcaagcttggggaatgaatgtggaagatgcctatattctgagagacaggacagtttcccaggaagatgggcagagacttgagtggcgattacctccagcacagagacgtgccaggcggtgttggcgctcggggcgagatgctgcccttctttgcacgaagcctggcctcttgcttggcgtgataaccctgtcatcttcccaaagctcatttatgagccaccagaggctcctaccccaaagattttcacagaaacttgaggccaggtgccgtggctcacacctgtaatctgaacactttgggaggccgaggcgggaggatcacttgagcccaggagttcaagaccagcctgggcaacatagtgagactcctgtctctacaaaaataaaagatttaaaaaaattagccaggcacggtggcacacacttgtagccc

SEQ ID NO: 19952 - DNA, 473 bp, Homo sapiens
  misc_feature (1)...(473): n = A,T,C or G
attgcccggctgcggaattcggtacgaggcacgatgcctggagttactgtaaaagacgtgaaccagcaggagttcgtcagagctctggcagccttcctcaaaaagtccgggaagctgaaagtccccgaatgggtggataccgtcaagctggccaagcacaaagagcttgctccctacgatgagaactggttctacacgcgagctgcttccacagcgcggcacctgtacctccggggtggcgctggggttggctccatgaccaagatctatgggggacgtcagagaaacggcgtcatgcccagccacttcagccgaggctccaagagtgtggcccgccgggtcctccaagccctggaggggctgaaaatggtggaaaaggaccaagatggcggccgcaaactgacacctcanggacaaagagatctggacagaatcgccggacaggtggcagctgccaacaagaagcattagaa

SEQ ID NO: 19953 - DNA, 477 bp, Homo sapiens
  misc_feature (1)...(477): n = A,T,C or G
cttgcacgccngttgcattgcgctcgagcgactgctcaccctctctctacatctgcgatgatgctcaaaatcgcctacctgtgcctgcgtgtaaaccacagcctcagaccagctatggggagaggacaacacggagggatatccagcttccccggtctggggtgaggagtgtggggagcttgggcatcctcctccagcctcctccagcccccaggcagtgccttacctgtggtgcccagaaaagtgcccctaggttggtgggtctacaggagcctcagccaggcagcccaccccaccctggggccctgcctcaccaaggaaataaagactcaaagaagccaaaaaaaaaaaaaaaaaaaaaaaacctggggggggggccgggcccccaatccccctttaggggagggaattaacattacctggcccgggttttaacaacgggggaactgaaaaaccanngntnacttnntcgtnnag

SEQ ID NO: 19954 - DNA, 528 bp, Homo sapiens
  misc_feature (1)...(528): n = A,T,C or G
ngagtgnnnnnaattggcggctgcagaattcgcacgattgccncggctgcaggaattcggcacgagccggcctggcctagaatgacttttaaaagatcaaattaaatcaggtcactcctttgcttacaacgcagtgcgtttagaggtacaccccatgtctccacagggcatacagcatccgatttaatctggatccattccggcgccttcctctcccagtcacccagagggccccaaccccggcggccctttcttcctcaaatgtcctcggctctataccgtgcctgggtcttttctctttctctctgcctggaagattccttctttccccttttgtcttgcccactcctgtttacccttcaagtttcaagttcatgtcactgtctcaaagaggttttcctgtgctcgccctgtttctctcaggaagccttgctcttttccatcatgcctctaatcacagcttataatcggatatttatttctgtgtctacagtcttgccctgccagactgtatgccccatgtgggcc

SEQ ID NO: 19955 - DNA, 455 bp, Homo sapiens
  misc_feature (1)...(455): n = A,T,C or G
gcnncccacttttgacncccctncaatagaccccggctgcaggaattcggcacgagccaggattcccgatccagagacaatggccccgatgggatggagcccgaaggcgtcatcgagagtaactggaatgagattgttgacagctttgatgacatgaacctctcggagtcccttctccgtggcatctacgcctatggttttgagaagccctctgccatccagcagcgagccattctaccttgtatcaagggttatgatgtgattgctcaagcccaacgtggggactggagaacgccacatttgccatatcgattctgcagcagattgaattagatctaaaagccacccaggccttggtcctagcacccactcgagaattggctcagcagatacagaaggtggtcatggcactaggagactacatgggcgcctcctgtcacgcctgtatcgggggc

SEQ ID NO: 19956 - DNA, 489 bp, Homo sapiens
  misc_feature (1)...(489): n = A,T,C or G
aggagtgcccagggtgtcncncaaacgaccgctttcggaattgcgtcgaggnttcgcggcgctcgccgcactggttgttcagcaccttcggtccggttgaggttgtcaagtcggaccaaacaggttgtttctctgcagtttccaacatggcagggaggtttaatagacatggataagaagtccactcacagaaatcctgaagatgccagggctggcaaatatgaaggtaaacacaaacgaaagaaaagaagaaagcaaaaccaaaaccagcaccgatcccgacatagatcagtgacgtctttttcttcagatgatcctatgtttccttcttcctcatcatcgtcttcaggaagccagacagattcaagtattgaagatgctgccaagggaaaaattaagaagaagagaagagagaaaacaaataaatgggaaaaaagaaagagggactgaaactgggctgacccttttgatttccaagctcagcgtntt

SEQ ID NO: 19957 - DNA, 468 bp, Homo sapiens
gtttgaccgcctgcggaattcgctggagccggtctcccatcaacagaagaggctctgtctcctccgtctctcccaagccaccttcatctttcaagatgtcgattagaaactgggtgacccgaacaccttcctcatcaccacccatcactccacctgcttcggagaccaagatcatgtctccgagaaaagcccttattcctgtgagccagaagtcatcccaagcagaggcttgctctgagtctagaaatagagtaaagaggaggctagactcaagctgtctggagagtgtgaaacaaaagtgtgtgaagagttgtaactgtgtgactgagcttgatggccaagttgaaaatcttcatttggatctgtgctgccttgctggtaaccaggaagaccttagtaaggactctctaggtcctaccaaatcaagcaaaattgaaggagctggtaccagtatctcagagcctccgt

SEQ ID NO: 19958 - DNA, 452 bp, Homo sapiens
  misc_feature (1)...(452): n = A,T,C or G
cgcgccgccaattgacccccgctgcagtaattcgccacgagctcaggctggtctcgaacccctggcctcaagcaatcctcctgctatttagtctcccaagtagcagggattgcaggtgtgagctgctgcagtcaaccaaaataggtatatttcgagtaacttttttagggttgatctctaaatgcaatgtgggcagctgccagaaaccttccctgcctccggaacagaacagggctatcaccgttggtgttattcttcctcagagtagagcagatgagtcattttggtaatgtcttcctttcttccaaaacagccacagccactatcatgtttgtaccagcatgcttagaaagtgaactgtacaccttttgtgtttttactactctgtttgtgtttggaacatcctcttttcctctccactcctgataggctcgggttatgtatgattntgn

SEQ ID NO: 19959 - DNA, 486 bp, Homo sapiens
  misc_feature (1)...(486): n = A,T,C or G
gcggcntannaattgaccccctttgaccagcgctgcaggaattcggcacgaggccaccangctgttctcacgtgaacagctttaaggtgggagagaactggaggcaggaactgcgggttatctaccagtgcttcgtgtggtgtggaaccccagagaccatgaaaagcaaggcaaagtcctgcatctgccatgtgtgtggcacccatctgaacagactccactcttgcctttcctgtgtcttctttggctgcttcacggagaaacacattcacgagcacgcagagacgaaacaacacaacttagcagtagacctgtattacggaggtatatactgctttatgtgtaaggactatgtatatgacaaagacattgagcaaattgccaaagaagagcaaggagaagctttgaaattacaagcctccacctcaacagaggtttctcaccagcagtgttcagtgccaggccttggtgagatattcccaaccn

SEQ ID NO: 19960 - DNA, 510 bp, Homo sapiens
  misc_feature (1)...(510): n = A,T,C or G
aaggccccnnnnaattgacnatcggtaagcctgtctgctagctgtactacaaagagatagaatcaaactgctttttttcgacatactggtttttctttctgtttttcttctctttcttctatttcttgaggatattatggctaataacacaacaagtttatggagtccatggccagaaaacttttgggaggaccttatcatgtccttcactgtatccatggcaatcgggctggtacttggaggatttatttgggctgtgttcatttgtctgtctcgaagaagaagagccagtgctcccatctcacagtggagttcaagcaagagatctaggtcttcttacacccacagcctcaacagaactggattttaccgccacagaggctgtgaacgtcgaagcaacctcagcctggccagtctcaccttccagcgacaagcttccctggaacaagcaaattcctttccaagaaaatcaagtttcagagcttctactttccatccctttctgcaatg

SEQ ID NO: 19961 - DNA, 430 bp, Homo sapiens
  misc_feature (1)...(430): n = A,T,C or G
atggtnntnnnnaattaaagatcgtcttgtaggaaccggcacgagggtctggggaagcggcggcaggcgccatgtccggccgcgaaggtggcaagaagaagccactgaaacagcccaagaagcaggccaaggagatggacgaggaagataaggctttcaagcagaaacaaaaagaggagcagaagaaactcgaggagctaaaagcgaaggccgcggggaaggggcccttggccacaggtggaattaagaaatctggcaaaaagtaagctgttccttgtgcctgaggagatggcgaccctttatttcatctgtatttaaacctctctattccctgccataacatcttttgccacgtatagctggaattaagtgttgtcttggagctggtgcacatttaagaataaacttttgtaaaaaaaaaaaaaaaaaa

SEQ ID NO: 19962 - DNA, 504 bp, Homo sapiens
  misc_feature (1)...(504): n = A,T,C or G
ngcgtgttgggaattgaagctgattgatcgcccttaggaattcggcacgagatttgttcagagaggccttttgtttaaatataaatgtttaaatataaatgtgtgtctggattggctataacatgtctttcagcattaggcttttaagaaacacagggttttgtattctttactaaagatatcagagctcttaatgttgcttagatgagggtgactgtcaagtacaagcaagactgggaccttagaaatcattgtagaaacacagctttgaaagaaaaataccatgtctctaagccaactttaattgcttaaaagacatttttatttagttgaaaaatctagttttttttgtaaactgtatcagatctggctatgttggaataaaacttatgctagtttattggaagtgttcaagaaataaaaatcaacttgtgtactgataaaatactctagcctgggccagagaagataatgttctttaatggttgccaggaaacccatgcn

SEQ ID NO: 19963 - DNA, 497 bp, Homo sapiens
  misc_feature (1)...(497): n = A,T,C or G
agcggtnnnnnnattgttgcacttgcatgaattaggcacgagcacccttgggctctatgggaaggaccagcaggaggcagccctggtggacatggtgaatgactgcgtggaggacctccgctgcaaatacatctccctcatctacaccaactatgaggcgggcaaggatgactatgtgaaggcactgcccgggcaactgaagccttttgagaccctgctgtcccagaaccagggaggcaagaccttcattgtgggagaccagatctccttcgctgactacaacctgctggacttgctgctgatccatgaggtcctagcccctggctgcctggatgcgttccccctgctctcagcatatgtggggcgcctcagagcccggcccaagctcaaggccttcctggcctcccctgagtacgtgaacctccccatcaatggcaacgggaaacagtgagggttggtgggactctgagcgggaggcaaattttgcttttttcctc

SEQ ID NO: 19964 - DNA, 486 bp, Homo sapiens
  misc_feature (1)...(486): n = A,T,C or G
natttgccccgcgctgcaggaattcggtacgacgcgcctgcacgaattcggcacgaggaccagcagcactgtgacgaggctaaggccgtggatatcccccacatggacatcgaggcgctgaaaaaactcaacaagaataaaaaactggtcaagaagctggccaagaagtatgatgcgtttttggcctcagagtctctgatcaagcagattccacgaatcctcggcccaggtttaaataaggcaggaaagttcccttccctgctcacacacaacgaaaacatggtggccaaagtggatgaggtgaagtccacaatcaagttccaaatgaagaaggtgttatgtctggctgtagctgttggtcacgtgaagatgacagacgatgagcttgtgtataacattcacctggctgtcaacttcttggtgtcattgctcaagaaaaactggcagaatgtccgggccttatatatcaagagcaccatgggcaag

SEQ ID NO: 19965 - DNA, 462 bp, Homo sapiens
  misc_feature (1)...(462): n = A,T,C or G
nttgcccctgctgcggattcggcacgaggtcatccgccccttggagccacagccagctcctcacctggcccgggaattcatgatcaaaacccgccgtaggaagggcctcagtgaagatgtgagcatcagcaaattcttcgatgatcctatgttgctggaacttgccaaacaggatgttgtgctcaattaccccatgtgagtgcgtggactcctgggagctcctgctccctacagtgggctgcaactcctgtacttgaagctgagacctcatatgacgtggccttcgtgttgtcagagagtgtctggaagctgctgttgccatcttgaacaactcaccaacctccaacccagagccccagtgagagaggagcatttggcctcctgcttccttctgtggcctctgccgggctccattcccaaggaaaagagaggagcttgggctcacagaaagagaaggggatg

SEQ ID NO: 19966 - DNA, 465 bp, Homo sapiens
  misc_feature (1)...(465): n = A,T,C or G
nattgaccgtcctgcgcaattcggcacgagnccgggtcccccatgtactccagacacactgcaggccacctctcccagcaggttgccagtcatgggccccatcatcatgacttctgtccaaggtactgtgtgcagaaatgtgattgagattcaagacaaggcctctctgcccttttacctccagattcatgaccaagataatttatcctgaacacggtgaaaaaaggaagggagggaggagaaaaagtccgggtctcacctgggattctctgtctcctgcaacatgaaggatttagcctgggaggaggtggtgagaactctgggagagaaaaaagaaggaaagaatagttttacccatgctgaagttaatttaaaccttcacctagagaagcaaaataaaaaacccacactttcccattttggggctgccttcctagaagtttagcccaaagtttcacctaaccg

SEQ ID NO: 19967 - DNA, 508 bp, Homo sapiens
  misc_feature (1)...(508): n = A,T,C or G
ngtgatggggnattgacggctgtnngaatttgcccgactgtcggaattcggcacgagccgagctgttctttcagctgctccaaggattgagacccaagtcatcatgaaaaaggcccaagtacagtcttaatgcgataaatccactagctaagacgtcgagtgccaagaccagccttccagccgaggtttggacaaagtctcaggttcccgtgactcagggtaaggtgctggggctgccagaggacctgccccagcaagatttttgtcaagagcgagactccatcagcccaggcagacgggagcaggttcttggccagcgtagacagcagcaaacagcagcagggaagccattctcactgcatcctccctgcagtagccacggccaggcccttaggaggagcagtgaccgggggtgtccagaaatatcctgtccctggatggaaactaggtctcgtttggattttttttttttttttttgccgggttaggaaatttttttttaatttac

SEQ ID NO: 19968 - DNA, 469 bp, Homo sapiens
attggcccttctcctccgcgctgcaggaattcggcacgagcggaagccggagagctggagctttgaagccaccccggtcaaaggatgctgagtccggagcgcctagccctaccggactacgagtatctggctcagcgacatgtcctcacctacatggaggatgcagtgtgccagctgctagaaaacagggaagatattagccaatatggaattgccaggttcttcactgaatattttaacagtgtatgccagggaacacacattctctttcgagaattcagcttcgtccaagccaccccccacaatagggtatcatttttacgggccttctggagatgcttccgaactgtgggcaaaaatggcgatttgctgaccatgaaagaatatcactgtttgctgcaattactgtgtcctgatttcccgctggagctcactcagaaagcagccaggtacgtctcctggactcttg

SEQ ID NO: 19969 - DNA, 337 bp, Homo sapiens
  misc_feature (1)...(337): n = A,T,C or G
gggggaggcgggnnnnnnnnnnaattgacccgctgtgcgggcgctggggagatacgaacgagccgaccccgtggatctagagctgaagaaggccttgacagagcttcaagccaaagttattgacactcaacagaaggtgaagctcgcagacatacgagaagcatccctaaacagaacgaaaaagcatgcacatcttacagatacagagatcatgactttggtagatgagactaacatgtatgaaggtgtaggaagaatgtttattcttcagtccaaggaagcaattcacagtcagctgttagagaagcagaaaatagcaaaaaaaaaaaaaaaaatt

SEQ ID NO: 19970 - DNA, 504 bp, Homo sapiens
  misc_feature (1)...(504): n = A,T,C or G
gtggagcnnaattgacggctgtangaattcgaccgactgctggaanccggcacgaggtgctgcttacccatcatggaagcaatgaggctcctgtgtggggcgtcggcggccttggcatggggcttcctctgggtttgggactcctcacaacgaatgaagagtcgggagcagggaggacggctgggagccgaaagccggaccctgctggtcatagcgcaccctgacgatgaagccatgttttttgctcccacagtgctaggcttggcccgcctaaggcactgggtgtacctgctttgcttctctgcaggaaattactacaatcaaggagagactcgtaagaaagaacttttgcagagctgtgatgttttggggattccactctccagtgtaatgattattgacaacagggatttcccagatgacccaggcatgcagtgggacacagagcacgtggccagagtcctccttcagcacatagaagtgaatggcatcaatctggtggtg

SEQ ID NO: 19971 - DNA, 455 bp, Homo sapiens
  misc_feature (1)...(455): n = A,T,C or G
nttagacccccttttcccccggctgcaggaattcggcacgaggcaaaaggggacaagaaaatccctcttcctccatgggatggatttaagctcttgctgtgtgttctacaaatgctgttattgtgggaggaaatgctaggtttttgtgtgtggactgcccagacctcagccaggtcttctggagatgacatttgaggactgatggccaaagagcatggggaactgaagccctggctgcctcagcgctctgtctcccaacaccagctggtgttgcagagggaggtcaacgtgagtttggatctcttgtacgcagatgtaatcattcacatgtaaaaataaccccacctccccaccccaaaaagggcaagagctgtggaaaatgattgccaaatgagatggctggttagagcatgattttttctaaagcatacttcatatattttcttaagattaca

SEQ ID NO: 19972 - DNA, 468 bp, Homo sapiens
  misc_feature (1)...(468): n = A,T,C or G
nattgccncgtgctgcaggaattcggcacgagctgctctctatcctgccccacagccctgcctggatttgtatccttggcttcgtgccagttcctccaagactatggcacctccctccctctcaaccacttgagcaaactccaagacaccttctaccccgacaccagcaattatgccaagggccattaggctctcaacatgactatagagaccccgtatcatcatggagacctttgttcctgtgggaaaataaccctcccacctgcaacagctgcccctgctgactgcgcctgtcttctccctctgaccccagagaaaggggccgtggtcagctgggatcttctgccaccatcagggacaaaccgggggcaggaggaaagtcactgatgcccagctgtttgcatcctgcacagctacaggtccttaattaaaagtgtactggtggtttctgctgaaaaaaaaaaaaan

SEQ ID NO: 19973 - DNA, 518 bp, Homo sapiens
  misc_feature (1)...(518): n = A,T,C or G
ggcggtggnnttatgtcgccgtggatnctgacgagcacaatcagtcttcaaattttggacccatgaagggaggaaattttggaggcagaagctctggcccctatggcggtggaggccaatactttgcaaaaccacgaaaccaaggtggctatggcggttccagcagcagcagtagctatggcagtggcagaagattttaattaggaaacaaagcttagcaggagaggagagccagagaagtgacagggaagctacaggttacaacagatttgtgaactcagccaagcacagtggtggcagggcctagctgctacaaagaagacatgttttagacaaatactcatgtgtatgggcaaaaaactcgaggactgtatttgtgactaattgtataacaggttattttagtttctgttctgtggaaagtgtaaagcattccaacaaagggttttaatgtagatttttttttttgcaccccatgctgttgattgctaaatgtaacagtctgatcgtgacgctaa

SEQ ID NO: 19974 - DNA, 500 bp, Homo sapiens
  misc_feature (1)...(500): n = A,T,C or G
aggatagggaattttgacnccctnntttgacccgcantgcggaattcggcacgaggagagagagagagagagagagagagagagagagagagagagagactcgtgccgaattcggcacgaggttaaatagaagaggatgtgagcaccagatgcgcgtgataaagaccatgctctggaagattcattccagggagtagaagtggtatttactcagggcatttagggagagcagggactctgaaatgaggtgagagaaaagataagacatgcgggaacagctggccacaccaagaaagaatttagggagagggatctctctgttagagaacttaacattaccctaggaacagcgagagcatcatcagccccaggaaaatctacctctgatatggagaccacgcttaagaaaatcccctagaacccagagaaaaagtgcaaaacaaggaaaatggccagagagaatatcatatatacagagatcagacagtgagaatccagag

SEQ ID NO: 19975 - DNA, 506 bp, Homo sapiens
  misc_feature (1)...(506): n = A,T,C or G
tggcgnnnnnnnnnaatttgaacngtttgtaacgacctgcaggaattcggcacgagcaaagactgtgggtctcaaaaatatgcttatttcaatggctgctcctcaccaaccgctcccctctcgcctatgtctcctcctgggtacaagctggttactggcgacagaaacaattcttcttgccgcaattacaacaagcaagcaagtgagcaaaactgggctaattacagtgcagaacaaaatcgaatggggcaggcgggaagcaccatctctaactcccatgcacagccttttgatttccccgatgataaccagaattctaaaaaactagctgctggacatgaattacagccactagccattgtggaccagcgaccttcaagcagagccagcagtcgtgccagcagcagacctcggcctgatgacctggagatagagatacaggcttgaaagcatcaagattccactcaattgtggagaagaaaaaaggtgctgtagaaagtgcaccn

SEQ ID NO: 19976 - DNA, 486 bp, Homo sapiens
  misc_feature (1)...(486): n = A,T,C or G
aattcgccccggctgcatgcgcgaggagctgggcacacagctgcgcacctgtaccacgctgagcgggctggccagccaggtggaggcccatcactcgctggtgctcagccacctcaagactctgctctggaagaagatctccaacaccaagtactcttgatggggcagtgaggggcctggccacccttcctggagctggccaggtgccagggtccaaccctccctcaaggaatcctgtcagaagatgtgaaatgcaactgtgttgcaaaatcactcccctaccgtcagggctctggattccagcaccacagacatgagaccccagctcggagcaaaggcggacatggacatcccggcaggagagtcctccaagggggtttgttactctgaagaacgtaatgtcaataaacagcttttatgtaatgcccagggctgagcaccctgagcccccatcaaaaaanaaaaaaaaaaaaaaaaaaaaaaana

SEQ ID NO: 19977 - DNA, 494 bp, Homo sapiens
  misc_feature (1)...(494): n = A,T,C or G
ggggnaggggnagggaggggccnnnnnnntttctgannnccactgatccgcgctgcaggaattcggcacgagggttattgctctgtgttataaactctgggaaattccatctcttgcatatttgatcagatagtgacatctttctgtatataaactctttaactgctattttagggaccttgcagtttgcacataattgttttatatcatagcagtaaatatttgcaagaaatcccactcatcgaccccgggtaaaatgttatggtaagcatgcacagtttgcagtctacagtttttttatgtagcacaaaataggtgtacctttataagtacattcaattttatgatttacatttatcatgtaatttttaaaaaaatccatctatctaggatatgttgatacaaagtctgcttttgctattctttttgcttaaatactcctatcattttctgaattacttggtatttagaactcctagcaccacggggaagaa

SEQ ID NO: 19978 - DNA, 497 bp, Homo sapiens
  misc_feature (1)...(497): n = A,T,C or G
tggagcncaattgacggcctgtggaaatcggcacgactatgtatccagagatcaaggcaatggggagggaaagctggcaggaggcagtcccttgtgggcctgaggccctttggctcctaagtgtccacattctgttctcttccaagtcccttcattgttaagctgattctccaacaagatgcaatgaacagatgcaatgtctaccccgcgctgggcgagttcccgaggccatgggctgtttggaatcacacttcattaagagacaaactgttccttcccttattgtgccttaatgcttatgacaaggcagctctgaattgatcccaagctggagcctctgaatgctttaaagagtttgaatatagacggtttgagagcaaaaagggagctttaaatattgctcagtggcccccatctcccctcttcccacatttactgaggcacgagatgggatgggacctgtcccgggtcacagcagcagtcgtcagcgccttggc

SEQ ID NO: 19979 - DNA, 491 bp, Homo sapiens
  misc_feature (1)...(491): n = A,T,C or G
agancccaattgacggctgtggatgtacgccgagagaacattgactgtatttcctaaacattgataaagcctttaaaatgtttgtactgtaatactttgcttaaaagtcatgaggcattctgtgatccaacctctttcacttatttataagccctcttggttgctattccatattgtaggatgcctttctatttcaattggtaactttctgttttgttcttcctaattattctcccaagatcccacactgcagctttatctttaggcttatgaaaggtaacccgtggttaccggctctccaagtgattctgttcttctccatttttggcagttaatttgcagaagtaactgacagctgacaccatatgagaacctttgtataaaatattggcatgtaaacagcacagacaccgtaacacactctgtgccctgtttggttgttgacaatgaagcaccattatgtgactcttcatataaccctttttttctan

SEQ ID NO: 19980 - DNA, 472 bp, Homo sapiens
  misc_feature (1)...(472): n = A,T,C or G
atggcccgcctgcggaattcgtacgagccgctgtcttgggagtccagtggctgcaaagggcatcccggaacgtgatgccgctgggcgcacggacagcctcccacatgaccaaggacatgttcccggggccctatcctaggaccccagaagaacgggccgccgccgccaagaagtataatatgcgtgtggaagactacgaaccttacccggatgatggcatggggtatggcgactacccgaagctccctgaccgctcacagcatgagagagatccatggtatagctgggaccagccgggcctgaggttgaactggggtgaaccgatgcactggcacctagacatgtacaacaggaaccgtgtggatacatcccccacacctgtttcttggcatgtcatgtgtatgcagctcttcgaggtcctggctatcatgatattcatgtgctgggtggnggacgtgtaccctgtctaccc

SEQ ID NO: 19981 - DNA, 481 bp, Homo sapiens
  misc_feature (1)...(481): n = A,T,C or G
agatggaccgcctgcggaanncttagccccccgctgcagcgatacagataagacggctgtagtacctctgctgttgttggggggtctgtgcagcgctgtgggaacgtccagcctgggtgtagttacttgcggctccgtggagaagctactcaatacgaaccacaacgtccgactgcactcacacgacgtgcgctatgggtcaggtagtgggcagcaatcagtgacaggtgtaacctctgtggatgacagcaacagttactggaggatacggtggaagagtgccacagtgtgtgagaggggaacccccatcaagtgtggccagcccatccggctgacacatgtcaacactggccgaaacctccatagtcaccacttcacttcacctctttctggaaaccacgaagtgagtgcttttggtgaggaaggtgaaggcgattatctggatgactggacagtgctctgtaatggaccctactgggcg

SEQ ID NO: 19982 - DNA, 495 bp, Homo sapiens
  misc_feature (1)...(495): n = A,T,C or G
gcnnntcnnnnnaattgcccgtctgcggttcgtgctggaaaaggcaaatactatgctgtcaattttccaatgagagatggtatagatgatgagtcatatgggcagatatttaagcctattatctcaaaggtgatggagatgtatcaacctagtgctgtggtattacagtgtggtgcagactcattatctggtgatagactgggttgtttcaatctaacagtcaaaggtcatgctaaatgtgtagaagttgtaaaaacttttaacttaccattactgatgcttggaggaggtggctacacaatccgtaatgttgctcgatgttggacatatgagactgcagttgcccttgattgtgagattcccaatgagttgccatataatgattactttgagtattttggaccagacttcaaactgcatattagtccttcaaacatgacaaaccagaacactccagaatatatggaaaagataaaacagcgtttgtttgaaaat

SEQ ID NO: 19983 - DNA, 494 bp, Homo sapiens
  misc_feature (1)...(494): n = A,T,C or G
ggttttctcnnaatagatcggctgtangaattcggcacgagccacgttccagcccctgcagcccacattttaagtatattccttcaagtgagttttcctccagcccctgagagttgctgtctcccagtggaatgttcactgacgtcttttcttggtagccatcatcgaaactaatggggggacagacttgatagccaaggtcccttctggtccagttttctgatttagggttctctcaagattaataaaggaagatggggaaatttgactcattaatgagctcgctaacctacgatctggtgataattttgtgtgcacagcccaaggaccacgaggctttctgcactttctgcacccccttccaaagtgaccacaaaatttcaaagggactcatacaatttgagaaaaaaacagtcaacctgatttgagaaattaaccagtatggctaactatatcacagaaaatgggattgagttaaaactattttattttan

SEQ ID NO: 19984 - DNA, 440 bp, Homo sapiens
  misc_feature (1)...(440): n = A,T,C or G
nattgatattcgtgaccattccgacgagaagttggaatctttatgaagtttctttaaagacaatagacacccagaggaggaatgatagaacatttactgagtgttgaccagtgttgggcatggtgccaactgattccacacacattttctggtttcagtgatcttactgagctctagtgtttcaagcattctccatttgcaagatggtgggtgaggacagtgggggatgtaaccatagaacagcagaccttgctgccttcaaagatcatgtttttgaagaaagtttaatggttgaggaaaatatctatggaccaattttaagctttaaaatattgtgtccacacaggttatgaaacactgtgtacactattgatcccaattgtattttgaaataaacatatgtatgcatagaaaaaaagaagagaagactatacatcagg

SEQ ID NO: 19985 - DNA, 501 bp, Homo sapiens
  misc_feature (1)...(501): n = A,T,C or G
ggagaannanaaaannttgatangttgagcgcctgcggaattcggcacgagtccccgcggccgccgcgatgcagaaatacgagaaactggaaaagattggggaaggcacctacggaactgtgttcaaggccaaaaaccgggagactcatgagatcgtggctctgaaacgggtgaggctggatgacgatgatgagggtgtgccgagttccgccctccgggagatctgcctactcaaggagctgaagcacaagaacatcgtcaggcttcatgacgtcctgcacagcgacaagaagctgactttggtttttgaattctgtgaccaggacctgaagaagtattttgacagttgcaatggtgacctcgatcctgagattgtaaagtcattcctcttccagctactaaaagggctgggattctgtcatagccgcaatgtgctacacagggacctgaagccccagaacctgctaataaacaggaatggngagctgaaattggctgatt

SEQ ID NO: 19986 - DNA, 465 bp, Homo sapiens
  misc_feature (1)...(465): n = A,T,C or G
attgcccattgcccgcctgcaggaattcggcacgagcttttctaggacgcactatatgtgactgtgactttcaaggacatttgtttgccatttgctgatttttttgggaagttaatttctaacttctttcactgataaatgaagaaaagtattgcacctttgaaatgcaccaaatgaattgagtttgtaattaaaaaaatttttttccctttcagtcattgtcttatatgcttagcatagatttgcagctcagtagtatatggtgttcctagaatgcagctgaagacctgttatgtagaggaaatacgaggggtggtgctagaagacagacatctgtggaatgattcacatcctctcaagttaggaggatggaggcctgcttcattaagaagctgggnggtagggggggggggggagaacacttaacaacatggggaccagncaagggaatccccttatttctgt

SEQ ID NO: 19987 - DNA, 530 bp, Homo sapiens
aggagatcgattgctgtgctgcagtttggaagcaacctaagtgtccatcagcggatgaatagagaaagaaaatgtggtacttatacacaatggagtactgttcagccacaaataagaatgagatccagtcatttgcaacaactggaaggaagtggagatcattatgttaagtgaaaaaaagccaggcagagaaagaaaaacatggcatattctgaaacatcacatgttctcagttatttgtgggttctaaaaatcaaatcaattgaactcatggagatagagagtagaaggatggtgatatcccttggctgtgtccccacccaaatctcatcctgaattgtagttcccatcatccccatgtgtcatgggaagtgcccagtgggagacaattgaatcgtgggggtggtttctttcatgctattcttgtgatagtaagttctcacaagatctgatgtttttatatgggcgtttcttcttttgctggcacttctcttgctgccgcacatgaagaagatgtgttgcttcctgtt

SEQ ID NO: 19988 - DNA, 500 bp, Homo sapiens
  misc_feature (1)...(500): n = A,T,C or G
tggagnttnnnnnnaattgcacgtttgaccgcctgcacgaattcggcacgagtggtcttgatctcttgacctcctgatccagccacttcggcctcgcaaagtgttgggattataggcgtgagccaccacacccggccggctttcttctcatagttgtaagatggctgcctcataagataatatctcaagacagaaaggaagggtcattccctttcatgcattgctcttttgatttgcaaaaacatccctgagaagctccccagccagcatactctcgtgctccattgtctagaactggcttacttgcccaccagcaaaccagtcactggaaaatgggaatgggattgccatgatgggtttagaccaatagtggttcagctcttgggctggacctgccttttccgagcactttgctgcctgcctgatacctgagtaaaatcagggctctctcaggaagaaagatgggggaaatggctcttggttaaataaccagttctttt

SEQ ID NO: 19989 - DNA, 476 bp, Homo sapiens
  misc_feature (1)...(476): n = A,T,C or G
gagtgatcgaccctgttgccacggctgcaggccggtgtgctgagcaccggcacttgcagctggcacctggacatctacggaatgtgcttccgtggttgtcattgctgttacagatccatccacgtgtggctgactcagagctgtgacattaagggaaaataaaggaaatgattgagctgccttttcagacaacactggaatttttgaagaacccgagaatcagtatattgaaaggtctgcgccgtggagtccctgcttgtgaagcccgtgtgcatccgaagtgctgacaaggacaatggaaagacgcttcattcatgagctcctttaaaatgccagacgggcccctcgacagggacggggagaattcagcagatgaataagattggcaacataaacccaaacgtttgggaaaaaaactgagtttattatttntattttactttattttattttttgagacagggtatcgctctgtn

SEQ ID NO: 19990 - DNA, 489 bp, Homo sapiens
  misc_feature (1)...(489): n = A,T,C or G
gcgggaattgacttctttagcaattcggcacgaggaaaattccatcattntgctacagtccaaaagatgagggactgtgctctgccaatgtgactcgctattattttaatccaagatacagaacctgtgatgctttcacctatactggctgtggagggaatgacaataactttgttagcagggaggattgcaaacgtgcatgtgcaaaagctttgaaaaagaaaaagaagatgccaaagcttcgctttgccagtagaatccggaaaattcggaagaagcaattttaaacattcttaatatgtcatcttgtttgtctttatggcttatttgcctttatggttgtatctgaagaataatatgacagcatgaggaaacaaatcattggtgatttattcaccagtttttattaatacaagtcactttttaaaaaatttggatttttttatatataactagctgctattcaaatgtgagtctaccatttttaan

SEQ ID NO: 19991 - DNA, 490 bp, Homo sapiens
  misc_feature (1)...(490): n = A,T,C or G
attggacncgccctnttttganncgcgctgcaggaattcggcacgaggggcccttctgcatctgtggcacccaatgcttggtcaacaacaagccctttggggaatccttttcagagcaatatttttccagctcctgctgtgtccactcagcccccatccatgcactcctctctcctggtcactcctcctcagccacctcccagagctggccctcccaaggacatctccagtgatgccttcactgccttagacccacttggggataaagagatcaaggatgtgaaagaaatgtttaaggatttccaactgcggcagccacctgctgtgcccgcgcggaagggagagcagacttcttctgggactttgagtgcctttgccagttatttcaacagcaaggttggcattcctcaggagaatgcagaccatgatgactttgatgctaatcaactattgaacaagatcaatgaaccaccaaagccagctcccagag

SEQ ID NO: 19992 - DNA, 500 bp, Homo sapiens
  misc_feature (1)...(500): n = A,T,C or G
gtggggcgnccaatcgacgccgtngattgatcggctgtggaattcggcacgagcggaggcggcgggcccaggagcctcagccagccacgtgggcatccactccttttcctgcaagagatgatggttccattgctcttggcttcatggtgttcctggaaggcagatgagctggtcatttcgcctgggactcggcacctttccgagtgcagctggagggatctgagcgcaggaagacgcagaacaacagaaatagccgcccctccccgcccactgtgcctgttggcctatcatagatctctatgttcttgactttgtctctcctttccgagtcaatggtgggttacactgatcttgttccactgattactctctctgacgagtccatcacctgcaacttaaatgaacaagcttacatcccaaagaaaaaaaaaaaaaaaaaaaaaaaaaaaacccctgggggggggcccggccccccattcccccttagggggggcggttta

SEQ ID NO: 19993 - DNA, 497 bp, Homo sapiens
cgggggaaccccaattcacggctgcggatttaggcacgagaacgagcaaaaaacctttctgtaggctgagacctctcggtgcacctggtgaccctgggtggaggggacttgctgtgaagtcttcctcgccctctgccctcttgctgcttctccacattgccaggaaaagctgctgacgcctgccctcctctcttgagtcgagggctgaatctttctcctctaagcagtctggtcaggaaccttggtttcttgagaggcccccaagatgccgcagctccagggctcttcctcctcaccagaaatccctgggcttccacaatgtgaactcactcattgtcaggtgtccgtggagtgtttttggcatggtgacctgtctgggcccagcatgttgcagatgtgtatttatgcgcaatggtatgcatatctctgtgtgactgtcagtgttgcaagctggctggatccaaccatctcttctgaaataatgcatccaaagggtt

SEQ ID NO: 19994 - DNA, 472 bp, Homo sapiens
  misc_feature (1)...(472): n = A,T,C or G
ncctcgcaccgctctgangacttcggcacgagtgaggccatctctcgcctctgcgaggacaagtacaaggacctaagaagatccgcgaggaagcgctcagccagtgcagacaacctgactctgccccggtggtccccagccatcatctcttaactacggaggcccgccggaggccacaccatcccttagtttctcctttagtttgagaaaagacagacttggggtgggtttgtttttgttttttctttccttttctttttttacgcatagctccgtcaagctgcctggatgagcgcccatgcagcaaggcttggaggaagcgtcagtgccctggagatcccagctcgctctccccactgtcagcaacagcacttccttcgtggaggaagtggactcgaatcctggaggaggaaataaagggaaagggaagtcgtggagaggcagggaaaatggttaagcagcccggccctct

SEQ ID NO: 19995 - DNA, 478 bp, Homo sapiens
  misc_feature (1)...(478): n = A,T,C or G
cgggggcncacnncccaaattgccaatcgacgccgcgctgcaggaattcggcacgagcctgagtcgctttaggggcgaaattccgagcatccggttgcatttcctgaggatgacacgcgtggtgggtgtggacggcctacaggggtccatcctcagcggcccctctgcagggcagagtctcgctctcactctcccagctgactcctctcaagcctgttaaccattgtacacgttcccaaggactccaagcaggttggacttcagggaacattgcagtttgggtcttggccattgtttacactccaccttgcataggtgcttgaggatcacacaaccagatacgtagatcatccgtagatcatcgcagtcacatcgaagatttgtttataataggaaaaaaaaaaagctgcccactgtcatgcgctgggaaactggtgagctgaaggatgacccatctgtaaatggggtgctccctaat

SEQ ID NO: 19996 - DNA, 472 bp, Homo sapiens
  misc_feature (1)...(472): n = A,T,C or G
ngagtgctcgacgctgttgaattcggcacgagccagcttctttggaacaatgtgtgctctgtatggttttttttggtatgacaactaattaagcaactgacattgaactgagaattctacaaactataaaacattaatttttgaaggtaatttagttttgtggctgggcattcagtgaagtcttaggacttctttgcagacaactgactgggcatctataggaatgaatctggctttagggttaaatcattcaaggaccttttataggccggcactagtcactaaaactgaaaactaagtcagttcattcttgacgaatgctgttaaaaacgcctttacgaagtcactaaaacttaattggaagaaaaaatcatgatgcttatacaataaatatgaataaatgttatataaggaaactcacctatttgaaatcatggctatattggctttattctgtacattgcaaaaatac

SEQ ID NO: 19997 - DNA, 455 bp, Homo sapiens
  misc_feature (1)...(455): n = A,T,C or G
atttgatccgcgctgcaggaanattgaccngcgctgcaggaattcggcacgagtatgaggacccaggttcacctctgattaagcctgtgcccctcccttgctactcttcctctctctttctgagtgctccctggtgtcagaattaggagggtggcagcaggattgcctgagctcagaggttcaaggtcacagtgagctaggatcgtgccactgcactccagccctggggacagaacgagaccctttctcaaaaaacaaacaatggtttgtgtcatctgagatacaaagaaagaaaacaaacaagttaaaattctccagtggcacagccataagaaagaatgaaatcctgtcctttgcagcaacatggacagagctagaagccattatccttagtgaactaactccaaagcagaaaaccaaatactgcatgccctcacttataagtaggagctaaa

SEQ ID NO: 19998 - DNA, 370 bp, Homo sapiens
  misc_feature (1)...(370): n = A,T,C or G
agtgagggttctcaaactgaaccactganactatccgcgagcccactcctgccatatcagggctggtctctgtggactcagcccaaggctgcctcctctttgtcaccccaaagtggggcagccagggacagccagggtgtgttcagaatgggttcttcctgcagggcaggaagggcagattgttaaaggggctgcggcccagaccaccctggtccctcctccggcagtgactcagacccacactgtgccgtgcagctgtgtgccctgcacacccgcttgacggcgcactgctcacttctggggggccctttcagaggcacttttaaagcaaataaaacatttattgttcagaaaaaaaaaaaaaaaaaaa

SEQ ID NO: 19999 - DNA, 490 bp, Homo sapiens
  misc_feature (1)...(490): n = A,T,C or G
agaaggaaaaanntgcccgcctgcttactccgcctgcaggaattcggcacgagtatggctcaagacctttctagagaaaaggaaactatgctctggggggaccagtgtaggttatatcactgcaaaagcaggccttcacagtggggtgaggtggaagtgtgcacagccaccactgtgagggcagccccctgtggctatccagttctgaggggcaggaacggcagtgtagttgatgaccacagaaagtttactcaagtgcggagtttcatccacatcccatctctgctctccaagattttggctgcagctcacattacaagtgaaagcaatagttacagcaattgttacatttcatcttgcccgtggcattcgtggaattgaaaaaagcacaatgaaaaatagcaggaagacaccaccaggctgcgacaccaccaggcttgggataatcaagatttggcaccattttattctccatcatctatgaggactc

SEQ ID NO: 20000 - DNA, 485 bp, Homo sapiens
  misc_feature (1)...(485): n = A,T,C or G
tattagccccgcgctgcaggaanncgtttgcccgcgctgcaggaattcggcacgagggaaaaccgtgtactattagccatggtcaaccccaccgtgttcttcgacattgccgtcgacggcgagcccttgggccgcgtctcctttgagctgtttgcagacaaggtcccaaagacagcagaaaattttcgtgctctgagcactggagagaaaggatttggttataagggttcctgctttcacagaattattccagggtttatgtgtcagggtggtgacttcacacgccataatggcactggtggcaagtccatctatggggagaaatttgaagatgagaacttcatcctaaagcatacgggtcctggcatcttgtccatggcaaatgctggacccaacacaaatggttcccagtttttcatctgcactgccaagactgagtggttggatggcaagcatgtggtgtttggcaaagtgaaagaaggcat

SEQ ID NO: 20001 - DNA, 473 bp, Homo sapiens
  misc_feature (1)...(473): n = A,T,C or G
gaggggnnnnnaggggnngnagcngnnnnnnnnnnttatgcaccgcttgtangacttcggcacgagccccaggcccacagcgtgggaactcactttcccttgtgtcaagacatttctctaactcctgccattcttctggtgctactccatgcaggggtcagtgcagcagaggacagtctggagaaggtattagcaaagcaaaaggctgagaaggaacagggaacattggagctgactgttcttggtaactgattacctgccaattgctaccgagaaggttggaggtggggaaggctttgtataatcccacccacctcaccaaaacgatgaaggtatgctgtcatggtcctttctggaagtttctggtgccatttctgaactgttacaacttgtatttccaaacctggttcatatttatactttgcaatccaaataaagataacccttattccataaaaaaaaaaaaaaaaaaa

SEQ ID NO: 20002 - DNA, 477 bp, Homo sapiens
  misc_feature (1)...(477): n = A,T,C or G
nttttgaccnactcgctccgcctgtangaattcggcacgagaataaattccttctaaaccacattggaactgacctgaagaagcaaactcggaaaatataataacatccctgaattcaggacttccacaagatgcagaacaaaatggataaaaggtatttcactggagaagttttaatttctaagtaaaatttaaatcctaacacttcactaatttataactaaaatttctcatcttcgtacttgatgctcacagaggaagaaaatgatgatggtttttattcctggcatccagagtgacagtgaacttaagcaaattaccctcctacccaattctatggaatattttatacgtctccttgtttaaaatgtcactgctttactttgatgtatcatatttttaaataaaaataaatattcctttaaaaannnnnnnnnnnnaaaaaaaaaaaaaaaaaaaaaaaaaaaaaaaaaaaaa

SEQ ID NO: 20003 - DNA, 499 bp, Homo sapiens
  misc_feature (1)...(499): n = A,T,C or G
nggggtaggggnnnnnnaactggatnnnccnttnnacttgattcgcgctgcaggaattcggcacgagccgccctcagaccccttgtgaagcccaagatcgtcaaaaagagaaccaagaagttcatccggcaccagtcagaccgatatgtcaaaattaagcgtaactggcggaaacccagaggcattgacaacagggttcgtagaagattcaagggccagatcttgatgcccaacattggttatggaagcaacaaaaaaacaaagcacatgctgcccagtggcttccggaagttcctggtccacaacgtcaaggagctggaagtgctgctgatgtgcaacaaatcttactgtgccgagatcgctcacaatgtttcctccaagaaccgcaaagccatcgtggaaagagctgcccaactggccatcagagtcaccaaccccaatgccaggctgcgcagtgaagaaaatgagtaggcagctcatgtgcacgttttctgtttaa

SEQ ID NO: 20004 - DNA, 465 bp, Homo sapiens
  misc_feature (1)...(465): n = A,T,C or G
gattgaccgcctgcggattccagtcgagcgcgcggnggccggacggacagccccacaccgacatgtaaccatggactgcaggaccaaggcaaatccagacagaacctttgacttggtgttgaaagtgaaatgtcatgcctctgaaaatgaagatcctgtggtattgtggaaattcccagaggactttggagaccaggaaatactacagagtgtgccaaagttctgttttccctttgacgttgaaagggtgtctcagaatcaagttggacagcactttacctttgtactgacagacattgaaagtaaacagagatttggattctgcagactgacgtcaggaggcacaatttgtttatgcatccttagttaccttccctggtttgaagtgtattacaagcttctaaatactcttgcagattacttggctaaggaactggaaaatgatttgaatgaaactctcagatc

SEQ ID NO: 20005 - DNA, 503 bp, Homo sapiens
  misc_feature (1)...(503): n = A,T,C or G
agaggcanaanaanngttgatagcctgcanggcctgcgagaataggcacgagcgcagatccatcctggggtctcccgggcagggatggctgacctcgagtcccctcccttcccgagaacctgctctgtcccgagggcagctaacaagggctgagccccaggtacaggttgcctcctccacggcaggaatttttaccaaaaccacaagcaaaaaacaaaacagaccaccacgaccaacaacaaagatggggggtagggttttgtaaaggttctgttaggttcatatttttatatcattttgcccataaatgcggaatttgccgtgggaatttgaagacaaatgatctatgtttttatggttttctagggaaggtgttctgggggccgggctctctccagctgtgggaggcctgctccctctggggggcaccctgggcagggtgggggggccttgggaggcgcttcttgccaaatgcaaacgaggggtgagcctgccagcgtttg

SEQ ID NO: 20006 - DNA, 467 bp, Homo sapiens
cttgcccgcctgatgaattcggcacgagcctggctctgttgtaagagtcttagaccatacttgaattggtatggtatcatttgaattagactgtcatgaattaaaaatgtataccataaattctgaagcagccactgaaataacagatatatagttaattaaccaacaaaggaggtaaaatgcaatcataaaaacaactcagctaacccaaaagaaggtagagaaagaagacaactagaacaaagaatagataatatggataggaaactaatagcaagatgactcaactgtatccatgagcacattaaatgtaaattgcccaaatgtctcaattaaaaggcagatgtgttagattgaataaaaaaacaagatgctacaagaaatctactttaaatgtgaagacacaaagattaaagtagctatatgaatatcagataaagatttcagagccaagactattaccagag

SEQ ID NO: 20007 - DNA, 512 bp, Homo sapiens
  misc_feature (1)...(512): n = A,T,C or G
gggggannnnnatcgctcggctgccgttnttttcctcttaggccactgctggagatgaattccagaagcaccactttcgtcttgagcgatgcttatttagtgcaatatcttccttctctcgttcccttttcacacgctggtagtgatcttcttccttcaggtaccacacagggggccagcggtgccgctcgaagtattcctggttgtctgcagattttgatttgatttccttacggaacttggagcatacactgttgtagttggtgcagatgtggtgcaaacaccaggcggccaactggtgggcattgtgaaactgagccaattccaagtaagagagcacttctccgtcaatgcccacgccactcgtggcggctttggtcaactcctgaacggcatgctgttctgcaagtgcaaccaagtgtggcaggcaaaatctggttgccaaggcaattaattcccagcggtccagatccaagttaggagacaacttgcttgtatagagataatccaat

SEQ ID NO: 20008 - DNA, 513 bp, Homo sapiens
  misc_feature (1)...(513): n = A,T,C or G
agggggnnnnnnattgatcgctcgcctgtangaattcggcacgaggaacacaggtgtcgcgaaaactacccctaaaagccaaaatgggaaaggaaaagactcatatcaacattgtcgtcattggacacgtaaattcgggcaagtccaccactactggccatctgatctataaatgcggtggcatcgacaaaagaaccattgaaaaatttgagaaggaggctgctgagatgggaaagggctccttcaagtatgcctgggtcttggataaactgaaagctgagcgtgaacgtggtatcaccattgatatctccttgtggaaatttgagaccagcaagtactatgtgactatcattgatgccccaggacacagagactttatcaaaaacatgattacagggacatctcangctgactgtgctgtcctgattggtgctgctggtggttgtgaaaatgaaagctgtatctncaagatgggcagacccgagagcatgcccttttgcttacacacttggg

SEQ ID NO: 20009 - DNA, 477 bp, Homo sapiens
  misc_feature (1)...(477): n = A,T,C or G
nccttgccctgcctgcacgaattcggcacgagggaaagtcaagtagcaagaaggaaatgtctaaaagagatggcaaggagaaaaaagacagaggagtgacgaggtttcaggaaaatgccagtgaagggaaggcccctgcagaagacgtctttaagaagcccctgcctcctactgtgaagaaggaagagagtccccctccacctaaagtggtaaacccactgatcggcctcttgggtgaatatggaggagacagtgactatgaggaggaagaagaggaggaacagacccctcccccacagccccgcacagcacagccccagaagcgagaggagcaaaccaagaaggagaatgaagaagacaaactcgattaagaaaggagacaagttccatgggatacaacctccctcttgttttggttggctctccttttcttttgttactgttcttgctgctagaacttttttaaataaacttttt

SEQ ID NO: 20010 - DNA, 498 bp, Homo sapiens
cattgaccgcgctgcggtattcggcacgaggagcatgtcagtaaaagttatcagtaagagaaattaaagttccttttttgtcagtggttcttatttgaacaaaattgtgttaaaagaataatgggtcataagatttattttgatactgatgctttataatttagaattatgcctgcttaccctaaaaaagttaattcaaaataaaaacataaaaaaaacacattctttttttaaaaggtaagaccagaaagaaaagaaaatgagaaatgagaagaaaatgaggcatacatataccaggaacctaatagggtatggtcactgaaattcactaataaattgagtttaatttttagacagcaggacaaaaagagggaacccaatcaatcatattattcccattgttaagtaagggaatataaattactttttgaagtagcaaattaataaaattattttataagaggaatttatcatgttataataaatttcccaaaagat

SEQ ID NO: 20011 - DNA, 514 bp, Homo sapiens
  misc_feature (1)...(514): n = A,T,C or G
gggggggaggggnnnnnnnnnnttttgccccggctgcaggaattcggcacgagcggagacctcctccacaccatgcagaggcagaaggtgtggagtgaagttaaccaagctgtgctagattatgaaaatcgcgagtcaacacccaaactggcaaaattactgaaactactactttgggctcagaacgagctggaccagaagaaagtaaaatatcccaaaatgacagacctcagcaagggtgtgattgaggagcccaagtagcgcctgcgcttgcgtggtggatccaacaccagccctgcgtcgtgggacttgcctcagatcagcctgcgactgcaagattcttactgcagtagagaactctttttctcccttgtacttttttttgacctggcatctttttatagggaaaaatggcctttgtaggcagtggaaaacttgcaaggaaagctgccgtctctttggcagtctgatgcagagcctgcactctggcactcgctgaagaatctggaaggtt

SEQ ID NO: 20012 - DNA, 499 bp, Homo sapiens
  misc_feature (1)...(499): n = A,T,C or G
gttagaccccgntgnngnnntttgccncgcgctgcaggaattcggcacgagccactgcgcagaccagacttcgctcgtactcgtgcgcctcgcttcgcttttcctccgcaaccatgtctgacaaacccgatatggctgagatcgagaaattcgatgagtcgaaactgaagaagacagagacgcaggagaaaaatccactgccttccaaagaaacgattgaacaggagaagcaagcaggcgaatcggaatgaggcgtgcgccgccaatatgcactgtacattccacaagcattgccttcttattttacttcttttagctggttaactttgtaagatgcaaagaggttggatcaagtttaaatgactgtgctgcccctttcacatcaaagaactactgacaacgaaggccgcgcctgcctttcccatctgtctatctatctggctggcagggaaggaaagaacttgcatgttggtgaaggaagaagtggggtggaagaagt

SEQ ID NO: 20013 - DNA, 496 bp, Homo sapiens
  misc_feature (1)...(496): n = A,T,C or G
cttcgcccgctttgcnccgcgctgcaggaattcggcacgagctggaacccaaagctcccatcagtcgctaccctgtgaacctgtggaggatctgaagtacctgtttaaaaggcatccaaaagatagaatctatcaagctacaaatggctatgttgcctgaagccccagacatcatcctacaagaaataagtccagacttcttaatttccccctggatagagcaggccaccacgctgtaagaaagcacaaagtcttcatagagaaaccatctggagggacctcaagctcccagccaacagccagtcctgcaagaggagtgttcagctgagttcagtcccaacctgagttgcatcaactgagctttcagacatcatggagcaaagacaaagccatctctgctgggcctgaatcctaggccacataatacacaagcaaaacaaaatggctgttttccccccattgcagtttgggtaatttgtacatagctatataactg

SEQ ID NO: 20014 - DNA, 473 bp, Homo sapiens
  misc_feature (1)...(473): n = A,T,C or G
ntttgatcgcctgcggaatcttcacgagctcaccttcatcttcttggagcagatgaacaaggcctacaagcgtctcttcctcagtggctgaagcggccgggggctcccactcgcctgctgcgcctatagccactgcgccctgggggcctgggctctgctgccctggacccctctatttatttcccttccacagtgtggtttcttcctctgcggtaaaggacttggtctgttctaccccctgctccagcttgccctgctcgtcctgatcctgtgatttctctgtccttggctattcttgcagggagctggaaaacttcctgaggatttctggcctccccctgggttttagtttcagggcacacaggacagcagaagatcccctttgtcagtggggaaaccaaggcagagctgaggggacagggaggagcagaagccatcaagatggtcaaagggcctgcagagggagatgtggc

SEQ ID NO: 20015 - DNA, 291 bp, Homo sapiens
  misc_feature (1)...(291): n = A,T,C or G
attgcctgcctgcagcgaattcggcacgagtcanaaccgacctgaggtttcagagcgcagccatcggtgcgctgcaggaggctagcgaagcgtacctggtgggtctgttcgaagataccaacctgtgtgccatccacgctaagagagtcaccatcatgcccaaagacatccagttggctcgccggatacggggagagagagcttaagtgaaggcagtttttatggcgttttgtagtaaattctgtataatattgacaaactggaaatagatcctcgggggggggcccggaa

SEQ ID NO: 20016 - DNA, 491 bp, Homo sapiens
  misc_feature (1)...(491): n = A,T,C or G
agaagagcaaaaattagaccgcctgtttganccgccctgcaggaattcggcacgaggcagggtatgccacttagatccagctgaattcaggagcccctggcttcagattggttgaaagccctcaaggacttctcgttttccagatcagtcttatgtgcaattcaacatttcgtagagatgagagtagatgatgaaccatgctaataataacagcaaacttgtttatagctctgttgccaggcatgctactaagggctttacatatatgttagtttgcttaatcccaacaactccatatgatggttattgttattatccccaatttatagatgaggaaactgaggcataaaaaggttaaggggcttaactcagggtctatcttaatctctgtctctctctctctctctctctcacacacacacacacacacacacacactcacactcacacacccctagtanatagtagagctggaattcacacccacgcag

SEQ ID NO: 20017 - DNA, 474 bp, Homo sapiens
  misc_feature (1)...(474): n = A,T,C or G
gccccccccccccgccccgcccatttgcccgcgctgaattgacncccgctgcaggaattcggcacgagccatcccatgcaacaacaagggagctcactcagtgggtttgatgtggtggatgctggctcgggaagttctgcgcatgcgtggcaccatttcccgtgaacacccatgggaggtcatgcctgatctgtacttctacagagatcctgaagagattgaaaaagaagagcaggctgctgctgagaaggcagtgaccaaggaggaatttcagggtgaatggactgctcccgctcctgagttcactgctactcagcctgaggttgcagactggtctgaaggtgtacaggtgccctctgtgcctattcagcaattccctactgaagactggagcgctcagcctgccacggaagactggtctgcagctcccactgctcaggccactgaatgggtaggagcaaccactgactggtn

SEQ ID NO: 20018 - DNA, 458 bp, Homo sapiens
  misc_feature (1)...(458): n = A,T,C or G
nattgacccgctctgaggactctgcacgaggaaaattgctgtgcctcccaaattgttttgagctttccatgttgctgccaaccataccttccttccctgggctgtgctacctgggtccttttcagaagtgagctttgctgctacaggggaaggtggcctctgtggagccccagcatatgggggcctggattcatttcctgcccttcctcagtttaatccttctagtttcccacaatataaaactgtacttcactgtcaggaagaaatcacagaatcatatgattctgcttttaccatgcccctgagcaatgtctgtgctagggaacttcccgtcccatatcctgcctcagcccgccaaggtagccatcccatgaacacactgtgtcctggtgctctctgccactggaagggcagagtagccagggtgtggccctgccatcttgacagcagggccactt

SEQ ID NO: 20019 - DNA, 359 bp, Homo sapiens
  misc_feature (1)...(359): n = A,T,C or G
agcggggnttttnaacctgatagctgcggcattcggcacgagacgtatagatactgtggtcccctttcttttaatatataaattatgtatggtgaagtggagtgtattgtgtaggtcccgtatttaatgcctctgactgcctttgaagcgcagccctctgtggcccgcagccccctgagcctggctgttgtgtggtatttatgctctctttgtctgcctgtttctaaggaaatgcatgtgtgccctgagccgtgatgatcctcccatccgtgttgtgagcacaggcatttgtgtctggtctgtcctccctgttgattggtctggcatttccggtattaaaatgataaaataaaaaaaaa

SEQ ID NO: 20020 - DNA, 475 bp, Homo sapiens
cttgcaccgcctgcaggatttcagcaccaggagactgagccttggatttaggactttagacgagtataggatggaacaaaatttttgcagtaaatgtaaaaaatgctgtgtaggaggaaggcgtataaggatgccccagctgtaggttctttagattgtctgtagtatttccacgagtaagttgtttttgatgtgtgtactggtattgctggtagatttgaagtggagtctggcggcttcttccacactcccctcccactagcttgtgtcaagatgtgacatcctatgcagcaaaactaggtgagcttgcacccccaggcggtggctctcaactttgtctcattgttcagaaatttcggccaggcgccgtggctcacccctgtaatcccagcactttgggaggccatggcaggtggatcacttgaggtcaggagttcaagaccagcctggccaacacggtgaaaccccgtctcta

SEQ ID NO: 20021 - DNA, 438 bp, Homo sapiens
cattgactttgcatcgcctgcaggaattcggcacgaggtttccttttatgagacccattcctatttcttatagtcaatgtttcttttatcacgatattattagtaagaaaacatcactgaaatgctagctgcaagtgacatctctttgatgtcatatggaagagttaacacacgtggagaaattccttgattcacaatgaaatgctctcctttcccctgcccccagaccttttatccacttacctagattctacatattccttaaatttcatctcaggcctccctcaaccccaccacttcttttataactagtcctttactaatccaacccatgatgagctcctcttcctggcttcttactgaaaggttaccctgtaacatgcaattttgcatttgaataaagcctgctttttaagtgttaaaaaaaaaaaaaaaaaa

SEQ ID NO: 20022 - DNA, 464 bp, Homo sapiens
  misc_feature (1)...(464): n = A,T,C or G
ntttgaaaagctcganccgcgctgcaggaattcggcacgagctgaagtaaaaatatatcaccttttagcttaattaaatagataagaacttgacaacaagatggctcacttattaggcttattttatatctatgctacttttttttttcttccaggaaaagttcagagagtttgatttacatctaacatattcccaaagaaactagagggaagttgacaatagatcttatcaccttattttgcagatatagatcttgagactcaaagactttgtcttcagtcaaacagcaacagtaatcactgcaaatattgctacaaaacattccacttggccacattgccctgctgcaaatagatgtctctcagaaagtgaaatcaatgaaaatgagaccatttgtcaagtattttctgttggagaaatgagttccttgagtggtcagttacagagagcaaaaggccacagc

SEQ ID NO: 20023 - DNA, 469 bp, Homo sapiens
  misc_feature (1)...(469): n = A,T,C or G
gctggtannnnnaaattgacttctatagacgattcgccacgaggttttccagacaccctatgcttcagctcaaaaaacggagcttgtagctgtaattgaggtattgactgcttttaatatgcctattaatgtgatttctgattcttcatatgtggttcattcgacacaattaattgaaaatgctgagttacgatttcatacagatgaacaactgatgactttatttatgcaattgcaaacagcagttaggagtagaatgcaccctttttacatcactcacattagggctcatacacctcttccaggacctttgactgcagggaatcaaatggctgatcgcctagttgctactgcaatatctaatgctggacactttcacaatttaacccgtgttaatacctctggtctcaaacgcagatacagcagtacctggaaagaagctaaagctattatccagcgatgcccaact

SEQ ID NO: 20024 - DNA, 461 bp, Homo sapiens
  misc_feature (1)...(461): n = A,T,C or G
nattgacccgctctgangacttcggcacgaggagctggggttgtgtccctgctgggctgccgttccagctggactgccgccatggaactcagcgccgaatacctccgcgagaagctgcagcgggacctggaggcggagcatgtggaggtggaggacacgaccctcaaccgttgctcctgtagcttccgagtcctggtggtgtcggccaagttcgaggggaaaccgctgcttcagagacacaggctggtgaacgcgtgcctagcagaagagctcccgcacatccatgcctttgaacagaaaaccctgaccccagaccagtgggcacgtgagcgacagaaatgagggactgggatctgcacagccattaaattataaatctggaaaaaaaaaanaaaaaaaaataaaaaaaaaaaaaaaaaaaancccctggggggggggccgggccccaatttgcccttatg

SEQ ID NO: 20025 - DNA, 314 bp, Homo sapiens
  misc_feature (1)...(314): n = A,T,C or G
nattgacccgctctgcaggtctcagggtgaatggactgctcccgctcctgagttcactgctactcagcctgaggttgcagactggtctgaaggtgtacaggtgccctctgtgcctattcagcaattccctactgaagactggagcgctcagcctgccacggaagactggtctgcagctcccactgctcaggccactgaatgggtaggagcaaccactgactggtcttaagctgttcttgcataggctcttaagcagcatggaaaaatggttgatggaaaataaacatcagtttctaaaaaaaaaaaaaaaaaaa

SEQ ID NO: 20026 - DNA, 474 bp, Homo sapiens
  misc_feature (1)...(474): n = A,T,C or G
atggtntttagacgtctgtagacttcggcacgagagataactgttaaaatgttgtatcttgtaaacaaaagaaagattgcctgctaggattgtgccatctttaaaatttttactattggtcatttgcagaacagtaaattctgtgtgttggtacagagtgctctgtaccagtgctcatcatcccttcttcataccaacggtccctagttataggaatttaatatttttaaaagttttacattgctgtatattcaaagatttgttttattaatatgcaataaaggcttagaaattttagttttattccttaattggtaaatatggttaactatggaatatatttacttcctctagtgaatgtcctttatataatgactaatttgggagtaatgtgtgctctgtaagtttgttttaaattgcactgtttttaaagaaactgtagaggagcaacaaaaatccaagcaacttcataat

SEQ ID NO: 20027 - DNA, 477 bp, Homo sapiens
attgcccgcctgcagatttgcgcgcgctgcatgaattcggcacgaggggagaaatacctgattctcccaatctgcagtgggagagctttgctgaattccatcccaaagtcaaacatgggcaagaggtgaggatttcacttttaccctcaagtccgatttgtctgtgattttaaactaactgtgtatgtattgatgtttggaagattgtttgaattttaaagtgataatagtacttaatgttatccagtattgttcattaaatggtgttatcctaaagctgcacttgggatttttacctaacgctttactgattctctcaagcacatggcaaagtttgatttgcactccgttcatttctgacacgttttgctgcctcctacctttctaagcgtcatgcaaattcgagaatggagaaggacgctgccggtccctgaacggtgtggagagggcggaaagtggactccagcgcagcttgag

SEQ ID NO: 20028 - DNA, 504 bp, Homo sapiens
  misc_feature (1)...(504): n = A,T,C or G
tganatntcccaagcaanaanaanantttgaccgcctgcagatttattcgagtttcataaaaagnggagacagactgatgtgtatacgtaggaattttttccttttgtgttctgtcaccaactgaagtggctaaagagctttgtgatatactggttcacatcctacccctttgcacttgtggcaacagataagtttgcagttggctaagagaggtttccgaagggttttgctacattctaatgcatgtattcgggttaggggaatggagggaatgctcagaaaggaaataattttatgctggactctggaccatataccatctccagctatttacacacacctttctttagcatgctacagttattaatctggacattcgaggaattggccgctgtcactgcttgttgtttgcgcatttttttttaaagcatattggtgctagaaaaggcagctaaaggaagtgaatctgtattggggtacaggaatgaaccttctgcaacatn

SEQ ID NO: 20029 - DNA, 471 bp, Homo sapiens
attagaacggcctgaggaattcggcacgaggtcgcctgcgcatcggcgggccgggaggctgagcagtactgttgagagcggtgtgaggtgcttggtagcgcgccgtaactgcttccacgtccttgcttcacctcaggtaaagagagaagtaatggaaggcctgtctgatgttgcttcttttgcaactaaacttaaaaacactctcatccagtaccatagcattgaagaagataagtggcgagctgctaaaaaaacgaaagatgtaactgtgtggagaaaaccctcagaagaatttaatggatatctctacaaagcccaaggcgttatagatgaccttgtctatagtataatagaccatatacgcccagggccttgtcgtttggattgggacagcttgatgacttctttggatattctggagaactttgaagagaattgctgtgtgatgcgttacactactgctggtcagct

SEQ ID NO: 20030 - DNA, 473 bp, Homo sapiens
  misc_feature (1)...(473): n = A,T,C or G
nattgacatgcctgcacgaattcggcacgaggcgcgaggtcttgcatttgctacttggtcctgttcgtggcgccgcgcctccgggtgttggggagtccgggatgatggggaatccgtggctcgccctagtcgcggggacaccgtcttccaggagctgtccccaggcaaactcacagacatcttcaaagaggcttcttggacattctgctttttgctcctcataacaggcttcgatggagtatctctcttattttccaggctgcagtacagtggcgtgatctctgctcactgcaacctccaccttccagggtcaagcgattctcctgtctcagactcacgagtagccgggattacaggcacatgcccccattcccagctaatttttgtatttttagtagtgacggggtttcatcatattggtcaggctggtctcaaactcctgacctcacgtgatccgcctcggcctcccaaag

SEQ ID NO: 20031 - DNA, 490 bp, Homo sapiens
  misc_feature (1)...(490): n = A,T,C or G
aggggagggagcnnngngcnnnnnnnaattgannngcttgacccgcgctgcaggaattcggcacgaggaacagcagaagaagcaacaggaggctgagaaactgcatcgacaagaaaggaaaagactccgtcgttcggccggacacctgaagtcaagacacaaaagaggacggtcgtttcattgatttgggaagtggtcctacctgtgattagggaggggtacgtctcccccaaactgatcatcgttagggtgttaaacacagacgaggaaacacacgtttttaaagttcatgtacgttcttgtacacagaggtaaagatttgaaaacctgtgccttgtgggttggactttgaagctggccccgccgacggccaccgcacagccccaggggtgtgcttgcgagtcgttgctccctggaaacattgtcctttccccacggctttaatcatgaaaaccaggctgggggttttttaatattgtgaaatgtacac

SEQ ID NO: 20032 - DNA, 460 bp, Homo sapiens
  misc_feature (1)...(460): n = A,T,C or G
nattganncgccttgangacttcggcacgagctgtgcctccgggttgcacgaagagtccgagtcatttctcagaaggttttgataggtgggccttagaggagacgccgccgagcaccgcaagaactggaaaacacacccctctctgtctgcctgggagagccacggaaattggcacttctctgagtgaagctgaggagaaggctgtaaatctgccaaaacagccttgaagtattcttttgtcatgaggaagtgacggctgctggagggaggtgaacaccacaaggagagatggcatctggcctgggccccgcctagcagcagctccacctcctaggccaggccctgtgggatgcgccactagaccaccatggacggatcccacagcgcagccctgaagctgcagcagctgcctcccacaagtagctccagcgccgtaagcgaggcctccttctcctacaa

SEQ ID NO: 20033 - DNA, 464 bp, Homo sapiens
  misc_feature (1)...(464): n = A,T,C or G
nttagannnngcttganccgcgctgcaggttgtgcgagcagaagagtgctctccatgctctaatttccgggctaaaactacccctgagtgtggtcccacaggatatgtagagaaaatcacatgcagctcatctaagagaaatgagttcaaaagctgccgctcagctttgatggaacaacgcttattttggaagttcgaaggggctgtcgtgtgtgtggccctgatcttcgcttgtcttgtcatcattcgtcagcgacaattggacagaaaggctctggaaaaggtccggaagcaaatcgagtccatatagctacattccacccttgtatcctgggtcttagagaccctatctcagacagtgaaagtgaaatggactgatttgcactcttggttctttggagccttgtggtggaatccccttttccccatcttcttctttcagatcattaatgagcagaataaaa

SEQ ID NO: 20034 - DNA, 490 bp, Homo sapiens
  misc_feature (1)...(490): n = A,T,C or G
cggcagggccnncnatttgancgcccattgcaccgctctgcaggaattcggcacgagagtcagtgaagcgcggaggtccgggcgcgcctagagagagtccagtctttgaggaccgagtagtcctgggccacctcccgcctctgctgtcagaagcagcagctgccgccgtggaatccaaaatttcgggagctgtgaccctttcctcatgtaaaacgagtagtcttggacgatctgggcataggaaccaatcagaaacaatcgcttcagcaatcaagaccattgttcatcatggaggaacccatggatacctctgagcctctatctgcattaccattcactgggcagcagtcttttgagccaagtggcaaatttggacagtatccatcgatgcagatgaaccacatccaggcactggggaagtggaggacatagaacagctcaatcagtgtttgatccaacacttccatctcattaagacaagtttgatttt

SEQ ID NO: 20035 - DNA, 458 bp, Homo sapiens
  misc_feature (1)...(458): n = A,T,C or G
nattgaccgcttgaggacttcggcacgaggacattcagactgagcgtgcctaccaaaagcagccgaccatctttcaaaacaagaagagggtcctgctgggagaaactggcaaggagaagctcccgcggtactacaagaacatcggtctgggcttcaagacacccaaggaggctattgagggcacctacattgacaagaaatgccccttcactggtaatgtgtccattcgagggcggatcctctctggcgtggtgaccaagatgaagatgcagaggaccattgtcatccgccgagactatctgcactacatccgcaagtacaaccgcttcgagaagcgccacaagaacatgtctgtacacctgtccccctgcttcagggacgtccagatcggtgacatcgtcacagtgggcgagtgccggcctctgagcaagacagtgcgcttcaacgtgctcaaggtn

SEQ ID NO: 20036 - DNA, 483 bp, Homo sapiens
  misc_feature (1)...(483): n = A,T,C or G
aaggcggaaaaaaaaggaattttgancgccttgatgaactctgcacgaggtgggngctgggccccaccgggagagtggcctggctcgttgcagcctcgtgaacgtccactgtgctgttctgtacgacaagttcatccggcctgagggagagatcaccgattacagaacccgggtcagcggggtcacccctcagcacatggtgggggccacaccatttgccgtggccaggctagagatcctgcagctcctgaaaggcaagctggtggtgggtcatgacctgaagcacgacttccaggcactgaaagaggacatgagcggctacacaatctacgacacgtccactgacaggctgttgtggcgtgaggccaagctggaccactgcaggcgtgtctccctgcgggtgctgagtgagcgcctcctgcacaagagcatccagaacagcctgcttggacacagctcggtggaagatgcgagggcaacgan

SEQ ID NO: 20037 - DNA, 493 bp, Homo sapiens
  misc_feature (1)...(493): n = A,T,C or G
cgtgcgatgancnnaattgatcgcttgcggaattcggcacgagtggatgccttgcctgtgacagttgcagttcctattcgccaaatgaagggcagtgccccgcacgtaagttggaatgatggacctgtgttcagagacttaacagaaccaacaagcaaaacaagtgagaacaggaaaaaggaagaggacactggaatcaattcttgagagttgcactacttggtttttcttccattccaagtttcgtgggacccagagccttttttcttttaaaagctaaaaaacaagtgtttaattcctctttttgttatctgttagataattgagatcacctagaaatgcgtttaatctgttcactcactgtaaattttgaggacccagaattgtcttgtttaatttatactttcacccctgttgcagttaacaccagagaaggaacgtgaatgtcgagcacagccactacccttgttggcacttaatttagaaatagggn

SEQ ID NO: 20038 - DNA, 483 bp, Homo sapiens
  misc_feature (1)...(483): n = A,T,C or G
atagcccgcctgcggttcttgaccccatctgagctccacaatgataacttctccctctccaccattgccgagggctctcacccaaatgatgatcctagtgctccccacaaaatccaggagggtctcaagtcctgcgtgaaagaggaggagtcatttaacatccagaactccatgtcgcccaaacttgagggtggcaaaggtgaccaggctgacttggatgtgaactgtcttcagaataatttaacctaaagcagagcaagaagagaggaagcgggggtagtgggtggggggtaggggaagaaacattatctcctcttgtacagagtctatttcttggaaccatttgttaaactcttttctttttctgatctcatggcatgcttttatgtattttgtacaggagggcaaaaaatacttanaataagcatagaaactgaacagaattgcatacattgggntggtntttctgggctggctggacan

SEQ ID NO: 20039 - DNA, 481 bp, Homo sapiens
  misc_feature (1)...(481): n = A,T,C or G
gggagaccnnnaattgcccggcataggaattctgcacgagggacaacactgcagctaatttttcatgggataacaaaaatataaactgcaatttcttttattttttccctttcgatggtctttttaaacgaggagtaaagatttcaacgccaggtccattttccaaattttgtaccagaaccttgaggatgcttgtctctcgcgcgcttctccgcagaccgaaccctctccggaactcagagctgttcacccaagtcagcggaggaggcctcctgggacttgagcctgagggtggcgaagaaccctaggcagagatcatcaacttggtaccgatgagtgacgcggagcttgaacattccagcgacttgctccagggccactcccagttaagaggctgagtgttaactgcaagaggctgagtgttaactacgccgttggctccaggaaccgaaccgggtttggatacagacccagtcacacc

SEQ ID NO: 20040 - DNA, 491 bp, Homo sapiens
  misc_feature (1)...(491): n = A,T,C or G
aggatggtccagggagggccngattganngccttatgaccgcctgcggttcagccgtctagaacgtctggagattttgtccagcaaggagccccctaacaaaaggcaaaatgccagacttcgggttgaccagttaaagtatgatgtccagcacctgcagactgcgctcagaaacttccagcatcggcgccatgcaagggagcagcaggagagacagcgagaagagcttctgtctcgaaccttcaccactaacgactctgacaccaccataccaatggacgaatcactgcagtttaactcctccctccagaaagttcacaacggcatggatgacctcattttagatgggcacaatattttagatggactgaggacccagagactgaccttgaaggggactcagaagaagatccttgacattgccaacatgctgggcttgtccaacacagtgatgcggctcatcgagaagcgggctttccaggacaagtactt

SEQ ID NO: 20041 - DNA, 466 bp, Homo sapiens
attgaccgccataggaattctgcacgagcacagccagagacagagcccctcgagagggatccttggctgcttcattgtcttccccccagcaagccctgctctccacaggcacctctggggtcttggtatggtccccgctcacctccttccagagtcctgagtggtgtgggtgtgggtggcacaggatctggggcatgggaggggttcagagcttcccagagccccgtgtcctggcagactcagctggtgggctggggtgttaaccccagtcctggcgtaggtttacagactctcaaggtacgttggccctggtctcctgggagagaggggtgagggatgtcccctaccaaagcacaaggtgggatcaggctgcctcctgggtcgggtgtcgggggagctgtccggcagcctggcagggagatgcaagggctaaagtaaaattttgtcaagtaaaaaaaaaacaaaa

SEQ ID NO: 20042 - DNA, 489 bp, Homo sapiens
  misc_feature (1)...(489): n = A,T,C or G
aggagttcccagggggnncccctatgancgcctgtggatggtctcaccattgactttgacacagtgaacaagaccccccacactgcaactctgagggaccgtgactcaatgcggcagataagagcagagatctctgagctgcccagcatagtccaagacctagccaatggcaacatcacatgggctgatgtggaggccaggtatcctctgtttgaagggcaagagactggtaaaaaagagacaatcgaggaatgaggacaattttgacaacttttgaccacttgcgctaataaaaaaaaaaaaaaactactcttatgtccactttacaaaaaaaaacagcattgggattactcccagggaccgtattttatcttcaggggctgcctgattttacccccacaattaaagttgaaggaatcctgaacaaaaaaaaaaaaaaaaaacctgggggggggcccgggccccaattcccccttatgggaagcgaaa

SEQ ID NO: 20043 - DNA, 489 bp, Homo sapiens
  misc_feature (1)...(489): n = A,T,C or G
tgtgggtccnccaattgcacgctgattagatcgcctgaggcagtactgtgggctggctcaccatgacgacagagggctatggcgacatggtccccaggagcaccccgggccaggtagtggccctgagcagcatactgagcggcatcctgctcatggccttcccagacacctccatcttccacaccttctcccgctcctacctggagctcaagcaggagcaagagagggtgatgttccggagggcgcaggtcctcatcaaaaccaagtcgcagctgagcgtgtcccaggacagtgacatcttgttcggaagtgcctcctcggacaccagagacaataactgagcgcggaggacacgcctgccctgcctgccatctgtggcccgaagccattgccatccactgcagacgcctggagagggacaggccgcttccgagtgcaagtctggcgcagcaccgactcccacgcacccggngaaggacaccctcactc

SEQ ID NO: 20044 - DNA, 351 bp, Homo sapiens
  misc_feature (1)...(351): n = A,T,C or G
ggtgggccccccaattcancggctgcattgaatcgcatgaggcacagggtgtacagcaagctgtgattcctgggaaaactaaaaaagctctctggacaacggggcccagagctgatggcagacaatgtcagccactaacaacatagcccaggcccggaagctggtggaacagctacgcatagaagccgggattgagcgcatcaaggtctccaaagcggcgtctgacctcatgagctactgtgagcaacatgcccggaacgaccccctgctggtcggagtccctgcctcggagaacccctttaaggacaagaaaccttgtattattttataaaaaaaaaaaaaaaaaactcg

SEQ ID NO: 20045 - DNA, 494 bp, Homo sapiens
  misc_feature (1)...(494): n = A,T,C or G
cgcgcccgcccccaacaacggctgattagaacgcctgaggagaacggcacgagaagacctctacaactcttggctggaccctgtgtttgaccagacccggacacgtctccactgacgacggacagaggagagacaccactgggagccaccctgccctcctgctattgtggaggccaacaaagttttgaaccgaaaaccaaaaaaacaaccaaccaaaaaaaaaaaaaaaaagggaagaaatttaccccccaaaagaaaaacccaaaaatattcccaccaaaacccttttgcccaaagggacccaggggggaaaaccaaccaaaaaaaacccaaaaccaacccaaaaaaaaaaaaaaaatcctaggggggggcccggcccccaattcccctttagggggggggaaaaaaaattcctgggccgggttttaaaaacgggggaaaaggaaaaaaanannnnnntnnnntanatctccaccttatttatttttcttaaa

SEQ ID NO: 20046 - DNA, 482 bp, Homo sapiens
  misc_feature (1)...(482): n = A,T,C or G
nttgacccgcctgcangatttgccccgcgctgcangaattcagcacgagtgaagatacagctgttgaggaacctgtccctgaatttgtaccagtacaagtagaaactgccaagaaatccaaaaagccgagtagagaagttatcagctgcatgtttgagcctgaagggaatgcctgcagcttgacggacagtaccgcanaggagctcgtgctggcgctggtggagcacgcagctgacgaagctcgggacaggatcaaccggttcctcccaggcggcaagatgggctatctgaagaggaacggggacgggagcctgctctacagcgtggtcaacacggccgagccggacgctgatgaggaggagacccacccggtggacttgagctcgctctccagtaagctactcccaggcttcaccacgctgggcttcaaagacgagagaagaaacaaagtcacctttctctccagtgccactactgcgctt

SEQ ID NO: 20047 - DNA, 493 bp, Homo sapiens
  misc_feature (1)...(493): n = A,T,C or G
agcncccaattgatcgcctgcangatttcggcacgaggaaacttatcccattgaaattttcagtgttaaataaaaagagatttgtgatatttttaaatataaacttttacatcagtagtcagcagcctgacaattgaaatttggtaagtcgatatgttttaaaatattttgctctccaaatagaattgtttttaaacaattgggaggttttttgttctttaaatatgttttaattgtcattgtaaaaacaaaatcttgcttgaccctatattatgccatgaatgaattgctgagcctttataatacagtgacagcttgtttcatgcatagtcatggaacatagagatgttctttaaactgacctattgataagaggtttaatgagtttcacggctttcaacactattgtcatatagttatctttgccatttggagtttataaaaccattttatgtattgtgatactaaaggaagttgtttgctttactttaat

SEQ ID NO: 20048 - DNA, 476 bp, Homo sapiens
agctgggaaaattgaattgactcgcgctgcaggaattcggcacgaggagccgccaccaaaatgcagattttcgtgaaaacccttacggggaagaccatcaccctcgaggttgaaccctcggatacgatagaaaatgtaaaggccaagatccaggataaggaaggaattcctcctgatcagcagagactgatctttgctggcaagcagctggaagatggacgtactttgtctgactacaatattcaaaaggagtctactcttcatcttgtgttgagacttcgtggtggtgctaagaaaaggaagaagaagtcttacaccactcccaagaagaataagcacaagagaaagaaggttaagctggctgtcctgaaatattataaggtggatgagaatggcaaaattagtcgccttcgtcgagagtgcccttctgatgaatgtggtgctggggtgtttatggcaagtcactttgacagaca

SEQ ID NO: 20049 - DNA, 366 bp, Homo sapiens
  misc_feature (1)...(366): n = A,T,C or G
ntttagaaacccttganccgcgctgcaggaattcggcacgagaaaatgtgaaggccaagatccaagataaagaaggcatcccccccgaccagcagaggctcatctttgcaggcaagcagctggaagatggccgcactctttctgactacaacatccagaaagagtcgaccctgcacctggtcctgcgcctgaggggtggctgttaattcttcagtcatggcattcgcagtgcccagtgatggcattactctgcactatagccatttgccccaacttaagtttagaaattacaagtttcagtaatagctgaacctgttcaaaatgttaataaaggtttcgttgcatggtaaaaaaaaaaaaaaaaaa

SEQ ID NO: 20050 - DNA, 489 bp, Homo sapiens
atttgcaccgcctgcgtttgctgatcttatgttgggagggtgtccaagttactgatgtagttgttacgaccaatctttcatacttcttggttaagaatctgtccggttctaaagagtgcatttcatatccttgctaagcctactaataagcttcatccctttttttttttttttttttaaaaaaccggcggctggggaccggtggctagggggggaaaaagcaaaggcccaggctgaaccgcaaaaaaaaaaaaatggggcaggggcccaagtaacccgctagctggtggccccgggggggccacaggagcaaaaccatggaaggccaaaccctggggaggctggtccaagtggggggacgtgatgctactgtctaaagctggtctcaagggatttaaaacttaatggccctctgatggccgatcacctttgagacccacctggttaataaacaaaaggcccatgtgggccctctgccctggacctgga

SEQ ID NO: 20051 - DNA, 453 bp, Homo sapiens
  misc_feature (1)...(453): n = A,T,C or G
atttgcnctgcgctgcagttaggtacaaatacatgctctagtcaatgcttatttacatttcctctgagagcctatatttgaattcaagaaagtggagtgtgtctggacctggtcccactgcaggattctcggtgctcaaagagacattggaggtgtggagacaacactgtttagatgttggctacctctgggagagtgggtctgtggagaggcgaaggggagcttccttttatactcagtgcatacttaacaaaggaaaaagaaaagtatcctctcctcctctgacttggtctcccttactctgtctcaatggggaacaggaccttctcctggcagctgcctatgttttggatgcccagtacaacagaaatgttccatttgaaactcacctcaggccatcagacgttactatttttataaccactagacaacgcaggttgccgcatacttctt

SEQ ID NO: 20052 - DNA, 475 bp, Homo sapiens
ggctgggacattgacctgcgctgacggaattcggcacgaggcgcagaccagacttcgctcgtactcgtgcgcctcgcttcgcttttcctccgcaaccatgtctgacaaacccgatatggctgagatcgagaaattcgataagtcgaaactgaagaagacagagacgcacgagaaaaatccactgccttccaaagaaacgattgaacaggagaagcaagcaggcgaatcgtaatgaggcgtgcgccgccaatatgcactgtacattccacaagcattgccttcttattttacttcttttagctgtttaactttgtaagatgcaaagaggttggatcaagtgtaaatgactgtgctgcccctttcacatcaaagaactactgacaacgaaggccgcgcctgcctttcccatctgtctatctatctggctggcagggaaggaaagaacttgcatgttggtgaaggaagacgtggggtg

SEQ ID NO: 20053 - DNA, 496 bp, Homo sapiens
  misc_feature (1)...(496): n = A,T,C or G
gcncggccataggcncgccnntnngntttagcaccgccctgcaggaattcggcacgagccggactgagagcgactggcaggggctggtgagcgagacctcaagcccctggcaacctggatggcaaagagagggtttcagatgcatgcgtaattttagtgcttcatcctgaacatatacacaatctctgaaacaaaccagaactgcaaggcgtaccggcagcatctcggcctgagacaaggttggatcagcctagcactggggacagagcaaattcactctagtacctggtgtgtaagaggaagctggagagtaagaaggaagccctgctgatcctctccaaggagctggacacctgtcaacaggaaagggaccagtacaaactcatggccaatcagctccgggagcgccaccagtcactgaagaagaagtaccgagagctgattgatggagatccatcacttcctcctgaaaaaaggaaacaggctaatcttgcac

SEQ ID NO: 20054 - DNA, 495 bp, Homo sapiens
  misc_feature (1)...(495): n = A,T,C or G
agtntnnagnngnaaggnnnnnnnnnaatcgaccgtgtgcagacttcggcacgagcagaggttcaccgtagacagctttggaaactacgcttcctgtggacaaattgacttctcctgaggtggatcttggaaagcactagaaactaaacatcttcaccaggtgctgaagaaaagtgtcttcgttttaattgccaagcagggatgtggacatttggatggtgacttccctgggtggctccccatagattcaccattgcctctaatggtgtctacacccgtcatactaccagctgagatggtggtgggcataaggagaatttgtgcctataacccttagtgtgttctggttttttttcttttaatttttaaattgtcgtaaaatactcataaaacatactgtcttcaccatttttaagtgcacagttcagtaacgttaactgttaatacattcataatgctgtgtggccgtcaccgccgtccatctccataggcttc

SEQ ID NO: 20055 - DNA, 505 bp, Homo sapiens
  misc_feature (1)...(505): n = A,T,C or G
agagcncnnnnnnnaggccccncatagaccgccttnggatagcaccgcctgcaggaattcggcacgagcacaaacctgattgaatgcaacttggaccaagaactcaaactttttgtatctcgacactctgcaagattctctcctgaagtcccaggacaaaagatccttcatcaccgaagtgacgttttagaaacagtggtcctgatcaacccttctgatgaagcagtcagcaccgaggtgcgcttaatgatcactgatgctgcccgacacaagctgctcgtgctgaccgggcagtgctttgaaaataccggagagctcattctccagtccggctctttctccttccagaacttcatagagattttcaccgatcaagagatcggggagttactaagcaccacccatcctgccaacaaagccagcttaaccctgttctgtcctgaagaaggggactggaagaactccaatcttgacagacacaatctccaagacttcatcaatatta

SEQ ID NO: 20056 - DNA, 505 bp, Homo sapiens
  misc_feature (1)...(505): n = A,T,C or G
ggggnnccaattgancgcccgtnggattgcaccggcgtgtcggaattcggcacgagatcatctaccttcagtgctgcttcaggcggatgatggccaagcgtgagctaaagaagctcaaaatcgaggctcgctcagtggagcgctataagaagctgcacatcggcatggagaacaagatcatgcagctgcagcgcaaagttgatgagcagaacaaagactacaaatgccttgtggagaaactaaccaatctggaaggaatatacaactctgagactgagaaactacgaagtgacttagaacgtcttcaactaagtgaagaggaagcgaaagttgccactgggcgggtccttagtctgcaggaagaaattgccaagctccggaaagacctggagcaaactcgttcagagaaaaaatgcattgaggaacatgcagatcgatacaaacaagaaacagagcagctggtatcaaatctgaaggaagaaaatactttgctgaagcaagaaaa

SEQ ID NO: 20057 - DNA, 505 bp, Homo sapiens
  misc_feature (1)...(505): n = A,T,C or G
agaggggnnnnnnnaggggnnaatagaacgccngnngattgcaccgcctgcaggaattcggcacgagcttaggggacacgtcctcctttcacagcttctaaggtgtccagtgcattgggatggttttccaggcaaggcactcggccaatccgcatctcagccctctcagggagcagtcttccatcatgctgaattttgtcttccaggagctgcccctatggggcggggccgcagggccagccttgtttctctaacaaacaaacaaacaaacagccttgtttctctagtcacatcatgtgtatacaaggaagccaggaatacaggttttcttgatgatttgggttttaattttgtttttattgcacctgacaaaatacagttatctgatggtccctcaattatgttattttaataaaataaattaaatttannaaaaaaaaaaaaaaaaaaaaaaaaaaaaaaaaaaaaaaanccctggggggggggccgggccccaatttcccct

SEQ ID NO: 20058 - DNA, 502 bp, Homo sapiens
  misc_feature (1)...(502): n = A,T,C or G
cgcgaactttggggctgtnganatcgaccggctgtaggaattcggcacgagctagcatctgtgggatcattagaaacacagtatcccaggtcccaccccatacttgccgaacccagatctgcctgttgacaagatcctcagtgactcacgtgtgctcacttaagtctgaactctggcccatgtgcagcaatcacccagtctatgtggagcgcttgtggtgccctcggctctgggagatgccacagaagaagctaatggggtcccaactttggggaacttaacagttgagttggagaatgaaaaagcaattcatgtgatgatctttaaactttatattcatattttatgtacttctctgaatgttgtactctgaatgttgtatgtcacactttaaaaaaataaaccaaggtttcacatgagaaaaaaaaaaaaaaaaaaaaaaagaaaaaaaaaaaaaaaaaaatttttggggggggggcccggcccccaattccccttaaan

SEQ ID NO: 20059 - DNA, 498 bp, Homo sapiens
  misc_feature (1)...(498): n = A,T,C or G
gcagcncaatcgtcggctgcaggaattcggcacgacagaggactggccacattttgcctagataaagatgcacttagagatgaatatgatgatctctcagatttgaatgcagtacaaatggagagtgttcgagaatgggaaatgcagtttaaagaaaaatatgattatgtaggcagactcctaaaaccaggagaagaaccatcagaatatacagatgaagaagataccaaggatcacaataaacaggattgaactttgtaaacaaccaaagtcaggggccttcagaactgcaattcttactccctttcacagactgtccggagtctttgggtttgattcacctgctgcgaaaaacattcaacaaattgtgtacaagataaattaatctcactatgaagatttgaataactagacattatttatgctgccaaactcatttgttgcagttggttgtaatgtctagtggggcttcatcatcctgaaaagaaggagacaggg

SEQ ID NO: 20060 - DNA, 492 bp, Homo sapiens
  misc_feature (1)...(492): n = A,T,C or G
cgccgcccccatggacgactgacgacntgcggcgagacaactatacctgcgtagatataaatgaatgtgatgccagcaatcaatgtgctcagcagtgctacaacattcttggttcattcatctgtcagtgcaatcaaggatatgagctaagcagtgacaggctcaactgtgaagacattgatgaatgcagaacctcaagctacctgtgtcaatatcaatgtcttcacagttgagcctgtcacgttttttttttttttttttttaaaatttgcccaaaaaaaatttatggaccatttccccccccttggatttgcctcaaaggggccccccaaagggggcccccatcttccttatttattttcaccccttgggggttttttgtgaaatcaaagccaaggcccccaggaggggaacattctccggaaggtccacctccggggccttgtccgggtccaagttttcttactctcttgaatttcaaatcctgggatt

SEQ ID NO: 20061 - DNA, 474 bp, Homo sapiens
  misc_feature (1)...(474): n = A,T,C or G
cgcgganacatganactcattcgctctgcacgnnaaagcgaaaaagtgacggattttctctttcttaaacttacctgacacttaaccagagtaccagttctcgtgatgtgaattaatttttttgtgtgctaggggagggagagtgaggagggagtgttatttccttgggaacctagggaggagaggttcctttgttgggaaacttttgttgatagctgctgcctttgtcctgatcgttttctttcccttttctctggtggcctgttgtggtgcaacgagctgatggcatttgatcttgccccattcaggttggggagtgaagtgtgaggacccttttcccccgcttgctgtgaaagcacagattcattgactacagtacactgttgttcagaaaagaaggctgcaaatgacttctgagactttatgtcttttcttccagaccaagaccgtagaaggagtcacatctagccggcn

SEQ ID NO: 20062 - DNA, 468 bp, Homo sapiens
  misc_feature (1)...(468): n = A,T,C or G
tgtgggacctgattgcatgacgatttcggacgagccaccggaacctcttcagaaagtgtgctttatgctgaaacagaatactgttaaaggaaaaaaaagaggggggaagatcaggtcatactatctactctcctcatctctaacagctcaggatctcttagcattttaattagatgtaattgtttgtctttaactgtcaaaaagtttggttctgtgtctgtgttttaataagacgagaggacgagcgattgaggtgtatggagagaaaacagacctaatgctccttgttcctagagtagagtggagggagggtggcctaagagttgagctctcggaactgcatgctgctggacagtatcactgtctttcctagatggcagtcactgaattccattttttcaaggtaatttcttgtgcctctaatagcccaagaatgggaggttgatcagatctgacatgattccttcn

SEQ ID NO: 20063 - DNA, 511 bp, Homo sapiens
  misc_feature (1)...(511): n = A,T,C or G
ggatnnnnnnnntggggngncnnccgnnnncccccccaaatcgcccgcctgcatgaattcggcacgagggggactgaaataacagtggacaccacatggcatgatccaatcagattgagccctggaaagatcatcccatggcaagatccagttagattacacttcctggcatcacctcattgcaagatccaagatcatgcctcattaccttctgcctgtaaaaacctgccccagcccccagctccaggagacagatttgagccaggctcctgtctttctctgcagccttgcaataaacttttctttctacaaaaaaaaaaaaaaacccaaaaaaaaaaaaaaaaaaaaaaaaaaaaaacccccccccagggggggggccccccccccaattcccccttaaggggggggataaaaaaattcgggggccggttttaaaacgggggggggggggggaaaaaannnnnnnnnnnnnnttntttnnnnttnnnntnttttttttnnntgggttttg

SEQ ID NO: 20064 - DNA, 458 bp, Homo sapiens
  misc_feature (1)...(458): n = A,T,C or G
aatttgaattcgaccccgcgctgcaggaattcggcacgagacagggtatatttttgataccttcaatgaattaattcagatgttttacgcaaggaaggacttacccagtattactgctgctgtgcttttgatctctgcttaccgttcaagaggcgtgtgcaggccgacagtcggtgaccccatcactcgcaggaccaagggggcggggactgctggctcacgccccgctgtgtcctccctccctcccttccttgggcagaatgaattcgatgcgtattctgtggccgccatctgcgcagggtggtggtattctgtcatttacacacgtcgttctaattaaaaagcgaattataaaaaaaaaaaaaaaaaaaaaaaactcgggggggggcccgngccccaattgcccctatagggaggggtataacaattaactggccgcggttttacaacgccgggan

SEQ ID NO: 20065 - DNA, 476 bp, Homo sapiens
  misc_feature (1)...(476): n = A,T,C or G
ngaggnngtnnntttggtatgcatggcttcggaattcggcacgagccgctccggcccgctccgaggaaaaactgcatagaaaatctaatggatgaagatgagaaagacagagccaagagagcttctcgaaacaagtctgagaagaagcgtcgggaccagttcaatgttctcatcaaagagctcagttccatgctccctggcaacacgcggaaaatggacaaaaccaccgtgttggaaaaggtcatcggatttttgcagaaacacaatgaagtctcagcgcaaacggaaatctgtgacattcagcaagactggaagccttcattcctcagtaatgaagaattcacccagctgatgttggaggcattagatggcttcattatcgcagtgacaacagacggcagcatcatctatgtctctgacagtatcacgcctctccttgggcatttaccgtcggatgtcatggatcanaattttgt

SEQ ID NO: 20066 - DNA, 505 bp, Homo sapiens
  misc_feature (1)...(505): n = A,T,C or G
gancggcccatttgaacnccccttnnatcgaccgcctgcangaattcggcacgagcctgacccagcgtccaagatcctgagtgcacaggcagattgccacatgatgatgtaaagtggcaatatcgaggcaccaaatgctcccatcatgactggagacgtttaaagttatatcctgatatttttggtgtaagaatccctttcttcatattacacaagggaaggtcaaaggacataggacatctaactctccttttttgaatattagaaattgggtgaaaatgagaatgtcattgcttgttgaataagatattttcaaaatcagagtattagtgggggctgggtcttaggaatgcaattgtaaaagggagtgatggatattcccttggcagaaaaattatatagatgttatatcacagccattataggggtaaggactgtcaccagcttgggtaaaacaaataggctcttctgttatgctgattggaagagtcttacagagctgagg

SEQ ID NO: 20067 - DNA, 462 bp, Homo sapiens
aatttgccccgcgctgcatgaattcggcacgagccgaaatgggcaagttcatgaaacctgggaaggtggtgcttgtcctggctggacgctactccggacgcaaagctgtcatcgtgaagaacattgatgatggcacctcagatcgcccctacagccatgctctggtggctggaattgaccgctacccccgcaaagtgacagctgccatgggcaagaagaagatcgccaagagatcaaagataaaatcttttgtgaaagtgtataactacaatcacctaatgcccacaaggtactctgtggatatccccttggacaaaactgtcgtcaataaggatgtcttcagagatcctgctcttaaacgcaaggcccgacgggaggccaaggtcaagtttgaagagagatacaagacaggcaagaacaagtggttcttccagaaactgcggttttagatgctttgttttg

SEQ ID NO: 20068 - DNA, 477 bp, Homo sapiens
  misc_feature (1)...(477): n = A,T,C or G
attgcccggctgcangatattcggcacgagcctaatgataattaagggtgaaaaaagttgatgcatttcctgaaaggtatgtctcttatttaaaagcgaatgaaagttttatatggctagatggcctgtgaataggaatctgcccacaatgatcctttaaaactattgtggctgtttaagataacttatttttgaattattgtttcctggacaattggcaacatagattctaaatagctgactttgtactcctttacagatgcatggtcatggaggctatgattctgattttagtgatgatgaacactgtggagaatccagcaaaaggaaaaaaagttgaagacgacttactgctccaaaaaccatttcagaaagaaaaacatggaaaggtggcccataaacaagttgcagcagaattgctggatagggaagaagcaagaaatagaaggtttcatctcatagctatggatgcttatc

SEQ ID NO: 20069 - DNA, 505 bp, Homo sapiens
  misc_feature (1)...(505): n = A,T,C or G
aggcnccnncccncgcncgcccatagatcgcccttcggatagcaccgcctgtcggaattcggcacgagcagaggggaaaagcaaagacaaatactttatttggctgattatgttagatacaaaagtttctgagaagagaatacataattgagtttaatgatgctttgctatagcaagcaaacccacttttatgcaattttagaaatggggcagggaaacaaaatgtggtcattcatcagtcacttagtcattgagccttttatattgtacctggaaattaaattccagcaatgacaaaagttttgtgtattcattaaaagaaaactaactggaaaacaggttagattaattcagtactattaaaaaagaattcagagctgttaatattttatcacaggataggatacttaaaatatagcattctgtgctgagatctaaggtgaagtctataaagattaaagttcccttttttctgatgttcaagttgattgttgttcagtatggc

SEQ ID NO: 20070 - DNA, 510 bp, Homo sapiens
  misc_feature (1)...(510): n = A,T,C or G
tggggggaggggnnnnnnnnnntttttgcccggctgcaggaattcggcacgagcagccctctccccacccctaaagggacgccgacgctgtttgctgccttcaccacatattagtgcttgaccctggcaggggaccccatggaaaagatggggaagagcaaaatacatggagacgacgcaccctccaggatgctcgctgggattcccacgcccaccactgtcccccaccccatggctgggaggggcctctgaacggaacagtgtccccacagagcgaataaagccaaggcttcttcccnnnnnaaaaaaaaaaaaaaaaaaaaaaaaaaaaaatcctgggggggggggccgggccccaattcccccttaggggggggggaaaaaaattccggggggggggttttaaaaagggggggggggaaaaaaaannnnnnnnnnnnnnnnnnnnannanaaannnctatnaataannaataaaaaacaccataaggggnnaancaacacctctttc

SEQ ID NO: 20071 - DNA, 485 bp, Homo sapiens
  misc_feature (1)...(485): n = A,T,C or G
ggggggnncnnncggnccccccttttgccnccgctgtttgacnccgcgctgcaggaattcagaacgagaagcgctccactgccatcctcgtcgctgcagcgacacacgctctcgccgtcgccatgactgagcagacgacccttcgtggcaccctcaagggccacaacggctgggtaacccagaacgctactaccccgcagttcccggacatgatcctctccgcctctcgagataagaccatcatcatgtggaaactgaccacggatgagaccaactatggaattccacagcgtgctctgcggggtcactcccactttgtaaagatgtggttatctcctcagatggccagtttgccctctcaggctcctgggatggaaccctgcgcctctgggatctcacaacgggcaccaccacgaggcgatttgtgggccataccaaggatgtgctgagtgtggccttctcctctgacaacccggcaattgtct

SEQ ID NO: 20072 - DNA, 506 bp, Homo sapiens
  misc_feature (1)...(506): n = A,T,C or G
aagccnnnnnnnnattgaaaatcgatcggctgtcggaattcggcacgaganaatctccaagcctatcaagtgtgagctttctggctgcaccagcatgaagacataccgagctaaattctgtggaggatgtaccgacggccgatgctgcgccccccacagaaccaccaccctgccggtggagttcaagtgccctgacggcgaggtcatgaagaagaacatgatgttcatcaagacctgtgcctgccattacaactgtcccggagacaatgacatctttgaatcgctgtactacaggaagatgtacggagacatggcatgaagccagagagtgagagacattaactcattatactggaacttgaactgattcacatctcatttttccgtacaaatgatttcagtagctacaagttatgtaaatctgcttttctaactgggggaaaagattcccacccaattcaaaacattgtgccatgtcgaacaaatagtctatcaaccccagacac

SEQ ID NO: 20073 - DNA, 492 bp, Homo sapiens
  misc_feature (1)...(492): n = A,T,C or G
agtgtgcnnnnnnttagcacgctagaccggctgtangaattcggcacgagctgcaacaggtgtacattttgcatctgtcagaacttcctcaactcagacttgctgcaatctgtaaagaacaaaatcttcactgcagttcttaacaggcacgtgacacaagctgacctcaagagctccacgttttggcttcgagcaagttttggtgctactgtttttgcagttttgggctttgctatgtacaaagcattattgaaacagcgatgatataaaaagaaatactgtccctaccaaaaacaaatacttttatgtacattctgaatgctttaagttctgctagaattattgagatatttatacatgcagagttactttattaatatttgtaattcatgcataagagtattttaatgatagttataactgcagtattggctagcatatggaaagaaaacagctaacagccaaactaaaatggctaaattccagaggcca

SEQ ID NO: 20074 - DNA, 490 bp, Homo sapiens
  misc_feature (1)...(490): n = A,T,C or G
cgggggccnnnnntttcggcggctggtagatctgtacgagctcacctggcacctgttcggtggtcccggagcatcatggtctgcagctctgggcccccagccccactgtgaagtcagtcctgcatgctggccgaggcccggccacctcccgatgcctccagagtcagtgggaaggagtcagcccttcccagacttccccgccacctccagcaggagcagctcagtttgtggctctgggagctccgcttttgcaaacccaaaaaggctgtgcatttggaagccaaacgctcagcatgcggctgccgagtctggttttgtggacaaagcaaactgtggaatggcttctcggtgtctgtataaagggacaaacggttgcattcaccctttgtactataacaccgcttctgcattcgccatatccgttttttaacctttttgtctccggggaacttctcattcgattattatgtcttctgatgatttgccatgt

SEQ ID NO: 20075 - DNA, 496 bp, Homo sapiens
  misc_feature (1)...(496): n = A,T,C or G
nattcgccccgcgctgcaggaattcggcacgagctcaggcctgcctgcgaagcattgtcctacataatggtagaggacgaactggcacttttcgataaaagcataaatgaattttggaataaattcaaaagtacggacacctcctgtcagatggcgggactaagagatacctacaaggattccatcaaagcatttgcagaaaagctgtctgtgaaattaaaggaagaagaacgaatggttgagatgtttctggaatatcaaaatcagatcagcaggcaaaataagctcattcaagaaaaaaaggataacttgttaaaattgattgctgaagtaaaaggcaaaaagcaggaattggaagtactgactgcaaatatccaggatcttaaggaagaatattctaggaagaaggaaactatttctactgctaataaagcgaatgcagagagggtgaanaggctgcagaaatctgcagacttggtatanagatcgactngga

SEQ ID NO: 20076 - DNA, 500 bp, Homo sapiens
  misc_feature (1)...(500): n = A,T,C or G
agggcggnnnnnttttgcttcgcccgcctgcaggaattcggcacgaggccttttgcaagtagcgttagctctttttaaatgttgaactgagctaaggatgcactttcttgtggacatagaaagggcccacgtaaggccctgagtaggctccttagttgctgctttacctgatgagggccaaagagattaactctgcctcgttgccatgtctcagaaaagttgccatatttcacccagaaggggctcgttttcctcttactcttactttaaccatgtgcctggaggcgccattctgggctcttgcacttgcccagcctttctttgccaggggcagagaagggaaagggggtagattgagtgtgccaagggccgtgcaagggcaggcttgctttccacccatctgctgagggagccctctcctctcgctccttgcctctgttcacacctgttgtcttggaagaagatggtccctttgtcttaaggctttgtgataaagtcat

SEQ ID NO: 20077 - DNA, 492 bp, Homo sapiens
  misc_feature (1)...(492): n = A,T,C or G
ggcgccccattgacaactgagcgctttcggaattccgacgagcctgcttgagttttgcacttggaagaaccctgcaccggctggcgtgtgcgacggcccagtcccatccagagcatggagcccgaccccagccagcgccttccactccatcatttcatttcacacccccgaagggaggggaggccaggaggggagctgctcctgccagaagctggtgggtgaccgttgggaatcggccacacctggtgtccatgggcagcctggtgcaattccattcatttgtacagaaacatttttgaaaaattcttttcaataagatgcaaaatcttccaacttttcaacccaacgtgatgaatatttgattttgttctagatttcctgtagctgtgaattgttaaaatgtatgattcaggataaaacgtaaacacgtgctggtagtaatttcttgtggatttcattggtttgctttcaatanagccttntttaaaaaaa

SEQ ID NO: 20078 - DNA, 427 bp, Homo sapiens
ggatgtgccccgcgctgcaggttcagcttcttcccgggctgcaggaattctgcacgagcagaagcgagatgacgaagggaacgtcatcgtttggaaagcgtcgcaataagacgcacacgttgtgccgccgctgtggctctaaggcctaccaccttcagaagtcgacctgtggcaaatgtggctaccctgccaagcgcaagagaaagtataactggagtgccaaggctaaaagacgaaataccaccggaactggtcgaatgaggcacctaaaaattgtataccgcagattcaggcatggattccgtgaaggaacaacacctaaacccaagagggcagctgttgcagcatccagttcatcttaagaatgtcaacgattagtcatgcaataaatgttctggttttaaaaaataaaaaaaaaaaaaaaaaa

SEQ ID NO: 20079 - DNA, 510 bp, Homo sapiens
  misc_feature (1)...(510): n = A,T,C or G
cggggtccaactgangtccgtangacttcggcacgagcaagagcgaaactccgtcttagaagtggaccaggacaggaccagattttggagtcatggtccggtgtccttttcactacaccatgtttgagctcagacccccactctcattccccaggtggctgacccagtccctgggggaagccctggatttcagaaagagcaagtctggatctgggaccctttccttccttccctggcttgtaactccaccaacccatcagaaggagaaggaaggagactcacctctgcctcaatgtgaatcagaccctaccccaccacgatgtggccctggcctgctgggctctccacctcagccttggataatgctgttgcctcatctataacatgcatttgtctttgtaatgtcaccaccttcccagctctccctctggccctgccttcttcggngaactcctggaaatatcagttactcagccctgggccccaccacctaggccactcctccaaagg

SEQ ID NO: 20080 - DNA, 508 bp, Homo sapiens
  misc_feature (1)...(508): n = A,T,C or G
gcgggcgnccnnnatggccccctttgccccgcgctgcaggaattcggcacgagcagatagctgccagagcttctcttattgagcaactgatgtccaaaaggaattttgaggatcttggcaaccaccttactgagctagaaacaatttatgtgactaaggagcatctccaggagacagatgtggtcagagctgtgtacagagtcctcaaaaactgcccctctgtggctttgaaaaagaaagccaagtgtttgctatcaaagtggaaagctgtttataagcagactcactccaaagcgaggaacagccctaaattatttcctgtgaggggtaataaagaagaaaattcaggaccttctcatgacccaagtcagaatgagacactgggcatctgcagctcgaattctctgtcttcccaagacgttgcaaaactcagtgaaatgattgtgcctgaaaatagagccattcaattgaaacctaaggaagagcattttggggatggtgaccctga

SEQ ID NO: 20081 - DNA, 500 bp, Homo sapiens
  misc_feature (1)...(500): n = A,T,C or G
cagccncnnnnaatagacgtctgtagacttcggcacgagtaatgtcttaagtaagtgcttaatttggaatagagaaaccagtatattttaaaaaagaaaaatattctttgtagcaactgtaaattctcccattataacagtgaacagagctccaggtaataacgcataggcatgtcaggttgcatctgtatatttgactacattagtattagtgacatcaggtggatataaaagaaaacccttggaaagagaactgccttagccatgatttcgttagtagacctatttatgattcaattgcaattttcagataggatgtgaacatggaatttcattgaaaatagtttaattttttatataaaaggttttgtatataatgtgtgtcagtgactattttcaaaatcattttcatcaagacaccttttttctaaaataggcattgcatacacatatgcacacgtatgtgcatgtgccacacattttttgtataatgttgggtt

SEQ ID NO: 20082 - DNA, 474 bp, Homo sapiens
  misc_feature (1)...(474): n = A,T,C or G
cattgccncccctgcatgaattcgccacgagaaaaagctccagaactccaccaagatcctgcagaagaataacctgaatctgctcagagacctggctgtgcacattgcccatagcctcaggaacagtccagactggggaggtgtggtcatattacacaggaaggagggtgattcagagttcatgaatatcattgccaatgagattgggtcagaggagaccctcctgttcttaactgtgggcgatgagaaaggtggtggactcttcttactggcagggccacctgcgtctgtggagaccctggggcccagggtggctgaggtcctggaaggcaaaggagcagggaagaaaggccgttttcagggcaaggccaccaagatgagccggcggatggaggcgcaggcgcttctccaggactacatcagcacgcagagtgctaaggagtgagggcttagggcactcacctcctgtttccn

SEQ ID NO: 20083 - DNA, 489 bp, Homo sapiens
  misc_feature (1)...(489): n = A,T,C or G
tggagggccnnnnnagaagnnnnactcgatnngcctgatagactcgcgctgcaggaattcggcacgaggtacaagcaccctgtaaatggtactttccattagatatgggagggggactcaaatgtctgaaaagctaccaagtcttgagtgctttgtagcctatgttgcatgtagcggactttaactgctccaaggagttgtgcaaacttttcattccataacagacttttcacattggattttaaacaaagaggctctggggtataagatgtcattctctatatggcactttaaaggaagaaaagatatgttgctcattctaaaatatgcattataatttagcagtcccatttgagattttgcatatgtttaaaagtacttttaaagaagagcaattgacctttaaaaatgtgagggctcagtaccatgtcatgttgcctcctctgggagactgaagtgaagctctacatagattaaatgggagaaacg

SEQ ID NO: 20084 - DNA, 484 bp, Homo sapiens
  misc_feature (1)...(484): n = A,T,C or G
cgcgcggggnnnnnatttgaaactcgatccgcgctgcacgaattcggcacgaggtcgtgatggcggcgccggaggcggaggttctgtcctcagccgcagtccctgatttggagtggtatgagaagtccgaagaaactcacgcctcccagatagaactacttgagacaagctctacgcaggaacctctcaacgcttcggaggccttttgcccaagagactgcatggtaccagtggtgtttcctgggcctgtgagccaggaaggctgctgtcagtttacttgtgaacttctaaagcatatcatgtatcaacgccagcagctccctctgccctatgaacagcttaagcacttttaccgaaaaccttctccccaggcagaggagatgctgaagaagaaacctcgggccaccactgaggtgagcagcaggaaatgccaacaagccctggcagaactggagagtgtcctcagccacctggaggacttctt

SEQ ID NO: 20085 - DNA, 496 bp, Homo sapiens
  misc_feature (1)...(496): n = A,T,C or G
aggcccgccncaatcgctggctgcacttttttanagttcagctttttattgaacatgttataaaagaggtttagtcaaaaagaccaaagcccatgtcatcatcagactcctcggattcttctttctttgcttccactttcttctcctcagctggagcagcagcagtggagggggcaggacctcctgctggtgcagcaccagctgctggagcaggtccaccggcccctacattgcagatgaggctcccaatgttgacgttggccagggcctttgcaaacaagccaggccaaaaaggctcaacatttacaccggctgctttaatgagggcattgatcttatcctccgtgactgtcacctcatcgtcgtgcagaatgagggccgagtagatgcaggcgagctcggagacagaggccatggcgcgggcgagtgtaaggctggcgctgccggacgcggtgctagtcgccggatgaagtgagggcctcaccccaacgcagcc

SEQ ID NO: 20086 - DNA, 506 bp, Homo sapiens
  misc_feature (1)...(506): n = A,T,C or G
agagtncaatgatactcgatgccgtggaatacgcacgagctcttcccttctgtcctccgaggggcttgccttctctcgtgtccagtgaggtgctcagtgatcggcttaacttagagaagcccgccccctccccttctccgtctgtcccaagagggtctgctctgagcctgcgttcctaggtggctcggcctcagctgcctgggttgtggccgccctagcatcctgtatgcccacagctactggaatccccgctgctgctccgggccaagcttctggttgattaatgagggcatggggtggtccctcaagaccttcccctaccttttgtggaaccagtgatgcctcaaagacagtgtcccctccacagctgggtgccaggggcaggggatcctcagtatagccggtgaaccctgataccaggagcctgggcctccctgaacccctggcttcagccatctcatcgccagcctcctcctggaccctttggcccccagccccttccccac

SEQ ID NO: 20087 - DNA, 473 bp, Homo sapiens
  misc_feature (1)...(473): n = A,T,C or G
cgccccccccnattttgcnccgcgctgcatgaattcggcacgagccgggccagacagctgtccccccgtcctcctccccagcccagcctgctcagagaagctggcaggactgggaggcgacagatgggcccctcttggcctctgtcccagctctctgcagccagacggaaaggcggctgcttgcctctccatcctccgaaaaacccctgaggacccccccccatcctcttctaggatgaggggaagctggagccccaactttgatcctccattggagtggcccaaatctttccatctagggcaagtcctgaaaggcccaaggccccctccccagtctggccttggcctccagcctggagaagggctaacatcagctcattgtcaaggccacccccaccccagaacagaaccgtgtctctgataaaggttttgaagtgaataaagttttaaaaactaaaaaaaaaaaaaaaaaa

SEQ ID NO: 20088 - DNA, 494 bp, Homo sapiens
  misc_feature (1)...(494): n = A,T,C or G
ggnnngnnntttgcttgctgcgcattcggacgagattggctctcagtcccgagagatttactaaaccccaattcatagaataggaaactgtggctcagaggtcatctacctaaagacacattaagccagaatttgacttgacgggatggcttacaagtcctgcctgatacctacacaccatgatgccccacccctgccaggcttggatcggaggagtgaacctgggctaagagtttggcattgcaggagctcccagagagactgccttccctacactagaagtccccacaaaggcttctgagaccacaaaatacaaggccagacctagagtgtccacagcaggcctgtgctgcccgcctcaagaggtggccgactgctgctagcggcctgccgccacgtcagcagcccagggcacagcgctcgaggtgtgctgttaggctaaaagggtgcagggctagacacgaagcttaaactattcatcttattaaaaataa

SEQ ID NO: 20089 - DNA, 455 bp, Homo sapiens
  misc_feature (1)...(455): n = A,T,C or G
atttgcnctgcgctgcacgaattcggcacgaggagagagaactagttctctccgctgttgctgagacacgttggtcgtcattgcctccgagcccactttagccctcagctctgtatcagaaatgctgttcctttgggaaccacggccaaagaagagatggagcggttctggaataagaatataggttcaaaccgtcctctgtctccccacattactatctacagttggtctcttcccatggcgatgtccatctgccaccgtggcactggtattgctttgagtgcagatgtgggacctaggaaaaggcctgaagattccccagctataccagtctggagtggttgtcctggttcttactgtgttgtcctctatggggctggcagccatgtgaagaaaggaggctcccagcatcatcttcctacacattattacattcacccatctttctgtttgtg

SEQ ID NO: 20090 - DNA, 475 bp, Homo sapiens
tggactcaaactgacttcgatgacggttgacagcccttttcctaactatgctgactctggcgctggtcaagtcacaggacaccgaagaaaccatcacgtacactcaatgcactgacggatatgagtgggatcctgtgagacagcaatgcaaagatattgatgaatgtgacattgtcccagacgcttgtaaaggtggaatgaagtgtgtcaaccactatggaggatacctctgccttccgaaaacagcccagattattgtcaataatgaacagcctcagcaggaaacacaaccagcagaaggaacctcaggggcaaccaccggggttgtagctgccagcagcatggcaaccagtggagtgttgcccgggggtggttttgtggccagtgctgctgcagtcgcaggccctgaaatgcagactggccgaaataactttgtcatccggcggaacccagctgaccctcagcgcattccctc

SEQ ID NO: 20091 - DNA, 458 bp, Homo sapiens
aatttgcactcggctgcaggaattcggcacgaggccgaaaggaaagaaggccaagggaaagaaggtggctccggccccagctgtcgtgaagaagcaggaggctaagaaagtggtgaatcccctgtttgagaaaaggcctaagaattttggcattggacaggacatccagcccaaaagagacctcacccgctttgtgaaatggccccgctatatcaggttgcagcggcagagagccatcctctataagcggctgaaagtgcctcctgcgattaaccagttcacccaggccctggaccgccaaacagctactcagctgcttaagctggcccacaagtacagaccagagacaaagcaagagaagaagcagagactgttggcccgggccgagaagaaggctgctggcaaaggggacgtcccaacaaagagaccacctgtccttcgagcaggagttaacaccg

SEQ ID NO: 20092 - DNA, 478 bp, Homo sapiens
cgcccccccccatttgcccgcgctgcatgtcccccggctgcaggaattcggcacgaggcgcttcgggagccgcggcttatggtgcagacatggccaagtccaagaaccacaccacacacaaccagtcccgaaaatggcacagaaatggtatcaagaaaccccgatcacaaagatacgaatctcttaagggggtggaccccaagttcctgaggaacatgcgctttgccaagaagcacaacaaaaagggcctaaagaagatgcaggccaacaatgccaaggccatgagtgcacgtgccgaggctatcaaggccctcgtaaagcccaaggaggttaagcccaagatcccaaagggtgtcagccgcaagctcgatcgacttgcctacattgcccaccccaagcttgggaggcgtgctcgtgcccgtattgccaaggggctcaggctgtgccggccaaaggccaaggccaaggccaaggccaa

SEQ ID NO: 20093 - DNA, 475 bp, Homo sapiens
  misc_feature (1)...(475): n = A,T,C or G
ggggnnnnncattggccccgcangnatagcccccggctgcaggaattcggcacgagggccgcgttcgcaccaaaaccgtgaagaaggcggcccgggtcatcatagaaaagtactacacgcgcctgggcaacgacttccacacgaacaagcgcgtgtgcgaggagatcgccattatccccagcaaaaagctccgcaacaagatagcaggttatgtcacgcatctgatgaagcgaattcagagaggcccagtaagaggtatctccatcaagctgcaggaggaggagagagaaaggagagacaattatgttcctgaggtctcagccttggatcaggagattattgaagtagatcctgacactaaggaaatgctgaagcttttggacttcggcagtctgtccaaccttcaggtcactcagcctacagttgggatgaatttcaaaacgctctggggacctgtttgaattttttctgtagt

SEQ ID NO: 20094 - DNA, 474 bp, Homo sapiens
  misc_feature (1)...(474): n = A,T,C or G
cggtgcccatgacgctggtgacgctggaacgncctttttcctggacggcagcctcctttgtgtgtattcagaggcagtgatgacttgctgtccaggcagctccctcctgcacacagaatgctcagggtcactgaaccactgcttctcttttgaaagtagagctagctgccactttcacgtggcctccgcagtgtctccacctacacccctgtgctcccctgccacactgatggctcaagacaaggctggcaaaccctcccagaaacatctctggcccagaaagcctctctctccctccctctctcatgaggcacagccaagccaagcgctcatgttgagccagtgggccagccacagagcaaaagagggtttattttcagtcccctctctctgggtcagaaccagagggcatgctgaatgccccctgcttacttggtgagggtgccccgcctgagtcagtgctctcagctggca

SEQ ID NO: 20095 - DNA, 488 bp, Homo sapiens
  misc_feature (1)...(488): n = A,T,C or G
tgtgggggannannnanaaaacgccctggctgcatgaattcggcacgagcaggacccctctgaggaaggtcccggtgattttggcttcctgcatgccagtagtagcatcgagtccgaggcaaaaccagcccagcctcagcccactggtgaaaaggaacaagataaatcaaaaactctttcccttgaggaggctgtgacttccattcagcagctcttccagctcagtggttccatcgctttcaacttcctgggaacagagaacatgaagagtggcgaccacacggcagccttttcttacttccagaaagctgcagcccgcggctacagcaaagcgcagtacaatgcgggcttgtgtcatgagcatggcagaggcacccccagggacattagcaaggcgggcctttattatcagttggctgccagccagggccacagcctggctcagtaccgctatgccaggtgcctactacgagacccagcctcttcgt

SEQ ID NO: 20096 - DNA, 466 bp, Homo sapiens
  misc_feature (1)...(466): n = A,T,C or G
ngcgtgtnaaaatgatngcctaggtacctacggaganncaagngaatttgggtagtagagttataaatacaaaaagggaaaggttaccagaaataagacattatttctaacaaatcttcaagaaaatcttgattattaaagtcccttttatcttacaagtgttgcatatacagttttggctcttcagagccctctaccaataaggcacctgcaatagtagataatttgctaccgcagccttagagagcagttcttagaggtctgctggtgcttctcttgacaaagcacactttttttttgtttcccccgagacagagtcttgctctgttgcccagagtcggagtgcaatggcatgatctcggctcactgcaacctctgcctcctgggttcaagcaattctcctgcctcagcctcccaagtagctgggattacaggtacccaccaccacgcccagctaatttttgta

SEQ ID NO: 20097 - DNA, 491 bp, Homo sapiens
  misc_feature (1)...(491): n = A,T,C or G
ggggcgccaacncccaattgccncgcatgnatttgctccgcctgcaggaattcggcacgagcaggaacctaggaaataactcggaacctgtaacgtcccactggtttggacatattcctctcctgatctggcctcatctgttccagggaggtgggattgaaacatatgcagtaatgtcacctcaaaagagagttaagaacgtccaggcacaaaacaggacttcacaaggtagtagtagttttcagaccacgctttcagcctggaaagtaaaacaggatccaagcaactcgaagaacatctcaaaacatggacaaaacaatccagtgggagattatgaacatgctgatgatcaagctgaagaagatgctttgcaaatggcagtgggatattttgagaaaggtcccattaaagcttcacagaataaagataaaaccttggaaaaacacttgaaaactgtggaaaatgtggcttggaagaatgggttagcttcn

SEQ ID NO: 20098 - DNA, 485 bp, Homo sapiens
  misc_feature (1)...(485): n = A,T,C or G
gtggcnngnnnnnnnnagaactgatcccntgcggaanncgctgatggccctagagagagacagagagagagagagagagagagagagagtggagaaatgccatctctactaaagatgcaaggattggccgcgcgtggtggtgcgtgcctgtgatcccagctgctcaagaggctgaggcaagagaatctcttgcacctgggaggtggaggttgcggtgagctgatatcacgccattgctctccagcctgggcaacaagcgaatctctgtctcaaaaaaaaagaaaagacagtatcttatgtttatgtcaagcacctctcatcacagtctagttccaaggaaaaaattcccagcgttttctacattcggtgctgcgtcatctgaaatcggcacattccatggaggaaggagtcctgctttgttgcatgtatcctagggtttaatgttggtaaatgagtcactctatcatttgtagaacgctccctgn

SEQ ID NO: 20099 - DNA, 454 bp, Homo sapiens
  misc_feature (1)...(454): n = A,T,C or G
nattgaccatcgtgangcaatgcggcacgaggtgcanacagctctggctctagcaaaaggaaagtttggccgtgtggatgtagctgtcaactgtgcaggcatcgcggtggctagcaagacgtacaacttatagaagggccagacccataccttggaagacttccagcgagttcttgatgtgaatctcatgggcaccttcaatgtgatccgcctggtggctggtgagatgggccagaatgaaccagaccagggaggccaacgtggggtcatcatcaacactgccagtgtggctgccttcgagggtcaggttggacaagctgcatactctgcttccaaggggggaatagtgggcatgacactgcccattgctcgggatctggctcccataggtatccgggtgatgaccattgccccaggtctgtttggcaccccactgctgaccagcctcccagag

SEQ ID NO: 20100 - DNA, 489 bp, Homo sapiens
  misc_feature (1)...(489): n = A,T,C or G
cttcgcccccccnnnnnannatagaccccgctgcaggaattcggcacgagaacaaaggtacagccatgggaatacagaatgatagaagagactacagatggataattggacttaagccatgagctctgagttcttgtaacataaaactttactttagaagttgtgaaatgtatttaaaactgaattctgtaaatagttttttttttttacagttccaaatgagttgataaagattgttgaaaagatccaaaaccagaataagccactgtttttgggaattctttttgattttagtacaaaccttaatttctcaaaaacggaacagttttaagggtgatcgttgttggttaggccaaatgttgggtaataattatgggggactgatgctggaattactcctgtaggtataaacctctgtatgaagagaagatttctcccaggaaatctttgtacagctttaagttgtgcagattctctgaaaacattttg

SEQ ID NO: 20101 - DNA, 454 bp, Homo sapiens
  misc_feature (1)...(454): n = A,T,C or G
nattganccatcgactccgcgctgcaggaattcggcacgagccctgggctacataacagcaagacagtccggagctgtagcagacctgattgagcctttgcagcagctgagagcatggcctagggtgggcggcaccattgtccagcagctgagtttcccagggaccttggagatagccgcagccctcatttgcaggggaagatgattcctgccagatttgccggggtgctgcttgctctggccctcattttgccagggaccctttgtgcagaaggaactcgcggcaggtcatccacggcccgatgcagccttttcggaagtgacttcgtcaacacctttgatgggagcatgtacagctttgcgggatactgcagttacctcctggcagggggctgccagaaacgctccttctcgattattgagagaagactcgttgttgttttcttggtggcct

SEQ ID NO: 20102 - DNA, 490 bp, Homo sapiens
  misc_feature (1)...(490): n = A,T,C or G
tggaggtannnnnnntttgcacgcgctgcttgaattcggctcgagccgggccccacgagtggggctggttctgaggacatggggaccacagtcaatggagatgtgtttcaggaggccaacggtcctgctgatggctacgcagccattgcccaggctgacaggctgacccaggagcctgagagcatccgcatgtggcgagaggagcagaggaaacggctgcaagagctggatgctgcatctaaggtcacggaacaagaatggcgggagaaggccaagaaggacctggaggatgggaaccagcgccagagtgaacaagtagagaagaacaagatcaacaaccgggcatccgaggaggctttcgtgaaggaatccaaggaggagaccccaggcacagagtgggagaaggtggcccagctatgtgacttcaaccccaagagcagcangcagtgcatagatgtgtcccgcctgcgctcggtgctcatgtccctga

SEQ ID NO: 20103 - DNA, 447 bp, Homo sapiens
  misc_feature (1)...(447): n = A,T,C or G
nctgagnactgtgagccattcggacgagctcactccccgccaaaacccacatcccagcctctggatcctggggaaggttccagtccctggagaatacccagggcctcaaacttgaagtcactcctccaatgtctgggacttgccagctcagcccgttaggatgagggtgctgagaggaaacaggaaacaagactgcgaatggtgctcaagcagggagcagggagtggcgtttggcttgcacgttcccatgtggccagatgctggggccactttccttctgtctgctggtgactgcagtgttccccctcctcctcaccacggggctcctgtgagtctggggggcacctctttctggcctgtgcacctctctctggcttataaaggtgcctggcctgtgccagcccctccttgttgcgcctcaccgtggggaccaggtgagccggctcn

SEQ ID NO: 20104 - DNA, 486 bp, Homo sapiens
  misc_feature (1)...(486): n = A,T,C or G
nttagacccgcgctgcaggaatttggcacgaccccttagttaacttgtcactttaatttgatatttttattttctctccttttaagtcttagagaccagcagagaatctgtgagagaaagtatttcaggaagttagaaattcaaccgaatctgaggtagtcctaaaaagtgccattttgtttcacttatgggctaaagtaccagcttagtcaggtaagagccctgacccacttcagatggtaacaccacttctcactgccttcagatggaatcacagatttcagtcacggcgcataacaaattgatcagtgagtggctaggcatctgcagataaattgtttcagccatagaagctccattagcacatatgcttccttttccccccttcctttaaaatcatctggaaagaaactattttgtgcccttggggactcctgtctgtctgttacagtttaccaagatggagctgggttaggaaagaagtga

SEQ ID NO: 20105 - DNA, 452 bp, Homo sapiens
  misc_feature (1)...(452): n = A,T,C or G
nattgaccattgatccccgctgcaggaattcggcacgagctaaacaaaaactaaaactaagaattctcaaaaaaacttgttcaaaacagggaaagactgatgaaaagtaaaatggactacttttgtaacttacctgtttgttaggaaatggaatggtctctttgatttaaaatgaataaaaatagattattacgtcttttgtattgagactgtattgttatgagcctaggaaatttgggaacatgattgtattgtattaaaattcgaagtgattattatcagcttaattggattaaaaaagtacttcaagaaattattttatcatatctgcttctgtttttccaaaaggttaaaacttgtaaaaaaaatatatataaacaattgagtttactaatggtaaacatttttattctgggattcggtcattggaatttatattaaaagacaagtta

SEQ ID NO: 20106 - DNA, 415 bp, Homo sapiens
attgcccgcctgcggtattcggcacgagacgtagcttaaaacacacattgcatagctgtacaaaaatattttccttatatccttattatataagcttttatctatttaaattttgaatttttaaactttttggtcaaaaaccaagacaaacacactagcctaggcctatgcagggtcaggatcaagacatccctagcaggtgacaggaatttttcaactccattataatctgtggggccaccatcatatatatattgtacattgaccgaaacatggttacatgactatataatttgcgacaatactgctcagtgtgccatatttaaatttacatgactatattgtgatattcttttcaaaataaagtttatttgggagaagaaaaaaaaaaaaaacctcaggggggggcccgcgc

SEQ ID NO: 20107 - DNA, 491 bp, Homo sapiens
  misc_feature (1)...(491): n = A,T,C or G
ggggagagagtnnnaattgacgtcttcggaattcggcacgagcagaaagcagccatcccgcgtgtcgtccaaacagcagtgcctgcgtcccgctccacggagtcttccagaacacctccctctgaactaatcccggagcaccccacccccagcgagtcccacctggacctcttcaaagtcaaaactcttctctcgggacaaacaaatattcgggactttcgaagccctgaacttgagacaccaagtttgtctccatggaaacacgtagccgctgcagttggacagctgcgtgctggagttctgtccccaaaccaactgcagagaagaaagacgagcctcggcccaggacgcgatttctaacgaaatgcaatagttttctctttttggaaaaatgtttataccaatagttttgtgcgctaattgttattagaacgtttcttatgaatgtgtacattgcagtatattcagtcccaaatgttttgttctcattn

SEQ ID NO: 20108 - DNA, 453 bp, Homo sapiens
  misc_feature (1)...(453): n = A,T,C or G
nattgaccctcgtgagcgtgtaataccagacagctgtcatgcggagggactttagcatggctgataaggtccttcctaccattccaaaagaacagaggaccagagttgcacactttttggaaaagcagggcttcaagcagcaagctcttacagtatccacagatcctgagcatcgttttgagcttgctcttcagcttggagagttaaaaattgcataccagttagcagtggaagcagagtcagaacagaagtggaaacaacttgctgaacttgccattagtaaatgtcagtttggcctagcccaggagtgcctgcatcatgcacaggattatgggggcctgctgcttttggccactgcctctggaaatgctaatatggtgaacaagctagcagagggtgcggagagagatggcaaaaataatgtggcattcatgagctactttttacagggcn

SEQ ID NO: 20109 - DNA, 454 bp, Homo sapiens
  misc_feature (1)...(454): n = A,T,C or G
attgaaaactgaggactnctgcggaantcggcacgagggaaatcggctgtgggagagaggctaggcctctgaggaggcgaatccggcgggtatcagagccatcagaaccgccaccatgacggtgggcaagagcagcaagatgctgcagcatattgattacaggatgaggtgcatcctgcaggacggccggatcttcattggcaccttcaaggcttttgacaagcacatgaatttgatcctctgtgactgtgatgagttcagaaagatcaagccaaagaactccaaacaagcagaaagggaagagaagcgagtcctcggtctggtgctgctgcgaggggagaatctggtctcaatgacagtagagggacctcctcccaaagatactggtattgctcgagttccacttgctggagctgccgggggcccagggatcggcagggctgctggcagaggn

SEQ ID NO: 20110 - DNA, 444 bp, Homo sapiens
  misc_feature (1)...(444): n = A,T,C or G
nattgacngctgtgagcattcggacagtttaccatattggtcacgtcacgttggtcttgaactcctgaccttgtgatccaccccgccttggcctcccaaagtgctgggattacaggtgtgagccaccgtgcccggccaagtaaaatgttttttaaaatggttatgtgcattattcataaaaaataatggtgtccagtctttttaaacttgtaaagacacatcttattgaataaagagatgagagcttannaaaaaaaaaaaaaaaaaaaaaaaaaaacttggggggggggccgggcccccaattccccttataggggggggaataaaaattcctgggccggggtttaaaaacggggggagggggagaaaannnnnnnnnttttntttnnntnnnnttttttttttttntttttntntttntttttttttttnttntnntnttcg

SEQ ID NO: 20111 - DNA, 468 bp, Homo sapiens
ccttgacccgcgctgcaggaattggacaccagatccaggatgacgagggctccacggccctcatgtgtgccagcgagcacgggcacgtggagattgtcaagctgctgctggcccagcccggctgcaacggtcacctagaggacaacgatggcagcactgcgctctcaatcgccctggaagcaggacacaaggacatcgctgttcttctgtatgcccatgtcaactttgcaaaagcccagtctccgggcacccctaggcttggaaggaagacgtctcctggccccacccaccgaggttcatttgattgattgtatgcaaatagccctttatttacatgccactattaagctgctaattgttcctgttggggtgacagatactgaatgtatacgtattgtgcctgagctcaccagcaaacagaagcatcaagcccaggggtaaaggctgaagctttcacagtgcagagac

SEQ ID NO: 20112 - DNA, 371 bp, Homo sapiens
gaagacaaaaaaattttgatcggcctgaggttagacggcccgaggaaagacattgagatgttccttgagtccagccgcagcaaatttataggttacactctaggcagtgacacgaacacagtggtggggctgcccaggccaatccacgaaagcatcaagactctgaaacagcactttgattttggacagggacaaggtaggaagagaagcttcccttaaccagaggggccatttttccttttggctttcgagggcctgtaaatatctatatataattctgtgtgtattctgtgtcatgttggggtttttaatgtgattgtgtattctgtttacattaaaaagaagcaaaaataaaaaaaaaaaaaaaaaaa

SEQ ID NO: 20113 - DNA, 453 bp, Homo sapiens
  misc_feature (1)...(453): n = A,T,C or G
nattgaccaatgagagccattcggnacgacgtttggtaatgcagtttatcgttttaaaaataatccacaaagatgtttttatctcacatacttacaactcaacacacagagtgaccatgtgcagctttcttttttgttagatgccacatccgaagactcatcgcagtgtgttatatgacaggacaaagcaaaaacaaacaaaaagcaagcctgtgaatataatttaatttgaaactgctcctggtattatatatttgctagttatctaatgttttaaaagaaaatatacctcatttaggtttgaattgggcgtattgtgtaaatttcaaatattcagaatgcaaagggcttgactattaaatgtttgcctttgatgtttataaacattacaactatgttgttttaagacatttaaaaacgtgaaatttgttatctttgtaaaatgacaatcat

SEQ ID NO: 20114 - DNA, 488 bp, Homo sapiens
  misc_feature (1)...(488): n = A,T,C or G
gaggggnngggattgacgccnttngactaccattgtaaaagattcttgttaataaagatgtacctcagaaaccaggaggtgaaaccacaccttcagtaactgacttactaaattattttttggctccagagattcttactggtgataaccaatattattgtgaaaactgtgcctctctgcaaaatgctgagaaaactatgcaaatcacggaggaacctgaataccttattcttactctcctgagattttcatatgatcagaagtatcatgtgagaaggaaaattttagacaatgtatcactgccactggttttggagttgccagttaaaagaattacttctttctcttcattgtcagaaagttggtctgtagatgttgacttcactgatcttagtgagaaccttgctaaaaaattaaagccttcagggactgatgaagcttcctgcacaaaattggtgccctatctattaagttccgttgtggttcan

SEQ ID NO: 20115 - DNA, 490 bp, Homo sapiens
  misc_feature (1)...(490): n = A,T,C or G
ggaggccnnnnnnntttgacngctcgaccgantgtcggaattcggcacgagccgagaaaaagaaacatccctgttgtctgctcagtcaagtccccacacatcagcaatctctcaccacttcttttgcaagtttacagaagcaaacagaaatgtacaggatacttaaaatggaataactttttggttgcaaaacagagacatggttctataatgcttcatgtccctccaagatttgagatcaatttagggattgtgaattttttttttcaaatttcatacaatcatatttcccagtacttttcacaatcattttttacccatctaactctatgttttgtggcttcccggtctcttagaactttgaaaacatgatatacaataatgtttatttattatacatccagattctgaaataattttcctactgatgttcagctcacactatctgtacctttttagaagagaaaagaatcttgaattgtatatattt

SEQ ID NO: 20116 - DNA, 487 bp, Homo sapiens
  misc_feature (1)...(487): n = A,T,C or G
gcagggccncntttgancgcctgttgagaccgccctgcaggaattccgcacgaggttctttggcaaaataaaaatatttgactaatcaatttttattattggaatagttttaacctttcaaatacatgttctgtcctggagcaggattgtagaaactaacagtgtctattttcatgtctgatgtgttcttcctttagtcatcatgttaggtctgtgtaccctaaatcagcatattactcataaatcattaattaatataagcataggaaatggtcttaaaagatactgcattcattcatcagatatttattccatgcctactctatgctaggcactgtgctagatggtatgaaaacttattaggaacctttttgtttttgagaccattgcattctggctggtttgtgctggcttaacgacatctaagaaggtttagaaatggtgagaccaaaacaataactgttaatgatggacagcattattagga

SEQ ID NO: 20117 - DNA, 457 bp, Homo sapiens
  misc_feature (1)...(457): n = A,T,C or G
aaaaaatttgcccgcctgcagaatttgaccngcgctgcaggaattctgcacgagccgtcgcgtctaggggagaggcagcacccgcgatggacgtgttcctcatgatccggcgccacaagaccaccatcttcacggacaccaaggagtccagctcggtgttcgaactgaagcgcatcgtcgagggcatcctcatgcggcctcctgacgagcagcggctgtacaaggatgaccaactcttggatgatggcaagacactgggcgagtgtggcttcaccagtctaacagcacggccacaggccccagccacagtggggctggccttccgggcagatgacacctttgaggccctgtgcatcgagccgttttccagcccgccagagctgcccgatgtgatgaagccccaggactcgggaagcagtgccaatgaacaagccgtgcagtgagacccccaagaggg

SEQ ID NO: 20118 - DNA, 500 bp, Homo sapiens
  misc_feature (1)...(500): n = A,T,C or G
ngaggggcnnggaattgaangccnctttganncgcctgcangaattcggcacgagagcgcgtctgtgctgctttcacctggggcttcctgttcccaaatgacaagggcctgaaggcggtccctgctttctctttctctttctctgagtctcagatggggattctgctgacagctgacaagaaaatgcttcactcaacagccctcatgtgcccagagatgtttatagaactgtttgaattggagccattcgctgccccctcccaggctgaagatatgttctttttaagttgattcgggagtgtcattcttttatacccaaagactgttgtgcatcttgaagagctcagagcacatgaccgcacaaatgcttacaggggtttctcccgagtaatccaatctcactccccttgtaagggaattctggggcagctatggtttgagtgtgcagacagcatcgcgtttctacctttagtaccttgccactcttttaaaacgctgct

SEQ ID NO: 20119 - DNA, 460 bp, Homo sapiens
atgcccgcctgattttgacttgggagctattttcagagctctttgcctttttaatcctgttccagatcacttatccaaaatctttccgaatcaattatattttgctgcttttctttaattccctaaaagccatagcttctagattttctatcagcacacattctcaccagaagttgaaccaatacaggtagaaaaagaaagcccccttaatgtttttaactgatgatatttttttaagcttaccaatataagtatttttaaaggttctatttttcaaagtcataacaatgattgttcttgttttctctcatagaatagactgccatcggataaagagtggtccctagcttctatttttccaagtaaataagtagaacatgttcttgggattataccattaaatgttaattttcttgaagaagaaagagtgttgtctgccaagattatatgatagcgctcg

SEQ ID NO: 20120 - DNA, 490 bp, Homo sapiens
  misc_feature (1)...(490): n = A,T,C or G
cttcgccccccttcnnnnnatagaccccgctgcaggaattcggcacgaggtgccctgaatgggtcttgggaatctccagggatccctcaggcacactttgagaaccaatctatataaagtgatggttcacaatgattctgaagccttagtttcagaatcatttggggcagcttttcaaaaatgccattcctgccacctaccacaaagattctgattcactgtatctgtgatgggtctcagatctctgcatttttaatctcacgtgattcttaagtatgtggtggaagtacctttcttcaggaaattctgtcctaagcttttaccctgagaaaataaaacctgcatgctttcaccatggacagtgggagactccactgaaacacatctgctagaccactaagtttatccttgtcacccagtttgctcttggaaagagtctgttcccttttgtcactgaaccaatcatgacataaacttgtgctttacctcn

SEQ ID NO: 20121 - DNA, 486 bp, Homo sapiens
  misc_feature (1)...(486): n = A,T,C or G
cgggctccnnnnnntttgaccgtctgcggacttcggcacgagaagaagatgagatttcggaggaattgaaagaaaaggccaagattgaagatgagaaaaaggatgatgaaaaagaagaccccaaaggaattcctgaattttggttaactgtttttaagaatgttgacttgctcagtgatatggttcaggaacacgatgaacctattctgaagcacttgaaagatattaaagtgaagttctcagatgctggccagcctatgagttttgtcttagaatttcactttgaacccaatgaatattttacaaatgaagtgctgacaaagacatacaggatgaggtcagaaccagatgattctgatcccttttcttttgatggaccagaaattatgggttgtacagggtgccagatagattggaaaaaaggaaagaatgtcactttgaaaactattaagaagaagcagaaacacaagggacgtgggacagttc

SEQ ID NO: 20122 - DNA, 442 bp, Homo sapiens
  misc_feature (1)...(442): n = A,T,C or G
natgagagtgtgagcattcgacgacttactcgcacttcgcagggggtgggggcccagtcatggttgggggggacgcagatgccaggtccaaggccttgctgggagtctgcgtagggtcaggcacggaagcctatgtcctggtattggaccctcactactggggcactccaaaaagccccagtgaactacaggctgctgggtgggtgggctggcaagaggtgagtgcagcctttgaccccaactccttctacaacctgtgcttgaccagccttagctcccaacagcagcagcgcaccttggactgaggacgaagttacagaactgagattctcgggtcccagacacgcacctatgtacctcccactggtgtccctgcaaagcctggcgcttttgacatcaataataaaagtggcagggctgagcaacaaaaaaaaaaaaaaaa

SEQ ID NO: 20123 - DNA, 453 bp, Homo sapiens
  misc_feature (1)...(453): n = A,T,C or G
nattgacnactcgaccccgctgcaggaattcggcacgaggggaaggcagcatggcacgctgcatggagccaaaatcgggtctgagatcgggtgctaccaaggttttgcttttgcatggaaatgtctactgcacagttgcaccactgagaaggacaggtaaaggtggagatgtctttctttctcagcgtaggaaccaggagttctagttccatgggttaccagcatgcccttgagtaatcaatctgtctgttcctcatctgtaaaatggagaaaattatcagtgtcaagcttgagtgttgttaggagatttaacggaaatactaaatagaaagtgccaggcacattttaggtgtttggtgaacactggctgttgttgcttctcaagagttctatgctcctgccttttacctggagtcattagtgcaccacgtggcttttagataccctaccaat

SEQ ID NO: 20124 - DNA, 486 bp, Homo sapiens
  misc_feature (1)...(486): n = A,T,C or G
ggcgaggaccacacattgaccgcccgnnattgccccgcctgcaggaattcggcacgagcaaaagaagcacttgctcagtgtgtcttggcagagattccccagcaggtggtgggctacttcaatacatacaaactccttcctcccaagaacccagccacgaaacaacagaagcagtgaccacttcaacagaattcttttgtgttatgtggagcaatgccatctctcaccccaaatcgtgtatctgtcattctacgtactttttacccccagcatttatgatgtaaatctctttctctatggattatatctgtttaaagcattctttctaggttattttggggggacagtgccaagtccatctttgcccagtcaattcagtgattgatagcaatttacattaattgcagtaaagctctttggattagaaattagtgtggggaaagcttattctggtggtggttttggttactttcatatgatgaaaan

SEQ ID NO: 20125 - DNA, 478 bp, Homo sapiens
  misc_feature (1)...(478): n = A,T,C or G
agttagaccccccntngnnnnnnnaattgatccgcgctgcaggaattcggcacgaggagaggagaaagaaaatcaatgaataggagagcatacactgtgggaaggctcagctgtactgagccaggcaaagcatccgattaccccactgctgtacacatcatgacctgggataaacccctgggccgttggcctaagaaatatgttgcttttcatcctgtataactgcaactttgtgccggctcatattatgttctagagagctcatgtacaccatggtgaccatagttaataatactggattgtatgcttaaaatttgctaagagagtagatcttaagtcatcaccaaaaaaagtaactgtaagatgatggagatgtgttaattagcttgacggtggtaatcacaatatatgtgtatatcaaaacatcacattatacaccttaaatgtatataatatttgtcaattatacctcagtaan

SEQ ID NO: 20126 - DNA, 493 bp, Homo sapiens
  misc_feature (1)...(493): n = A,T,C or G
agaggggtnnnaaatcgacgcctgtggaattcgccacgagcgaagactcaggctcagattcagaacaagatgaactcaaagatagtccatctgagacagtcagttctttgcaaggtccctttcttgaagaaagcagtgcctttcttattgttgatggtggagtacgcagaaacacagccatccaggagtctgatgccagtcagggaaagccacttgcctcttcctggcctcttggagtgtctgggcctctgatagaggagcttggggaacaactgaagactacagttcaggtttctgaacccaagggcaccactgctgtaaaccgcagcaatattcaggagagagacggctgtcagacaccaaataattgactcttaggtggttttattcattgttgagaaatatggtagattgggtttcatttaccgaatgagaattcttcattttcactttgtaatttttcttagtatatagtcagcccactgtatttgtg

SEQ ID NO: 20127 - DNA, 503 bp, Homo sapiens
  misc_feature (1)...(503): n = A,T,C or G
aggggggtnnnaattatcgcaccgcctgcangaattcggcacgaggtggctcgcacccaccatgccaaccatgcactcccagtctacgtcttcacacgacccacctacagccgcaggctcacggggcttagtgagatggacctcatctctaccattggcgagagtgcggccctgggcgcagctggtgtcatcctctggggtgacgcggggtacaccacaagcacggagacctgccagtacctcaaagattacctgacacggctgctggtcccctacgtggtcaatgtgtcctgggccacccaatattgcagccgggcccagtgccatggccatgggcgctgtgtgcgccgcaaccccagtgccagtaccttcctgcatctcagcaccaacagtttccgcctagtgcctggccatgcacctggtgaaccccagctgcgacctgtgggggagctcagttgggccgacattgaccacctgcagacacacttncgctgncagtgctc

SEQ ID NO: 20128 - DNA, 476 bp, Homo sapiens
attcgccccgcctgcaggaattgggcaccaggccgcccaggccattttcccctccatggccagggctctccagaagtacctgcgcatcacccggcagcagaactaccacagcatggagagcatcctgcagcacctggccttctgcatcaccaacggcatgacccccaaggccttcctagaacggtacctcagtgcgggccccaccctgcaatatgacaaggaccgctggctctctacacagtggaggcttgtcagtgatgaggctgtgactaatggattacgggatggaattgtgttcgtccttaagtgcttggacttcagcctcgtagtcaatgtgaagaaaattccattcatcatactctctgaagagttcatagaccccaaatctcacaaatttgtccttcgcttacagtctgagacatccgtttaaaagttctatatttgtggctttattaaaaaaaaaaaaaaaaaaaaaa

SEQ ID NO: 20129 - DNA, 496 bp, Homo sapiens
  misc_feature (1)...(496): n = A,T,C or G
ngcggtccnnnttttgaaacccttttcgaccgcctgcggaattcggcacgagggagattggatttgtggaatctcaataatgacacagaggtaccaactgccagcatttctgtggagggtaatcctgctcttaatcgtgtgagatggacccattctggcagagagattgctgtgggtgattctgaaggacagattgttatatacgatgtgggagagcagattgctgttccccgcaatgatgaatgggcacggtttggccgaacacttgcagaaattaatgcaaaccgagctgatgcagaggaggaagcagctacccgaatacctgcttagttcctgaaaaggggagtgtgactagtggatttgggaaaggttcttaagtagatcctgagactatttgcatgcttctgtctaaatgataattaaaaggaaatttcatggattaaaccatgggtttaatgcagcaaggaaacttacaatgtccctttatatataacan

SEQ ID NO: 20130 - DNA, 502 bp, Homo sapiens
  misc_feature (1)...(502): n = A,T,C or G
aggggcgttaaggaggcncnnnnnnttttgacngctcgacncgcctgcaggaattcggcacgagccacggtgctgtcctgcggccctgtcagcaccacatcctctgtgagccgtgtgcggccaccgcacctgagtgcccctactgcaagggccagcccctgcagtggtgacctcagcggggacagccacctcctgctgggcaccctggctccagcgctcctcctgaccacggacatgtcgtcactcgcttctggtgccaccgacgtgaggaccgaggctgggagcccttcctgttacacgttatcatgaggctgggagccccgcctgcgcttggcctgacagcctttcctgtcacacgttgtcacctatctagtcctaccgacggtttcaaggtattttcctcaaaaaccttaaatgcgaacccacagaacccgcctgcctgtccctgaggggcctggtgcctccgggatccacgcggcgctgtgatcacagcagtttgtgg

SEQ ID NO: 20131 - DNA, 495 bp, Homo sapiens
  misc_feature (1)...(495): n = A,T,C or G
gggttttnntttgtccggctgcagtcctgaagagacaatcctttcgaggaagaggacgaggaggaggaagcagtggcagggaatccattcattcagccagacagcccagctcctaaccccttcagtgaggaagacgaacatccccagcagaggctctcaagccctctggttcctggtaacccctttgaggaacccacctgtatcaacccctttgagatggacagtgacagtgggccagaggctgaggagcccatagaggaagagctcctcctgcagcagatcgataacatcaaggcatacatctttgatgccaagcagtgcggccgcctggatgaggtagaggtgctgacagagaatctgcgggagctgaagcacaccctggccaagcagaaggggggcactgactgaccagcagtggagagggcacctttgggcccaggggtctggcaggagccagtggagcangacagagggcaggcaggatggatggngagg

SEQ ID NO: 20132 - DNA, 499 bp, Homo sapiens
  misc_feature (1)...(499): n = A,T,C or G
ggggggnaaggggntnnnnnnnnccttgatcgttgtaatgacnntggcacgaggatttggctgttcatctggaagctgagaaaaataagcacaataaggagattacagtcatggttgaaaaacacaagacagaattggaaagccttaagcatcagcaggatgccctttggactgaaaaactccaagtcttaaagcaacaatatcagactgaaatggaaaaacttacggaaaagtgtgaacaagaaaaagaaacattgttgaaagacaaagagattatcttccaggcccacatagaagaaatgaatgaaaagactttagaaaagcttgatgtgaagcaaacagaactagaatcattatcttctgaactgtcagaagtattaaaagcccgtcacaaactagaagaggaactttctgttctgaaagatcaaacagataaaatgaagcaggaattataggccaagatggatgaacagaanaatcatcaccagcagcaaggtga

SEQ ID NO: 20133 - DNA, 454 bp, Homo sapiens
  misc_feature (1)...(454): n = A,T,C or G
ngancncccacattgaccngcgctgcagtaattcggcacgagctctggttgagcccatactgaagaggcgcctctttggacatgcacagctgatacagagtgatgatgatattggggatcaccagccttttgcaaatgcacacgatgtgctagcccgctcccgcagtcgagccaacgtgctgaacaaggtagaatatgcacagcagcgctggaagcttcaagtccaagagcagcgaaagtctgtctttgaccggcatgttgtcctcagctaattgggaattgaattcaaggtgactagaaagaaacaggcagacaactggaaagaactgactgggttttgctgggtttcattttaataccttgttgatttcaccaactgttgctggaagattcacaactggaagcaaaaacttgcttgatttttttttcttgttaacgtaataatagagacatt

SEQ ID NO: 20134 - DNA, 481 bp, Homo sapiens
  misc_feature (1)...(481): n = A,T,C or G
gacgggacnntttgaccgcctgctgaattcgccacgagctgctttgggctttgcacctgcactttggtgacattgttcttctgtgttccctttatttatgctggtggcttccatccgttcctcctctgagggtgagtggagaggtatatggaaacacggctgtgaccaaagggagatcccagcctgggcaggctgcgctgctgaccaccctccctggggcccgggctctgtaggaaagttggtccttgactgtggcattgcactctgcactgtttctctctgcagacctaggggaaaactgcaggtggaagtgcttttctactaaggcctcttactttgggggggatgtgccctacagaagacatagaagatggggaaatgccaatgggcaaagagctactttgaatacataattctcttcaaagacttcagcagcaaaccaaaacagcaggttaaaaaaaaagatgcttttttgggtgca

SEQ ID NO: 20135 - DNA, 491 bp, Homo sapiens
  misc_feature (1)...(491): n = A,T,C or G
tgaatggttcnntttgaccgcctgttggccccgcgctgaggaattccgcacgagctgacccgaatatgcccggcgccatggggactccggctttgggagaagctgacgttgttatccccaggaatagctgtcactccggtccagatggcgaggcaagaaggactaccctgcactgctttccttggatgagaatgaactcgaagagcagtttgtgaaaggacacggtccagggggccaggcaaccaacaaaaccagcaactgcgtggtgctgaagcacatcccctcaggcatcgatgtaaagtgccatcagacaagatcagttgatcagaacagaaagctagctcggaaaatcctacaagagaaagtagatgttttctacaatggtgaaaacagtcctgttcacaaagaaaaacgagaagcggcgaagaaaaaacacattaaaaaaaaaaaccctcgggggggggcccgagccccaattttccttatagtgn

SEQ ID NO: 20136 - DNA, 501 bp, Homo sapiens
  misc_feature (1)...(501): n = A,T,C or G
ggggtgnnaaggaggcccnnnnnnnattgannttttgatngccctgtcggaattcggcacgagatattatttatatcctttgaataaatccctgtgaagtttttcctccccactaaaatggtgcataataaaacatgaaatatgtagtatgcagatatcatttattagatagtttgtagtgtatacatttagaacatacttcttttgacaaagggtgatctgattgctaatttaccattttattctgtcaggtacaggtgaaacaaattctcatcttgaatgatcagatgcaaaatcatttctgaaccctagagcagaagttagaaataacaaaatggccgtttcaaccttgactggccaaaaataactaataaacttttttgttttaagtcaggcaagtgattttctacatttagcagtttgaaagtccagtgttaatgcaatatttctagtgagaaatgcttgttattgaaagcatgggagtgatagtgtgaaatgggg

SEQ ID NO: 20137 - DNA, 464 bp, Homo sapiens
  misc_feature (1)...(464): n = A,T,C or G
ncctgatcgcctgcggaattcctttgatagcccatcaaaccgcacgcctccatggggagcctctacagccttcttcatatagagtgacactctgcgtggaccgttacgcttctttctgcgtcccagagtgcagaaacaatgccatgtgtgtcagccttttgttactgcagcaccctatttctggtatcagaatctgtcccaataatcttttgccatgtaacaaccaccacaaaatttcatggtttaaaacaacaatgtgggcaggcctgggtggagacagcttgtctctgttgcatgcagcgtcagctggggtggcttgactaggactgaaggatccactttcaccacatggccaaccagctcgttctggctgttggtttaaatggacctccctgcagggtggctttgcttcctcacacatggtagttggggtctcaaagcaaatgtcccaagaaacaggaagg

SEQ ID NO: 20138 - DNA, 492 bp, Homo sapiens
  misc_feature (1)...(492): n = A,T,C or G
ngtggtntnnnaattgacggctgtggcagctccctacctcctggacgtctctgagagtccaggcagagcagagggcagcgctcggccggtcatgctggctcccttggccttgcagcgagcccctggcccacgccgagcgagggatgcttctccctacagcatgtccactcccccggcatggccaggtggggcccctggggcaatggcagtggtagaacgctcaacttggttgcggtaccatcagcccacctgcatttggctttcgacttgcttgttctaagtcacagcgccctcatctttttagcaaggtaaaaaaaccaaaatgggtgttatctctgatatcttgaaaccagcgttctgaatagaggtaggttgagttttctaggggaaaacaaatggagaaaagaggcatgaagaaaagtaaaccgagaacataattaggcatcgggcctaagtgtcctggggagattggaggggacgngagcgttctgc

SEQ ID NO: 20139 - DNA, 471 bp, Homo sapiens
  misc_feature (1)...(471): n = A,T,C or G
ntttgatcgccttaggaattcgcacgccttttttcgatccgccatctgcggtggagccgccaccaaaatgcagattttcgtgaaaacccttacggggaagaccatcaccctcgaggttgaaccctcggatacgatagaaaatgtaaaggccaagatccaggataaggaaggaattcctcctgatcagcagagactgatctttgctggcaagcagctggaagatggacgtactttgtctgactacaatattcaaaaggagtctactcttcatcttgtgttgagacttcgtggtggtgctaagaaaaggaagaagaagtcttacaccactcccaagaagaataagcacaagagaaagaaggttaagctggctgtcctgaaatattataaggtggatgagaatggcaaaattagtcgccttcgtcgagagtgcccttctgatgaatgtggtgctggggtgtttatggcaagtca

SEQ ID NO: 20140 - DNA, 501 bp, Homo sapiens
  misc_feature (1)...(501): n = A,T,C or G
agagcgtctnnnnccttgaagcccgcttgcagcgcctgtangaattcggcacgagcgtctcanaaagaaaaaaagcaataaatgctcttccagaaaactcaaaaatgaagataagctaaaagaaaatggaaagcaccagaataccagaatctttccactcactgatgatcagagttaatacctcagtgtcttctgtggcttcagcgtcacctagtgcaggctgccattcaacaaacgcattgtcaacagtcaaccaaaagaaacccattggccaccataccctgaggactaaccctgacacagatgcccttccagatgccctcaatagtctaactgattccatcgccccagccttgggggagaagcactgctgcctatgcactccatttacaggctaaaatcacactcgatgtttttatgggatcatttgatctggacattgtcaaagaaaaaattgcaccagacaagttaaaccttcaaggaaggactcagtcaggactt

SEQ ID NO: 20141 - DNA, 462 bp, Homo sapiens
  misc_feature (1)...(462): n = A,T,C or G
agganannncctgattcatcgcctgcagaattccgacgaggtcctttccattctcaaatcctgtgactgggatcactcaacagcactgtgatgtattattttcaatgaggtgcctttcttaactgaccaaatgctgccttgtttggcccctaaatcaataaaatatgttaaaatttgtatcccctgttgtggcattttttttagataatctaagctagaaaaatgacattgaattctggacctggctggaaggaaaagaagccctttcttgtcgctggcagctgtgtggtagggaggtccaagtatgtgcatatgagataagcctgcaacctcttgaccttcagctcctatgcaggcttctcttgagcccagagacaaggcagcttggtctagtggagatagcactgtgcttggagttcaggggacctatgacaaatcccagccagttagttattcactgtg

SEQ ID NO: 20142 - DNA, 475 bp, Homo sapiens
attgacccgcactgcaagaattgggcaccagccgagcagtgctcggttctgtggaaagactgttgggagtgctggcagaaagctgcggggggaaatggccactgtggctgtccccgttccaggtggtggtcatccctgtggggagtgagcaagaggaatacgccaaagaggcacagcagagcctgcgggctgcaggactggtcagtgacctggatgcagactctggactgaccctcagccggagaatccgccgggcccagcttgcccactacaattttcagtttgtggttggccagaaagagcaaagtaagagaacagtgaacattcggactcgagataatcgtcgccttggggagtgggacttgcctgaggctgtgcagcgactggtggagctacagaacacgagggtcccagatgccgaagaaattttctgagcctttgtacatagatgaggcaaaaacctgcgagtgccatg

SEQ ID NO: 20143 - DNA, 433 bp, Homo sapiens
gcacgaggtccttccgaggaagctaaggctgcgttggggtgaggccctcacttcatccggcgactagcaccgcgtccggcagcgccagccctacactcgcccgcgccatggcctctgtctccgagctcgcctgcatctactcggccctcattctgcacgacgatgaggtgacagtcacggaggataagatcaatgccctcattaaagcagccggtgtaaatgttgagcctttttggcctggcttgtttgcaaaggccctggccaacgtcaacattgggagcctcatctgcaatgtaggggccggtggacctgctccagcagctggtggctgcaccagcagaggtcctgccccctccactgctgctgctccagctgaggagaagaaagtggaagcaaagaaagaagaatccgaggagtctgatgatgacatggg

SEQ ID NO: 20144 - DNA, 496 bp, Homo sapiens
  misc_feature (1)...(496): n = A,T,C or G
aggggatnnnaattcagtactccttaggaacgacgagacaatcctttcgaggaagaggacgaggaggaggaagcagtggcagggaatccattcattcagccagacagcccagctcctaaccccttcagtgaggaagacgaacatccccagcagaggctctcaagccctctggttcctggtaacccctttgaggaacccacctgtatcaacccctttgagatggacagtgacagtgggccagaggctgaggagcccatagaggaagagctcctcctgcagcagatcgataacatcaaggcatacatctttgatgccaagcagtgcggccgcctggatgaggtagaggtgctgacagagaatctgcgggagctgaagcacaccctggccaagcagaaggggggcactgactgaccagcagtggagagggcacctttgggcccaggggtctggcaggagccagtggagcacgacagagggcatgcatgatggatggnga

SEQ ID NO: 20145 - DNA, 503 bp, Homo sapiens
  misc_feature (1)...(503): n = A,T,C or G
cgggnnnnnttttggcaatagtatcgcctgtcggaattcggcacgagcatcttttttaattttattttttgtttacctccctccattcattcacatgctcatctgagaagacttaagttcttccagctttggacaataactgcttttagaaactgtaaagtagttacaagagaacagttgcccaagactcagaatttttaaaaaaaaaaatggagcatgtgtattatgtggccaatgtcttcactctaacttggttatgagactaaaaccattcctcactgctctaacatgctgaagaaatcatctgagggggagggagatggatgctcagttgtcacatcaaaggatacagcattattctagcagcatccattcttgtttaagccttccactgttagagatttgaggttacatgatatgctttatgctcataactgatgtggctggagaattggtattgaatttatagcatcagcagaacagaanatgtgatgtattttatg

SEQ ID NO: 20146 - DNA, 489 bp, Homo sapiens
  misc_feature (1)...(489): n = A,T,C or G
ctagaccgcctgcagttcttgactatcttttacatgtaacttctgcagacctatcacaagtttacatgtaaccacagaaatccctttctctcctgactcattaataatggataccattctcaacaagtcaatccaagtcagcccgttaaggagaaagaaattaaggttagcggatcatgtacaagctgagtgtgaaagtagaaatcacctacaccagagagccattttggtattttgcctttaaataaaaagcctcctttatctggctgtgcagccttgctctgtggcttttcccaacacaatcagtgctagtgctggggaggaacagtcaagagcagtcagttgcttgcttattttttctggatgagtctgggacacactgtaactntaacacatttaagaagtaggtgtgtggccttttcagatggtggcatggtcctcaagtgagttcttagtattttatatcagcanaataattcaattntgcag

SEQ ID NO: 20147 - DNA, 470 bp, Homo sapiens
  misc_feature (1)...(470): n = A,T,C or G
tgtggtacnnnnnaattgactttcgatgagcgattccgcacgagagatgatctgtaatttggtcattgttctgttatattccagattgctctacttgctaatatttgtatagaatagaatttatgtaaactagtaaccagttgatctctgtgccaaatacattatatcaggattacacaaaaagtatcacaaaggatggtcttggccatatgctagggcccctgtgaaaataagtagttttgagaagtttttctatatacgtatatatacacgtgtggttctatttaggtggggaaaaaatgaaaaagcagggacaacaggaggaaatgaaggcagagaaatatagtttcctttcctaggattgagacaattctatttttcatatactcgttgctcattaaatagtaaagggttgatttgctgcaagagtagctgagaattcaaaaacatccttgcagaatgattcaaan

SEQ ID NO: 20148 - DNA, 505 bp, Homo sapiens
  misc_feature (1)...(505): n = A,T,C or G
agaaaaatttgaccgccctnnggattttgaccccgctgcaggaattcggcacgagtatcattccagggaagccatctaagatcacgtgccacctaccttgttttcttgccagggttgcatgtgggactctgcagtggcccctgtgagatggctgagcaacggttctgtgtggactatgccaagcgtggcacagctggctgcaaaaaatgcaaggaaaagattgtgaagggcgtatgccgaattggcaaagtggtgcccaatcccttctcagagtctgggggtgatatgaaagagtggtaccacattaaatgcatgtttgagaaactagagcgggcccgggccaccacaaaaaaaatcgaggacctcacagagctggaaggctgggaagagctggaagataatgagaaggaacagataacccagcacattgcagatctgtcttctaaggcagcaggtacaccaaagaagaaagctgttgtccaggctaagttgacaaccactggcn

SEQ ID NO: 20149 - DNA, 458 bp, Homo sapiens
  misc_feature (1)...(458): n = A,T,C or G
nattgcccgctctgagacttcggcacgagatttaacaaactttggtatgtcttactgaaagaaagaaacatgcttctaaccctagagcaggaggccaagcggcagagattgccaatgccaagtccagagcggttagataaggtagtagattccatggatgcattagataaagttgtccaggaaagagaagatgccctaaggcttcttcagactggtcaagaaagagctagacctggtgcttggagaagagacatctttggaagaatcatctggcacaagttcaagcagtgggttataccttggcacctaaataaaagatacaataggaaacgattctttgccttgccttatgtggaccattttctcagactggaacgtgagaaacgagcccgcatcaaagcacggaaggaaaatttagagagaaagaaagcaaaaattcttttaaaaaagtttccaca

SEQ ID NO: 20150 - DNA, 461 bp, Homo sapiens
  misc_feature (1)...(461): n = A,T,C or G
nttagaannccttgccccgcgctgcaggaattcggcacgagggaaaattaatttcagggttttttgaggcttttgacacagttattagttaaatcaaatgttcaaaaatacggagcagtgcctagtatctggagagcagcactaccatttattctttcatttatagttgggaaagtttttgacggtactaacaaagtggtcgcaggagattttggaacggctggtttaaatggcttcaggagacttcagttttttgtttagctacatgattgaatgcataataaatgctttgtgcttctgactatcaatacctaaagaaagtgcatcagtgaagagatgcaagactttcaactgactggcaaaaagcaagctttagcttgtcttataggatgcttagtttgccactacacttcagaccaatgggacagtcatagatggtgtgacagtgttaaacgcaacaa

SEQ ID NO: 20151 - DNA, 484 bp, Homo sapiens
  misc_feature (1)...(484): n = A,T,C or G
gcgagcccaaatgacgcctgggaatatggcgagcatagcaaatccgtgcaattttgtttacaaatggtgtatattaaagatttttctatttcagatgtactttaaagataaatattagcttaactcttttgacatctgctattgtgacacatcccattgctggcaatgtggtgcacactccgaaacttttaactactgttttgtaagcctccaagggtggcattgcagggtccttaagcaatgttttgtttgcctttatgcanagaggtgctccaagtgctgtgattgagcaccgtgctagaggaactgtaatgcttcagaagttgtagcttatacaaaggaaacaggtcctgctggcttaatttaaacagttattgcatgaagtagcgtggaggccctggactgctgctcgttctttaagaaggactgctctggtatctggtattggtttagagactgttaataaggcacatcacaagggggg

SEQ ID NO: 20152 - DNA, 502 bp, Homo sapiens
  misc_feature (1)...(502): n = A,T,C or G
cgccccccatttgcnccgcgctgcaggcaaatgtatcctaccaagagactacaacacctagtacccttggaagtaccagcctgcaccctgtgtctcaacatggcaatgaggccacaacaaacatcacagaaacgacagtcaaattcacatctacctctgtgataacctcagtttatggaaacacaaactcttctgtccagtcacagacctctgtaatcagcacagtgttcaccaccccagccaacgtttcaactccagagacaaccttgaagcctagcctgtcacctggaaatgtttcagacctttcaaccactagcactagccttgcaacatctcccactaaaccctatacatcatcttctcctatcctaagtgacatcttctgtgggtgacccaggtccttgtttgctgttgatttctttccagaggggttgagcagggatcctgggttcaatgacgggtggaaatagaaatttccagagaagagagtattgggtagata

SEQ ID NO: 20153 - DNA, 496 bp, Homo sapiens
  misc_feature (1)...(496): n = A,T,C or G
gaggtgcccnaatgatcgcctcggaannatcgaccgcctgcagcggcctcggccgcggggaaggactgggcgttcatcaacaccaacatctttgccaggaccaagatagaccccagcgccttggtgcagaagctggagctggacgtgaggagtgtcacttccgtcaggagaggtgaggcaggctcgagtgcacggagcgtcccttccatcaggagaggtgcagaggccaagaccgttttgcccaagaaggagaaaatgaagctgaggcgtgagcaatggttgcagaaaatcgaagccataaaactggctgagcagaagcacagggaggagcggaggcggagggccacggtggtggtgggggacctgcaccctctcaaggatgccctgcccgagctgctggggctcgaggctggcatccggcgccaagcccgcagcagggagagcaacaagccccggccctcagagctcagccggatgagcgcagcccagagacagc

SEQ ID NO: 20154 - DNA, 489 bp, Homo sapiens
ctcgaccgcctgcggaattcggcacgcgcccatgtgaagtcactgtgccagcccagaacactggtctcgggcccgagaagacctcctttttccaggctttaggtatcaccactaaaatctccaggggcaccattgaaatcctgagtgatgtgcagctgatcaagactggagacaaagtgggagccagcgaagccacgctgctgaacatgctcaacatctcccccttctcctttgggctggtcatccagcaggtgttcgacaatggcagcatctacaaccctgaagtgcttgatatcacagaggaaactctgcattctcgcttcctggagggtgtccgcaatgttgccagtgtctgtctgcagattggctacccaactgttgcatcagtaccccattctatcatcaacgggtacaaacgagtcctggccttgtctgtggagacggattacaccttcccacttgctgaaaggtcaaggccttcttggctga

SEQ ID NO: 20155 - DNA, 459 bp, Homo sapiens
  misc_feature (1)...(459): n = A,T,C or G
nattgaccgccttgaggccggtctcagccagctagatccagaaagtgattcccagggccaaggaaatggtttgttttactcgtcaggccctcaatcctggtatcccaaagccaataaccaggactttatcccctttacatagaaacgagttggagtggaccgggcgttcccattgtaacccatggtccacaggaagtcgtgcagtacatgtgaggctggcactgatggggaccataatgtctacccaaggccccctgagccgagagagttttcatctaggaactttggtgtgaggaaccagggcaacttttctgtggttggtactgttcttgctgccacgcatgcggagaaggccgtggcaaactttgacaggacggagtgggtgcagatccgaagactataagctgcaggggagagcttacaggaggaaatccgaagaaagcagattctcctgagggg

SEQ ID NO: 20156 - DNA, 241 bp, Homo sapiens
  misc_feature (1)...(241): n = A,T,C or G
natttgaccctcgctgcgcgaattcggcacgagaacaaatcttactgtgccgagatcgctcacaatgtttcctccaagaaccgcaaagccatcgtggaaagagctgcccaactggccatcagagtcaccaaccccaatgccaggctgcgcagtgaagaaaatgagtaggcagctcatgtgcacgttttctgtttaaataaatgtaaaaactgccatctggaaaaaaaaaaaaaaaaaaaca

SEQ ID NO: 20157 - DNA, 487 bp, Homo sapiens
  misc_feature (1)...(487): n = A,T,C or G
catcgacccccctnaattgancggctgtacgaattcggcacgagacctctggctagaggacatattcacagtgaacataactgtaacatatatgaaaggcttctgggacttgaaatcaaatgtttgggaatggtgcccttggaggcaacctcccattttagatgtttaaaggaccctatatgtggcattcctttctttaaactataggtaattaaggcagctgaaaagtaaattgccttctagacactgaaggcaaatctcctttgtccatttacctggaaaccagaatgattttgacatacaggagagctgcagttgtgaaagcaccatcatcatagaggatgatgtaattaaaaaatggtcagtgtgcaaagaaaagaactgcttgcatttctttatttctgtctcataattgtcaaaaaccagaattaggtcaagttcatagtttctgtaattggcttttgaatcaaagaatagggagacaatc

SEQ ID NO: 20158 - DNA, 484 bp, Homo sapiens
  misc_feature (1)...(484): n = A,T,C or G
atttgacnccgctgcaggaanncttttgagcccgtctgcaagaattcggcacgagcggcgccgcgcgagcatccggccctggagcaccttcgtggaccagcaacgcttctcacggccccgcaacctgggagagctgtgccagcgcctcgtacgcaacgtggagtactaccagagcaactatgtgttcgtgttcctgggcctcatcctgtactgtgtggtgacgtcccctatgttgctggtggctctggctgtctttttcggcgcctgttacattctctatctgcgcaccttggagtccaagcttgtgctctttggccgagaggtgagcccagcgcatcagtatgctctgnngggaggcatctacttccccttcttctggctggttggtgcgggctcggtcgtcttctgggtgctgtgagccaccctggcggtcatcggctcccacgctggcttccaccaaattgaggctgtggactgctaagag

SEQ ID NO: 20159 - DNA, 534 bp, Homo sapiens
  misc_feature (1)...(534): n = A,T,C or G
aggggnnncaagcnnncccccccnattagacccccttttgaccgcctgcaggaattcggcacgagccaggttctgtggacaatcacaatgggaatccaaggagggtctgtcctgttcgggctgctgctcgtcctggctgtcttctgccattcaggtcatagcctgcagtgctacaactgtcctaacccaactgctgactgcaaaacagccgtcaattgttcatctgattttgatgcgtgtctcattaccaaagctgggttacaagtgtataacaagtgttggaagtttgagcattgcaatttcaacgacgtcacaacccgcttgagggaaaatgagctaacgtactactgctgcaagaaggacctgtgtaactttaacgaacagcttgaaaatggtgggacatccttatcagagaaaacagttcttctgctggtgactccatttctggcagcagcctggagccttcatccctaagtcaacaccaggagagcttctcccaaactccccgttcctgcgtagtccgctttctctagc

SEQ ID NO: 20160 - DNA, 447 bp, Homo sapiens
atttgacaatcgatccgcgctgcaggaattcggcacgagtagcgctcggccgctggcgacagcggagggcggaggatctgcaggttccgggggacgtgacatgttttgagcgcctgctgtgtctcaagccctgtcctaggcactggagatgagatgaagaaacgatgagttgaggccttgcttacgtttatcctgcaactcatgatgaggcttactctgcaactgcagtgctcggctttttacacaacagagtctctgttgcccaggctggagtacagtcgcacgatcttggctcactgcaacctctgcctctcaggttcgagtgattcttctgcctcagcctcccaaggtgctgggattacagaaacgggtatgcaggagattagaagccagtgggcatgagcgtggctgccaccaggtgaatgcctgtgccctggcatcctgggg

SEQ ID NO: 20161 - DNA, 371 bp, Homo sapiens
  misc_feature (1)...(371): n = A,T,C or G
cggggncnaattgaccgccgtagatagcccggctgcggctgctgcgctctctgtggctgagtgtgtggagcggatggcccccacactgccaaaaagtgacttgaatgaagtgaaagagctgctaaaaaccaacaagaagttggccaaaatgattggtcacatctttgagatgaacgatgatgatccacacaaagaggaggaaattcggaaatacagtgcaatatatggcagatttgactcaaagaggaaggatgggaaacatctcacacttcatgagctcactgttaatgaagcggctgctcaactctgtgtgaaggataatgccctgctgacaagaagagatgagctttttgccttggctcgacagattt

SEQ ID NO: 20162 - DNA, 498 bp, Homo sapiens
  misc_feature (1)...(498): n = A,T,C or G
nggggngccaattgancggctgtangtagtcggcacgagctcgaatgacgttatgggcacatgccttttaaaagttctttaagcaacacagagctgagtcctctttgtcatacctttggatttagtgtttcatcagctgtttttagttataaacattttgttaaaatagatattggtttaaatgatacagtattttaggtatgatttaagactatgatttacctatacattatatatattttataaagatactaaaccagcatacccttactctgccagagtagtgaagctaattaaacacgtttggtttctgaataaattgaactaaatccaaactatttcctaaaatcacaggacattaaggaccaatagcatctgtgccagagatgtactgttattagctgggaagaccaattctaacagcaaataacagtctgagactcctcatacctcagtggttaaaagcatgtctctcttgagctacagtagaggggaagg

SEQ ID NO: 20163 - DNA, 452 bp, Homo sapiens
  misc_feature (1)...(452): n = A,T,C or G
attganctcgctnccgctgcacgaattcggcacgagcggcgtggacacttggcattcagggacgtggccatagaattccctcaggaggagtggaaatgtctggaccctgctcagaggactttatacagggaagtgatggtggagaactacaggaacctggtctttctgggaatctgtcttcctgacctgagtgttatctccatgttggagcaaaggagagatccccggaatctgcagagtgaagtgaaaatagcaaacaatccaggtggcagggagtgcatcaaaggtgtgaacgcaggctgtcgtanagtggcaatcatcagtggcaatcgtggcttaactcatagcctcaaactcctggtctcaagtgatcctccttcctctgcttccgaaagtggtgggattacaagcatgagccactgtaccctgcaaaaccacactttgagtttctg

SEQ ID NO: 20164 - DNA, 470 bp, Homo sapiens
  misc_feature (1)...(470): n = A,T,C or G
nattgacttgcctgacgatattcggacgagcccacataaccatctggagtgtgtccagcttgctcttcataggaccaatttttatttgcagcttgagtttttatatgaagttgcattattgtggacttggctgtcttgtgatgaatttttttcatatgtattctgtgccatactattgttaaaatgaactgttgctattgtgagatggattttaactgacctattaagggtttctttcgaatggcactactttagggacattctagtatttgcttctattgtttgggccttgcggataatgtacagatttaaaaacaaatcttgttgctgatttgtccatttctttccctgcactttgttacatctgggatacagtctaactcatctgatttaatatgcatttaaaaaaatgccataactattaaacaccttgtttacagacagatgaaataaatttattccaaccaaaa

SEQ ID NO: 20165 - DNA, 479 bp, Homo sapiens
cattgacggctgtggtatgacgccgagcccccctagtgcccccggcggcccgggagaggaatcttcccccaatgcgcccgcctgcatggaacggcagttggaggctgcgcggaaccggtccgatggggcgcttatcctcggggcctccagcctgagagggcgctgctgggccggctccctctggctttttaaggacccctgtgccgcccccaacgaaggcttctgctccgccggagtccaaacggaggctggagtggctgacctcacttgggttggggagagaggtattctagtggcctccgattcaggtgctggtgaattgtgggaactacatgagaatgagacacttattgtcagcaagtgctgcaaggatgagcatgatgacattgtgtctacagtcagagacttgagctctggcacacaagctgtcagtggtagcaaagacatctgcatcaaggtttgggaccttgctcagcagg

SEQ ID NO: 20166 - DNA, 473 bp, Homo sapiens
  misc_feature (1)...(473): n = A,T,C or G
agaggggaaatgactgctctgcacgaattcggcacgaggacagacagcaccttctccggatttctggtgtactccgactggcacagctccccagtctttgcttaatgcccactgcaaagtgagctcatgctctcactcctagaaggagggtgtgaggctgacaaccaggtcatccaggagggctggcccccctggaatattgtgaatgactaaggaggtggggtagagcactctccgtcctgctgctggcaaggaatgggaacagtggctgtctgcgatcaggtctggcagcatggggcaggggctggatttctgcccaagaccacaggagtgtgctgtgctggcaagtgtaagtcccccagttgctctggtccaggagcccacggaggggtgctctcttcctggacctctgcttctctggatgcttcccaccccctactgctcctggggccggcccttttctcagagatcan

SEQ ID NO: 20167 - DNA, 498 bp, Homo sapiens
  misc_feature (1)...(498): n = A,T,C or G
tggggngnnnnnaatcgcctggctgcacgaattcggcacgagctggctcgatactgtgactccttgttgaagaaaagttccaagaacccagaggaggcagaactagaagacacactcaatcaagtgatggttgtcttcacgtacatagaacacaaagacgtatttcagaagttctatgcgaagatgctcgccaagaggctcgtccaccagaacagtgcaagtgacgatgccgaagccagcatgatctccaagttaaagcaagcttgcgggttcgagtacacctctaaacttcagcgcatgtttcaagacattggcgtgagcacagatctgaacgagcaattcagaaagcacttgacaaactcagaacccctagacttggatttcagcattcaagtgctgagcgtcgggtcctggcccttccagcagtcttgtacatttgccttgccgtcagagttgtgacgtagctatcagcgattcacagctttctacgccagccgg

SEQ ID NO: 20168 - DNA, 443 bp, Homo sapiens
  misc_feature (1)...(443): n = A,T,C or G
nattgacctcgtgcgcnggaactgaggcttcctgatattcctcttcgtcaagttatagctgaggaatgtgttgcctttatgttaaactggagagaaaatgaataccttacactccaagttcctgcatttttgcttcagagtaatccatatgtaaagcttggacagcttttagcagctacatgcaaagaacttccaggccctaaagaaagcagacggactgccaaagacctttgggaagttgttgttcaaatctgtagtgtgtccagtcagcacaaacgaggaaatgatggcagagttagtttaataaaacagagggaatctacgttaggtatcatgtatcggagtgaactgctttcttttatcaaaaaattacgagaaccactcgttttgactattattttatcactctttgtgaaacttcacaatgttcgggaggacattgg

SEQ ID NO: 20169 - DNA, 449 bp, Homo sapiens
  misc_feature (1)...(449): n = A,T,C or G
nattgaccatcgatccgcgctgcaggaattcggcacgagagtacatctccaataaacgtaagagcatgaccaagctgcgaggcccaaaccccaaatccagccggactactctgcagtccaagtcggagtccgaggaggatgatgaagaggatgaggatgacgaggacgaggatgaagaagaggaagatgatgagaatggggactcctctgaagatggcggcgactcctctgagtccagcagcgaggacgagagcgaggatggggatgagaatgaagaggatgacgaggacgaagacgacgacgaggatgacgatgaggatgaagataatgagtccgagggcagcagctccagctcctcctcctcaggggactcctcagactctgactccaactgaggctcagccccaccccagggcagccagggagagcccaggagctcccctccccaa

SEQ ID NO: 20170 - DNA, 505 bp, Homo sapiens
  misc_feature (1)...(505): n = A,T,C or G
aggggnannnnnncacgcgcccnnnnnntttgannaatcgaccgctctgcggaattccgcacgaganaacgcacaagccagaccctggcacgccccagcacacgagttccagaccccctgagccacagaaagctccttccagaccttatcaggataccagaggaagttatggcagtgatgccgaggaggaggagtaccgccagcagctgtcagaacactccaagcgcggttactatggccagtctgcccgataccgggacacagaattatagatgtctgagcacggactctcccaggcctgcctgcatggcatcagactagccactcctgccaggccgccgggatggttcttctccagttagaatgcaccatggagacgtggtgggactccagctcgtgtgtcctcatggagaacccaagggacagctggtgcaaattcagaactgagggctctgtttgtgggactgggttagaggagtctgtggctttttgttcagaattaagc

SEQ ID NO: 20171 - DNA, 500 bp, Homo sapiens
  misc_feature (1)...(500): n = A,T,C or G
aggggacgnngncagnnnnnnnnnaaatgaccctctgcggacttcggcacgaggggatccggtctttccagccccgagagggacctggttcctctgcccaggcttctgtcactctgtcacctacgctatgccctgctgtagtcacaggaggtgtatagaggaccccgggacatcttaaagccaggaaatggaggagtgggctttgctggatatttcccagaggaaactctacaaggaagtgatgctggaaactttcaggaacctgacctctgtaggaaaaagttggaaagaccagaacattgaatatgagtaccaaaaccccaggagaaacttcaggagtctcatagaagagaaagtcaatgaaattaaagatgacagtcattgtggagaaacttttacccaggttccagatgacaggctgaacttccaggagaagaaagcttctcctgaaataaaatcatgtgacagctttgtgtgtggagaagttggcctatgtaact

SEQ ID NO: 20172 - DNA, 505 bp, Homo sapiens
  misc_feature (1)...(505): n = A,T,C or G
agaaggagccaattgaccncccctcngattgatcgcccgtcggaatncgccacgagcacagattcacaatgttgaaagcccttttcctaactatgctgactctggcgctggtcaagtcacaggacaccgaagaaaccatcacgtacacgcaatgcactgacggatatgagtgggatcctgtgagacagcaatgcaaagatattgatgaatgtgacattgtcccagacgcttgtaaaggtggaatgaagtgtgtcaaccactatggaggatacctctgccttccgaaaacagcccagattattgtcaataatgaacagcctcagcaggaaacacaaccagcagaaggaacctcaggggcaaccaccggggttgtagctgccagcagcatggcaaccagtggagtgttgcccgggggtggttttgtggccagtgctgctgcagtcgcaggccctgaaatgcagactggccgaaataactttgtcatccggcggaacccagctgaccc

SEQ ID NO: 20173 - DNA, 448 bp, Homo sapiens
  misc_feature (1)...(448): n = A,T,C or G
nattgcccgtcctgancaattcggcacgagatcagacaccccttcacgtgtatccccacacaaatgcaagctcaccaaggtcccctctcagtccccttccctacaccctgaccggccactgccgcacacccacccagagcacgccacccgccatgggagtgtgctcaggagtcgcgggcagcgtggacatctgtcccagagggggcagaatctccaatagaggactgagcactgaaaaaaaaaaaaaaaaaaaaaaaaaaaaaaaaaaaaaaaaaaaaaaaaaaaaaaaaanncttgggggggggggccggcccccattttccctttagggggggggtttaaaaattccgggggcgggtttttaaaagggggggggggagaaaacnnnnnnntnnngntnnatcccttgcccccccnaacttctccttgggcaanatatcgatacccc

SEQ ID NO: 20174 - DNA, 496 bp, Homo sapiens
gggcgggaaattgatcggctgtggtagacggcacgagagaattgccattgggcccagggagagactacacttcttgtctgctttgttgctagtgcggccttgtggccaagcacagaacgtgtgcagtgatgatggtgcaacttctaggtcgtccccagcatggaaaatgagccctgggcatggaagatgagccctggtcctgcagcggtgctctttcctcttctcacaagctggaatgtgcatgtgctcccacccagctttgaccatggggcgaaaacagtactctgcagtctggcagagcaacaaggtggaaagggcctgggtccttgagtgacgtcatgagccctctcactgtcccgactttgggactgttatatgataaggactttctgtgagtcactgtcttttagagtctctctgttttagctgcctggactttatcctgaataatatggctgttatcatgggtatagtgttactatgagcctcatctaag

SEQ ID NO: 20175 - DNA, 390 bp, Homo sapiens
  misc_feature (1)...(390): n = A,T,C or G
tgggcgaggcnnccccaaattgacgcccctnaatcgaccggctgtangaattcggcacgagattaaggctactatggagtatcctctgtgtccagacctgaggtggatgttgtccctaattgtagatggctgagcttctctaagctgctgcctatctgagagggcctcaccatatctttttccttggattggcatgggagggtcaggcaggaataatgggtttatattggctgtttctatgactcatgccccccactcccactagactgtgacatccctgagggcagggactatgtctaactcattggtgtatccccagcacctaacatactgccctgcgtgtagtgagagtttaataaatgtttgttgaataaaaaaaaaaaaaaaaaa

SEQ ID NO: 20176 - DNA, 478 bp, Homo sapiens
  misc_feature (1)...(478): n = A,T,C or G
agctgggcaaatgaaactcactcgcgctgcacgaattcggcacgagcaagaactcacctcaaagagaagccctttgactgcagtcagtgtggaaatgcattccggaccctctcggccctgaaaatccacatgcgagttcacactggcgagaggccttacaagtgtgatcagtgcgggaaggcttacggccggagctgccacctcatcgcacacaagagaacgcacaccggagagaggccctacgagtgtcacgactgtgggaaagctttccagcacccctcccacctcaaagagcacgtgaggaatcacacgggggagaagccctacgcgtgcacgcagtgcggcaaagccttccgctggaagtccaactttaatttgcacaagaagaaccacatggtggagaagacctacgaatgtaaagaatgcgggaaatcctttggcgatctcgtgtcccggaggaaacacatgaggattcacn

SEQ ID NO: 20177 - DNA, 473 bp, Homo sapiens
  misc_feature (1)...(473): n = A,T,C or G
agaggggcaatgacttcctctgacgaattcggcacgaggccactcagccatttccccctcctcagatggggcaccaataacaaggagctcaccctgcccgctcccaacccccctcctgctcctccctgccccccaaggttctggttccatttttcctctgttcacaaactacctctggacagttgtgttgtttttttgttcaatgttccattcttcgacatccgtcattgctgctgctaccagcgccaaatgttcatcctcattgcctcctgttctgcccacgatcccctcccccaagatactctttgtggggaagaggggctggggcatggcaggctgggtgaccgactaccccagtcccagggaaggtggggccctgcccctaggatgctgcagcagagtgagcaagggggcccgaatcgaccataaagggtgtaggggccacctcctccccctgttctgttggngagggg

SEQ ID NO: 20178 - DNA, 469 bp, Homo sapiens
  misc_feature (1)...(469): n = A,T,C or G
agagggacactgattcatgacgattnccgacgagaaataagggcctagaaactcacccgtgcatatgttgacctttgcaaaatgacctggtgacatggcaagtcagtggggacaggaaggaccactccctaagtaatcccagaacaatggctattcatgtgggaaaaaaagaaattttactttctctcaccttacctggtgataagttccaaatatgttaagggctttaatacaaaaagcaaaaattgtcagtgtttggatgaaaaaagccttagggcaggaaagaatctcttgagacataaagtagtaatcataaaggacaagatggttaagtcaattctgttaaaactcaaggcttatattaagcaaacacttgaagtgagaagatgatccacaacttgagaagacatttataatacaaataactgatgaaggattcataatcacaaatatagagaattcctattta

SEQ ID NO: 20179 - DNA, 452 bp, Homo sapiens
atttgcaccggatcgaggactttggcacgagccggcacctcgaatccctggcgaccatgagtcaccagctccaagccttactgtgcccccagaccaagagctccatcccccgccctctgcagcgtttgtctagcgcccttgcagctccagagccccctggcccagcccgtgactcctctttggggcctacagatgaagctggctctgagtgtcccttccctagaaaggcctgaccctccttacccaccagaacaggggttttgatgccctcactagtgttgaagcctgttccagagagaggtgggactgcaaggagaggatggtcagccctacccacctgccctgtttgagcttcctgtttgacaatgtttgctgttgattttttgttcaataaagaatttggtaaaattggaaaaaaaaaaaaaaaaaaaacctcgtgccgaattcggcag

SEQ ID NO: 20180 - DNA, 507 bp, Homo sapiens
  misc_feature (1)...(507): n = A,T,C or G
aggggnannnnnnnnagncgccnnnnnnaattgaccaattgatccgcgctgcaggaattccgcacgagccacctacacccaacaagtcaatgagggacttctttttaatttggtaggattttgactggttttgcaacaataggtctattattagagtcacctatgacaaaaaataggggttacctagataatgccaaagtcagcatttgtcctgggttcccttgtgtgatctgtttggactatgttttcttttcttctcccacttgctcagcagcttgggcttccattctagttcttttaccaagatttttgtgtgaccatgttgacttcatttggattgccctctttcaatttccttgtgaaaacacccttaactttctctttacccttagctgaaatgtttacatagcttctggtgatatcttttcatgattttatatctcttaaaatggtgatggatgtgacacctcataaaagtgagctttgaactgtagataactcttaaag

SEQ ID NO: 20181 - DNA, 382 bp, Homo sapiens
  misc_feature (1)...(382): n = A,T,C or G
cagaattttattttttaaaataaaaggttctttacaagatgataccttaattacactcccgcaacacagccattattttattgtctagctccagttatctgtattttatgtaatgtaattgacaggatggctgctgcagaatgctggttgacacagggattattatactgctatttttccctgaatttttttcctttgaattccaactgtggaccttttatatgtgccttcactttagctgtttgccttaatctctacagccttgctctccagggtggttaataaaatgcaacacttggcatttttatgttntaagaaaaacagtattttatttataataaaatctgaatatttgtaaccctctaaaaaaaaaaaaaaaaaa

SEQ ID NO: 20182 - DNA, 497 bp, Homo sapiens
  misc_feature (1)...(497): n = A,T,C or G
gggggcnaatagacgactgatgtggtatctgacaagactacatcaganaagctgaatacccttttagctctgagcaaaagtggatggctgttaagtgtgtacaccgaacacagcaggacagaccagagatttgttttatgaaaggtgcttacgaacaagtaattaagtactgtactacataccagagcaaagggcagaccttgacacttactcagcagcagagagatgtgtaccaacaagagaaggcacgcatgggctcagcgggactcagagttcttgctttggcttctggtcctgaactgggacagctgacatttcttggcttggtgggaatcattgatccacctagaactggtgtgaaagaagctgttacaacactcattgcctcaggagtatcaataaaaatgattactggagattcacaggagactgcagttgcaatcgccagtcgtctgggattgtattccaaaacttcccagtcagtctcaggagaagaa

SEQ ID NO: 20183 - DNA, 499 bp, Homo sapiens
  misc_feature (1)...(499): n = A,T,C or G
acgcccccccatagatcgcttgaggactntcccacgaggtcagcttcacattctcaggaactctccttctttgggccacggaattaacccgagcaggcatggaggcctctgctctcacctcatcagcagtgaccagtgtggccaaagtggtcagggtggcctctggctctgccgtagttttgcccctggccaggattgctacagttgtgattggaggagttgtggccatggcggctgtgcccatggtgctcagtgccatgggcttcactgcggcgggaatcgcctcgtcctccatagcagccaagatgatgtccgcggcggccattgccaatgggggtggagttgcctcgggcagccttgtggctactctgcagtcactgggagcaactggactctccggattgaccaagttcatcctgggctccattgggtctgccattgcggctgtcattgcgaggttctactagctccctgcccctcgccctgcagagaagagacn

SEQ ID NO: 20184 - DNA, 513 bp, Homo sapiens
  misc_feature (1)...(513): n = A,T,C or G
aggantcncaggggtnnnnnnattggcggcgtggtccgctcnatgcttttggaaattggtttggacaaactaaagaaagattatatcagttttttcataggtcaggaacttgcatctttgaatcatttggaatacttcattgctccatcagtagatatacaagaacaggtttatcgtgtccaaaaactccaccatattctagaaatattagtcagttgcatgcctttcattaaatctcaacatgaactcctcttttctttaacacagatctgcataaagtattacaaacaaaatcctcttgatgagcaacacatttttcagctgccagtcagaccaactgctgtaaagaacttatatcaaagtgagaagccacagaaatggagagtggaaatatatagtggtcaaaagaagattaagacagtttggcaactgagtgacagctcacccatagaccatctgattttcacaaacctgatttttncgaattaacactaaacggtagcctggaagaaa

SEQ ID NO: 20185 - DNA, 518 bp, Homo sapiens
  misc_feature (1)...(518): n = A,T,C or G
tggttgnccccnagatgcccnnnnnccttgannnnccattgcagcgcccttcgcgaattcggcacgaggcaacatctcattttaaatagtacaattcagaagggatactaaatcaataaaaaccaggactcagacactacagttttcatcagtgtaattttatgtcttgtttctttctatatgaacttgtttatttagtctttttttcataatattctcatagagtttctgctagatctagagctctgctcagtgcctcttataaaaacaatatataagtctcatatgctgtcttgagaatccaagagaatcacatgcagctctgcaacagtttttgctcaaaaatgttactgactaaagcaactgtccttcctgtttccttattgctaccaaggaccagcagggagaaatgtcttctcccagcagtgaattctgttatgcaatttattcttgatgctcaggcctggttaagctgaggcttacctttaataacagcctccaagggaatgaattattcn

SEQ ID NO: 20186 - DNA, 416 bp, Homo sapiens
  misc_feature (1)...(416): n = A,T,C or G
ngggncaccttganncccctnnnattgcaccgcctgcaggaattcggcacgagcgcgcggtgtggtggcagcaggcgcagcccagcctcgaaatgcagaacgacgccggcgagttcgtggacctgtacgtgccgcggaaatgctccgctagcaatcgcatcatcggtgccaaggaccacgcatccatccagatgaacgtggccgaggttgacaaggtcacaggcaggtttaatggccagtttaaaacttatgctatctgcggggccattcgtaggatgggtgagtcagatgattccattctccgattggccaaggccgatggcatcgtctcaaagaacttttgactggagagaatcacagatgtggaatatttgtcataaataaataatgaaaacctaaaaaaaaaaaaaaaaaaa

SEQ ID NO: 20187 - DNA, 426 bp, Homo sapiens
  misc_feature (1)...(426): n = A,T,C or G
nttgatcgccttaagaatcttcggagacgatatgctgcgacattaaaacctctttgtacctgagacatctagattcacctcaggaggcctgaaggaaatgtgtaacttgtgggaaagaactagacaaccatttaagaattctctagatatactcagcctaacccagtggcttaacacaaggagattggctttgatctttttttcttgtggcatcttccagcaagttagaagtctcatgggataagactgcagttcccctggttcaataactggaacagtgattgtaaatgtccctttttctggatcccttgtaaacatgagatcattccatggatggctgacttataattttgtctctttccactttaattgtgaatggataaaaaaatgctgctctctgatattaaatttttattagtgcaaaaa

SEQ ID NO: 20188 - DNA, 474 bp, Homo sapiens
  misc_feature (1)...(474): n = A,T,C or G
nagagangttttnnaatagactgctgtagcagtctgncacgagcgatgctccaccagttggaggcttctcttttgtaactgccgcaggaatgccgtcttggaagccgattttgcaaagaggggatacaagcttccaaaggtccggaaaactggcacgaccatcgctggggtggtctataaggatggcatagttcttggagcagatacaagagcaactgaagggatggttgttgctgacaagaactgttcaaaaatacacttcatatctcctaatatttattgttgtggtgctgggacagctgcagacacagacatgacaacccagctcatttcttccaacctggagctccactccctctccactggccgtcttcccagagttgtgacagccaatcggatgctgaagcagatgcttttcacgtatcaagggtacattggtgcagccctaagtttagggggagtagatgttactgt

SEQ ID NO: 20189 - DNA, 461 bp, Homo sapiens
  misc_feature (1)...(461): n = A,T,C or G
aggggnnnnnnnnnnnnnagncgcncnnnnnnnnattgannctactgatccgccctgcaggaattcggcacgagctttcctgagaatggctttctctctcctgataaactgtctttgctggaaaaactcctacccgagaggaaggaagtggaagagactgatgagatggaccaagtagaactggtggactttgatccaaatcaggaaagacggcgccactacaatggagaagcatatgaggatgatgaacatcatcccagaggtggtgttcagtgtcagacctcttaatgggccagtgaataacactcactgctggcatttaatgtgcagtagtgaatgagtgaaggactgtaatcataatatgctcactacttgctcttgtttttgttttaataaactatagtagtgttttaaaaagttaaatgaagaataaacgcaaatataaaaaaaaaaaaaaaaaa

SEQ ID NO: 20190 - DNA, 512 bp, Homo sapiens
  misc_feature (1)...(512): n = A,T,C or G
tgggtggcccnaaggtggnnnnnnaattgannnncattgatcgccttcggaattcggcacgagatcagtctatggtcccagtaaaagtaaagatgcaggaaacacagtctgtaaatgagcgacttttctttgttcagctttagttttagcaaacaccacaaatatgttttaagtaacatcgctcaagtttaagtaacatcgctcaagttgataatctcttgataagctctgttgttgacattttgcagtgatacaacagctccactcatagatttaaacttttatttttacttatcttggtcataagttggcattctctcacattccacatgatatagagggctacgttttggaattttccttttcttaattgcccagagttatcagacagattataaaaatggcttttaatggcttaaaccatttctaaacctctatcttagcagatcaatgcaggatctaattcttttgataagttctagctctaaaagtgatagtgggactgtatgttt

SEQ ID NO: 20191 - DNA, 507 bp, Homo sapiens
  misc_feature (1)...(507): n = A,T,C or G
aggatgtcccnngntattccncaattgattagcccattgattntcgtacgagganncttggnccgcacgctcctgctcctgactcaccgctgttcgctctcgccgaggaacaagtcggtcaggaagcccgcgcgcaacagccatggcttttaaggataccggaaaaacacccgtggagccggaggtggcaattcaccgaattcgaatcaccctaacaagccgcaacgtaaaatccttggaaaaggtgtgtgctgacttgataagaggcgcaaaagaaaagaatctcaaagtgaaaggaccagttcgaatgcctaccaagactttgagaatcactacaagaaaaactccttgtggtgaaggttctaagacgtgggatcgtttccagatgagaattcacaagcgactcattgacttgcacagtccttctgagattgttaagcagattacttccatcagtattgagccaggagttgaggtggaagtcaccattgcagatgcttaagtcaa

SEQ ID NO: 20192 - DNA, 475 bp, Homo sapiens
  misc_feature (1)...(475): n = A,T,C or G
ngggcgnngtgnnattgaatagcatggctgtcacgaattcggcacgagcctaaagatgcttctttgctgcctttccatcttacgttgcacaaaacacactgtaacttgtctgttggaatgtcttgcactttcactaacctgtaaatctctaggaagttggtgcttggtagtattcagcttcatatctatctgtcaatccttcacactgtctgtcgcatgggatacgcacaacagacaaattccccgagttagctttctagaattgtacagcagatggcactaataggctgcttaacaaatccccttcactaagaatgatttttgtcccaaccttgtctgactttggccttatcctagaagccaatatttatgccattacaggtaaaatctcctgtttcctccctcagccaatagcaaaaataacaaaatgactcagcagcttcgtctctgcaagaatggagtggcagatgtccag

SEQ ID NO: 20193 - DNA, 499 bp, Homo sapiens
  misc_feature (1)...(499): n = A,T,C or G
gggggnnaattgaccatagatgcgcctgcaggaattcggcacgagggagaatccgcccgcgagatcccagggcgcctgacccgtgcgggccgtttcgcggttgctaaaaaccacctcctgggggactgggagaggaactcggggtaatgctcttctccaaactgtttttcggaagcagcggtgaacgggatcgtgcacgatgtggacgtgctgggcgcgggcatccggctggtgaccctgctggtggatcgggacgggctgtacaagatgaaccgcctgtacctcacccccgacggcttcttcttccgagtccacatgttagccctggactcctccagctgcaataagccgtgtccagagtttaaacctggcagcaggtatattgtgatgggccacatctaccataagagacggcagctccctacagctctgctccaggtcctgagaggccgcctccgtccaggggatggactgctaaggagcagcagcagctatgtga

SEQ ID NO: 20194 - DNA, 475 bp, Homo sapiens
  misc_feature (1)...(475): n = A,T,C or G
gaggcgtngnngncctgatactgatgnccatcggaattcggcacgagctcaagcagctctctgcccgcaaccgccgccgcgtccaggagctgcagcagggcgccttcggccggggtgcccgctccaagaagggcaagatgcggaagaggatgtgaggaccaggacccagccccgtggctccttgattggccttagggtgggcatcagcagacgttcccgtgcaccactgtgtgcctggccctgtgctgggcactgggggcactccctgcaggagccatcatctgtgaaaaggagcactgtatggccacagaagggcagcagctgcgtcagcctaagacagagacatttgaacagggccttgaagggtgtgcaggagttcgccagcaaagccaggcaggccaagacttgagttggcaactcagctgctgctgcttccatgtgttctgggttcagaggtcatggcttgcccggtcaa

SEQ ID NO: 20195 - DNA, 472 bp, Homo sapiens
  misc_feature (1)...(472): n = A,T,C or G
agcgggnttttaatagattactgtggcattcggcacgagccaacttcctctcgaatatcaagaaatgcagtaaccagcatgtcaataaggggtcataggtggaaaagacatggaaatacagaattaacaggtcaagaagaactgatggagatatctgaagttgacgagggattttattccagggctgcgtctagtaccagccagtcgggtttatcaaacagtagtcacaattgtagtaacaagccaagtataggaaagaaccacagacggtcaggaggaagcaaaactggaggaaaagaaaaagaaactacaggggaatcttgcaaagatcactttgctcgaaaacaaactcagagagcccaaagtgagaatcttgagcttctctctttgaagagacttactttaacaaccagccaatccctacctaagcctagtagccatggtttggctaagaccgcagcgactggtttta

SEQ ID NO: 20196 - DNA, 461 bp, Homo sapiens
  misc_feature (1)...(461): n = A,T,C or G
ngacgatcgcctgaggaattcgttcgagggctcatgcctgtaatcccaacactttgggaggctgaggcaggaggatggcttcatctcaggagtttgagaccagcccgggcaacatagggagaccctgtctatacaaaaataaaaataaattaacctggtgtggcggtgaattgctgtggtcccagctacttgggaggctgaggatcactagagcctgagaggttgaggctgcagtgagccatgatcatgccactgcactctagcctgggccacagagggggcccctgtctcaaaaaaaaaaaaaaaagcctttgaaaaggtattattccccctttaaaaaaaaaaaaaaaaaacttgggggggggcccgggccccaattcccccttaagggggggggtataaaattccggggcccgggttttaaaaccgggggaaggggaacaaaannnnnnnnnnnnnnn

SEQ ID NO: 20197 - DNA, 503 bp, Homo sapiens
  misc_feature (1)...(503): n = A,T,C or G
cgccccccnaattgacnatcggtangccttcagcacgagacaagaataatctgaaagtgaatctagcaggcgctgcttgttctctggagcatgcgcctgtgtcctgagcgttttctgatcctccaccaccaacagccagtttgtgcaatttctttgcacctcagagctttcataattttatgacttttctatcatgttcttatcttactccagctaccacactgtcatgttttttacgttaaggtgtactttttactcctgttttggcttttcaagctatgtcatacctgcctcccagaggtacttggaaaatattggcttgacagcacatgcttatcccaaggcggaattcatctctacaggcttcacatgccccactccagccgcgtggtaacacgccttgcttgtgaccctgtgatacagatggggatgttaagtacgatcctctcaaccccagcactaatttgagaggaaaaactattaccgatacccgtcctttctcc

SEQ ID NO: 20198 - DNA, 538 bp, Homo sapiens
ggagattcgcggcttagaattccgacgaggagagaggcgcgtcttcctctttgagcaaatcatcatcttcagtgaagccctgggaggaggagtgagaggtggaacacagcctggatatgtatacaagaacagcattaaggtgagctgcctgggactggaggggaacctccaaggtgacccttgccgctttgcactgacctccagagggccagagggtgggatccagcgctatgtcctgcaggctgcagaccctgctatcagtcaggcctggatcaagcatgtggctcagatcttggagagccaacgggacttcctcaacgcattgcagtcacccattgagtaccagagacgggagagccagaccaacagcctggggcggccaagagggcctggagtggggagccctggaagaattcagcttggagatcaggcccagggcagcacacacacacccatcaatggctctctcccctctctgctgctgtcacccaaaggggaggtggccagagccctcttgccactggataaacaggccctt

SEQ ID NO: 20199 - DNA, 479 bp, Homo sapiens
  misc_feature (1)...(479): n = A,T,C or G
cgcgcctnnnnattgaccggctggaggacctctgcacgagaagacttggagacagttattcaccatgtacacagcctgtacccttctgctcctttcctggcagcaggggtttcaatgggaggaatgctgcttctaaattacttgggcaaaattgggtccaaaacgcctttgatggcagctgcaactttttccgttggttggaacaccttcgcttgctcagagtcattggaaaaaccactgaactggctactttttaattactatttgacaacctgccttcagtcttcagttaataagcaccgacatatgtttgtaaaacaagttgatatggatcatgtcatgaaggctaaatccatcagagagtttgataagcgattcacttcagtcatgtttggataccaaacaattgatgattattatactgatgccagtccgagtcctagactgaagtcagtaggaattccagtattgtgtctaaa

SEQ ID NO: 20200 - DNA, 313 bp, Homo sapiens
  misc_feature (1)...(313): n = A,T,C or G
cttcgaccaacantnnnttttgatccgcgctgcaggaattcggcacgagctcacacccctgtcccacccacacagctgccctagctgaccccgagaagtgctcttggctgacccctctggtgtgtggtgaggggctttctcttccccttcctgtttcagacccccccatttcccgcacatggtgtggggggctgggggaggtccaagcagagtgttttattattatcgctttatgtttttggttattggtttttttgtatagaccaaagcaaagaaaataaaaataacacagaaaaaaaaaaaaaaaaaaaaa

SEQ ID NO: 20201 - DNA, 504 bp, Homo sapiens
  misc_feature (1)...(504): n = A,T,C or G
aggggnnnnnaaagaaacctagccgcgcctgcaggaattcggcacgagcacaactgaacaaaactgtagcccagggcattgaaaacctctcggagagggccagccctgtgcccatcctgctgtgattcaggactctcgcagaagacatcagaatgcctttctctgagtcacagtctgtatcttctagaaaaggctgtccatcttcaccccaagcccactggctcctgagatacgacatccagacccagtgcagctggacctggcccaggaagatcatgcggtttctgggaagcactggagaaggaaaaggctgaagaaaggaagaccggaaaagaaatacaagtccttccgccttggcaaagatgatagtaccgttcccttcagtgttccggntctgctctattggataagttccggtttgactatgactacgtgaaaatgtggaaccagaccttcaccccacattccagctccagctctaccacagaggaagtggcatatcac

SEQ ID NO: 20202 - DNA, 450 bp, Homo sapiens
  misc_feature (1)...(450): n = A,T,C or G
atgtgcccctcgctgccgcactgcaggaattcggcacgaggtgacagctcctttcttctccccatctgcccactgaagatttgagggaggggagatggagaggagaggtggacaaagtacttggtttgctaagaacctaagaacgtgtatgctttgctgaattagtctgataagtgaatgtttatctatctttgtggaaaacagataatggagttggggcaggaagcctatggcccatcctccaaagacagacagaatcacctgaggcgttcaaaagatataaccaaataaacaagtcatccacaatcaaaatacaacattcaatacttccaggtgtgtcagacttgggatgggacgctgatataataaggtagaaagaagtaacacgaagaagtggtggaaatgtanaatccaagtcatatggcagtgatcaattattaatcaattaat

SEQ ID NO: 20203 - DNA, 495 bp, Homo sapiens
  misc_feature (1)...(495): n = A,T,C or G
tggggncnnnnnnnaatcgcncgtctgcggatcttgcacgaggttagttggttaaaaacatcacactgtgtcaaatgaaaagagactcatctagaatcctgctatggtctgaatgtgtccccccgaaagcatgtgttggaaacttaatcctcgaggcaacagttttgggaggtggagcctaatgggaggtgtctcggttacaaaggctctattctcattaatagatcactgccagatctaaaacgacttgaggctgcgagagccatctcttgttctctatcaccctgttgacttccaacatggggtgatacaagaatgccctcgacagatgctagcactttgatactggatttcccaccctccagagctgaagaataaatttctttcctttgttaacaccctgcaatctttcagacaggatgttgacaatgcgtctctggcgggggggggccccgaacccaaagtggcatttttgggggaagaaattgcctttct

SEQ ID NO: 20204 - DNA, 502 bp, Homo sapiens
  misc_feature (1)...(502): n = A,T,C or G
gagctncnnnnnaatagacgtctgtggactttggcaacttgctaaatatcaagaatataggccgggtgcggaggctcacacctgtaatcccagcactttgggaggctgaggcgggcggaacacctgaggtcaggtgttcgagaccagccaggccaacatggtgaaaccccgtctctactaaaaatacataaaaaaatgagccgggcatggtaacagagagcatgttatcccagttacgaggctgaggcaagaaaatctcttgaacctgataggcggacgttgcagtgagccaacatcgcgccattgcactccaacctgggggacaagagtgagacttactcctgatgaatcccctaatgatttttatcataatcattaagttaaggcagatacacatcttgtcatatgatcaaaaggtttcgccaaaaatcaatattcacaccacaaaatgtgcgaactcgatattttacacgactctctttaccaattctgcccagaattc

SEQ ID NO: 20205 - DNA, 508 bp, Homo sapiens
ccccccccccgcccccccccccccttgccccgcttttgccccggctgcaggaattcggcacgagcaggagcaccgtttggtctcactcataacacttctcagagatgctatattctgtgaaaacactgaacctcgctctctccaagataagcaaaaaggagcaaaacagacttttgaagaaatgatgaattacattccagatctgttagtcaagtgtattggtgaagaaaccaagtatgaaagcatcagacttctgtttgatggcttacagcaaccagtactcaacaagcagctgacttatgttttattggacattgtgatacaggaactgtttccagagctcaataaggtacaaaaggaagttacctctgtgacatcttggatgtaaacacttggatttggtatagaataacccattgaaatttctgctgtgcgagggtggtagaaatttacttttttgggtatattcttatatatattatggacatcgctggctgaacatttagtt

SEQ ID NO: 20206 - DNA, 498 bp, Homo sapiens
  misc_feature (1)...(498): n = A,T,C or G
tggggnccnnnnnnaattgaanattgcaccgcctgcaggaattcggcacgaggacagttggcaacatctggagacattttttattgttacagctggggagatggtgctattggagtccagtggtgtagagatcagggatgctactaaacatcgtatggaaggcagtgtgtggatcttacacattgtcacatctcctgtcacagtgacttgtcatgcaaactctgttccttctttaagcgccaactcaaaagctcttttgtgcatgatcaagcctttcctgatgcccttggtgagaggggagctcccctcccctcagctctggccacagtgtatccggatggccactgtcccactgcagcacgtgggcttgttagctgtgatggctcctggagggctgaggccacgttcaatgctgtgtctaattcagctttgtatccccaacatctcacacagtacataaaacagaataaacacttttgtttataaatgactcaatga

SEQ ID NO: 20207 - DNA, 475 bp, Homo sapiens
  misc_feature (1)...(475): n = A,T,C or G
agaggcgnttttnaatagatagcttagcattcggcacgagaactatccctgggctcagaaacttatggttaacagtccaggttttgtaaaatatgggggggaccggcctggggagcatgacaaagcttcaaaggatgccaaatatgaactagggaaagcacttgccaattccaaaacaatggcaaaaatttttggaaacccaaattatttgaggctcagaacttacctgagtgaagggccatactatgtgaaacctgtttccacgacagcagtagaaggagccgaatgatttcttctagagctcatgtagaggaccacgttttgaccaaaacttctcctaaggcatttgactccatctatatttcacaaaagagacttcctttccccaagaattatcatggaatgtcagatgtctctgtgttaccaacacgtgtatatctctacattgaagcgcagagtggaactaggagtggga

SEQ ID NO: 20208 - DNA, 507 bp, Homo sapiens
  misc_feature (1)...(507): n = A,T,C or G
ccgccccccccccccccccccccattgcaccgcctgtgacccgcctgcacgaattcggcacgagtcgcacttgattttcaatattttatagtaagaaatgacaaactgctttggttcatttcataaacaaactctgcatttagataactattaaaggttgttaagatgaagatttactgtttctttgttactcgttggtacagctgtttgttttacttgcacatttgtacatatacttaatgttttcaagtgccttaattgtttaaaatctctggcttcaaagtttcttggggaaaggtcggtttacctcacattttttgtttccattagtaatattctaggtacctcacaaaatgtattatggtgccatggctgttagtttttagcgagtgctgtangattaattcgaaaataggcagaattccattcctcccaaggtggcaaaaattagctatactgatgtaattgtcatttacctgggtatgaattccctgacacacattcatg

SEQ ID NO: 20209 - DNA, 492 bp, Homo sapiens
  misc_feature (1)...(492): n = A,T,C or G
gggggtgnnnnnaattgaccgtctgaggtctcggtttaccacctcatagatgttgaattggctctgcccacgggccagctcccggtaactggtggtgaactccccaatgaagtcatggctgccgtcccgatcccagtcatacacctccaccttgatggtccgatcgtagtcgccgttgcagagggctctcacgggaatggagaaagtttgccagactggatttagggtgttcttcatgacctcggtcttgtggcaaatggtgaacgttccatcctcgttgcttctgtagaataccaagaaggggtcagatttcccaaagaaatctttcttgtccagcttgttggcacagaactgcatggtggcgacatccctacagttgctgagctcctcagcggacaggatgatggtgccacatttctttcctgggacaccaccgttggacacagctggcatgggtttgcccgtcctggaattcaggctgaatgcgcctat

SEQ ID NO: 20210 - DNA, 479 bp, Homo sapiens
aatagaccgcttgtagaactctgacgagccggccaggaattccaggctcacaaggctatcttagcagctcgttctccggtttttagtgccatgtttgaacatgaaatggaggagagcaaaaagaatcgagttgaaatcaatgatgtggagcctgaagtttttaaggaaatgatgtgcttcatttacacggggaaggctccaaacctcgacaaaatggctgatgatttgctggcagctgctgacaagtatgccctggagcgcttaaaggtcatgtgtgaggatgccctctgcagtaacctgtccgtggagaacgctgcagaaattctcatcctggccgacctccacagtgcagatcagttgaaaactcaggcagtggatttcatcaactatttaggcgctggcccgaggatatcccagcggtggtacttcggagacacctgtctgcatctgactgagcagaacaaatcgtcaggtgcctg

SEQ ID NO: 20211 - DNA, 514 bp, Homo sapiens
  misc_feature (1)...(514): n = A,T,C or G
cgtgnnagggcnnnnnncncgnncncccccccaattcgaccgccnattgctccgctctgcaggaattcggcacgaggagatgggcagctctcanaaaaggcacaaacaattgaaggatggataccatggcatatgttaaaagcgtgttgaaaggaaaataagaaagccaggaatctcaggatgaatcagtctagatcgagatcagatggtggcagtgaagaaaccttacctcaagaccataatcatcatgaaaatgagagaagatggcagcaagagcgtctccacagagaagaggcctattatcagtttattaatgaactcaatgatgaagattatcggcttatgagagaccataatcttttaggcacccctggagaaataacatcagaagaactgcaacagcggttagatggcgtcaaggaacaactagcatctcagcctgacttgagagatggaacgaattacagagactcagaagtccctagagaaagttcacatgaagattctcttctag

SEQ ID NO: 20212 - DNA, 462 bp, Homo sapiens
agcggggctttgaccttgagtcgcgctgcaggaattcggcacgagccagaatgggaatttcttttatgtttttatttttttcctggctcccttttatttttgtgcgcgatatttaaggtcgtctggatggggaagcaacctgcagctgaggtcgccggcgcctttttctttttagatgggaaggaggccaggaaagggtcagcttaaccatttcctatgtgccaagctgtgccagcagtccagggtaccctgactgtccctctgtagactgttgagactgagttcctgttgggacagtcagttggtatgtatccaagtccctgctgaccactaatgttctagctgatggtgagcggcacagtcccacttccccatctccccaagtaggtggtgttagaaaaccttaattttttttcccttttgtatggactacaaataaaacttggggcaatttgcagtttg

SEQ ID NO: 20213 - DNA, 488 bp, Homo sapiens
atttgcccccgctgcaggaattcggcacgaggattcatatgctacacaacttgaagctattcttgagcaaaaaatagacattttaactgaactgcgggataaagtgaaatctttccgtgcagctctacaagaggaggaacaagccagcaagcaaatcaacccgaagagaccccgtgccctttaaaccggcatttgctgctaaaggatacccagaaccctcactactgtaacatacaacggttcagctgtaagggccatttgaaagtttggaattttaagtgtctgtggaaaatgttttgtccttcacctgaattacatttcaattttgtgaaacactcttttgtctacaaaatgcttctagtccaggaggcacaaccaagaactgggattaatgaagcattttgtttcatttacacaaatagtgatttacttttggagatccttgtcagttttattttctatttgatgaagtaagactgtggactcaa

SEQ ID NO: 20214 - DNA, 472 bp, Homo sapiens
  misc_feature (1)...(472): n = A,T,C or G
gtgggntnannnnnnaattgacctcgctgcaggaattcggcacgagccttcaggcccccatggggctgtccatccatggctctgcctacggaaggggcttaatgcatgagcctgcccctcccccagctgtttttaatgaaactgaaaaaatagacttgatcccggcaggactgagatacagagccctagcctgcccagccagccccaagatctcaggagctttagggagaaaacttggtggggctggagcacaccttgggcctcagtggtttctgagtccctgtggtgccagagcttctgggcaatgcatgcggctgccaggcccagccctgacttccactctggctcagcaacctggttatttatgtggggccgagcaggcatgggcccactgcctgatcatcctgtttctgttatttattgagactcaccattgacctatccttgtgtgtacacccccttacatgcgtgg

SEQ ID NO: 20215 - DNA, 496 bp, Homo sapiens
cttcgccgcatagatcgccttccgaattcggcacgaggtgcgtgaactctgttatccagaaagcctcgccctgccgccgccgaagctggaattcgtcggctagtagttctcgccggcaactagaggaacctgttggcgtggcccagaaggcttagcgggattgcacgagccctcagattcatcgctaccccgaggctaagcgccatgcctcatattgacaacgatgtgaaactggacttcaaggatgtccttttgaggcccaaacgcagtacccttaagtctcgaagtgaggtggatctcacaagatccttttcatttcggaactcaaagcagacatactctggggttcccatcattgctgccaatatggatactgtgggcacctttgagatggccaaggttctctgtaagttctctctcttcactgctgtccataagcactatagcctcgttcagtggcaagagtttgctggccagaatcctgactgtcttgagc

SEQ ID NO: 20216 - DNA, 241 bp, Homo sapiens
  misc_feature (1)...(241): n = A,T,C or G
agttattttccaaaggcacccncccccnattgatccgcgntgtcaggaanncccatttgacccgcgctgcaggaattcggcacgagctcagatggccagtttgccctctcaggctcctgggatggaaccctgcgcctctgggatctcacaacgggcaccaccacgaggcgatttgtgggccataccaaggatgtgctgagtgtggccttctcctctgacaaccggcagattgtctctggat

SEQ ID NO: 20217 - DNA, 467 bp, Homo sapiens
  misc_feature (1)...(467): n = A,T,C or G
attgccgcagtggaatcgtccgagaaaccgatcacaaaaatggacagcactttataatacctcaaatggcagacagcagcctggatttgtctgaattggcaaaagctgctaagaagaaacttcaatctctaagtaatcatttgtttgaagaacttgccatggatgtgtacgatgaagttgacaggcgagagacggatgcagtctggcttgccacgcaaaaccacagcgccctggtaaccgagacaacggtcgtcccctttcttccggtcaatcctgagtactcatcaacacgaaatcagggcagacagaagttagctcggttcaacgcccatgagtttgccacgctggtcattgacattctcagtgacgccaagaggagacagcagggcagttctctctcgggttcaaaagacaatgtggagctcatactgaaaaccatcaataaccagcaggtcatccagtgtgcn

SEQ ID NO: 20218 - DNA, 487 bp, Homo sapiens
  misc_feature (1)...(487): n = A,T,C or G
ctttgggtggcgnnnncnnntttagatccgcgctgcaggaattcggcacgaggaacagcaggccacagagctgcttgcggccaagtacaaggccatggagagcaagctcctcatcgggggcaggaacatcatggatcacaccaacgaacagcagaagatgttggaactgaagaggcaggagattgccgagcagaaacgtcgtgagcgggagatgcagcaggagatgatgctccgggacgaggagactatggagctccggggcacctacacatccctgcagcaggaggtggaggtcaaaaccaagaaactcaagaagctctacgccaagctgcaggcggtgaaggcggagatccaggaccagcatgatgagtatatccgcgtgcggcaggacctggaggaggcgcagaacgagcagacccgcgaactcaagctcaagtacctaatcatcgagaacttcatcccgccggaggagaagaacaagatcatg

SEQ ID NO: 20219 - DNA, 473 bp, Homo sapiens
  misc_feature (1)...(473): n = A,T,C or G
ttatccccccttcgcgttgccctctagaatccccgagttccgcacttgcacagatgcaggcgctaccttcgacctctgggaactgaaaaaagttctttctatcctcattgtatttgaaaaccttcgtgtcctaatctggtggtttaatggacctgtttatgaagagaatagtacaggatcctgaatccctaaacatgaaaaacattctatctattcttcatacttactcttctctcaatcatgtgtacaaatgccacaacaaagaacagttcgcggaagttatggctagcgctctgactggatatcttcacactatttcttctgaaaacttattggatgcagtatattcattttgcttgatgaattactttcccctggctccttttaatcagcttctgcaaaaagacatcatcagtgagctgctgacatcagatgacatgaagaatgattacaagctgcatactttggatacn

SEQ ID NO: 20220 - DNA, 476 bp, Homo sapiens
atcgcccgccatcgcccgcctgcaggaattcggcacgagatcgccatcatgaacgacaccgtaactattcgcactagaaagttcatgaccaaccgactacttcagaggaaacaaatggtcattgatgtccttcaccccgggaaggcgacagtgcctaagacagaaattcgggaaaaactagccaaaatgtacaagaccacaccggatgtcatctttgtatttggattcagaactcattttggtggtggcaagacaactggctttggcatgatttatgattccctggattatgcaaagaaaaatgaacccaaacatagacttgcaagacatggcctgtatgagaagaaaaagacctcaagaaagcaacgaaaggaacgcaagaacagaatgaagaaagtcagggggactgcaaaggccaatgttggtgctggcaaaaagtgagctggagattggatcacagccgaaggagtaaaggt

SEQ ID NO: 20221 - DNA, 504 bp, Homo sapiens
  misc_feature (1)...(504): n = A,T,C or G
gagccnnnnnnnttttganaaacgatcggccgtagaattcggcacgaggtgaatcctaaccacgtcttccctggcctgtcttcactcttctccccagaatcaccacttctgcactggtgtctgaaggtgtattgagtgattttgtggagggcagaagtaggaagtctttgggacaaaactgtatttaccttgggatctgtgaacaagaggaacctcagcagccaggacaggcaggagcagtggaatagctagtatggcttctggaatcctggttaatgtaaaggaggaggtgacctgccccatctgcctggaactcctgacacaacccctgagcctggactgcggccacagcttctgccaagcatgcctcactgcaaaccacaagaagtccatgctagacaaaggagagagtagctgccctgtgtgccggatcagttaccagcctgagaacatacggcctaatcggcatgtagccaacatagtggagaagctcagggaggtcan

SEQ ID NO: 20222 - DNA, 448 bp, Homo sapiens
ctggaccctcgctgcacgcgaaagcgaagaaggaagctcctgcccctcctaaagctgaagccaaagcgaaggctttaaaggccaagaaggcagtgttgaaaggtgtccacagccacaaaaagaagaagatccgcacgtcacccaccttccggcggccgaagacactgcgactccggagacagcccaaatatcctcggaagagcgctcccaggagaaacaagcttgaccactatgctatcatcaagtttccgctgaccactgagtctgccatgaagaagatagaagacaacaacacacttgtgttcattgtggatgttaaagccaacaagcaccagattaaacaggctgtgaagaagctgtatgacattgatgtggccaaggtcaacaccctgattcggcctgatggagagaagaaggcatatgttcgactggctcctgattacgatgc

SEQ ID NO: 20223 - DNA, 461 bp, Homo sapiens
  misc_feature (1)...(461): n = A,T,C or G
ggcgagaaggaaaaatttgactgctctgcgctgcaggaattcggcacgagcaaaggtcatccttaataacaacagatctgcaggggtatgttttaccatctgcatccagcctcctgctaactcctagctgactcagcatagattgtataaaatacctttgtaacggctcttagggaagattctggtgtccatgtgatcattggggggcacgattctccctctcctagaggcgtcggatacgctaaaaatcaagcagttgcccagagctcagggtcttacctttgctttttggattcggatgacgtcatgatgccccagcgggtgaggctgcaacacgaggctgccgttcagcacccgtcgagcctgtgtggtcctgtggactggaaggtggagcagaccctgtgccggcccgtgagctggaaaccgtggctggactgagccgtccgtatgtgaggtgccan

SEQ ID NO: 20224 - DNA, 498 bp, Homo sapiens
  misc_feature (1)...(498): n = A,T,C or G
gccccccccgcccccccnnattgaccgcctgaggaattcggcacgagcagccgtgtgcagcctatcaagctggccagggtcaccaaggtcctgggcaggaccggttctcagggacagtgcacgcaggtgcgcgtggaattcatggacgacacgagccgatccatcatccgcaatgtaaaaggccccgtgcgcgagggcgacgtgctcacccttttggagtcagagcgagaagcccggaggttgcgctgagcttggctgctcgctgggtcttggatgtcgggttcgaccacttggccgatgggaatggtctgtcacagtctgctccttttttttgtccgccacacgtaactgagatgctcctttaaataaagcgtttgtgtttcaagttaaaatgtaggcataatttctataatcctttactggttcgaggtcatgtggccagaggtcacaagatttgtgatttgtgccccctgtagataacatcactattgtaaaacc

SEQ ID NO: 20225 - DNA, 487 bp, Homo sapiens
  misc_feature (1)...(487): n = A,T,C or G
ngacggtgcnnncattgatcgccttgcgttagacgcccctagcaaatgagctcacttccattttcaaattttaagcaatcatattttcaatttatatattgtatttcttaatattatgaccaagaattttatcggcattaatttttcagtgtagtttgttgtttaaaataatgtaatcatcaaaatgatgcatattgttacactactattaactaggcttcagtatatcagtgtttatttcattgtgttaaatgtatacttgtaaataaaatagctgcaaacctcagtcctttgtgctacttgatgtggctttcaaagaagagaagccttgtcctgagtttctcacttggcttcaggaaggccccaggttggattccagaaaccagtgaagatgtggccacaggaggaggtgtgctgaggtggctgctgaccgtggactccctgcgcagtggcctgcagatgttggggctgggttacagctgattga

SEQ ID NO: 20226 - DNA, 473 bp, Homo sapiens
aattgcacggcttaggaattcggcacgagcagaaacttccaacttggagcacttgggccacgagacgcccagagccaagtctccagagcagctgcggggtgacccaggactgcgtgggagtttgtgaccttgtggtgggagagcagaggtggacgcggccgagagccctacagagaagctggctggtaggacccgcagggaccagctgaccaggcttgtgctcagagaagcagacaaaacaaagattcaaggttttaattaattcccatactgataaaaataactccatgaattctgtaaaccattgcataaatgctatagtgtaaaaaaatttaaacaagtgttaactttaaacagttcgctacaagtaaatgattataaatactaaaaaaaaaaaaaaaaaactcgaccaaaaaaggggtccgatgggagggagggttgtgtcaggcttgggggatgggctcttcgccatg

SEQ ID NO: 20227 - DNA, 489 bp, Homo sapiens
  misc_feature (1)...(489): n = A,T,C or G
gggggagcccnnnaattcgancgcccattgcaccgcgctgcagtcaaagcatcagaagggcctgctttcttccccgggcgatgtgcagagatctttgccaggggtcaaagcgtcgggaagcttggggtccttcatcctgacgttatcaccaaatttgagctgaccatgccctgctcctccctagaaatcaatattggaccctttttgtgaagattggtctctgtggtgtgattctcttcccaggtgtccctttctcctcccctagtgtccttaagtcctcctccacagggaacatctatttgggctttgatgtttaataaagtagaaagcactgtcaaaaaaaaaaaaaaaaaaactcggggggggccccggcccccaattccccttatagggggccgtataacaattcattgcccgccgtttaacaccgccgggatgggggaaaggggnnnnnnnnnnnnnnnnnnnnntnnnncnnnnnttnnnnnt

SEQ ID NO: 20228 - DNA, 501 bp, Homo sapiens
  misc_feature (1)...(501): n = A,T,C or G
attagaccgcgctgcagganancccgnattgcctccgcgctgcaggaattcggcacgagggaaagggcctagcttctgtgtggcccacagagttcactgcctgtgagacttancaccaagtgctgaggctggaagaaaaacgcacaccagacgggcaacaaacagtctgggtccccagctcgctcttggtacttgggaccccagtgcctcgttgagggcgccattctgaagaaaggaactgcagcgccgatttgagggtggagatatagataataataatattaataataataatggccacatggatcgaacactcatgatgtgccaagtgctgtgctaagtgctttacgaacattcgtcatatcaggatgacctcgagagctgaggctctagccacctaaaaccacgtgcccaaacccaccagtttaaaacggtgtgtgttcggaggggtgaaagcattaagaagcccagtgccctcctggagtgagacaagggctcggg

SEQ ID NO: 20229 - DNA, 466 bp, Homo sapiens
  misc_feature (1)...(466): n = A,T,C or G
ggcgaccnnaatgacgccttggagctccgagagaatgaacctattataatagcctgaaactctcttacaaatacatttggttattcaccatgaggttagcaaagcctaaagcgggtatttctcggagctcaagccaaggaaaggcctatgagaacaagcgcaaaacaggccggcagcggcagaagtggggcatgactattcgatttgactcaagcttcagtagactcagaagaagcttggatgacaaaccctataaatgtactgaatgtgaaaagagtttcagtcagagttcaactctttttcaacaccagaagatccatactggaaagaaatcccataaatgtgctgattgtgggaaaagtttctttcagagttctaatctcattcagcatcgacggatccatacgggggaaaagccctacaaatgtgatgagtgtggagaaagcttcaaacagagctcaaatct

SEQ ID NO: 20230 - DNA, 512 bp, Homo sapiens
  misc_feature (1)...(512): n = A,T,C or G
tgggtaacgannnnncnnnncgggcanncccncnaattcgacnnccaattgccacgctctgcaggaattccgcacgagagacgacgtgcagaaatggcacctctaaaggggaaggaaaagaaggaagaacaggtcatcagcctcggacctcaggtggctgaaggagagaatgtatttggtgtctgccatatctttgcatccttcaatgacacttttgtccatgtcactgatctttctggcaaggaaaccatctgccgtgtgactggtgggatgaaggtaaaggcagaccgagatgaatcctcaccatatgctgctatgttggctgcccaggatgtggcccagaggtgcaaggagctgggtatcaccgccctacacatcaaactccgggccacaggaggaaataggaccaagacccctggacctggggcccagtcggccctcagagcccttgcccgctcgggtatgaagatcgggcggattgaggatgtcacccccatcccctctgacagcac

SEQ ID NO: 20231 - DNA, 507 bp, Homo sapiens
  misc_feature (1)...(507): n = A,T,C or G
ccccccccccccccccccccccatcgacccgcttttgcnccgcgctgcaggatttattttcctaataggcattgataagacaaaatatgcgattgcatgcccaatatttgcaggacttctacactttttctttttggcagcttttgcttggatgtgcctagaaggtgtgcagctctacctaatgttagttgaagtttttgaaagtgaatattcaaggaaaaaatattactatgttgctggttacttgtttcctgccacagtggttggagtttcagctgctattgactataagagctatggaacagaaaaagcttgctggcttcatgttgataactactttatatggagcttcattggacctgttaccttcattattctgctaaatattatcttcttggtgatcacattgtgcaaaatggtgaagcattcaaacactttgaaaccagattctagcaggttggaaaacattaagtcttgggtgcttggcgctttcgctcttctgtgtct

SEQ ID NO: 20232 - DNA, 470 bp, Homo sapiens
  misc_feature (1)...(470): n = A,T,C or G
nttgcccgccttaggaattctgcacgagtctagntgcaaaaacaagctcagggatcccactgattctactttacgacagagtctttctctgtcacccaggctggagtacagtggcacgatctcggctccctgcaacgtccgcctcccgagttcaagtgattctcctgcctcagccacccgagtagctgggtctacagataatggattctgaattaatgcatagtatagtaggaagctatcataaacctccagaaagagtatttgttccctcattcacccagaatgaaccatctcagaattgccatcctgcaaacttagaagttacctctcctaagatacttcatagcccaaatagccaagctcttattttagccttaaaaactcttcaggaaaaaattcatcgtttagagctggagagaacacaagctgaagataacctgaacattctttccagagaagcagcacagtat

SEQ ID NO: 20233 - DNA, 489 bp, Homo sapiens
  misc_feature (1)...(489): n = A,T,C or G
agtgctnnaactgttatcgctgagcaattcggcacgagcaaccctatcatcgtctcctgtggctgtgacaagctggtcaaggtatggaacctggctaactgcaagctgaagaccaaccacattggccacacaggctatctgaacacggagactgtctctccagatggatccctctgtgcttctggaggcaaggatggccaggccatgttatgggatctcaacgaaagcaaacacctttacacgctagatggtggggacatcatcaacgccctgtgcttcagccctaaccgctactggctgtgtgctgccacaggccccagcatcatgatctgggatttagagggaaagatcattgtagatgaactgaagcaagaagttatcagtaccagcagcaaggctgaaccaccccagtgcacctccctggcctggtctgctgatggacagactctgtttgctggctacacggacaacctggtgcgagtgaggcag

SEQ ID NO: 20234 - DNA, 478 bp, Homo sapiens
  misc_feature (1)...(478): n = A,T,C or G
catccgaccnccnattgacacgccntgcgngattcggcacgaggagaaattcctttggaagttattccgtagcataagagctgaaacttcagagcaagttttcattgggcaaaatgggggaacaacctatcttcagcactcgagctcatgtcttccaaattgacccaaacacaaagaagaactgggtacccaccagcaagcatgcagttactgtgtcttatttctatgacagcacaagaaatgtgtataggataatcagtttagatggctcaaaggcaataataaatagtaccatcaccccaaacatgacatttactaaaacatctcagaagtttggccagtgggctgatagccgggcaaacaccgtttatggattgggattctcctctgagcatcatctttcgaaatttgcagaanagtttcaggaatttaaagaagctgctcgactagcaaaggaaaaatcacaagagaagatgga

SEQ ID NO: 20235 - DNA, 485 bp, Homo sapiens
attagaaaaccttgacgcgcctgcaggaattcggcacgaggagcaacggaagagcttcccggagggcgaggaaaagagggaaagtagccagcaatgtcgaacgcaatgtataataagatgtggcatcagacccaagaagccctcggtgctttactcgataaagagcctcagaagatgattgaaccacaaagaaatcaggttttcatctttcaaacattagccaccttctacgtaaagtatgtgcagatctttagaaacctagagaatgtctacgaccagttcgtccacccccagaaacgaatactgatcaggaaagtcctggacggagtgatgggccgcatcctggagctgaagaacgagatggtggagctggaactcacggagttccattatttcgatgatatcctgcaggatctcaagctggccccccaacaattagatattcccatacccaagtattttttgaaggagaagttggaagtaat

SEQ ID NO: 20236 - DNA, 495 bp, Homo sapiens
  misc_feature (1)...(495): n = A,T,C or G
atagaccgccctggggaanncgnattgcccccgctgcaggaattcggcacgagaaacaacacaaaggcagaaaggaaagaaactgaagaaagaagataatagaccagcaattgcagcacttacaatcactaattcccttaaggttgaaactgtaatgacataaaaagggtcgatgatatttcactgatggtagatcgcagcccctgcaacgtagcctttgttacatgaagtccgctgggaaatagatgttctgtctctatgacaatatattttaactgactttctagatgccttaatatttgcatgataagctagttttattggtttagtattcttgttgtttacgcatggaatcactattcctggttatctcaccaacgaaagctangaggcggcgtcagaggtgctgggtgacagagccatgagccagccattttataagcactctgatttctaaaagttaaaaaaaatatatgaaatctctgtagcctttag

SEQ ID NO: 20237 - DNA, 495 bp, Homo sapiens
  misc_feature (1)...(495): n = A,T,C or G
ggcggtcacccaatcgacggctgtggattgcagcccatanaagcttcgcgagtcttcagatggattttaagagtgaacacacttgggatggttttccagtgaagcatgagcccgtatttatcacgctgaatccaggtgacagaggagtgatgatggacattactgctccatttttcagggatactccacccccacttggagaacgaggaaaacctttcaatgaactgtgggattatgaagatgtggaagcatttttcttgaatgatataactgagcaatatttagaagatgaactttgtccccacggacagcatttagtgcttttactttctggaagaacaaatgtgtggaaacaagaacttcctttatcgttcagagtgtccagaggagagacaaaatgggaaggcaaagcttatctaccttggagatattttccaccaaatgtgacaaaattcaattcatttgcgattcatggatcacaagataaacgaagtt

SEQ ID NO: 20238 - DNA, 467 bp, Homo sapiens
  misc_feature (1)...(467): n = A,T,C or G
tgggcgagannggaaaaanaattgactcgcgctgcaggaattcggcacgagaggaggccaaggaacttccaggggaaacactggagtctaagaacacccaaaatgactttgaggtgcacattgttcaagtggagaatgatgagatctagatcttgaagatacaggtaccccacgaagtctcagtgccagaacataagccctgaagtgggcaggggaaatgtacgctgggacaaggaccatctctgtgccccctgtctggtcccagtaggtatcaggtctttctgtgcagctcagggagaccctaagttaaggggcagattaccaataaagaactgaatgaattcatccccccgggccacctctctacccgtccagcctgcccagaccctctcagaggaacggggttggggaccgaaaggacagggatgccgcctgcccagtgtttctgggcctcacggtgctccggc

SEQ ID NO: 20239 - DNA, 499 bp, Homo sapiens
  misc_feature (1)...(499): n = A,T,C or G
catcgaccgccatagagcgccttcggaattcggcacgagccgggcaccggggtcatcatcgccatcctgtctatcctcctggccgtcctcctcacggtcctcctggctgtgctcatatacacctgcttcaacagctgcaggagcacttccctatcaggcccagaggaggcagggagtgtgagaagatacaccacgcacctcgcgttcagcactcctgccgagggggcttcctgaggggttccagaggggcccacgtgtccctccacctcctccctggcccaggctgcagagcctgagctgggacacgccctgaagcttctggaccctgagagagattgnttcttttctttactattttttttttttttttttttttgaaagggagtttaattttgtcgccaggtgggggcgattttggttaattgaaacctttgcttaaggggttaagggaattttcctgtttaaccctcctgaggggtgggaactacaggcccccccn

SEQ ID NO: 20240 - DNA, 503 bp, Homo sapiens
  misc_feature (1)...(503): n = A,T,C or G
tcggtaaattgaaggggatantaaagganggaaaaggattgagnccctncttgatcgccttcgggaattcgcctcttggccagcctggtctcgaactcctggcctcaagtgatctgtccacctcagcctcccaaagtgctgggattacagatgtgagccaccacacctggcctaaaatgtcatatattttgaactgactgacttctccaaaaacttatggatattagttgagagagaaaacttgagagaaagtttccctgcacttggatgagaggagagcggaacagcctgcatctctggtgctggggagtatcaaacaaggggaattgggagaaggatggaggcaacagcgtacctctttgcctttcaaaattaaaatgggatgctgctttatattacaaatctaaggaattagaagagcagcatactaagcaactaagtttgttctccttgcataaactttaaaaagccagcttacaagttctcaagcttaaaaattgaag

SEQ ID NO: 20241 - DNA, 470 bp, Homo sapiens
  misc_feature (1)...(470): n = A,T,C or G
atagaaaaccctnanaatttgaccccgctgcaggaattcggcacgagtattaatatgttctcttaacgtgtgccattgttctctttgaccattttcctataatgatgttgatgttcaacacctggactgaatgtctgttctcagatcccttggatgttacagatgaggcagtctgactgtcctttctacttgaaagattagaatatgtatccaaatggcattcacgtgtcacttagcaaggtttgctgatgcttcaaagagcttagtttgtggtttcctggacgtggaaacaagtatctgagttccctggagatcaacgggatgaggtgttacagctgcctccctcttcatgcaatctggtgagcagtggtgcaggcggggagccagagaaacttgccagttatataacttctctttggcttttcttcatctgtaaaacaaggataatactgaactgtaagggttagtgg

SEQ ID NO: 20242 - DNA, 466 bp, Homo sapiens
  misc_feature (1)...(466): n = A,T,C or G
gggggcnaganggaaaaaaaattgactgcgctgcggaattcggcacgagccgccacctggtggggggatggtgatgatgcagctcagtgtaccaaacaatccacaatcttgtgcccactcacccccgcagtggaaacaaaacaaatattactgtgatcaccagagaggacagaagtgtgtagaatttagcagtgtagacaatattgtccagcacagccctcaactcagtagccccattatttcaccagctcagtcgccagcaccagctcagctgtccaccctgaaaactgtacgtccctctggaccaccactttccatcatgccccaattttctagaccttttgtccccgggcaaggagattccaggtatccattacttggccagccactgcagtacaatcctcctgctgttctgcacggacacattccaaaccaacagggtcagcctggcagcaggcatggaaan

SEQ ID NO: 20243 - DNA, 517 bp, Homo sapiens
  misc_feature (1)...(517): n = A,T,C or G
tgggatgtccagggcgtncccccaatagaacgcctttgattgccatgcggacaancgagagaagaaatatccgtatttgtggctctgctacaatggtgaaatctacaaccatattaagatgctacagcattttgaatttgaataccagaccaaagtggatggtgagataatccttcatctttatgacaaaggaggaattgagcaaacaatttgtatgttggatggtgtgtttgcatttgttttactggatactgccaataagaaagtgttcctgggtagagatacatatggagtcagacctttgtttaaagcaatgacagaagatggatttttggctgtatgttcagaagctaaaggtcttgttacattgaagcactccgcgactccctttttaaaagaggagccttttctttctggacactatgaagttttggatttaaagccaaatggcaaagttgcatccgtggaaatggttaaatatcatcactgtcgggatgaacccctgcacgccctctat

SEQ ID NO: 20244 - DNA, 487 bp, Homo sapiens
  misc_feature (1)...(487): n = A,T,C or G
gctggtcncccattgatcgccttaggttgaggcacgatcacatgatcagctttgtggatcctcttgtgaccaattacacagtggtggacttcagaaatagagcaactgctctgattgaagatatatttgcccgagacaaaattcctattgttgtgggaggaaccaattattacattgaatctctgctctggaaagttcttgtcaataccaagccccaggagatgggcactgagaaagtgattgaccgaaaagtggagcttgaaaaggaggatggtcttgtacttcacaaacgcctaagccaggtggacccagaaatggctgccaagctgcatccacatgacaaacgcaaagtggccaggagcttgcaagtttttgaagaaacaggaatctctcatagtgaatttctccatcgtcaacatacggaagaaggtggtggtccccttggaggtcctctgaagttctctaacccttgcatcctttggcttan

SEQ ID NO: 20245 - DNA, 489 bp, Homo sapiens
  misc_feature (1)...(489): n = A,T,C or G
agcgtnacactgacttcctgcgccgctgtctctgaacttccagcctcagagaccgccgcccttgtccccgagggccatgggccgggtctcagggcttgtgccctctcgcttcctgacgctcctggcgcatctggtggtcgtcatcaccttattctggtcccgggacagcaacatacaggcctgcctgcctctcacgttcacccccgaggagtatgacaagcaggacattcagctggtggccgcgctctctgtcaccctgggcctctttgcagtggagctggccggtttcctctcaggagtctccatgttcaacagcacccagagcctcatctccattggggctcactgtagtgcatccgtggccctgtccttcttcatattcgagcgttgggagtgcactacgtattggtacatttttgtcttctgcagtgcccttccagctgtcactgaaatggctntattcgtcaccgtctttgggctgaaaaagaa

SEQ ID NO: 20246 - DNA, 507 bp, Homo sapiens
  misc_feature (1)...(507): n = A,T,C or G
agagatggggccttcccggctgcggtaattcggcacgaggcctggtccacccttgccctccctgggtcgcagacgaggtcggcctcgtcattccccgcagaccgccgcgcgtccctcttgtgcggttcaccacagttgtatttaagtgatcgtgtgagtcgtcgttaaatgcctgtctccccgcggatcatgggctcctcgaggacagggactggcctgtctgtccactgctgtaaccccgcgccggcatagggacctaaggcccactggagggcgctcatcaagtagctgctggatgttgacgaaggaagcggcggcgcagctcagggatctccgagtcaggacggtcggccagacccacggggtaacgggtctaatcgtgtaggaataaagctgtattccagtgcttccaannnaaaaaaaaaaaaaaaaaaaaaaaaaaaaaaatttggggggggggcccgggcccccattccccttttaggggggccgataaaaattccgggc

SEQ ID NO: 20247 - DNA, 499 bp, Homo sapiens
  misc_feature (1)...(499): n = A,T,C or G
nttggccccgcttttgcacagcgctgcaggaattcggcacgaggagagagagagagagagagagagagagagagagagagagagagagagagagagagagagagagagagagagagagagagagagagagagagagagccacttctctctcgcgcgcgcgcccctcttttctttttccctccgcatgtgtgtctcacaccccctatgtgggtgagagagaaaatctctctctccacactctgaaacacacacacacgcgagagaaacactctctctcttacacaaacgcgagcgcacgagacacgcgcgcgcgtttctcggaggggcgcgcgccccctatatactctgtgtacctcacacacggtgtgtttttttttttttttttttctctctgtctctctgtgagacacgcagaggggctcgctcatgtataagagtgtgctctctctctctcacaacaaagatatagtgagagagagcggcgcgtgtgttttatata

SEQ ID NO: 20248 - DNA, 466 bp, Homo sapiens
aatagatcggcctgcggaattcggcacgaggggatacccacccaccatcccagggtctacaacatccacagccggaccgtcacccgctatcctgccaactctatcgtggtcgtaggaggctgtcctgtctgcagcagggttggggtgctggaggactgcttcaccttcctgggcatcttcctggccatcatcctcttcccctttgggttcatttgctgttttgccttgaggaagcgacgatgccccaactgtggagccaccttcgcttaaagggaacaccaggcccggctttcctacacccagctctctttttctaatgtaaatgttgcgtacaatagttttatttgattaagcttcaagactgttttgtaaagcgaggtgggaccgatgtggcacacgccagctgcggtttcccggagcgtggaaaggcagtgctgctgctcccgcccgaggctcatgacaactc

SEQ ID NO: 20249 - DNA, 489 bp, Homo sapiens
  misc_feature (1)...(489): n = A,T,C or G
cgacctgcnnnnaattgagcgccttcggtgcagacccaccgagccgtgctggaaatgaaggtgaaccacaagggctataattatactttttcccatctgtgtgtgttgagaaatcaggataagaaatgcgtgctggatgatattatttcagtgctagaggatctcaggcaggctgccgtctccaataagacaacagccagggtgcaagtgaggtatcccaacactaaattaaaggtatgctccttctgcatgcttctgccaattaaagaggcagcacttcatttcttgccctaaacaagcaaagaaaatgcagaggtctcatccttaagactcagaagctaatgcttctttcatttctggggggaaaagatgggcaactgagtgaagaaaacaggcaatgaatggtatgactagatattaagaaattcaaggccaaacaaaacaaataccaaaaataaaaaaaaaaaaaaaaaaaaactcggggggggg

SEQ ID NO: 20250 - DNA, 405 bp, Homo sapiens
cgaggaacgagtgagaatgaatctggattttgggattccttcaatggggctttacaggacagaagactgaggaagtgaagcaagataaagatgacataattaatattttctccgttgcatctggtcatctctacgaaagatttcttcgcataatgatgctatccgtgctgaagaataccaagactcctgtgaaattctggttcttgaagaattacttgtcccccacatttaaggagtttataccttacatggcaaatgaatacaatttccagtatgagcttgttcagtacaaatggccccggtggcttcatcaacaaactgaaaaacagcgtatcatctggggttacaagatcctcttcctggagtacttttcccactagttgttgacaagttcctgtttgtggg

SEQ ID NO: 20251 - DNA, 284 bp, Homo sapiens
  misc_feature (1)...(284): n = A,T,C or G
agcgcgcnnattgaccactgatcgcctgcaggaattcggcacgagctcacaccagctgtgcgatgcccgcttttacaattaaaggaaaactgttgtgttcagtgtcaccttgtcagcaacactgtgtcccttcgccccgccgttcttctctgctgcatttggacatcagccaaatttgaacccaatcaaatataacgtgtctgacactgattttgtttttactcaataaatgtatagactacaaaaaaaaaaaaaaaaaacccggcccaaggggggccccggcc

SEQ ID NO: 20252 - DNA, 471 bp, Homo sapiens
  misc_feature (1)...(471): n = A,T,C or G
ggggcgggnaggggnaaatgagnnccatgaaagctngcggaaancgcacgagtggctgatccatctgcctttgtggctgctgcccctgtggctgctgccaccacagctgctcctgctgctgctgcagccccagctaaggttgaagccaaggaagagtcggaggagtcggacgaggatatgggatttggtctctttgactaatcaccaaaaagcaaccaacttagccagttttatttgcaaaacaaggaaataaaggcttacttctttaaaaaaaaaaaaaaaaaaaaaaaaaaaaaaaaaaaaccttgggggggggcccgggccccaattcccctttatgggggggggaataaaaattatggggccgggttttaaaacgggggggggggggaacaannnnncnttnntatncntgtgcnnntnnntgtggcttaaannnnnntnnntantttctctctggggggggcccgn

SEQ ID NO: 20253 - DNA, 488 bp, Homo sapiens
  misc_feature (1)...(488): n = A,T,C or G
gagatgcncccaaggatcgcctgcaggtatacgcccttagacaggatctccttcatccctgtccagaagaggagaagaggaaacacaagaagaaacgcctggtgcagagccccaattcctacttcatggatgtgaaatgcccaggatgctataaaatcaccacggtctttatccatgcacaaacggtagttttgtgtgttggctgctccactgtcctctgccagcctacaggaggaaaagcaaggcttacagaaagttgttccttcatgaggaagcagcactaaaagcactctgagtcaagatgagtgggaaaccatctcaataaacacattttggataaaaaaaaaaaaaaaaaccttgagggggggcccggaccccaattccccctatagggaggggtattaaaatttattggccgtttttttacaacgccggggggggggaagnngtttgcccttgggaagggggggtttcattttttaaaaaag

SEQ ID NO: 20254 - DNA, 492 bp, Homo sapiens
  misc_feature (1)...(492): n = A,T,C or G
acgtgattgtattctctcggcatgangcattcggcacgaggaaaatcatcgaaaagatgctgaacagtgacaaatccaactgaccagaagggaggaggaagctcactggtggctgttcctgaaggaggccctgcccttataggaacagaagaggaaagagagacacagctgcagaggccacctggattgtgcctaatgtgtttgagcatcgcttaggagaagtcttctatttatttatttattcattagttttgaagattctatgttaatattttaggtgtaaaataattaagggtatgattaactctacctgcacactgtcctattatattcattctttttgaaatgtcaaccccaagttagttcaatctggattcatatttaatttgaaggtagaatgttttcaaatgttctccagtcattatgttaatatttctgaggagcctgcaacatgccagccactgtgatagaggctggcggatccaagcaaat

SEQ ID NO: 20255 - DNA, 507 bp, Homo sapiens
  misc_feature (1)...(507): n = A,T,C or G
agcgcggggaactcacggctgcggtaattcggcacgagagacgatcccgagttcaacgcaggttgtgggtctgtcttgaacacaaatggtgaggttgaaatggatgctagtatcatggatggaaaagacctgtctgcaggagcagtgtccgcagtccagtgtatagcaaatcccattaaacttgctcggcttgtcatggaaaagacacctcattgctttctgactgaccaaggcgcagcgcagtttgcagcagctatgggggttccagagattcctggagaaaaactggtgacagagagaaacaaaaagcgcctggaaaaagagaagcatgaaaaaggtgctcagaaaacagattgtcaaaagtaagtcttacctgtggctcgcattatttgggagttattaaaatattaaagtttggcaaatnnnnnnnnnnnnnnnnnnnnnnnnnnnnnnnnnnnnnnnnnnnnnnnnnccctggggggggggcgcgggccccaatttcctttt

SEQ ID NO: 20256 - DNA, 462 bp, Homo sapiens
aatcgaccatcgctcccgctgcaggaattcggcacgaggaaaaacgttgttttatttgtggaagagaagggcacattaaaaaggaatgcccacagtttaaaggctcttcatgaatgtctaaatcagattgtatgtttggatcgccctcacctgtcccattgaaaccaactgggttatttgttcaggcagtgcttttacatgaagacccaaagaaactaaaaacaacaatatttttgagtccccagtcaggtagcctttccagtaaatatatgactcagggaaaagcctcatcgaacaggacccagcatgaatcatgagggaaggaaaatgcaacactctaaatgggcactcaggcgtttctattcactcggaaaattaagttcatttcacaggacacagcagtgtaaatcaggcttcaacttagcatttaagggaaatgaccgatttttttttaatttaatg

SEQ ID NO: 20257 - DNA, 486 bp, Homo sapiens
  misc_feature (1)...(486): n = A,T,C or G
gtgtgnnnnaatgatcgcctcgattgatcgcctcgcggaancgccacgaggccgagtgacagagacgctcaagctgtgttctcaggatgaccgagtgtgagacagcagcaccagcggtggcctagaccccagacatcaagctctttgggaagtggagcaccgattatgtgcagatcaatgacatttccctgcaggattacattgcagtgaaggagaagtatgccaagtacctgcctcacagtgcagggcggcatgccgccaaacgctttcgcaaagctcagtgtcccattgtggagcgcctcactaactccatgatgatgcacggccgcaacaacggcatgaagctcatgactgtgcgcatcgtcaagcatgccttcgagatcatacacctgctcacaggcgagaaccctctgcaggtcctggtgaacgccatcatcaacagtggtccccgggaggactccacacgcattgagcgcgccgggactg

SEQ ID NO: 20258 - DNA, 503 bp, Homo sapiens
agcgtggggtttgccgctgcgtagcccgcctgcagaattcggcacgagcgacgatctactatgtgatgtcagggcctgcgtggcaactcatgcagcaattccagaaccccgacttcccacccgaagtataggaacaggatgccagcaccctgcctgtgtcttgtgcctgggagagtgggatgaaacgccacagagcagcctgtgcttcggctagtattaatgtgtacatagcactctggtagctgttaactgcaagtttagcttgaattaagggatttggggggaccatgtaacttaattactgctagttttgaaatgtctttgtaagagtaaggtcgccatgatgcagccatatggaagactaggatatgggtcacacttatctgtgttcctatggaaactatttgaatatttgttttatatggattcttatgcactcttcagacacgctacatcagagtgcccctcatctgctgaacaagcatttgtagcttgtacaatgg

SEQ ID NO: 20259 - DNA, 502 bp, Homo sapiens
  misc_feature (1)...(502): n = A,T,C or G
aggtgggcntattgaccgctctgcangacttcggcacgaggtaatcccagcactttgggaggctgaggtgggtggatcacttgaggtcaggagtttgagaccagcctgaccaacatggtgaaaccctatctctattaaaaatacaaaaaaattaggtgggcatggtggtggctgcctgtaattcctgccttggcctcccaaagtactgggattacaggtgcaagccactgcacctggcctgaaatttctcttaagttcagcatctgaaccctttctgctgctgcttttgttattgctaccaccgggctgttcttgctcctcataaaagactgtctgctctctgagggcaaggattgtgtcttttgcttccctctgcagcatttggaaggcactgggtaatatgctgacaaaatcattggtttatgaatgaaaattatattggtagaacaaaacctggttggcacaggtacttttgagagctcaaattccctgaggcctgcaa

SEQ ID NO: 20260 - DNA, 369 bp, Homo sapiens
  misc_feature (1)...(369): n = A,T,C or G
gggagggaggggnncnnnnnnattgaccgtactgagactctggggcgcatggactgctgagaatgcagcctgttaagcacccatgcacccactcttcctcaagctgtggcgactcatggcgcgctcacctccatccgatggtggggggtgtcctgaaggacaggatgctctccccagacctccccagggtggtgaagctgtgccctggggccccagctaacccactcctctctctgtacgtcaatgtccctatttgaaagcagggatgatcccattccaccctgtccactctggatgagaattggccacctgatggttatttatacgtccagaagaacatcatttcccagtaaaaaaaaaaaaaaaaaa

SEQ ID NO: 20261 - DNA, 464 bp, Homo sapiens
  misc_feature (1)...(464): n = A,T,C or G
aatagatagccttaggaancgtccgagggaagcgctccgggcctggaatccctacgcgtccctttgggtttagcacgatgagctcaatcttcactgggtatgacctgtcagcctctacattctctcctgacggaagagtttttcaagttgaatatgctatgaaggctgtggaaaatagtagtacagctattggaatcagatgcaaagatggtgttgtctttggggtagaaaaattagtcctttctaaactttatgaagaaggttccaacaaaagactttttaatgttgatcggcatgttggaatggcagtagcaggtttgttggcagatgctcgttctttagcagacatagcaagagaagaagcttccaacttcagatctaactttggctacaacattccactaaaacatcttgcagacagagtggccatgtatgtgcatgcatatacactctacagtgctgtn

SEQ ID NO: 20262 - DNA, 506 bp, Homo sapiens
agcggggggaattgacggctgtggtactccgcctgcggagatcaacatgaaggccatctatcacatgctgatcatgtgcagttttggcgtgaccaacaagcgtataagtgctgaggtctggtgtcccgaggcgcatttgacagacctgcgcctggcactggaggagggctcgagagagagtggagctacaatcccctcattcatgaatatactccccacaaaagaaacaccccccactcggatccgcaccaacaaattcaccgagggatttcagaacatcgaggatgcttatggagtcggaagctacagagaagtcaatccagctctctttaccatcatcaccttcccgtttttatttgctgtgatgtttggagacttcggacatggctttgtgatgcttttatttgccctcttgatggtggtgaatgaaaatcatcccagactaaatcagtcacatgagatgatgaggatgttttttaatggccggtacatcctactgctgatgg

SEQ ID NO: 20263 - DNA, 413 bp, Homo sapiens
gaattcggcacgagaaatgggatctccgaagactttgaaaactgttggtgctacagctcttcctagattgacacctcctgtccttgaagaaatgggacactgtgacagtgtttacctctcagaagttggagatactcaggtggtggtttttaagcatgaaaaggaagatggcgccatttctaccatagtacttcgaggctctacagacaatctgatggatgacatagaaagggcagtagacgatggtgttaatactttcaaagttcttacaagggataaacgtcttgtacccggaggtggagcaacagaaattgaattagccaaacagatcacatcatatggagagacatgtcctggacttgaacagtatgctattaagaagtttgctgaggcatttgaagctattccccgcg

SEQ ID NO: 20264 - DNA, 504 bp, Homo sapiens
  misc_feature (1)...(504): n = A,T,C or G
cagaaacacannnaaganaantttgaccggccttangaannttttgaccggctgtangaattcggcacgagctgacttcaagtggattaataccttgtatctttatgttgctaccttaatcatcatgggcctagccttgtgtgcaattccatttgccaaaagctatgtcacattggcgttgctttctgggatcctagggtttcttactggtaattggtccatctttccatatgtgaccacgaagactgtgggaattgaaaaattagcccatgcctatgggatattaatgttctttgctggacttggaaatagcctaggaccacccatcgttggttggttttatgactggacccagacctatgatattgcattttattttagtggcttctgcgtcctgctgggaggttttattctgctgctggcagccttgccctcttgggatacatgcaacaagcaactccccaagccagctccaacaactttcttgtacaaagttgcctctaa

SEQ ID NO: 20265 - DNA, 500 bp, Homo sapiens
  misc_feature (1)...(500): n = A,T,C or G
aggtggccctatagatcgtatgaggacttcggcacgagcggtgccctaggaggccgagctctgttgcttcgaactccagtggtcagacctgctcatatctcagcatttcttcaggaccgacctatcccagaatggtgtggagtgcagcacatacacttgtcaccgagccaccattctggctccaaggctgcatctctccactggactagcgagagggttgtcagtgttttgctcctgggtctgcttccggctgcttatttgaatccttgctctgcgatggactattccctggctgcagccctcactcttcatggtcactggggccttggacaagttgttactgactatgttcatggcgatgccttgcagaaagctgccaaggcagggcttttggcactttcagctttaacctttgctgggctntgctatgtcaactatcacgatgtgggcatctgcaaagctgttgccatgctgtggaagctctgacctttttgacttcn

SEQ ID NO: 20266 - DNA, 486 bp, Homo sapiens
  misc_feature (1)...(486): n = A,T,C or G
gtggggagggaattcncgcctgcagaattcgatcgagttcatcattattttgagataaacaaaaacattcccaaaccacattgactcgttccttccccaccctctgccccctcccacgatccaatgtacaagagagctattgtaaccaaagccatgaaccgaggttgcaacggcagacatgtgggatggctgttccaagttcaagcactgctgtctccagtcctggccttccgggcctcgatcatcggcttggttgcccgtttgcggtcagtggccagccccagccagcacatgaaatcaatgaaccaggtggttgggttaaaatttaagccaaattcactcgcagagtagtcaaagggaaaggtgtgatggtaattatggaagccttcaccaatggcacccagagcgacaagtgggttctgccgagggctgatgtgcttgtcatagggccggnttccatacatgtgggcggcgctgttgaccagc

SEQ ID NO: 20267 - DNA, 457 bp, Homo sapiens
  misc_feature (1)...(457): n = A,T,C or G
ngattgatncgcgctgganaaanncnattgacccngcgctgcaggaattcggcacgagattgagtggcagcatttataatagtaagttgtaaacatctcctttaaggaaaattagagttccttaagaaattaaaatgtttattccattataatgaatattgtatactgtcaaaaaatatcttgtaatttgaaagatgggtgagccaatttctttagaattccagtgggtgttttgttttaatataaacatttcaactcagtgggaagtggcaaggaattaaagatgaataaagaagtaaaggttaaaaactgtactgttatgaaaggatttcttgttagcaacttagacaattcagtatcagtttagaaaacgtacattctatcttggttcataatggccaaatacgttgccatcagaaatacatagagagtttcagctaagccctcttagagatgt

SEQ ID NO: 20268 - DNA, 501 bp, Homo sapiens
  misc_feature (1)...(501): n = A,T,C or G
aggtgncnaatagancgtctgaggactttggcacgaggntccccaganagggatcagcagataaagccaaaatgagctgggtccactgactgccacagacacctcaaaaatcatcttccctccctttcattgtttgtttcctttcctcacacctctccagcccctgtggcaccccccagcagtcaggacacagcccttgactaatacgtaaatctgattatacattaaagccgagtctcagcccaaacaacctcagtagctgccagtgtaagattaaactcctaggctcaatgggtctctcttctcctcgttccttctgtcactccaggtagaagcaagatcctctgcaattctgctttcaacagccatggttcagaccggagtttctcaagttttttttaatgccctttttttaactaaacatgagactcccaccccccagcattcccgaattttttattctttgcattcccaatctcttgtccagagactgtcctcttt

SEQ ID NO: 20269 - DNA, 460 bp, Homo sapiens
  misc_feature (1)...(460): n = A,T,C or G
nttgcccgtttgcaggcctgcggagttattgctagaaggccgcctgacaagcgatatagatctggctgcctatagagctctgggatctcaacgagacaaacgatgggtggacccgaactccccggtgctcttggaggacccagtcctttgtgccttggcaaaaaagcacaagcgaaccccagccctgattgccctgcgctaccagctgcaacgtggggttgtggtcctggccaagagctacaatgagcagcgcatcagacagaacgtgcaggtttttgagttccagctgactgctgaggacatgaaagccatagatggcctagacagaaatctccactattttaacagtgatagttttgctagccaccctaattatccatattcagatgaatattaacatggagagctttgcctgatgtctaccacaagccctgtgtgtggatggtgacgcaaaagacgt

SEQ ID NO: 20270 - DNA, 473 bp, Homo sapiens
  misc_feature (1)...(473): n = A,T,C or G
gctgggggnnacctgagatcatgcgcatttccgcacgagatcaggtaagccaagatgggtgcatacaagtacatccaggagctatggagaaagaagcagtctgatgtcatgcgctttcttctgagggtccgctgctggcagtaccgccagctctctgctctccacagggctccccgccccacccggcctgataaagcgcgccgactgggctacaaggccaagcaaggttacgttatatataggattcgtgttcgccgtggtggccgaaaacgcccagttcctaagggtgcaacttacggcaagcctgtccatcatggtgttaaccagctaaagtttgctcgaagccttcagtccgttgcagaggagcgagctggacgccactgtggggctctgagagtcctgaattcttactgggttggtgaagattccacatacaaattttttgaggttatcctcattgatccattccatan

SEQ ID NO: 20271 - DNA, 475 bp, Homo sapiens
  misc_feature (1)...(475): n = A,T,C or G
aattagaccggccttaggaattcggcacgagtctacaagctgaccagtgagaactgcgagcactttgtgaatgagctgcgctatggagtcgcccgcagtgaccaggtcagagatgtcatcatcgctgcaagcgttgcaggaatgggcttggcagccatgagccttattggagtcatgttctcaagaaacaagcgacaaaagcaataactgaaaaagactgtcctgtcagcgatgactttatacatcaagggggtcttgttttgctagagagtttggggtttggtttgtggatttcattgtgatttataataaggcttattttcacagaataaaataaagcaaaacgagggaggattttattgggggaagtgcngcnnnnnnnnnnnnnnnnnnnnnntnanngnnnnannnnnatactgggggggggggccgggcccccaatccccctttaggggggggtgaaaaaaaccccggg

SEQ ID NO: 20272 - DNA, 447 bp, Homo sapiens
  misc_feature (1)...(447): n = A,T,C or G
nattgaaatctgtgagcaattccgcacgagaaactgtcaagattggcaaggttgattgtacacagcactatgaactctgctccggaaacctggttcgtggctatcccactcttctctggttccgagatgggaaaaaggtggatcagtacaagggaaagcgggatttggagtcactgagggagtacgtggagtcgcagctgcagcgcacagagactggagcgacggagaccgtcacgccctcagaggccccggtgctggcagctgagcccgaggctgacaagggcactgtgttggcactcactgaaaataacttcgatgacaccattgcagaaggaataaccttcatcaagttttatgctccatggtgtggtcattgtaagactctggctcctacttgggaggaactctctaaaaaggaattccctggtctggcgggggtcaagatcg

SEQ ID NO: 20273 - DNA, 506 bp, Homo sapiens
  misc_feature (1)...(506): n = A,T,C or G
agaggggggnttatcgccggctgcagtaattcggcacgagccgtgacaccgagcccgagaaccggagccttaccatcaaacttcggaaacggaagccagagaaaaaggtagaatggacaagtgacactgtggacaatgaacacatgggccgccgctcatcaaaatgctgctgtatttatgagaaacctcgggcctttggcgagagctccacggaaagtgatgaggaggaagaagagggctgtggtcatacacactgtgtacgtggccaccgcaaaggacggcgtcgtgcaaccctaggaccgacccccaccacccctccccagccttctgacccttcccagccccctccagggccaatgcagcactaaatacctctctcctccagcattcctgtgtctgtctggcccttaatgtatgcatgtggctacttctccagccccctccttccctctcttctgcctgatagagggaagaggaagaggaggacgaacagagatcctgaaatt

SEQ ID NO: 20274 - DNA, 505 bp, Homo sapiens
  misc_feature (1)...(505): n = A,T,C or G
agcggtnnntttgccgctgtttagcccgcctgcacgaattcggcacgaggagaanaagatcccaagaatctcgagaatggagctcttcagccatcggacttggacagaaataagatgaaagacatcccaaagaggcctttctctcagcggctatctacaattatttctcctctgtttgcagagatgaaggacaagagccaggcgtgcggagggaacttggggtccattgaagagctgcgaggggccatctacctagcggaggaggcgtgccctggcatctccgacaccatggtggcccagctcgtgcagcggctccagagatactctctaagtggtggaggaacttcatcccactgaaattcctttggcatttgggggctttggggatacttttttccttcttcatcctcctgcttttttagaagtcaacgagagccttcgctgactccaccgaagaggtgcgccactgtgagccaccccaacgccaggcgcccgtccagggaca

SEQ ID NO: 20275 - DNA, 472 bp, Homo sapiens
  misc_feature (1)...(472): n = A,T,C or G
cgggggtcnnnnnnaattgacctctctgcagcaattcggcacgagggactgactcagcaaactcctcttttgtgtggttatctgggactcctttgggagggaacattttaaattttccatttcaaagggttccattggcactcttgcactgttattctctgcctaccctgagacttgagttctcctggactcgaatctccagccacagagtccagaagcccatacctccacattctgtgactgttcccaaacacagggagaatttgcagaaaatatgtataaaaaccttgccattcttcgcaataaaaccccacattacaaactggtgaaaacggaggattttagcttgaacaggtttttcctctatttgaaatcaatcatttcccttttacaattttggagggaagtttcaaaatcagtacgcacccactcccaggtttatccttatgtaaagtgccccctctgcacatgc

SEQ ID NO: 20276 - DNA, 502 bp, Homo sapiens
  misc_feature (1)...(502): n = A,T,C or G
agtgggtnntttgccggctgcangtattcggcacgagccgagcctggcctcccgataaagaacaggaaaaagagaaaaaatcagtgatctgtgtcgagggcaatattgcaagtgggaagacgacatgcctggaattcttctccaacgcgacagacgtcgaggtgttaacggagcctgtgtccaagtggagaaatgtccgtggccacaatcctctgggcctgatgtaccacgatgcctatcgctggggtcttacgctacagacttatgtgcagctcaccatgctggacaggcatactcgacctcaggtgtgatctgtacggttgatggagaggtcgattcacagcgcaggatacatttttgtagaaaacctgtatagaagtgggaagatgccagaagtggactatganttctgtcggaatggattgactggatcttgaggaacactggacgtgtctgaagatctgatatgataccctctgaccaatgctgagactcggtagca

SEQ ID NO: 20277 - DNA, 485 bp, Homo sapiens
  misc_feature (1)...(485): n = A,T,C or G
naggcccaattgancgcctgcaggaattcggcacgaggaggcctcctcaaatgctttggacaaaatgacagtttggggacacagtcatctgatggttggctccagttgcgttttcaacacgtatttttcatcgactttcacatgctttcaggggcgaatgcaaacaaaagctttccttttgaaaacatgaaatggatgtgagacaaatcccaagacaatatttggtgtcaaaaatctctagagaatccttcctttccgcttcattcattttaaagaatgactctgctgggcatgtttctgctatgaaatctcgactgctggccccggggccctgattctattcctgaccttgctccgggcattttcctttacccgttgtaaaggcccctagaagacctgtagccaagagggcatccgcagcgatcaggccagtgactgtagctgtaacctgcctaggcagtcctgatgcactgaggggcttcctt

SEQ ID NO: 20278 - DNA, 485 bp, Homo sapiens
  misc_feature (1)...(485): n = A,T,C or G
agcggggntnnnaattgccttgcccggctgcaggaattcggcacgagcccacagctctgctgagggatctaggttatggggccctgagcaaactggagtagccagaatgtgcttgctgttattattttatgggtggagttcctggaattgtctgaattaggtttgatatttctaggtttcatctgtctatactttggagtacttcattcctttaaacttggagatgattttcaaaaatggcagtatccactgaagaaaaagccagtgacttaaaagtttctgggcaaccttatttatggttgtcgtaatcatggaaaatctccaaactccagtatttgtagttttttttccatctgttactatgagagcaacctangagccctttagaaaggcattaatggctgggcccagtggcttatgcctgtaatcccagcactttgngaggccgaggcaggcaaatcactangtcaggagttcgagaccag

SEQ ID NO: 20279 - DNA, 484 bp, Homo sapiens
  misc_feature (1)...(484): n = A,T,C or G
ngtggtcnccctttgatcgcctgcggtattccgccgaggaaaccttgggaacatgatgaatgtgaggaaagttcctttccaacttgagatgtataaaactagagctgaaaagaagctgagaaatcaccttgtctggtgattttctgcctggtggggccatttgtataacgacacttgtgcattgcctcctcatgctgttactgacggggcagggtgtcatgcatgggtgcagaggatggaggctgagaaaggtagacagctacccatgatctagcccagtcgtattttagagctaataaaactgatgttcagaaagtgacatgccttggcctatagtcctaactgggctgggcctctttcctgtggttcacagctgtagtatggagattaatagactggatctttgcagtacaacacctctatgcacttctttctctgtagcacatgttacctttctttgtgaggcaatggagtggtctaggat

SEQ ID NO: 20280 - DNA, 541 bp, Homo sapiens
  misc_feature (1)...(541): n = A,T,C or G
aggagatcgaagnncgtnaatttcgccggctgcangaattcggcacgagaaaggatgctttttcagatgtggctttcaaaagccagcagtctacatccatgacaccttttggacgtccagccactgacctgcctgaagcctctgagggacaagtgacttttactcagttgggtagctatcccctcccacctccagttggcgagcaggtgttctcatgccaccactgtggcaagaatctcagccaagacatgttgctgacccaccaatgtagccatgctactgagcaccccttaccctgtgcccagtgccctaagcactttactccacaggcggacctcagcagcacctcccaggaccatgccagcgagacaccccccacctgcccacactgtgccaggacttttactcacccatcaagacttacctaccatcttcgggtccataacagcactgagcgtcctttcccctgtcctgattgccccaagcgctntgctgaccaggctcgactcaccagccaccggagagctcatgcaagcgaaag

SEQ ID NO: 20281 - DNA, 461 bp, Homo sapiens
  misc_feature (1)...(461): n = A,T,C or G
catcgancatctgcnccgcgctgcaggattcggcacgagctctgagctgctctacagagcttcagtgtgagaggatcgagccattgaaagctcattaccagtaggacataatttttggctctccctattcacaaccagtgcacagtttgacacagtggcctcaggttcacagtgcaccatgtcactgtgctatcctacgaaatcatttgtttctaagttgtgtttattcctggagtgacatgccaccccgaatggctcactttcactgaggatgctgtcctctgatttagctgctgcctccagcctctggcttgagaacttactaaaggcacttccttcctgttaaacccctgttaactctccataaatttggtgattctctgctaggcctaagattttgagttaacatctcttgaagccaaactccaccttctgtgcttttttgcttgggataatggagt

SEQ ID NO: 20282 - DNA, 443 bp, Homo sapiens
gactgcccgcctgcggttcgtgtcgtccaccctcttatagacgcgatgtcgccggtgcaggcgcggcttccggccctccccggccagcggtaccttccaccagcgctccacgatgaccgtgccctggcggccaggaaagcgacgcatcacttataaggaagaggaggacttgacactccagccccgttcctgcctccagtgctcctgagtccctagtaggcctccaggagggcaaaagcaccgagcagggtaaccacgaccagcttaaagaactgtattcggctgggaacttgacggtgctggctactgaccccctgctccaccaggacccagtacagttagactttcacttccgccttacctcccagacctctgcccattggcacggccttctctgtgaccgtcgactcttcctggatatcccatatcacgccttggatcaa

SEQ ID NO: 20283 - DNA, 492 bp, Homo sapiens
  misc_feature (1)...(492): n = A,T,C or G
cgtggtgcccaattgacccccctngatagatncgcctgcaggaattcggcacgagcaccaggtggccagataccgcccacgtgcccccatcattgctgtgacccggaatccccagacagctcgtcaggcccacctgtaccgtggcatcttccctgtgctgtgcaaggacccagtccaggaggcctgggctgaggacgtggacctccgggtgaactttgccatgaatgttggcaaggcccgaggcttcttcaagaagggagatgtggtcattgtgctgaccggatggcgccctggctccggcttcaccaacaccatgcgtgttgttcctgtgccgtgatggaccccagagcccctcctccagcccctgtcccacccccttcccccagcccatccattaggccagcaacgcttgtagaactcactctgggctgtaacgtggtactggtaggttgggacaccagggaagaagatcaacgcctcactgaaacatgg

SEQ ID NO: 20284 - DNA, 487 bp, Homo sapiens
  misc_feature (1)...(487): n = A,T,C or G
gagaaaaaanaaagaaaattgacggctcggaatctcgcaaggctcattacattcttatcacgtgtagaatacttcacaaaatagtcaacatctaaggccctaatttatgttttgaaagatcatgtgttcccaaagtattccctattgttggctccacagccttaaagtgctatagatttaaattcattgattagttttaatttttaattttagactgtgtatttccataaataccctacgtactggcatatttgaaactctttttccaagttaggtccttttctttctcattgaatcatcttaaataggtcttggccctgaatttagctgatttaaaattcttaatattcaagaatttatacttattttttccttaaaagccacaggggacagttaaatatcttaaaatatctaaaacattttttaaagcacttagattgtcttacgtatgtgcatactatacctttacagcgattattggcttgtc

SEQ ID NO: 20285 - DNA, 473 bp, Homo sapiens
  misc_feature (1)...(473): n = A,T,C or G
gtgggnnannnnnnaattgacctcgctgcagcaattcggcacgagagaacacaacccagggcagatgggcggaaccatgaggctgggcaagaggagaaccctgttccagaccaagaactcagtcatgaggaaactctatggagacgcagactacttggaagagaggcaccgccaccgatttgaggtgaatccagtctggaaaaagtgtttggaagaacaaggcttgaagtttgttggccaagatgttgaaggagagagaatggaaattgtggagttagaagatcatcccttttttgttggggttcagtaccaccctgagttcctgtccaggcctatcaagccctccccaccatactttggcctcctcctggcctctgtggggcggctctcacattacctccagaaaggctgcaggctctcacccagggacacctatagtgacaggagtggaagcagctcccctgactctgaan

SEQ ID NO: 20286 - DNA, 482 bp, Homo sapiens
  misc_feature (1)...(482): n = A,T,C or G
nccgtgattgacgcctgttgaattccgcacgaggaaatttgtccaaatacattttggtgatcagagctcaatcggttgccgatgagccacactatgtgaatatcaccttggccttcataaatcacgaccatgcggagggtggtcattcacgacccacgagccaagtcccagcccagtgcatgccgccctcagactccacccaggtcccctgctggttgtacagagccatcctgagcctgtacatcctcctggccctggcctttgtcctctgcatcatcctgtcagccttcatcatggtgaagaatgctgagatgtccaaggagctgctgggctttaaaagggagctttggaatgtctcanactccgtacaagcatgcgaagagagacagaagagaggctgngattccgttcagcagagcatcaccatggtcaggagcaagattgatagattaaagacgacattagcangcatanaaaacatg

SEQ ID NO: 20287 - DNA, 472 bp, Homo sapiens
aattgccccgtgctgcaggaattcggcacgagctgttacagaccaaggagaactggagaaagaaagagaaaatcagttcgtggttgcattgtggatgcaaatctgagcgttctcaacttggttattgtaaaaaaaggagagaaggatattcctggactgactgatactacagtgcctcgccgcctgggccccaaaagagctagcagaatccgcaaacttttcaatctctctaaagaagatgatgtccgccagtatgttgtaagaaagcccttaaataaagaaggtaagaaacctaggaccaaagcacccaagattcagcgtcttgttactccacgtgtcctgcagcacaaacggcggcgtattgctctgaagaagcagcgtaccaagaaaaataaagaagaggctgcagaatatgctaaacttttggccaagagaatgaaggaggctaaagagaagcgccaggaacaaattg

SEQ ID NO: 20288 - DNA, 518 bp, Homo sapiens
  misc_feature (1)...(518): n = A,T,C or G
cggtgcccggggttaaaagnaacctgacgccttggattttgacagcctgtatgaatcagcacgagcacagtatggtgaacttattgcatagtacattatagaaggaaagattgtaccagttgagataaccatcagtttattaaagagggaaatggatcagacaatggctgccaatgctcataagaataaattcttgattgatgggtttccaagaaatcaagacaaccttcacggatggaacaagaccatggatgggaaggcagatgtatctttcgttctcttttttgactgtaataatgagatttgtattgaacgatgtcttgagaggggaaagagtactggtaggagtgatgacaacagagagagcttggaaaagagaatttagacctaccttcagtcaacaaagccaattattgacttatatgaagaaatggggaaagtcaagaaaatacatgcttctaaatctgttgatgaagattttgatgaagttgtgcagactcttgacaaggaaggataat

SEQ ID NO: 20289 - DNA, 501 bp, Homo sapiens
  misc_feature (1)...(501): n = A,T,C or G
gaagaaaaaaaannnnngnnnnnttttgaccggcctgangaattcttcgagagacttttagcagaagctggaactttttatacttataaaaatagtatgttcttatgtttctccttatgcatttatgtgttcacttaaaaatgtttttaaatctaaggttttctttgtttatgttcaggtaaggaactgttgtcatgatctggaaatgtttaaaacaatgtttgttagcattctgtgagcagcaaaacttatagtgataaaaatcgattgttgttaatatgatgtttaccatgtgcacatagtaatgaaaaggaacataaaagcccagcaggctcgtaccaaagtcacagcagtaatgctatgtactgcagagtctgatgagctggcctttgtgcacacttttattttcatgggattgcatcttatctgttaaaacttctagattgaaatttgacagccagggttacatattggggacttttaaagcgtctttccaaagag

SEQ ID NO: 20290 - DNA, 495 bp, Homo sapiens
  misc_feature (1)...(495): n = A,T,C or G
aggaatgacgccgttgtatncgccgagatcgagccctcctcnagaggccaaatttccaattctgagtgcaaacattaaagcaaaggggccactagcatctcaaatatcaggactttatttgccatataaagttcttcctgttggtgatgaagttgtgggaatcgttggatacacttccaaagaaaccccttttctctcaaatccagggacaaatttagtgtttgaagatgaaatcactgcattacaacctgaagtagataagttaaaaactctaaatgtgaacaaaattattgcactgggacattcgggttttgaaatggataaactcatcgctcacaaagtgaggggtgtggacgtcgtggtgggaggacactccaacacatttctttacacaggcaatccaccttccaaagaggtgcctgctgggaagtacccattcatagtcacttctgatgatgggcggaggttcctgtagtccaggcctatgcttttggn

SEQ ID NO: 20291 - DNA, 448 bp, Homo sapiens
  misc_feature (1)...(448): n = A,T,C or G
cgagcgggccccncaattgcccgccttaggaatccggcacgagccgacatcatgctccagttcctgcttggatttacactgggcaacgtggttggaatgtatctggctcagaactatgatataccaaacctggctaaaaaacttgaagaaattaaaaaggacttggatgccaagaagaaaccccctagtgcatgagactgcctccagcactgccttcaggatatactgattctactgctcttgagggcctcgtttactatctgaaccaaaagcttttgttttcgtctccagcctcagcacttctcttctttgctagaccctgtgttttttgctttaaagcaagcaaaatggggccccaatttgagaactacccgacatttccaacatactcacctcttcccataatccctttccaactgcatgggaggttctaagactggaattatgg

SEQ ID NO: 20292 - DNA, 514 bp, Homo sapiens
  misc_feature (1)...(514): n = A,T,C or G
cgtggcccgggggtnnnnnaganatatgtcgccgcggattttcacgagccctatttcaaaaaaataaaaattggaagaagagcttaaaaaagataagattttaaagagtcccaagttatttaagttgagtgtaattgtcatttaaggaaggcaaatgagtttatcatccttcttaaagagcatctcttttaactgttggacaaaaccataactttgtcattttacaaggaagaacctcttaagaagtcctcagaaccagaagcaatgtgaactctcagcgctggtcctggtgggtttgctgaccatgactgggcaagccgttctttttgctgccatcttcctcatcataaagtgtggaacataggcaattgctttgagattcttggatagaagaggacaacattctgcacctgcccccttttttaaatctttggggaaagatgagtaactttccccactactctgccttcctgttcagtaactcttacttttgcctgaagtaacagcatcttct

SEQ ID NO: 20293 - DNA, 485 bp, Homo sapiens
  misc_feature (1)...(485): n = A,T,C or G
cggggggtnnntttgccttctcggctgcggttcagccagagtgctgccctgaccaagcaccagaggacacacacaggcgagaagccgtacacctgtctgaaatgtggggagcgcttcaggcagaattcacacctaaatcgtcatcaaagtacccacagtagagacaaacattttaaatgtgaggaatgcggggaaacctgtcatatttccaacctttttagacatcagagactacataaaggggaaagaccctataagtgtgaagaatgcgagaagagcttcaaacagcgctctgacctctttaaacaccacagaatccacactggggagaagccctatggatgttccgtctgtgggaaacgcttcaatcagagtgcaaccctcattaaacaccagagaattcacactggggaaaagccttacaaatgtcttgaatgtggggaaagatttagacaaagtacacaccttatccgacaccaaagaaa

SEQ ID NO: 20294 - DNA, 479 bp, Homo sapiens
  misc_feature (1)...(479): n = A,T,C or G
cgtgcgggttttccaggatcgaggagatgacgacngagcgagagcaccatggnggttggcaagaacaagcgccttacgaaaggcggcgttatagggagccaagatgaatgtgggtgatccattttctaagaaagattggtatgatgtgaaagcacctgctatgttcaatataagaaatattggaaagacgctcgtctccaggacccaaggaaccaaaattgcatctgacggtctcaagggtcgtgcgtttgaagtgaggcttgctgatttgcagaaagatgaacttgcatttagaaaattcaagctgattactgaagatgctcacggtaaaaactgcctgactaacttccatggcatggatcttacccgtgacaaaatgtggtccatggtccaaaaatggccgacaatgattgaagctcacgttgatgtcaagactaccgacggtttcttgcttcagctggtctgtgataaatttactc

SEQ ID NO: 20295 - DNA, 502 bp, Homo sapiens
  misc_feature (1)...(502): n = A,T,C or G
atagaaaacccttagaccngcgctgcaggaattcggcacgagtttagtagagacggggtttcaccatgttggccaggctgattaactcctgacctcaggtgatccacctttctcggcctcccaaagtgctgggattacgggtgtgagccaccgtgcccggcctgcaaacacattttaattgacaacactagggctgttgtacaaaatagtaatgatagccatggaagttttaccttattctgtgagaagtgttcttaaacttattaagtgtctaaactaaggtttagtgcttttttaaaggaaagttgtcccaggattcatcctaaagaaagcaaaagttaattcaactgatccaccaatggaattagatgggtagagttgggttcttgagttttaccaccacttagttcccactgaattttgtaacttcctgtggttgcatactctggtactattctgcccttgctctgtgacatctcagtcatttgacttaaaaagtgcc

SEQ ID NO: 20296 - DNA, 465 bp, Homo sapiens
  misc_feature (1)...(465): n = A,T,C or G
cccttgatcgccctgantaattccgcacgagcagaagcgaacaaagacccagcaagagaaggcagaggctaagacccatcccgtatctgctctcctgaaataattctggagtcatgcctgaaatgccagaggacatggagcaggaggaagttaacatccctaataggagggttctggttactggtgccactgggcttcttggcagagctgtacacaaagaatttcagcagaataattggcatgcagttggctgtggtttcagaagagcacgaccaaaatttgaacaggttaatctgttggattctaatgcagttcatcacatcattcatgattttcagccccatgttatagtacattgtgcagcagagagaagaccagatgttgtagaaaatcagccagatgctgcctctcaacttaatgtggatgcttctgggaatttagcaaaggaagcagctgctgttggag

SEQ ID NO: 20297 - DNA, 469 bp, Homo sapiens
  misc_feature (1)...(469): n = A,T,C or G
agtggttctnaacctcaccctcgcaccgcatgcaacaattcggcacgagatcattgagtacgcagagctcaaaacagacgtgttccagagcctgagggaagtgggcaatgccatcctcttctgcctcctcatagagcaagctctgtctcangaggaggtctgcgatttgctccatgccgcacccttccaaaacatcttgcctagagtctacatcaaagagggggagcgcctggaggtccggatgaaacgtctggaagccaagtatgccccgctccacctggtccctctgatcgagcggctggggacccctcagcaaatcgccattgctcgcgagggtgacctcctgaccaaggagcggctgtgctgtggcctgtccatgttcgaggtcatcctgacccgcattcggagctacctgcaggaccccatctggcggggcccaccgcccaccaatggcgtcatgcacgtcgat

SEQ ID NO: 20298 - DNA, 474 bp, Homo sapiens
  misc_feature (1)...(474): n = A,T,C or G
cctacgaccnccnntccntttgtacccgcgctgcaggaattcggcacgagagattggaggcctgctgcagacccgcggccacgagtggggagtgaccacaggcaggaagaggcgctgcggctggctcgacctgatgattctaagatatgctcacatggtcaacggattcactgcgctggccctgacgaagctggacatcctggacgtactgggtgaggttaaagtcggtgtctcatacaagctgaacgggaaaaggattccctatttcccagctaaccaggagatgcttcagaaggtcgaagttgagtatgaaacgctgcctgggtggaaagcagacaccacaggcgccaggaggtgggaggacctgcccccacaggcccagaactacatccgctttgtggagaatcacgtgggagtcgcagtcaaatgggttggtgttggcaagtcaagagagtcgatgatccagctgtttta

SEQ ID NO: 20299 - DNA, 450 bp, Homo sapiens
  misc_feature (1)...(450): n = A,T,C or G
ggggacccnnnaatcgaccccctttgacccgcgctgcaggaattcggcacgagcctgctgacagtaaagccagtggtaggctttcacacagatatttgaatccctgaccctctgtttgaaggtaagctgtgctagaacaaaaatgcaatgaaagaaacactggatgaatgaaaagccctgctttgcaacccctcagcatggcaggcctgcagctcatgacccctgcttcctcaccaatgggtcctttctttggactgccatggcaacaagaagcaattcatgataacatttatacgccaagaaaatatcaggttgaactgcttgaagcagctctggatcataataccatcgtctgtttaaacactggctcagggaagacatttattgcagtactactcactaaagagctgtcctatcagatcaggggagacttcagcagaaatggaaaan

SEQ ID NO: 20300 - DNA, 519 bp, Homo sapiens
  misc_feature (1)...(519): n = A,T,C or G
ngggggttnnnnnnngntttgatcgcctgtggaattcgtacgagctggacctggcctacctgcccagcgggagcagcgcccacctggtggatgaggagttcttccagcgcgtgcgcgcgctctgctacgtcatcagtggccaggaccagcgcaaggaggaaggcatgcgggccgtcctggacgcgctactggccagcaagcagcattgggaccgtgacctgcaggtgaccctgatccccactttcgactcggtggccatgcatacgtggtacgcagagacgcacgcccggcaccaggcgctgggcatcacggtgttgggcagcaacagcatggtgtccatgcaggatgacgccttcccggcctgcaaggtggagttctagccccatcgccgacacgccccccactcagcccagcccgcctgtccctagattcagccacatcagaaataaactgtgactacacttggcnagaagaagaagaacattaactgnnnagaattgaaaaaaaaaaccacctgcg

SEQ ID NO: 20301 - DNA, 465 bp, Homo sapiens
  misc_feature (1)...(465): n = A,T,C or G
ntttgcacctcgctgcaggaattcggcacgagcaaaaacgcctcttatggaaaagccagagcgccaggagtcagcaaaacacactaaagattgggcagtcactggggagaacactcagcccgcctgcacccaggtgaaatatacagccttgttgctcacacaaagcctgtttggtggtttcttcacacggatgcatgtgacatttggtgctgaagacccaggacaggaggactcctttgggagaccagtgccctgttgtcgccctcactccgtgaggagatccacctatgatctcaggtcctcagaccaaccagcccaaggaacatcttgccaatttcaaatcggaagataggagtgtcaggcctctgagtccaagctaagccatcaaatcccctgtgaccttgacgtgtacatccagatgacctgaagcaactgaagatccacaaaagaagtgaaagtagcctt

SEQ ID NO: 20302 - DNA, 490 bp, Homo sapiens
  misc_feature (1)...(490): n = A,T,C or G
agaggccngnnntttaganttctgcccggctgcangaattcggcacgaggaaatttcttcactacatttaatagttctcctatttcccgctcccccatatcaattttccttttgtctccggggctgagtaaataaacatgttctgtcacaaatagcagcaccactttggattgattttgctctccaggacatcagcacatggccctgatcagcactaccacatccaaacataagtcactgaaaaacacttaatatttatgagttggtaatgacaagggacattgtataaagtactatttgctagattcatgcctcaaaagttattataaacagacctttattaaacacatcttgaaagatgtaaagtccctctatagtctagtatagtttacaatagagttgtaagaccaaaaaaaaaaaaaaaaattgactcaaaccctgccccgcctgagtctcaggagaaaaacccgctgaagccctgctgcgcttg

SEQ ID NO: 20303 - DNA, 486 bp, Homo sapiens
  misc_feature (1)...(486): n = A,T,C or G
cgggctcnnnnnttagacggtagtagaccntgcacgaggctgagtccattttttctcaaatcatgaatccagaaagcatagcctgcattaatttaaatattataatccatatccagtcaaatatgttggaaaacctgataaagactctaaaaaatgctgcagaaggaaatttatcaaaatttgtgaaaagacatgtgttctcggaggaagtgctggccaaagtgagggaaaaagtgaaggatgtgcctgcccttgtggccaaatttgatgagatctatgggacactgcacatcactggccaggtcaccactgattctttggatgctgtgctctgccacacccccagggacaggaaatctcacacgttgctattaaacaagaggatggtcagccgtcgcaccttccagccactcagccagtccctgttggctgagtaaccctggtttcagtccacctatggatctgaggggcctgcttctagtgagn

SEQ ID NO: 20304 - DNA, 471 bp, Homo sapiens
atggtcgcctgcggaatggccaccagtcccgagtaagcttggcctgccgcaagctcagcagccccagtggagcctctcacagatgaatcagcagaaggctggcatgagtatcagtagtgcaacccctactgcagggtttggccagccctccagcacaacagcaggatggtctggaagctcatcaggtcagactctcagcacacaactgtggaaatgaaaactgcaatacaagtttcatccagaactaccacctgacattccttgctgaaacgcatctagttcccctgtttattcatatgcatattttttttctttttacccatttgttcatattaagaatgatctgattgaccgtgttggtctgtactgattcaatttgatgtggtgaaaagcaggctgataaatcattttatgtcaagggcagctttgctcatatttcccatgatttcatgtactgcattatttgagaag

SEQ ID NO: 20305 - DNA, 462 bp, Homo sapiens
ctttgacacccttcggtgatccgccttgggaatatacaagcgataaacaccacccctcacatacccctgtaacttaaatgcttccatttaactcacttagattactttccccttagtggtaaacgggttgggggatgggtgtgagtgcacagaaggtagtctgaactattgccatagaaacatggcaactttttattccaaccctttaccctggcttttttttctctcaatatttgcctaaaattctaaaatgtgttatagctaaaccataaaactatggaaacaactgaactttggtacacaagttacttcgatgacatcttgctattcgagaacagtaaaaggtgagtcattgcctcatgatttatcatagtcattactaagggtttcagagagaatctgatgtgaagcactatcctttcagacactaaggcctttacctagttgctcccctaccttctg

SEQ ID NO: 20306 - DNA, 488 bp, Homo sapiens
  misc_feature (1)...(488): n = A,T,C or G
tggggnnagagggggnnttttgcctacagaggcgtactctnttactgttcctattcagagatattttggaattatatgactggaatcttaaaggtcctttgtttgaagacagccctccctgctgcccaagatttcatttcatgccacgttttgtaagatttcttccagatggaggaaaggaagtgctgtccatgcaccagattctcctgtacttgttaaggtgcagcaaagccctggtgcctgaggaggagattgccaatatgcttcagtgggaggagctggagtggcagaaatatgcagaagaatgcaaaggcatgattgttaccaaccctgggacgaaaccaagctctgtccgtatcgatcaactggatcgtgaacagttcaaccccgatgtgattacttttccgattatcgtccactttgggatacgccctgcacagtaccaaaaactgtggaagagttatgtgaaacttcgccacctcctagcn

SEQ ID NO: 20307 - DNA, 465 bp, Homo sapiens
  misc_feature (1)...(465): n = A,T,C or G
gtggttctnnatacagattccctcngcaatttccgnccgagctcaaaccaacagtggcctctcagaaccagaaccttcctgttgccaaactcccacctagcaagttagtatctgatgacttggattcatctttagccaaccttgtgggcaatcttggcatcggaaatggaaccactaagaatgatgtaaattggagtcaaccaggtgaaaagaagttaactgggggatctaactggcaaccaaaggttgcaccaacaaccgcttggaatgcggcaacaatgaatggcatgcattttccacaatacgcaccccctgtaatggcctatcctgctactacaccaacaggcatgataggatatggaattcctccacaaatgggaagtgttcctgtaatgacgcaaccaaccttaatatacagccagcctgtcatgagacctccaaacccctttggccctgtatcaagag

SEQ ID NO: 20308 - DNA, 527 bp, Homo sapiens
  misc_feature (1)...(527): n = A,T,C or G
gtgggnnnnnnnaaggtttgtncggctgtggnnnnaattcgcccgcctgcaggaattcggcacgagggaattccttattgctttcaacggacactctttgtgaaaaatccaagtaatattttagttcaaacttgatcttgagccaaggcccactgccacctctgggatgggagtcggacctacataccaagtgacaagttcaccttaacatctgcttccagaatggctttgattcagccgtgccaggcaacagaacagggtcagactcctgctctgttattggcttgaagactaggatcccaaaggggttggaggcagggaatatttgaaaattcagactggaattccaggccaaaagctcaagaccaccagcctctcctcctgcctggaaaaataagcctttgtgaaagactgatttaccatgtacaattgtgattgtgaacattgttgagtaaacctccagactttctctaaaaaaaaaaaaaaaaaaaaaactcggaaagagagagtgagaaaactagtttcgg

SEQ ID NO: 20309 - DNA, 404 bp, Homo sapiens
  misc_feature (1)...(404): n = A,T,C or G
acgaggtgacatccccctggtgggttttatcaacagcctcaagttctccagctctggggacttcctggtggctggggtagggcaggagcacaagcttggccgatggtggagaatcaaagaggctcggaattctgtctgcatcatcccactccgcagggtccctgtacccccagctgctggttcctgacactcttatcctccttatttaagtccttcccaggctatgccccaccctctttgtattaaaagcctcctcttttgggccccnnnnanaaaaaaaaaaaaaaaccctggggggggggccgggccccaattcccccttatgggggggggaataaaaatacacggcccgcgttttaaaacgggggggagggggagaaaaagnnnncnnngnggggttncct

SEQ ID NO: 20310 - DNA, 468 bp, Homo sapiens
  misc_feature (1)...(468): n = A,T,C or G
gtggttctnaaaatcgacacctcaccgcatgcgccaattcggcacgagagatggcagccaccacgggctcgggagtaaaagtccctcgcaatttccgactgttggaagaactcgaagaaggccagaaaggagtaggagatggcacagttagctggggtctagaagatgacgaagacatgacacttacaagatggacagggatgataattgggcctccaagagtctgccgtgcacctgtatcctagttccttgggccattcagcaaaggtccctggcaagcctgtcagctcctggtctattccaggcactactagacccagaggcctttgcaaagaagacgaagacaatgaggatggggaaaagtggcctctttcagaccttcctgatttgtgagagttcccagtcttcataatgccagccaaccgttttttgaggacacatagtaaaccctcaagaaatgtctcttaa

SEQ ID NO: 20311 - DNA, 504 bp, Homo sapiens
  misc_feature (1)...(504): n = A,T,C or G
agcgtgnccnatttgaattcatagcgcctgcggaancgccacgagctttgatgtgactgaagggaagagtgccccattcttttacggcggatgtggcgtcaaccggaacaactttgacacagaagagtactgcatggccgtgtgtggcagcgccatgtcccaaagtttactcaagactacccaggaacctcttgcccgagatcctgttaaacttcctacaacagcagccagtacccctgatgccgttgacaagtatctcgagacacctggggatgagaatgaacatgcccatttccagaaagccaaagagaggcttgaggccaagcaccgagagagaatgtcccaggtcatgagagaatgggaagaggcagaacgtcaagcaaagaacttgcctaaagctgataagaaggcagttatccagcatttccaggagaaagtggaatctttggaacaggaagcagccaacgagagacagcagctggtggagacacacatggccagagt

SEQ ID NO: 20312 - DNA, 464 bp, Homo sapiens
  misc_feature (1)...(464): n = A,T,C or G
atggcgcttttaactgacatcgagcgtcggctncgccagacgcgnagctgtgacccacctgcctcctccgcagagcaatggcggtgtctgccgggtttgcgcggacctcgcccagctcagataaagtacagaaagacaaggctgaactgatctcagggcccaggcaggacagccgaatagggaaactcttgggttttgagtggacagatttgtccagttggcggaggctggtgaccctgctgaatcgaccaacggaccctgcaagcttagctgtctttcgttttctttttgggttcttgatggtgctagacattccccaggagcgggggctcagctctctggaccggaaataccttgatgggctggatgtgtgccgcttccccttgctggatgccctacgcccactgccacttgactggatgtatcttgtctacaccatcatgtttcttggtgaggggaactgn

SEQ ID NO: 20313 - DNA, 456 bp, Homo sapiens
aggggggcaatgacctcgctgcaggaattcggcacgagctctagccgaagtcttcagcaagaggattcgctgctggtgttaattttattttattgaggctgttcagtttggcttctctgtatctattgactgccctttttgagcaaaatgaagatgtttttataaagcttggatgccaatgagagttattttatggtaaccacagtgcaaggcaactgtcagcgcaatgggggagaagaggttagtggatcgggggtccctggctcaaggtctctgggctgtccctagtgggcacgagtggctcggctgccttcctggggtcccgtgcaccagccctgcagctagcaagtcttgtgtttaggctcgtctgacctatttccttcagttatactttcaatgaccttttgtgcatctgttaaggcaaaacagagaaactcacaacctaataaatagcgc

SEQ ID NO: 20314 - DNA, 454 bp, Homo sapiens
  misc_feature (1)...(454): n = A,T,C or G
ggtggaatggttgcctncgatttcgaaccaggacgagcagaagcgagatgacgaagggaacgtcatcgtttggaaagcgtcgcaataagacgcacacgttgtgccgccgctgtggctctaaggcctaccaccttcagaagtcgacctgtggcaaatgtggctaccctgccaagcgcaagagaaagtataactggagtgccaaggctaaaagacgaaataccaccggaactggtcgaatgaggcacctaaaaattgtataccgcagattcaggcatggattccgtgaaggaacaacacctaaacccaagagggcagctgttgcagcatccagttcatcttaagaatgtcaacgattagtcatgcaataaatgttctggttttaannnnnnnnannnnnnnnnaaaaaaaaatctcggggggggcccgggccccaatttccccttaaagggaggca

SEQ ID NO: 20315 - DNA, 416 bp, Homo sapiens
  misc_feature (1)...(416): n = A,T,C or G
agggccggnnnnnattcancgcttgcangacctgtangaattcggcacgagccgcggtgcgcgctgtgggctgcctccccgtgctgtgtagcgggacggcaggtcatttattggggaggcagtgttccctaaacaccttaccagcagcttccattttggcatggaagagtgttctcggcaatggccatttgtcatcactgggaaccagagacacccatccctacgccagcttgagccgtgcactgcagacacaatgctgtatttcttctcccagtcacctgatgagccagcagtatagaccatatagtttcttcactaaattgactgcagatgagctgtggaaaggcgctttagcagagactggtgctggagcaaaaaaaggaagaggcaaaagaactaaaaaaaaaaaaaaaaaa

SEQ ID NO: 20316 - DNA, 402 bp, Homo sapiens
  misc_feature (1)...(402): n = A,T,C or G
ggggcnnnnnnnattccaccttctgcangacttcggcacgagcccacaccctagggtaccccagtcgtatcctctgtccgcatgtgtggccaggcctgacaaacacctgcagatggctgctgccccaacctgggacctgcccaggaggttggagcagaaagggctctccctggggtggtgtttctcctctagggtattgggatgcatgttctgcactgccagcagagagggagtgtctgggggccaccacctatgggacacggggtcgaaggggcctgtacactctgtcatttcctttctagcccctgcatctccaacaagtccaaggtgacagctggtgctaggggcgtggggttaataaatggcttatccttctctccaaaaaaaaaaaaaaaaaaactc

SEQ ID NO: 20317 - DNA, 464 bp, Homo sapiens
  misc_feature (1)...(464): n = A,T,C or G
atggttactgannaagggtggcagcgaaattncgcacgagctaattatggtccaattattgtggttgtgattttatgcatatcatcaaatgtttttttcttatgcgggtcttttatatattagggatcctgagatacccgattctatatgtaaaagctaatatacaaaaaagcagattaaattacatgataaatgtagctgatcatcagtgtttaattgatttaattcctaaggcaatattaatgtgttttctaaagtcattcaggtaaggaagaattataaatcaggtaactggaccaacaaagggaacacatataaagctattatgcatgcatggagccgtttgaggctagttttttaaggccacaactccagacccctgatttagactgagataggaaacagatcttgaaagaatccttattttaatgatacatgaatatcatgttcctatacgcttaata

SEQ ID NO: 20318 - DNA, 470 bp, Homo sapiens
  misc_feature (1)...(470): n = A,T,C or G
gggagggcggagggttaatgattggttcgnctgcggcaanancacgagccgncatcatgggtcgcatgcatgctcccgggaagggcctgtcccagtcggctttaccctatcgacgcagcgtccccacttggttgaagttgacgtctgacgacgtgaaggagcagatttacaaactggccaagaagggccttactccttcacagatcggtgtaatcctgagagattcacatggtgttgcacaagtacgttttgtgacaggcaatagaattttaagaattcttaagtctaagggacttgctcctgatcttcctgaagatctctaccatttaattaagaaagcagttgctgttcgaaagcatcttgagaggaacagaaaggataaggatgctatattccgtctgattctagtagagagccggattcaccgcttggctcgatattataagaccaagcgaggcctccctcccaan

SEQ ID NO: 20319 - DNA, 457 bp, Homo sapiens
aggatgggccttgccttgactggcgcatgacgaatccaggaccaacgtaggggagcaggccacgtagacgggtgctatcgctgtgttaggggtatatgatgggggagtagatctttctaggagggagacactggcccctcaaatcgtccagcgaccttcctcatccaccccatccctccccagttcattgcactttgattagcagcggaacaaggagtcagacattttaagatggtggcagtagaggctatggacagggcatgccacgtgggctcatatggggctgggagtattgtctttcctggcactaacgttgagcccctggaggcactgaagtgcttagtgtacttggagtattggggtctgaccccaaacaccttccagctcctgtaacatactggcctggactgttttctctcggctccccatgtgtcctggttcccgtttctccacctag

SEQ ID NO: 20320 - DNA, 475 bp, Homo sapiens
  misc_feature (1)...(475): n = A,T,C or G
catagcaaccgccnctcaggtagatccgcgctgcaggaattccgcacgagcttaccctctagccaggcatgacgatggtctgctggaagtcgttggagtatatgggtctttccactgtgctcagattcaaggaaaactggctaatccttttcgaataggacaggcacatacagtgaggctgattttgaagtgctccatgatgccaatgcaggtggatggggagccttgggcccaagggccctgcactgtcaccataactcacaagacacatgcaatgatgttatatttctctggagaacaaacagatgatgacatctctagtacttcggatcaagaagatataaaggcgactgaatagatggatgagggagtgaaaactttgcatagaatcctcacgcaagtagatacatgttcatccaaaagtattaatagaaattctctatcagctattcagtcttaatttcactagtagtat

SEQ ID NO: 20321 - DNA, 488 bp, Homo sapiens
  misc_feature (1)...(488): n = A,T,C or G
tgcggcctnnnnnnaaaattgaaatcatcgnctttagcaattaggcacgagaggacaggcatgtctgcttacaggtgatatttgtctgttaaaactagtctgcagatgtttcttgaatgctttgtcacattaacaaagttaaagtgcaataatgtttgaagacaataagtggtggtgtatcttgtttctaataagataaacttttttgtctttgctttatcttattagggagttgtatgtcagtgtataaaacatactgtgtggtataacaggcttaataaattctttaaaaggagagaactgaaactagccctgtagatttgtctggtgcatgtgatgaaacctgcagctttatcggagtgatggcaatgctctgctggtttattttcaagtggctgcgttttttttagtttggcaggtgtagactttttaagttgggctttagaaaatctgggttagcctgaagaaaattgcctcagcctccacag

SEQ ID NO: 20322 - DNA, 496 bp, Homo sapiens
  misc_feature (1)...(496): n = A,T,C or G
acgggaattganattcattcgcatgtcaggaattcggcacgaggagagagagagacagagagagagagagagagccctgaaccccccatgccgtacagggagacacacctctatgctctggcctcacaaaagacaacgtgtgtgacttgtccaaccccttgcctgaccctcagggagtcagcctgcttccatccatgggtgggaagacttcagcacaaaggaaagactaattcttgtcaggcatttttgaaaaggctgattatgtgtatcaaggtacagcatcgtagggttcccctaaacttgccctgtttttgtttttttagtttgttatccccttactgagcggcctctactaggtggctgtgattaaatgtcccacgcaaggatagggaaggggaatggttgagcctctggagatcattgtaaccaatcctgccacacctgtttggggcagtggggagcaaacctatataaagacctgtttggggcaacaggg

SEQ ID NO: 20323 - DNA, 507 bp, Homo sapiens
  misc_feature (1)...(507): n = A,T,C or G
aggggnnnnnattgancaatagattcgccttcacgaattcggcacgaggtggctcacgcctgtaatcccagcactttgggaggccaaggcgggcagatgacttgaggtcaggagttcgagaccagcctggccaacacggcaaaaccccatctctactaaaaatacaaaaaattaaccgggcatggtggcgggcacctgtaatcccagctacttgggaggctgaggcagcagagccgcttaaacccaggaggcagagactgcaatgagctgagatcgtgccattgcactccagcttgggcaacaagagtgaaacttcatctcaaaaaaacagaaacaaacaaaaaggcagctgggttgtcactgatgggcagcatttgagcctgccacactggcctggaaagttcccttccagtctggattttgtctgctccttcctttccccctcaccccgtacctcttcacctnccatctcatttcactgtgtagctcaggctctcccacgcacan

SEQ ID NO: 20324 - DNA, 455 bp, Homo sapiens
  misc_feature (1)...(455): n = A,T,C or G
ggaggacatgaatcggtgctctgggcganngcgacgagattttgggaggccgagatgggcggatcatttgctgtcaggagttcgagaccagcctggccaacatggtaaaaccccacctctactaaaaatacaaaaatcacctgggcgtggtggcgggcgcctgtaatccccactactagggaggctgaggcaggagaatcgcttgaacccgggaggcggaggttgcaacagtgagccgagatcgcgccacggctctccagcctgggcgacagttagacccgtctcaaaaaaaaaaaaaaaaaccaaaaagggtggatccaccgataagttgctccgctccgttttttttaggggaaaccatggtcccccttttttggggttattttttaaaagtctacaaataaacattttataaagaggacccttcaatacatattctacagcccagttaaaag

SEQ ID NO: 20325 - DNA, 493 bp, Homo sapiens
cgatgtgcccccaattgaccgccctcgatagcaccgcctgcaggaattcggcacgagcctggatagggaagggggaggaggggacttttagagccagcaggccccactgtattatgtatatatttttcaaggtctgtttttctaactgaaaagctaagggcttgattcctagccccgttctgtggggcactgggtgatactcagtttcttgttcctggccgtggagaggggcctggggcactggttccggctgtgtctggtggtccggctgcagggaaggggcaagaaggcgggcaggccttcactgcagcactgagcctcaaatccgctctggagcatgaggctggatgcagtggtggtgaggccgccccgctccatcccgaggcagccaggctttgttttgcgctctcctgtcacaaatgctgcactattggttcttaagttttttatctccagatcctaatttatgcctatgcaaaaaataaatgacgcc

SEQ ID NO: 20326 - DNA, 482 bp, Homo sapiens
  misc_feature (1)...(482): n = A,T,C or G
attgcccgcctgcttgaattcggcacgagctttatttcttcagaagaggtactgtatgtatgcctgcatagtgctggccagtgtcaagggcagtgtgtcctactctggtctcatttagtacataacaatttgcacttggtgagaatggcaagttaattgttctctgtgagcaaaacaatggtctcttctgggaaaatgttgctgagaacaatatagttaacaactaagactcctaaaagcttctctaaactgtaccctccaatccagccttcacatggctgcttttttttttttttttaatccaaccctgcccttgaaccacttggaggttatcattttggggaaacgggaaagccccccagttcttgttactccccagttggaacttgagcaaacaggatgctcccctttttttgattggctaaaaacatcacccttgctcacatgcctgttaatcctgncaatgggggtaagtgtcctaa

SEQ ID NO: 20327 - DNA, 499 bp, Homo sapiens
  misc_feature (1)...(499): n = A,T,C or G
aggggnnagnnngncagnnnnannnnnnnaattgaccgactggaggacntcgcgacgaggcaggttagatttttttcctctacccagagtccctttttagtttaccccacggcttagtttgctgtcagataccagttctctagcagattccccaacagttttttccccagtggggagggtggaagggagggactgatataagcaaggagatgagtagttgtgttacagctcattttctttaaaaaaaagggctttgagaaaaggtgcaaaatattcttgaaagtctctaggccagccaaagtccacatatggatatttggggatgttatttaaatactcagcaggctgagtgcaggtatacgtgtgtatagagtgtgtatactttgcttttgttttataacattgacagctcattttggctttgatctttggcatccattcttattataagtgatggaatgccatgaaatggactgtattgtatattacttgggaggac

SEQ ID NO: 20328 - DNA, 495 bp, Homo sapiens
  misc_feature (1)...(495): n = A,T,C or G
agggcnacnnnttttgaacgcttgcaggacctgtcacgagacactgcggccggccagaatccgggtccatccgtccttcccgagccaacccagacacagcggagtttgccatgcccgagaatgtggcaccccggagcggggcgactgccggggctgccgacggccgcgggaaaggcgcctatcaggaccgcgacaagccagcccagatccgcttcagcaacatttccgccgccaaaggtatcactctcatggcctgacccgcggcgccgcggggttgtgctctgcgctctcatcgtgggcttgagcgggtttggctcatttcccatttcttcgggtgatcctctcttgtcctccctatagaagcagcccagcggagggatccttatttctgtttttctgccgatgatcgccaacccggagtatggaggcctttggacttgccccattttgcatcttaatctcccttagttgttcatcctgcactgtgcatcattn

SEQ ID NO: 20329 - DNA, 426 bp, Homo sapiens
  misc_feature (1)...(426): n = A,T,C or G
attgancgcctggtagatcgcactagcttgactctgggcagctttaatcaggttgggcagcctctgctacagcgtggagtgggatggctctcttccctcagccacgccgcttgtgaggacagaggtgggggagtgggaagtgggaagtcaccagagaacaggagagggatttgagggcgcgaccccagcgctctccacggaccagccagagggactggagccaggtgtgcatgggttcaaggccctggccctgcccagcctctgtcttgggagctcagccccagggttcggtcgtcagcagtttcccaagaacaagatgtgatggcatctgctgctgaaaccctgatgaggaccaggccccctgcaccgctgtcagcctgaggaattaaagctttggtgctgggaagagcaaaaaaaaaaaaaaaa

SEQ ID NO: 20330 - DNA, 468 bp, Homo sapiens
  misc_feature (1)...(468): n = A,T,C or G
tgcgggccggagggataatgatcnggtccgtatccgcaannncacgagaattttaaaaataatgcatacctggctcagtccccacagctatataagcaaatgtgcatttgtgctgattttgagaaggttttctctattgggccagggttcanagcggaagactgtaatacccatagacatctaactgagtttgttggtttggacattgaaatggcttttaattaccattaccacgaagttatggaagaaattgctgacaccatggtacaaatattcaaaggacttcaagaaaggtttcagactgaaattcagacagtgaataaacagttcccatgtgagccattcagatttttggagccaactctaagactagaatattgagaagcattggctatgcttagggaagctggagtcgaaatgggagatgaagacgatctgagcacgcccaatgaaaagctgttgggtcat

SEQ ID NO: 20331 - DNA, 455 bp, Homo sapiens
  misc_feature (1)...(455): n = A,T,C or G
ntttgccccccctgtacccccgctgcaggaattcggcacgagccacgtggggtttgctgccggagctgagtctccggccggcgtccagtttgagtctaggttggagttggaaccgtggagatgcggaaggaaaccccaccccccctagtgcccccggcggcccgggagtggaatcttcccccaaatgcgcccgcctgcatggaacggcagttggaggctgcgcggtaccggtccgatggggcgcttctcctcggggcctccagcctgagtgggcgctgctgggccggctccctctggctttttaaggacccctgtgccgcccccaacgaaggcttctgctccgccggagtccaaacggaggctggagtggctgacctcacttgggttggggagagaggtattctagtggcctccgattcaagtgctgttgaattgtgggaactagatgagaatga

SEQ ID NO: 20332 - DNA, 450 bp, Homo sapiens
  misc_feature (1)...(450): n = A,T,C or G
atttgaccctcgctgcgcgaattcggcacgagccagaatgagcgttttctggtagtgcttaactttggggatgtgggcctctcggctggactgcaggcctccgacctgcctgccagcgccagcctgccagccaaggctgacctcctgctcagcacccagccaggccgtgaggagggctcccctcttgagctggaacgcctgaaactggagcctcacgaagggctgctgctccgcttcccctacgcggcctgacttcagcctgacatggacccactacccttctcctttccttcccaggccctttggcttctgatttttctcttttttaaaaacaaacaaacaaactgttgcagattatgagtgaacccccaaatagggtgttttctgccttcaaataaaagtcacccctgcatggtgaanaaaaaaaaaaaaaaaaaaaaaaaaaaaaaa

SEQ ID NO: 20333 - DNA, 477 bp, Homo sapiens
  misc_feature (1)...(477): n = A,T,C or G
agaggggnnnnnnnnaatttgccttcgctccgcgctgcaggaattcggcacgagggggcaccaaggcacgcggagggcagcaggatccagaggcagcgagggcacttggtgctgttcagccctctttagaaggccatcacaagggaagtccctgagggtgcagaaagtgactctcttcattgtacccaccctcagtggctgttaaccctgccacgtgtctgatattaataactgactgtcctccttggtctaattacagcggcctgctgcttgcacaatttgttatttatttggcagtgtcctcggggctatctctctagtccatccaatttgtatttactgagcacctactatgcctggagggctgggtctaccctggagtaagctcccagtgctggagctcctctctatagagactggagggatcaggagaaagctgcctacaggcctgggcatttcagaaaaaaaaaaaaaaaa

SEQ ID NO: 20334 - DNA, 491 bp, Homo sapiens
  misc_feature (1)...(491): n = A,T,C or G
agacgtgnnnnaactgatcgcctggatagatncgcctgcaggaattcgccacgagctactctgttgttttcacaaggcaaaatgtatggttatgtggataccttacttactatgttagccatgcttttaaaggtagcaatgaatcgagcccaagtttgtttgatatccagttccaagtctggagagaggcatctttatcttattaaagtatcgagagacaaaatatcagacagcaatgaccaagagtcagcacattgtgatgcaaaagcaatatttgctgtgctcacaagcgtcttgacaaaggatgactggtggaatcttctgttgaaggccatatactccttatgtgacctatcccgatttcaagaggctgagttgcttgtagattcctcattggaatattactcattttatgatgacaggcaaaaacgcaaagaactagaatactttggtctgtctgctgcaattctggacaaaaatttcagaaaggc

SEQ ID NO: 20335 - DNA, 504 bp, Homo sapiens
  misc_feature (1)...(504): n = A,T,C or G
ggagggtannnnnnntttcgatggcctgtngaattcggcacgagccgtggattcccttgctcgattggctctactgtgggtctggactgatctccatgtcctgttgtggggcttttacagcctttggattgtgaaaactgctgagagagacttgcaatccagtcacataagtataataaagaaatattggtcctcatggaagaagagcaagatttaccagagcaaccagtgaaaaaagccaagatgcaggaatcaggagagcaaactataagtcaagtaagcaatccagatgtcagtgatcagaagcctgaaacatcaagccttgcttcaaaccttcccatgtcagaggaaattatgacatgcaccgattacatccctcgctcatccaatgattatacctcacaaatgtattctgcaaaaccttatgcacatattctctcagttcctgtttcggaaactgcttaccctggacagactcaataccagacactacagcagactcaa

SEQ ID NO: 20336 - DNA, 493 bp, Homo sapiens
  misc_feature (1)...(493): n = A,T,C or G
agggcnnnnnnattacccgatcgcacggctgcagattcggcacgaggagaacacctaccgggaccccatagcaaagtattgctatggagaaagcccgcccgagctcttccccgcttgacgggtgcagcggacttgctccagcctgggtgaggaggccccgctgaagaactcgcctcctgggacccagcttcagccatcgggccaggctgcaggaagaagacaaaggcagcgtgaggaaaccttggctttgaccccttctcgtgttgtcatctttggcttcgctcaccacccgggcttaccagatggaactcttctgtaaagcagcttggcccctccagccagtcccattcgggaaagatgaaaccggaggccgggctcacggtggtggtggagttcttggatgactcagccctgggacctgcacagggacctgtgacttgtgttcatcgggggccgggtcacttccagttttgatccaggctctttcactgta

SEQ ID NO: 20337 - DNA, 488 bp, Homo sapiens
  misc_feature (1)...(488): n = A,T,C or G
aggattgctcccaggatgcncccncctgggagcgctcangatnncgtcgagccctgcgccactgccctaaccaggactggctggcggtcggaatggagagtagcaacgtggagatcctgcacgtccgcaagccggagaaataccagctgcacctccacgagagctgcgtgctgtccctgaagtttgcctcctgcgtccaaggagtcgtcctcagtcctgagttgtgacatctccagaaataacaaatacatcgtgacaggctcgggggacaagaaggccaccgtgtatgaggtggtctactgagacatgaccccccttcctgtacccgaagtccagactcccaggggaatcagcagccaggacagacatcctagcagccgcctcccagccctgcctatgaaccgtacatcccatctgctctctggccaacggcttcacaccttcccctgctgcatgtgggggccgatgggcaggggacctcggtggaa

SEQ ID NO: 20338 - DNA, 482 bp, Homo sapiens
  misc_feature (1)...(482): n = A,T,C or G
gagatgctnccattgatcgcctgcagtattccgccgagctgagctgccgttccagctggactgacgccatggaactcagcgccgaatacctccgcgagaagctgcagcggcacctggaggcggaacatgtggaggtggaggacacgaccctcaaccgttgctcctgtagcttacgagtcctggtggtgtcggccaagttcgaggggaaaccgctgctttagagacacaggctggtgaacgcgtgcctagcataagagctcccgcacatccatgcctttgaacagaaaaccctgaccccagaccagcgtgcacgtgagcgacagaaatgagggactgggatctgcacagacattaaattataaatctggtgccttcaagatcatacacctgctcacaggcgagaaccctctgcaagtcctggtgaacgccgtggggggcggcggccccgggaggactccacacgcattgggcgcgccgggact

SEQ ID NO: 20339 - DNA, 475 bp, Homo sapiens
  misc_feature (1)...(475): n = A,T,C or G
attagacaaccantaaaaattttgcccccgctgcaggaattcggcacgagcagattttctcactcaattagaaaaatgattggctgggacccaacagaaggattgtggagtcagtgtgagtcctcaccgcgctcgctggcttggtgggggctggttgcctctgctgtattctccaaggctttgctgccttttctccagcaagctcctttcttatgatgggtgatttgtactcatggactgtgtgatggtgatgagcaggagcttctgaatttcctttctaggtgagagcaggtgctgggacccattgtgagctgtgtacagtgactgttcccaggcgttcccatcagctccaaggtgcaaaatctcattttctcaggatgggtaaagcttctctcaggagaatgccacaaacctcaggcagagcctgatgctaacaatgggctagattttggagggctgtattacagttagaggg

SEQ ID NO: 20340 - DNA, 503 bp, Homo sapiens
  misc_feature (1)...(503): n = A,T,C or G
catcgacccccctnnnnnntttagacccgcgctgcaggaattcggcacgaggtttctcttccccttcttagtcagcacacccagtcctttattttattctattctatttattttattttaataagtacttagcctcttctgacttctcaaaggacaatcggatacatatcttcctgaaaagaagtagttaaagttcccttgggaactagctacttggtagttacaattcccaaatgcagaacttggtcttttcatgttaaaagccttaatctcatttgggtactcaaaagagaaatcagagtttattctggttaacttgagaagccaagaaagatcatttttagcaagtatgccttccatccttggcagaggcttcccagcatcctaggctcagcttaccgggtgataggccccataagacacacacatgagcagggtgagaaatgcttgctntatagctgctccaccctcatctccagagattntgtgtctatggttgtggg

SEQ ID NO: 20341 - DNA, 497 bp, Homo sapiens
  misc_feature (1)...(497): n = A,T,C or G
ggggggnnnnntttcccatggctgcggcaattcggcacgagggacagagactttaacatgttgttggggctcagaaaatgataccccaaattaaggctctgaagcagcctcagaagcaaaagtttctctctgaccttctgccttcctgtctctggcccttcattcttccccaagcctagccacagacactgaatcccttttcctcaaggtgggtcatagagagaaccccttttccccaaagccagccataaaatgtaaaatactactctaggccgggcgcggtggctcacacctgtaatcccagcactttgggaggcagaggcaggtggatcacaaagtcaggagttcgagaccagcctgaccaacatgatgaaaccctgtctctactgaaaatacaaaaattagccaggcatggtgggcgtgcctgtatccccgtactcangagctgaggcaggaaattacttgaacttgngagggtggggtgagtgagccgacaa

SEQ ID NO: 20342 - DNA, 463 bp, Homo sapiens
  misc_feature (1)...(463): n = A,T,C or G
aggcgaccnnnnaaaaatttgaatcgtctgcgctgcacgaattcggcacgagacagagctgggcgagaacgcagcggcccgggccggcggagggtgtgacccgtctgcaccttgctctgtcccacctgcctctgggtgcccggcagctccactagatttttggattcattcctttgaagggagtcgggttcacccttccatcgtattctcccaactacacattgtaaagcctgagaaacttctagaacctcaggaagctgcagctggagggctggggcacctgcccccctgctccccacacatcatatcctccccatactcctgcagggcccacggctcctgagcaacagctgggacacccgggccttggcggctgcaccccctgctaggctctgcccaccggccaccaacactcctgtaattccaataaagcagtttattttctgagaaaaaaaaaaaaaaa

SEQ ID NO: 20343 - DNA, 414 bp, Homo sapiens
  misc_feature (1)...(414): n = A,T,C or G
nattgaccctccgtgagcaattcggcacgagtgtcaatgagccttggaaaaatgcctgtcttaaattgagggcacaacaacccagggggtctgaagtgcaggaatgtcatgtcctactggctcctagaatggaacttgagtcattttgatttgggtttggttaacatcaggaagtgatcacatccttttgtaccggcattgctgagagctgctggtgtaagatgtatactttggtccttctagtctgtttgttaaatctgcctcttcattaaagatagtgaccggggccagacacagtggctcacacctgtaatcttaacactttggaaggctgaggcaggcggatcacttgagcccaaaagttagagaccaaaacccagtctctacccaaaaaaaaaaaaaaaaaaaactcag

SEQ ID NO: 20344 - DNA, 420 bp, Homo sapiens
gcacgagcacatcgacgtcgctaggctgctcctcgatgaacatggagcttgcctttcatcaaaaaacagcctgggtgcccaggctctgcacagggcagctgtgacagggcaggacgaagccatccgattcttggtctctgaacttggcgtcgatgtaaatgtgagagccacatgaacccacctcacagcacttgattatgcagctaacgaaggacatacaaacacaattcatactctcttatccttgagagctgacatcaattctaaagatgaaaaaaatcgatcagccctgcatctggcctgtgcatgtcagcacttggcctgtgccatgtttctcctgcagtcgggactgaaggattctgaagacatcacggacaccctggctgagcagctgccaaggagagcagatgtacttcggcg

SEQ ID NO: 20345 - DNA, 505 bp, Homo sapiens
  misc_feature (1)...(505): n = A,T,C or G
aatgggnnnnaattgacgccnattgcaatgcctgcgagaattcaggacgagagcttgcagctttccagaaggaacgagccatcttcctggctgctcagaaggaggcagatttggctgcccaagaagaagctgccaagaagtgacccttgccccaccaactcccagatttcaaaggaggtagttgcaaaagctgtgcccaaggggaggaaggaggtcacaccaatatgatgatggttttcatgactttgaatgatatatttttgtacatctagctgtatcgaggcatcaggcctgaataaacatcctttcttanaaaaaaaaaaaaaaaaaaaaaaaaaaaaaaaaaaaaaaaanncctcgggggggggggccggcccccaattcccccttatgggggggttaaaaaaaatccggggcccgtttttaaaaacgggggggaggggggaaccccnnntngntnntttttgtcttttctgnttnggcctnggtgcctgggcgcctttgg

SEQ ID NO: 20346 - DNA, 498 bp, Homo sapiens
  misc_feature (1)...(498): n = A,T,C or G
ngtgtgcnnnattgacgctatagaatgcctgcgagccggaggcatacaacggacattgccactgactgtccagaaggtgttggcatcccaagcctgccatggggccattaagtttaatgatggcctgagcttacaggaaagttgccgccttattgaagctctgtcctcatgccagctgccattccagtgtgctcacgggagaccttctatgctgccgttagctgacatagaccacttggaacaggaaaaacagattaaacccaacctcactaaacttcgcaaaatggcccaggcctggcgtctctttggaaaagcagagtgtgatacaaggcagagcctgcagcagtccatgcctccctgtgagccaccatgagaacagaatcactggtctaaaaggaacaaagggatgttcactgtatgcctctgagcagagagcagcagcagcaggtaccagcacggccctgactgaatcagcccagtgtccctgagcagcttaga

SEQ ID NO: 20347 - DNA, 506 bp, Homo sapiens
  misc_feature (1)...(506): n = A,T,C or G
aggggnnnnnnnnnnncaggggccnnnnnnnaattganngatcgatccgccctgcaggaattccgcacgaggaaaatcactgcttttggataggaatcagtagggtggctgttttccctttgttgaatctactagagtgacaggaaggactcccagccctttcagtaactatcaggagccctgaaacggtagaggcactgccatccttgtgggatactcaaagcccacagggcttttccctccctattgcatcttctgatgctccccacacctaccctccacctctccacctctgtggtgttcccatttgtgtgtttcccatctgtggagccagactgagcaatagcttagcagcgagtcagggacagctgccactttccacagagccacaggatgggcagagcagggacccagggaatgaatagccagtggacaaacagtcttgagctctgttcagccagagtgatgggccctgccagttaaggggctgtgtcttcatccttgaa

SEQ ID NO: 20348 - DNA, 510 bp, Homo sapiens
  misc_feature (1)...(510): n = A,T,C or G
cattagccccgcgctgcaggaattctggcacgcgctgcatgaattccgcacgagaactgacgaacgctaccgacatttaggattctctgttgatgaccttggatgctgtacagtgactcgtcatagtctctggggtacccatgtagttgtagggagtatcttcactaatgcaacaccagacagccatattatgaagaaattaagtggaaattagcagaaatatccattcatttgctgtactatttgtatgtaatatttgggttgatctataaacactgtcagactaaagtttttaaaatatacttatttctaagtatttatttcagcatttatgaatttacaacattggcaagtgatttgggattttaaaattgcaaatgttcatttattcatatcattgaatacacgttgaacacatccacattgtataggatgtggtaattagcttgtaaccagggtatgatctgctattggtatttctcctctttattggaanaaggcctcagtttn

SEQ ID NO: 20349 - DNA, 505 bp, Homo sapiens
  misc_feature (1)...(505): n = A,T,C or G
gggagggaaggagggccnnnnnnnattganngcttgaccgacctgtaggaattcggcacgagagcagatgcttaacgtgcagaacaagaacagcagctactttgtggaatggatccccaacaatgtcaagacagccgtctgtgacatcccacctcgtggcctcaagatggcagtcaccttcattggcaatagcacagccatccaggagctcttcaagcgcatctcggagcagttcactgccatgttccgccggaaggccttcctccactggtacacaggcgagggcatggacgagatggagttcaccgaggctgagagcaacatgaacgacctcgtctctgagtatcagcagtaccaggatgccaccgcagaagaagaagaggatttcggtgaggaggccgaagaggaggcctaaggcagagcccccatcacctcaggcttctcagttcccttagccgtcttactcaactgcccctttcctctccctcagaatttgtgtttgctg

SEQ ID NO: 20350 - DNA, 452 bp, Homo sapiens
  misc_feature (1)...(452): n = A,T,C or G
natgaaaactaggncgctgcggcaaatggggccatccccccattagaggggcccccaaaacttggttggagagctgaacaggctgggactgaggaaaggataaaccccgatattgggacctcacagtgggtgtctgaaaggacagatcactccggagtatcagggattgtggggacaggagtgagacaaccccccaggtacagcactggcttttcttttcagcccctgacaggccacccccactcctctgcatgtcttggagagcgctagttacacattggcttgtcccctttactttttcccagccacccctccccctgaaatttctgcccctctctaccaccctcactccatgacctgtgagatcacaaagtgaagatgaaccctttctgtgcaggagcagagccaggtgggccctggacattttttttttttttaatataacgagatan

SEQ ID NO: 20351 - DNA, 492 bp, Homo sapiens
  misc_feature (1)...(492): n = A,T,C or G
ngagatggncccaatggacgccttccgttngcaccgcctgcaggaattcggcacgagccgcggtggcggttgctatcgcttcgcanaacctactcaggcagccagctgagaagagttgagggaaagtgctgctgctgggtgtgcagacgcgatggataacgtgcagccgaaaataaaacatcgccccttctgcttcagtgtgaaaggccacgtgaagatgctgcggctggcactaactgtgacatctatgaccttttttatcatcgcacaagcccctgaaccatatattgttatcactggatttgaagtcaccgttatcttatttttcatacttttatatgtactcagacttgatcgattaatgaagtggttattttggcctttgcttgatattatcaactcactggtaacaacagtattcatgctcatcgtatctgtgttggcactgataccagaaaccacaacattgacagttggtggaggggtgtttgg

SEQ ID NO: 20352 - DNA, 459 bp, Homo sapiens
  misc_feature (1)...(459): n = A,T,C or G
ggcgcnnnannnaacctgattgcctgcggtattcggcacgagcttgacagtaaagtcagaaatgtgaaggacaaggttatgtgtatagagcatgaaatcaagagcctggaagatttacaagatgaatatgacttcaaatgcaaaaccttgcagaacagagaacacgagaccaatggtgtggcaaagagtgatcagaaacaagaacagctgttactcaagaagatgtatttaatgcttgacaataagagaaaggaagtagttcacaaaataatagagttgctgaatgtcactgaacttacccagaatgccctgattaatgatgaactagtggagtggaagcggagacagcagagcgcctgtattggggggccgcccaatgcttgcttggatcagctgcagaactggttcactatagttgcggagagtctgcagcaagttcggcagcagcttaaaaagttg

SEQ ID NO: 20353 - DNA, 468 bp, Homo sapiens
  misc_feature (1)...(468): n = A,T,C or G
aggccgaccaaaaanaaaaatttgaattgctctccgtctgacgaattcggcacgagaatggcagcatctacaaccctgaagtgcttgatatcacagaggaaactctgcattctcgcttcctggagggtgtccgcaatgttgccagtgtctgtctgcagattggctacccaactgttgcatcagtaccccattctatcatcaacgggtacaaacgagtcctggccttgtctgtggagacggattacaccttcccacttgctgaaaaggtcaaggccttcttggctgatccatctgcctttgtggctgctgcccctgtggctgctgccaccacagctgctcctgctgctgctgcagccccagctaaggttgaagccaaggaagagtcggaggagtcggacgaggatatgggatttggtctctttgactaatcaccaaaaagcaaccaacttagccagttttatttgcaaa

SEQ ID NO: 20354 - DNA, 500 bp, Homo sapiens
  misc_feature (1)...(500): n = A,T,C or G
aggggnnangnntgccgnnnnnnnnnnntttgcccgtttgcaggacttcgcgcacgagtagagaaggaaaaacaagaacttcaggatgataaaagaagagccatagagagcatggaacaacagttatctgaattgaagaaaacactttctagtgttcagaatgaagtacaagaagctcttcagagagcaagcacagctttaagtaatgagcagcaagccagacgtgactgtcaggaacaagctaaaatagctgtggaagctcagaataagtatgagagagaattgatgctgcatgctgctgatgttgaagctctacaagctgcgaaggagcaggtttcaaaaatggcatcagtccgtcagcatttggaagaaacaacacagaaagcagaatcacagttgttggagtgtaaagcatcttgggaggaaagagagagaatgttaaaggatgaagtttccaaatgtgtatgtcgctgtgaagatctggagaaacaaaacagatt

SEQ ID NO: 20355 - DNA, 456 bp, Homo sapiens
  misc_feature (1)...(456): n = A,T,C or G
nattgatnaactgaccggcgctgcaggaattcggcacgaggtttctgatcactgccatcctggtgaaggtgcagctggatgctctgcccttctttgtcatcaccatgatcaagatcgtgctcattaattcatttggtgccatcctgcagggcagcctgtttggtctggctggccttctgcctgccagctacacggcccccatcatgagtggccagggcctagcaggcttctttgcctccgtggccatgatctgcgctattgccagtggctcggagctatcagaaagtgccttcggctactttatcacagcctgtgctgttatcattttgaccatcatctgttacctgggcctgccccgcctggaattctaccgctactaccagcagctcaagcttgaaggacccggggagcaggagaccaagttggacctcattagcaaaggagaggagccaagag

SEQ ID NO: 20356 - DNA, 463 bp, Homo sapiens
  misc_feature (1)...(463): n = A,T,C or G
tggcggcaaaannnnaatttgacttctctgcagtaattcggcacgagaaccacttgcttggggacccaatggccaatgtggctatggcctatggcagctccatcgcatcccatgggaaggacatggtgcacaaggagctgcaccgttttgtgtctgtgagcaaactcaagtatttttttgctgtggacacagcctacgtggccaagaagctagggctgctggtcttcccctacacacaccagaactgggaagtgcagtacagtcgtgatgctcctctgcccccccggcaagacctcaacgcccctgacctctatatccccacgatggccttcattacttacgtgctcctggctgggatggcactgggcattcagaaaaggttctccccggaggtgctgggcctgtgtgcaagcacagcgctggtgtgggtggtgaatgaggtgctggccctgctcctgggcct

SEQ ID NO: 20357 - DNA, 452 bp, Homo sapiens
  misc_feature (1)...(452): n = A,T,C or G
nattgatcgttgtgagcaattcggcacgagcttgcacataaataacccccgtcagtggagtgttcgggatgcagggggcactatagtgttcttggacttgtcgtcctggggcagttttagttctttatatttagtgggtcagtgccaagtgctaccacttcccaataaaggaatggggacccagaggctgggtccctggctaccttgttatgaggttttgttatttctctgacaagattgctttggaaagagctgcttttagggattattttttgaataccccgagtggggagcagggttctcctcaaagcctcacaaccataggatcataggaaaggggccctattttcctgctgcttcccagctcagaacatatactgaatggaatgtatttttaagagaataaagtctatttttttgtattttaaagattgagagggctaagaaagtag

SEQ ID NO: 20358 - DNA, 470 bp, Homo sapiens
ccttgatccgcgctgcaggaattcggcaccatgtacgaactcgaacgctggtttctctctcatatttttggtctggaagtctcagggacggaggggcgccaaggccccatgtgtgggaggattgtttcagctccacaaacttgcacggattttggttacttgtttggccaatggttcggctctgatttcttccgaattgttgcaaattcgccatcgttccctggctgcttactaagttggatccggaatttcttttcaaccgggagccattggtgtcgaagtgtctgcaatgaaccccgtgaatgctactgctctctacatttccgcgagccgcctagtgctcaactacgaccccggagaccccaaggcgtttactgagattaacaggctcttgccttacttccgacagtccctttcgtgctgtgtttgcggacatttgctacaagatcctattgcacccacccaactca

SEQ ID NO: 20359 - DNA, 458 bp, Homo sapiens
  misc_feature (1)...(458): n = A,T,C or G
nactgatnaactgacgacgctgcaggaattcggcacgagctggattggtaaacagttgcctactccagtgggtgcagttcagcaagatcctgctctgtcatcaaacagagaagcacatcaacacagagataagatgcaacaatccaaaaaccaggttgtaagttctacaaatggagagttaaacacagatgaccccaccgcaggacgttcaaatgcacccatcacagcccctactgaagtagaagtgatggatgaaaccaactgccagaaagtgttgaacatgtggtgctgctgttttttcaaacgaaggaaaaggaaaaccatacagcgccacaaatgactctggacacagacagatcctggggagttacttacatgttcatctgctgtcttgtgattaaaatcatctctgtagtgaccacgtatattttcaaggactcactcttagaaacaaaaat

SEQ ID NO: 20360 - DNA, 479 bp, Homo sapiens
  misc_feature (1)...(479): n = A,T,C or G
agtagaaaanccnnttnanaantttgaccccgcgctgcaggaattcggcacgagaaatacaacattgaattagatccacgtttcaatgatatcttgggcagacactctcgaaagcgatgggaacgctttgtccacagtgaaaatcagcaccttgtcagccctgaggccttggatttcctggacaaactgctgcgatatgaccaccagtcacggcttactgcaagagaggcaatggagcacccctatttctacactgttgtgaaggaccaggctcgaatgggttcatctagcatgccagggggcagtacgcccgtcagcagcgccaatatgatgtcagggatttcttcagtgccaaccccttcaccccttggacctctggcaggctcaccagtgattgctgctgcaacccccttgggatgcctgttccagctgccgctggcgctcagcagtaacgggcctatctgtctcctgatgcctga

SEQ ID NO: 20361 - DNA, 453 bp, Homo sapiens
  misc_feature (1)...(453): n = A,T,C or G
nattgaccgccgtgaggcattcggcacgaggagagatgttatgtaatatgctgaggtggcgacctcagtggagaaatgtaaagactgaattgaattttaagctaatgtgaaatcagagaatgttgtaataagtaaatgccttaagagtatttaaaatatgcttccacatttcaaaatataaaatgtaacatgacaagagattttgcgtttgacattgtgtctgggaaggaagggccagaccttggaacctttggaacctgctgtcaacaggtcttacagggctgcttgaaccctcataggcctaggctttggtctaaaaggaacatttaaaaagttgccctgtaaagttatttggtgtcattgaccaattgcatcccagctaaaaagcaagaggcatcgttgcctggataatagaggatgtgtttcagccctgagatgttacagttgaagagn

SEQ ID NO: 20362 - DNA, 448 bp, Homo sapiens
  misc_feature (1)...(448): n = A,T,C or G
ntttgccccggcttgacgaatctctcacgagctagagtgagcaggttctcgtatccctcggccaagggtatcctctgcaaacctctgcaaacccagcgcaactacggtcccccggtcagacccaggatggggccagaacggacaggggccgcgccgctgccgctgctgctggtgttagcgctcagtcaagatcctttttaggattggcaaatcgctttcttcactgtcctctagcaagacaaaaagtgattcaactccccagcactttggaaagccaaggcagaaggattgtttgaggccaggaatttgaacctagactggtcaatatagcgagactctgtttctacaaaagaaaaatttaaaaaattagccaggaatcgtgctgcatgcctgtagtcccagctacgccggaggatgaggcaagaggatcatttgagcctaagaggtn

SEQ ID NO: 20363 - DNA, 479 bp, Homo sapiens
  misc_feature (1)...(479): n = A,T,C or G
aggggcgtaagcnggggccnnnnnnnaatcgacccatgagaggcattcggcacgagtcacaacattctgaaattttttggttattgtaatgatgttgatcgggagttgagaaaatgcctgaagaatgaggttcttgctctgtcacctaagctggagtgcagtagggtgatcgtaactcacggaagcctcaaactcaagtgatcctcccacctcagcctcctgagtagctaggacgacagtacgtagaaaacaggaccaagagcagggagcatggcattgcaatgcgaaagaaactttttaatcctccagaggaatccgaaaaataaattgtattttcactcgatgccttggctgagagaagacctaaagactctgggttgatacctgaaagaatcctgtcttatttggtctccataatcctttgaatggaaagtgacctgtgagagattgaaccatggagaaatatganaaccctggat

SEQ ID NO: 20364 - DNA, 477 bp, Homo sapiens
  misc_feature (1)...(477): n = A,T,C or G
ggggagaagcncggccnnnnnnactganccactacgtgcatgcgggaattcggcacgagaaacaccagtgtgtaaagctaaatgatggccacttcatgcctgtattgggatttggcacctatgcacctccagaggttccaagaagtaaagctttggaggtcacaaaattagcaatagaagctgggttccgccatatagattctgctcatttatacaataatgaggagcaggttggactggccatccgaagcaagattgcagatggcagtgtgaagagagaagacatattctacacttcaaagctttggtccacttttcatcgaccagagttggtccgaccagccttggaaaactcactgaaaaaagctcaattggactatgttgacctctatcttattcattctccaatgtctctaaagccaggtgaggaactttcaccaacagatgaaaatggaaaagtaatatttgacatagtgg

SEQ ID NO: 20365 - DNA, 509 bp, Homo sapiens
  misc_feature (1)...(509): n = A,T,C or G
cgccccatagcccncgctgcaggaattcggcacgcgctgcaagaattctgcacgaaggatccattgaccttgcccaggagagagagcctcgctgggacccagaaaccgcgaaagaagattcgacctacctagggaaccagacacaacttggtccccaaaggtcgcttaggcgaccccactgcaaatgggcgtcggagactcgcactttgacttggttgacatacacaggagatccggattcgctgggcacgtcgggaacccgcgagttaatagagcctgacgccagaagaagggcggcagcgagatagagatggagaagacccacaccagcgcgatcatgaccgccgccctcttgggagtccttttagctgagtactccacggcgtccgtgatggcccagtagcggtccagggcgatgacacagaggtgcaggatggaggcagtgcaacaagtgatgtccgacgacagccagaagtcacagaccacctggcccagtgtccagcggccgg

SEQ ID NO: 20366 - DNA, 502 bp, Homo sapiens
  misc_feature (1)...(502): n = A,T,C or G
tggtnnnnnnnaattgancgtctgtggacttcggcacgagtggaagcttacttgcagaatctcttcagcctctctcagctggacaagtatgctccagaaaacctagatgagcagattaagaaagtgtcccagcagatccttgagaagcgagcctatatctgtgcccaccctctggacaggacatgctgaggcaggggacagtgtcccctgctaccgcccgcccctacccatggcccgttgctggatgactgttactcttttttcagaaggtgttgggattatcacaggttaagccttttgttccccgtctgcacctgaagggttgtcgcctggcctgggagagcctcttccaggttttgacctgcaggcagtgctctctaacaggaccatcacagcttctgaactgagccggagagagagaatggaattgctgacccctggaactgacgggtattctggtcattgaggagacaccatagntggaactggggcttatgctgct

SEQ ID NO: 20367 - DNA, 482 bp, Homo sapiens
  misc_feature (1)...(482): n = A,T,C or G
ccttggaccagccctgnagagattttgaccccgcgctgcaggattcggcacgagctcgtgccgcttctctcctcccttaccaccgctctggatcatgttactagttccgtcttttgtgtggccttgggccagcttccttgataccttgaagatgggcttcttgtgagtccccagggagaaagggacaagagctaagatttttgcatcagcccttctggcagaaggtgtggtaggggccatttgttttttttagtggacttgggatttgtggtgtaatcatatcattaatgatccagggtgtgggaaaaatggaggtccttgaagtggctgaatctcattgtatttaagacactgtcagttgccagatgtaggcttatttttggagatgtctaggagaggaaaaagctaccaatcatactcttgatatccgtctggctgtgtgaggcacccctacctcatgggggtgtcttgggattgatgaa

SEQ ID NO: 20368 - DNA, 463 bp, Homo sapiens
  misc_feature (1)...(463): n = A,T,C or G
cgccccccccnaggaggncttgaaaccctannaattcgagcttgnagaatctgcacgagtaccaggagctaaaaaagaagacatagagaaagatgaaacagaagtttagaccgaatacaaatttgaatggcagaaaggagccccacgagaaaaatatgccaaagatgacatgaacatcagagatcagccctttggtattcaggttcgaaatgtgaggtgcattaaatgtcacaaatggggtcatgtcaacacagatcgagaatgtcctttgtttggtctttctggaatcaatgcaagttcggttcccactgatggctcagggccatcgatgcacccctcggagctaatagcggagatgagaaacagtgggtttgcactgaaacgaaatgtactggggagaaacttgaccgcaaatgatccatcacaggagtatgttgcaagtgagggtgaagaaatccagacg

SEQ ID NO: 20369 - DNA, 502 bp, Homo sapiens
  misc_feature (1)...(502): n = A,T,C or G
gagtcnnnnnaatcgacgtctgtaggacttcggcacgaggtccccgcggcgctgatcctacgggagagccccagcatgaagaaagcagggtcactgataaatgcaatagatacaggaagatttccacggttgctcactcggattcttcaaaaacttcacctgaaggctgagagcagtttcagtgaagaagaggaagaaaaacttcaagcggcattttctctagagaaacaagatcttcacctagttcttgaaacaatatcatttattttagaacaggcagtgtatcacaatgtgaagccagcagctttgcagcagcaattagagaacattcatcttagacaagacaaagctgaagcatttgtcaatacttggtcttctatgggtcaagaaacagttgaaaagttccggcagagaattctggctccctgtaagctagagactgttggatggcagcttaaccttcagatggctcactctgctcaagcacaactaatatctcctt

SEQ ID NO: 20370 - DNA, 463 bp, Homo sapiens
  misc_feature (1)...(463): n = A,T,C or G
ntttgatcccgctgcaagaattcggcacgagtcttcatccctttcaagccctgatatcttcgactccccaagtcccgaagaggataaggaggaacacatttcacttgcgcacagaggagtggacgcgtcaaagaaaacttccaagactgttaccatatcccaagtgtctgacaacaaagcatccctgccgcccaagccggggaccatggcagcaggtggcggtgggccagcccctctgtcctcagcggcgccctcccccctgtcatcctctttgggaacagctggacacagagccaactccccgtctctgttcggcacggnnggggnnncaaagatggagcctgcggccagcagccaggcggccgtggaggagctaaggacacaggtccgcgagctgaggagcatcatcgagaccatgaaggaccagcagaaacgagagattaaacagttattgtctgagttg

SEQ ID NO: 20371 - DNA, 414 bp, Homo sapiens
  misc_feature (1)...(414): n = A,T,C or G
gcgattcanttggaaattatattagtaaggattcttatcttagtactgttttaacaagagttacaactgaaagttattcaataatcaaaaatgaaggtactttaaaaattttgccaactgagtaatataaactttattcccacctaaaacacattaggataattataccaaattttttaggtcaacatctcaaacattttctactaattaccttaaaatagcattaaaatgaataaagaaacatcagagttttcaattacttattactggagttcaaaactgtaaatacaaatgtaaaataaacagtaaaaacgaaacacatgttcaacactcagaagaatggttattctgactggacaagttatgacttatataagagggaaaaaaatggctggaaggtctatctagtaagaa

SEQ ID NO: 20372 - DNA, 470 bp, Homo sapiens
attagaccaactttggaacgcccttacgaattcggcacgagagtttacccacccctcctctttcctcccctgtccctaaaataatccacgtgtcttcctaaaatctctctttgatcctgtcctttgataacaccgtcagtgcctactactgggtctagacagacctctgttgagcagtcagagtcttccctgactccacaatgcccctttccttggctgaccagtatgactactggtccccacctttcccttgcctatccctacctccctcctactaggttgtcccatccctctcttcacccattcattcatgaccatttttcactaccaagctccccccctcccgaaggaggctgaggtttttgtgactctctagactctattgtgggatggaatgaacattgctaaagaatcttgtgttcgctttactttaaaaaggtatttttttcctaattataaaactgatgtgt

SEQ ID NO: 20373 - DNA, 450 bp, Homo sapiens
  misc_feature (1)...(450): n = A,T,C or G
nttgccccccgctgtcccccggctgcacgaattcagcacgagcggagccgtcagtccacgcactcccggatgcactcaacaacctaaggacgcacgagggttccggggatggtccgagctcgtccgtagattggaatcgccctgaagatgtataccctcaagggatttatgtcatatctgctccttccatctacgctcgggaggcctgacgcgtctcctccatccgcacctggagtcagagcgaggatttttgtatttgctcggtggtgcccagtctctgccccagaggctttggagttcaatcttgaaggggtgtctgggggaactttactgttgcgagctgtaaataatggctatttatatcctattttttctcaccccatctctctagaaacacctataaaggctattattgtgatcaaacaaccaaaaaacaacaaaaaaaaccct

SEQ ID NO: 20374 - DNA, 467 bp, Homo sapiens
aattagaccggcctgaggaattcggcacgaggtcctgctgagttatgctttacatcaggttacagtgtacagcatgtatgtttctataatggctttcaatgcaaaggttagtgatccacttattggaggaacatacatgacccttttaaataccgtgtccaatctgggaggaaactggccttctacagtagctctttggcttgtagatcccctcacagtaaaagagtgtgtaggagcatcaaaccagaattgtcgaacacctgatgctgttgagctttgcaaaaaactgggtggctcatgtgttacagccctggatggttattatgtggagtccattatttgtgttttcattggatttggttggtggttctttcttggtccaaaatttaaaaagttacaggatgaaggatcatcttcgtggaaatgcaaaaggaacaattaatatatatgctactggacattctagc

SEQ ID NO: 20375 - DNA, 452 bp, Homo sapiens
  misc_feature (1)...(452): n = A,T,C or G
gattgaccgcgntgaggaannnaatcgaccgcgctgcaggaattcggcacgagcacacctgtaatcccagcgtttgggaggccaaggccagagaatgccaggagtttgagaccagcctgggcaacgtaatgagacctccatctctacnaaaaaaaaaaaaaaaaaatttaaatggccttgggggcacgtccctatggccccagttattcaggaggataaggggggaggataatttgaccccaggaggcggaggcagcagggacccatgattgggctactgcactccacccggggggacaaaaaaaaactccttccaaaaaaaaaaaaaaaaaaaacccggggggggggcccgggccccaattccccctaaaggggggggaaaaaaaaataccgggccggggttttaaaaaggggggggggggagaaannntnnntggccgtaccatgtncna

SEQ ID NO: 20376 - DNA, 484 bp, Homo sapiens
  misc_feature (1)...(484): n = A,T,C or G
cgatgggcannnnnattganactgatccgcgctgcacgaattcggcacgagctcaaacagctgaagcaatatattgtatattgccatatcgtctggtgaaagggttaaattacttcacctcttgcacttttagatgcaaatcagattttcatttctgtaatagaaaattattcacgtatttttacatcatttgtttttcctgaccagtatttaaaaccaaaaggatattctgaaaaatggccaacaatttttttagaagaagcatcccatgcagcgtgcctaaacattacattgcatatggaaataaaagaatcaaacgtcaaaaaaaaaaaaaaaaaaattctgggggggcccggacccccttttcgccttatggggaggcgggaaacaatgatgtggccttatatctacataccccccctgtgagaaaagcctactaagtcacaagttccaccactaccggtcacaccaccctacacttcag

SEQ ID NO: 20377 - DNA, 472 bp, Homo sapiens
aattaggaaaacctttcgaccggctgcaggaattcggcacgagctcgtgccgcagttttgtgctttgagccactttttgacaaaaatggctccatttttccacagcgtggttttcttaaaatagtttaatgttttatagtctcatagtagtagtgttgctttctaagctataacagtcgactttattcttctactctgaaaaatcttgacttgtttgagtgtatataatatatataaagggagccttaatggattggttttcataatttaatattttttgtatttgctcttgtataattgtttttaacggaaagtattaaagaattgagggtggaattcttagaaccaaagttattcttaataaaaatcaccacatgcttggaccatgcaaaaaaaaaaaaaaaaaaaaacctggggggggggccgggcccccattcccccttaaggggggcggtttaacaatcccggggcg

SEQ ID NO: 20378 - DNA, 498 bp, Homo sapiens
  misc_feature (1)...(498): n = A,T,C or G
cggcgggtnnnnnnnnaattgacngccttngnaanaaatcgaccgcatgcangaattccgcacgagatggaagtgggtcagactgatatggccataagtcaagcaatgtatacagcccgtagaagttggaaaaggcaaagaatggattctcttccacggcctcaataagaaatgcagcctttgattttaacactgtaaggctcattttgtacttctggcctccagaaacttgggatgataaatttgtgctatttaagccactaagtttgtggtaatttgttaccacagcataggaaatgaatacaaatatcaaagtgtttgtggacatattttaagactacctcaggcaaccctctggtcacaaattatttatagttctcccacatgcaaaataaacttaccccttctaaggccccaaagtcttatcccattatagcatcaattcaaagttcagaatcttatcctctacgtaagtccagggaagatgagacttcttgg

SEQ ID NO: 20379 - DNA, 466 bp, Homo sapiens
  misc_feature (1)...(466): n = A,T,C or G
aatagacgccctaggaancgctccgagatacgcctcacgtgactctagaagatgcacagtatcgcaagcctatggatcaaaagaggagcttttgcctcgggagcaatcggagtaaccgtagacatacgtctggtgcgtcttcgctccccatccaatgattcagcccatcgaagtggagatgaccaaagtggtcgaaagagagtactgcacaggggctcaagagatagagaaaaaacacattgcctggaaatcacaggagagagaaaatctatgattgatcagttaaagcgtggagaacccagtcgaagtacttcttcagatcgccaggattcaagaagccatagttcaagaagaagttctccagagtcagatcgacaggtccattcaagatctgggtcatttgatagcagagacaggcttcaagaacgagatcgatatgaacacgacagagagcgcgagagagaga

SEQ ID NO: 20380 - DNA, 480 bp, Homo sapiens
cattcgcaccgcgctgcaggaattcggtacgagctttcttgcagtgttggtggcctctacacttctgttgtggttaagtacacagacaacatcatgaaaggcttttctgcagcagcggccattgtcctttccaccattgcttcagtaatgctgtttggattacagataacactcacctttgccctgggtactcttcttgtatgtgtttccatatatctctatggattacccagacaagacactacatccatccaacaaggagaaacagcttcaaaggagagagttattggtgtgtgattttagcctcacgtgagactccttttaagactaaaccatttgcattaaactagagccttaagtcaatctcagaaggtagcataaacaaataaaaattaactgtatggcatgatcagtggcggtatgtggaaacaacaacaaacaaacgaagctatctgagtgaactgctaatacagaaactta

SEQ ID NO: 20381 - DNA, 468 bp, Homo sapiens
  misc_feature (1)...(468): n = A,T,C or G
atttgcaccattgtccccgcctgcaggaattcggcacgagcgcagaagcgagatgacgaatggaacgtcatcgtttggaaagcgtcgcaataagacgcacacgttgtgccgccgctgtggctctaaggcctaccaccttcagaagtcgacctgtggcaaatgtggctaccctgccaagcgcaagagaaagtataactggagtgccaaggctaaaagacgaaataccaccggaactggtcgaatgaggcacctaaaaattgtataccgcagattcaggcatggattccgtgaaggaacaacacctaaacccaagagggcagctgttgcagcatccagttcatcttaagagtgtcaacgattagacatgcaataaatgttctgggtttaaaccatacnaacttacaaaaaaaaaaaaaaaaaaatttgggggggggcccgggccccaaatcccccttaaagggaggataa

SEQ ID NO: 20382 - DNA, 464 bp, Homo sapiens
  misc_feature (1)...(464): n = A,T,C or G
nttgcccgcctgaggttcggtagccaaacccagtggactcctgtgggctggattggcactgctgtccattcagggtggggcactggcctggctcacgtggtgggtgtactcctgggatatcatggagccagttacatacttcatcacatttgcaaattctatggtcttttttgcatactttatagtcactcgacaggattatacttactcagctgttaagagtaggcaatttcttcagttcttccacaagaaatcaaagcaacagcactttgatgtgcagcaatacaacaagttaaaagaagaccttgctaaggctaaagaatccctgaaacaggcgcgtcattctctctgtttgaaatgcaagtagagaactcaatgaaaagattaatcttacagtttaaatgtcgcagatttccttatgattgattttgcactaagatgttttgagtccatggtcatttgat

SEQ ID NO: 20383 - DNA, 491 bp, Homo sapiens
  misc_feature (1)...(491): n = A,T,C or G
cttacgaacgccnnganggannnttttgacccgcgctgcaggaattcggcacgagagcgccttctccttctaccctccggagctgcaacttcggttcctgcggaatgggctggccgctggcaccggccagggtgacttcggccccaacagtgacggatccttccacgcctcgtcgtcactaacagtcaaaagtggcgatgagcaccactactgctgcattgtgcagcacgcggggctggcgcagcccctcagggtggagctggaatctccagccaagtcctccgtgctcgtggtgggaatcgtcatcggtgtcttgctactcacggcagcggctgtaggaggagctctgttgtggagaaggatgaggagtgggctgccagccccttggatctcccttcgtggagacgacaccggggtcctcctgcccaccccaggggaggcccaggatgctgatttgaaggatgtaaatgtgattccagccaccgcctgac

SEQ ID NO: 20384 - DNA, 445 bp, Homo sapiens
  misc_feature (1)...(445): n = A,T,C or G
ggaggttcccaggagcccncaactgataccnatagatnaccgtacgagancctccctcccccagccaccaccctcaggtgcctccaattggtgcttcagccctggcccctgtggggaacaagtcttggggtcatgaagggctggaaacaagtgaccccagggcctgtctcccttcttgggtagggcagacatgccttggtgccggtcacactctacacggactgaggtgcctgctcaggtgctatgtcccaagagccataagggggtgggaattggggagggagaaagggtagttcaaagagtctgtcttgagatctgattttttccccctttacctagctgtgccccctctggttatttatttccttagtgccaggagggcacagcaagggagccctgatttttaataaatccggaattgtatttaaaaaaaaaaaaaaaaaaa

SEQ ID NO: 20385 - DNA, 501 bp, Homo sapiens
  misc_feature (1)...(501): n = A,T,C or G
gtggcgttnnnnnnaattgancgccttcggaattccgcacgagattttaagaagttaagttgatataatagcaaaatttctcccacccaaaactatgtcaacaattggatgtactcactgagtcaccccttactctgccactaatttatttccttgttgcttaaatgatgagagacatataatctccaccctcacggagttgtcatcaccctggagaggaagaagacagccaaaagagagaagtattgtcttgtagacttactagattcacatagtatcatccttctccagtgtgtaaggtgttgtctaaataggtccagttaaagaactacagggtagccatttttaaaaaaaaattttggccacgttttcaaattcacaggggagggggaatgtctcatactccagccctcctgagcctaggccctctgtgagatgtgtcaccatttcttggacaccatatgagacattccccctcggattagagatgctcaacctgcn

SEQ ID NO: 20386 - DNA, 475 bp, Homo sapiens
  misc_feature (1)...(475): n = A,T,C or G
aattagaccnactttcgcaccgcctgtcagaattcggcacgagaggagaccctcagtttcagagaatctttaccctccatcccggaaggatcagcacagggagaggccacagacaaccaggaggcccagcaaggccaccagcttggagagcttcacaaatgcccctcccaccaccatctcagaacccagcacaagggctgctggcccaggccgtttccgggacaaccgcatggacaggcgggaacatggccaccgagacccaaatgtggtgccaggtcctcccaagccagcaaaggagaaacctcccaaaaagaaggcccaggacaaaattcttagtaatgagtatgaggagaagtatgacctcagccggcctactgcctctcagctggaggacgagctgcaggtggggaatgttccccttaaaaaagcaaaggagtctaaaaagcatgaaaagcttgagaaaccagagaaggag

SEQ ID NO: 20387 - DNA, 460 bp, Homo sapiens
  misc_feature (1)...(460): n = A,T,C or G
nattgaccgccatagaaacatgccccccgaggggagagttctgattgtcaaattgtagatggagaatggtaccgtgccccagtagagaaagtcgagtctcctgccaaaatacatgtcttctacattgactacggcaacagagaggtcctgccatccacccgcctgggtaccctatcacctgccttcagcactcgggtgctgccagctcaagccacggagtatgccttcgccttcatccaggtgccccaagatgatgatgcccgcacggacgccgtggacagcgtagttcgggatatccagaacactcagtgcctgctcaacgtggaacacctgagtgccggctgcccccatgtcaccctgcagtttgcagattccaagggcgatgtggggctgggcttggtgaaggaagggctggtcatggtggaggtgcgcaaggagaaacagttccagaaagtgatat

SEQ ID NO: 20388 - DNA, 508 bp, Homo sapiens
  misc_feature (1)...(508): n = A,T,C or G
agggancnnnnnaattgatcgcccggctgcaggaattcggcacgagaaaaaatcagtgcacaagaattgggctggttaggcccagcaccacactgaagtgggctcagtggtttttggagtgaagaagccttactccctgcacattccctcatgctcccacacaagtccagcaatggaaatgcttgggttcctcttgctttgtcaggggactcaggagtcgaccaagggaaaccatttggccccgtgaggaatgggcattgtcagtatccgtcctgaacggggcctagtcaggaagcggtctagaagtgtacggtcacggtcgcctcatgaaagtgtgtagcaggtggctctcatgaaaaataccaagtctggatcatccatgtggcagctttgcatagggagaggatagctccgaactggaactgaactgccttctctgcacgcttgaccaaagcagngatgagggcggccagtacctgcggngtgcgtggtanggttaaagaaaagg

SEQ ID NO: 20389 - DNA, 489 bp, Homo sapiens
  misc_feature (1)...(489): n = A,T,C or G
agagttccagcaggcccaatgaagccncctgcnagctagcgaaanncgccgagctgagcctcgattttgggctcaggtgatccctcagcctcacaagtagctgggactacaggcacgcgccaccatgcctggctaatttttgtattttttgcggagatggagtttcgccgtgttgcccaggctggtctccaacttgtgaatgcaagtgatccacccactttggcctcccagagtgctgggattacaggcgtgagccactgagctggcctaaagtagcatttcttgtataatttgactaagttggaagattatataatgctttatttcagagaggttaggcctagagattaaatgatgttttattcaaattacctttgtaatggatttagatttttttttggagcattttcttgcctttgacatattttaaataacttcattgtttgatacttttattttaagatattattattgtggtggaactagcct

SEQ ID NO: 20390 - DNA, 471 bp, Homo sapiens
  misc_feature (1)...(471): n = A,T,C or G
cattcgcaccgccattgcaccgccntgcaggaattcggcacgagtgccgctgttgctgctcgtgttgaatctagaaccgtagccagacatgggactggaggacgagcaaaagatgcttaccgaatccggagatcctgaggaggaggaagaggaagaggaggaattantggatcccctaacaacagtgagagagcaatgcgagcagttggagaaatgtgtaaaggcccgggagcggctagagctctgtgatgagcgtgtatcctctcgatcacatacagaagaggattgcacggaggagctctttgacttcttgcatgcgagggaccattgcgtggcccacaaactctttaacaacttgaaataaatgtgtggacttaattcaccccagtcttcatcatctgggcatcagaatatttccttatggttttggatgtaccatttgtttcttatttgtgtaactgtaagttcaca

SEQ ID NO: 20391 - DNA, 470 bp, Homo sapiens
  misc_feature (1)...(470): n = A,T,C or G
catcgcaccgcccatcgaccgccctgcangaattcggcacgaggaaaaagggaaggaagagggccaagccccgcctggagcaggacagctccctcatgagttacctgtcaggcgaggaggttgaagatgacctggacctggttggtgccccggagtacgaatgctatgccccggacacagaggagttggaggcagagagaggaggtggcagaacagaggatggccacagctgcggagcaagcagggagtacatggagaggctctgcccatcccacatttgcagggaaaagcattggcacgcaacgcagcatgtggctttattgaggcagctgatggagttaaaccatctgctcttctgctacttcaacattttctagcttttccgtgtatctaaacacaatttgctacacaagtcactgtttttttttgcatgcactgtgggacattaaaaattaaatggccatcttatc

SEQ ID NO: 20392 - DNA, 465 bp, Homo sapiens
  misc_feature (1)...(465): n = A,T,C or G
nattgagcgcaatgaggaaacggcacgagccctcgtctacctcctcctccgaccccatcctagacttcaacatctccctggccatggccaaagagagggcccaccagaaacgcagcagcaaacgggccccgcagatggactggagcaagaaaaacgaactcttcagcaacctctgagcgccctgctgccacccagtgactggcagggccgagccagcattccaccccacctttttccttctccccaattactcccctgaatcaatgtacaaatcagcacccacatcccctttcttgacaaatgatttttctagagaactatgttcttccctgactttagggaaggggaatgtgttcccgtcctcccgcagtcagaaaggagactctgcctccctcctcctcactgagggcctcatcctaccgggggtgcctttgccaccctgcctgggacatcgctggaacctgg

SEQ ID NO: 20393 - DNA, 534 bp, Homo sapiens
  misc_feature (1)...(534): n = A,T,C or G
gatggtggggnnnattgcgtcggctgtangaannnngcacnatttcgcaccggctgcaggaattcggcacgagctccactcccagccccaccagcagcctctctagcgaagacaagcagcacctggccgtagagctggccgacaccaaggccaggctgcggcgcgtcaggcaggagctggaggataagacagagcagcttgtggacaccagacatgaggtggaccagctggtgctggaactgcagaaagttaagcaggagaacatccagctagcggcagacgcccggtctgctcgtgcctatcgagacgagctggattccctgcgggagaaggcgaaccgcgtggagaggctggagctggagctgacccgctgcaaggagaagctgcacgacgtggacttctacaaggcccgcatggaggtagggagccttgctgtgaggcccctggatggggctgctggaaattcctgagaagcacattcagactgacctgtccttgngggcttggaggagcggagccacagctgtttcagca

SEQ ID NO: 20394 - DNA, 247 bp, Homo sapiens
  misc_feature (1)...(247): n = A,T,C or G
cttggacccgcgcngtatcccccgcgctgcaagaattcggcacgaggccgctggaagctattgggctggcagcaggacgactggctgtcctcctgcccacccacactgacggcatcttcccagttccccaaggcacgccttcttcccaggcagctctaacagccctttcatgaaggtaatgctagtcttctgtccatcagtgccatttcctgtagaactaaaggctgttccaagaatgtgggcggca

SEQ ID NO: 20395 - DNA, 509 bp, Homo sapiens
  misc_feature (1)...(509): n = A,T,C or G
aganaaacgattgatncgcctgtngaatattgcaccgcctgtaagaattcggcacgagtgcctgcatgctgcccggtacccacacgccgcagtcaacgggctgtttttggcgccagcgccgcggtctggagaatgcctgtgcctcaccgactgtgtgcccctcttccacagccacctggccctgtccgtcatgttggaggtcgccctcaaccaggtggatgtgtggggagcacaggccggtctggtggtggctggttactaccatgccaatgcagctgtgaacgatcagagccctgggcccctggccttgaaaattgctgggcgaattgcagaattcttccctgatgcagtacttattatgttggataatcagaaactggtgcctcagcctcgtgtgcccccggtcatcgtcctggagaaccaaggtctccgctgggtccctaaggataagaacttattgatgtggagggactgggaagagtcacggcagatggtgggagctctactgg

SEQ ID NO: 20396 - DNA, 500 bp, Homo sapiens
  misc_feature (1)...(500): n = A,T,C or G
nttagcccgcccttaggaattcggcacgaggtggaagggcacatagctaatctgccaactcatggaattaggagctgcccgcttttcaaaggaagacacacaggcagccaacaagcatatgaaaaaaagctcaacatcactgatcattagagaaaggcaagtcaaaaccagagtgagataccatttcttgacagattctgagattgtggagaaaagggaacgcttatgcactgttggtgggagtgtaaactagttcacccattgtggaaaacagtgaggcaattcctcaaagagccaaaaatagaactaccgtttaacccagcaatcctggtactgggtatatacccagaggaatttaaaatcattcgaccataaagacgcatgaacacgaatgtttattgcagcactattcacagtagcanaggcatggagtcaacctaaatgccccatcataacagattggataaagaaaatgtggtacatatacaccatggnatact

SEQ ID NO: 20397 - DNA, 459 bp, Homo sapiens
  misc_feature (1)...(459): n = A,T,C or G
aggagattcatggctgagctcggctcctctcccacttgcgtaggcctgtactcagatgacttcctcttagtcatcttgttagcaaagctttccttgaatatcctgccgaaaatattcctgctgggtgcagcggctcacgcctgtgatgcaaacactttgggaggccgaggtggaagggctgcttggggccagaagttcaagaccagcctgggcaacctggagcctggtccaaagacagctgacccccgaacatcacacgggtgtgaattgcgtcggtccagttatacttacgcgcttacccatggattttcctccacccctgagacagcaagaccagcccctctcctacctcctcctcctccgcctactcaacgcgaagactacaaggaggaagacctttatgatgatctacttaataaatagcgagtacattttctcttanaaaaaaaaaaaaaaaaa

SEQ ID NO: 20398 - DNA, 475 bp, Homo sapiens
ccggccccctttcgcccgtcctgcaggaattcggcacgaggcttcgcctcagtttgaacattgaccctgatgcaaaggtggaagaagagcccgaagaagaacctgaagagacagcagaagacacaacagaagacacagagcaagacgaatatgaagaaatggatgtgggaacagatgaagaagaagaaacagctgaggaatctacagctgaaaaagatgaattgtaaattatactctcaccatttggatcctgtgtggagagggaatgtgaaatttacatcatttctttttgggagagacttgttttggatgccccctaatccccttctcccctgcactgtaaaatgtgggattatgggtcacaggaaaaagtgggttttttagttgaattttttttaacattcctcatgaatgtaaatttgtactatttaactgactattcttgatgtaaaatcttgtcatgtgtataaaaata

SEQ ID NO: 20399 - DNA, 522 bp, Homo sapiens
  misc_feature (1)...(522): n = A,T,C or G
agagatgtnnnnnaatcggcggctgcggaattcggcacgatctcagatggcctccaaagacttcatatgctccagaactgctacttccgcgacccctatcacgtgtggtaccaaggcaacgcgtcgctggggggacacctaacgcacgtgctggaaggcccagacaccaacaccacgagcattcagctgcagcccttgcaggagcccgagagctgggcgcgcacgcaaagtggcctgcagtcctagctgctccagtttcacggcctcgtgcgcctggggcaccaggagcggaccttgggctttcctctgaccatacgctgcttcctgggctgtgagctgcctcccgagggctctagagcccatgtcttcttcgaagtggctgtgaaagggagctcctttgtgagtttacggccggagagagccttgtggcaggcatacacccatgtcacatccggagtggtcaccttcaccctgcagcagctcaatgcctacaaccgcactcggtatgaactgcgggaattc

SEQ ID NO: 20400 - DNA, 524 bp, Homo sapiens
  misc_feature (1)...(524): n = A,T,C or G
gatgtaaagggggganannngaaacatgcacggcntcggaanttngcacgcctgtccgaatggcctcgacatccaacaatgaatatgttcaacaaaaagaacgaaaagaggatagaataagattaatacagtttccctttttataatgagaaaaaaagcacaatttaaagtttcaggcaatttaacgtcaggttttgggaacactttctggcgtttggtccacgacatccaactacaaattaaaaataaattactatgttgcaatttacattttaaaacaagtccatgaataaaaagaaagcgactttcataaacggggactttccccctcccttcaacataggataaaataatatcttacaggtgagaggcaaggaagaaggcaagagaggggagacgggaggaggggaaagcaggtctctgaaaagcaagaagaaacttacgtgttatctggagtaacactgtcctttaataaaccaacattttgctgtctctgtataaaacagtttacgggtttgtttatt

SEQ ID NO: 20401 - DNA, 384 bp, Homo sapiens
  misc_feature (1)...(384): n = A,T,C or G
tgggttctcnggggggnnnnagnnaaaattgatcggctgcggaatttggcacgaggagccccactgccctgccatccccagtactgccgggaagtgtcggccgtccttgtcattagtggtcatatgaaaatggccccaagaaggagatgattctttcaagggacacaggcagcttctctccttgtcctctggggaggtgctgacccctcagaaaccccttcccccaacttgaccccaggctgaacagaccactgcatctcactgggccagcagcccccccagcccccagccttggtggggaccaagcagcctttcccgtcccctcctcgacccgtacagttgagagccaggggctggtgtgtgggagctgctacctggcagttt

SEQ ID NO: 20402 - DNA, 493 bp, Homo sapiens
  misc_feature (1)...(493): n = A,T,C or G
agggggtnnnnaattgacgccgtggattcgctcgagccacatcttccagacgccgagctgctgcagatccaagccctgtttcaacgcagcggggaccagctggccgaggaacgggcacagatcatctgggaatgtgcaggggaccaccgtgtggctgaggccctcaagaggctgcgcaggaagaggcccccaaggcagaaacccctgggccactcgctacaccactgcagccgcctcagaatcctggagccccactctgcactggccaacccacagagtgccacagagacagcctccagtgagcagtatctgcactctaggaagaaaagtgccaggatccgccggaactggaggaagtcaggccccacaagctacctccaccagatcagacactgatccagggaaagagccaggaatggcagtgtcttccctcttgccaaaaggcctggggaggtgaaggaagagagactttangcaagcagcccaaaggggt

SEQ ID NO: 20403 - DNA, 502 bp, Homo sapiens
  misc_feature (1)...(502): n = A,T,C or G
agagcgtgnnnnngaattgaaagccctagatcgtgctcggaattggcacgagcccaacaaacaagtcctgtaagtgcaatgcttgtgctcgtgaagtcattatcaggaccaagagaacatatcgtggacctggagatgctgacagtcagcagtatagggaccttccgcacaagctctgtgttaagattgacaataatagtggggccattttcattttagtcttttctaagagtcaaccacaggcatttaagtcagccaaagaatattgttaccttaaagcactattttatttatagatatatctagtgcatctacatctctatactgtacactcacccataattcaaacaattacaccatggtataaagtgggcatttaatatgtaaagattcaaagtttgtctttattactatatgtaaattagacattaatccactaaactggtcttcttcaagagagctaagtatacactatctggtgaaacttggattctttcctata

SEQ ID NO: 20404 - DNA, 467 bp, Homo sapiens
  misc_feature (1)...(467): n = A,T,C or G
gtgggcnncccattganatcgatccgcgctgcaggaattcggcacgaggcggtcatggagcttttcaggcccaagggggagagcaaggacctgctgtttatcttgacagcgaagtacaatgcctgcatcctggagtataaacagagtggcgagagcattgacatcattacgcgagcccatggcaatgtccaggaccgcattggccgcccctcagagaccggcattattggcatcattgaccctgagtgccggatgattggcctgcgtctctatgatggccttttcaaggttattccactagatcgcgataataaagaactcaaggccttcaacatccgcctggaggagctgcatgtcattgatgtcaagttcctatatggttgccaagcacctactatttgctttgtctaccaggaccctcaggggcggcacgtaaaaacctatgaggtgtctctccgagaaaagga

SEQ ID NO: 20405 - DNA, 455 bp, Homo sapiens
tgaggggacatcggcttgcactgacgaattcggcacgaggtgctccttccgggtggccccgaggtaatggaacttaatcgatctgagagtttatgtcatgaaaactcattcttcatcaatgaagctttagtacaaatgtcatttaacactttcaacaaactgaatccatcagttatccatcaggatgccacttaccctacaactcaatctcattctgacttggtgaggactagtgaacatcaagtagacctcaaggtggacccttctcagccttcgaatgtcagtcacaaactgtggacagccgctggttccggccatcagatacttcctttccaagaaagcagcaaggattcttgtaaaaatggtaattaacactttaaacatcatctgtatagtttgaacaagaagttgtccctctgaatggttggctcttgtgtagagtgaatcaaagtcct

SEQ ID NO: 20406 - DNA, 469 bp, Homo sapiens
  misc_feature (1)...(469): n = A,T,C or G
catggacccccattgcaccccatgcacgaattcggcacgagaaccctgagggctcccccaacttgccatgccctgtcccttagtagatgagttgctcctgattggtcattgggtttgggtgaggcctggaggcttcagaggtgaatttatgcttgggaagcctgatcccaaacctgaagggaagggacttggatctccttatattgaataagctgtttggaggaaggtgtctgtctgggaggatggggcagtaaatgaggttggcagagtggcagtgggggctctgcagagccagccttggagcctgctcattctgggcccttgctgccaaggagcccagcctcacctagcangaaaggagatgaaggccctcctcccaggaggtagggtcttggctgccccgaacttaaatgcttttgaaatctcttagatgtggaaatattttttcgaacctgaaaatgcagctggg

SEQ ID NO: 20407 - DNA, 528 bp, Homo sapiens
  misc_feature (1)...(528): n = A,T,C or G
agcgtggggnnnaattctcggctgcggaatnnncncnattgcaccgcctgcaggaattcggcacgagcttaaacatccctaaaggcagcagccccagagtcctgcagccagatctcagaaggcggagggggtggctgtggggactgctgggacatgtggtccacctcttccctttacctgtacaactcctactattccagatgtccattcaaatcagtagttctcaatttgggttgcacaacagaaccatgtggggaggcttataaaatagtgatgcctggatcctaccccagatattcttatttaattatccttgtgggctagcgtgggcatgagaatttttttaaagctctgagataattctcacgcacagccaaatttgagaaccacaggtttggatgatgcttctttggagaagccctccctgacctccaaacacttggctctttagcattcattctccccttatatggactggcagtgcattaaacttattacacctccatgtaaaacaggactgttcccaan

SEQ ID NO: 20408 - DNA, 409 bp, Homo sapiens
  misc_feature (1)...(409): n = A,T,C or G
gggtggggnattcacggctgcggaattcgacgatcaggcaccggcttttacgcggacacctgtgtacactcacaggtggagtgggcaggtgctagcctgactgcgtgtctgcccatgcaggggaacacggtgctcggggcttaagcccccaacccatcactccctgcgcagcctcggcgtttgcacagtccctgcctgaggcctgagccattccccaaaggcttcctgggccagctgccccgctgacctccgttctgcctctggtggggttgccttccctggccaggtgagtcctgacagtgcctctccctcctggggcctccaaggaaagtattttgacatctctctctcttctgtttttattgacttgttaataaaggactttgtagtgaaaaaaaaaaaaaaaaaa

SEQ ID NO: 20409 - DNA, 503 bp, Homo sapiens
  misc_feature (1)...(503): n = A,T,C or G
agggggattctgcncgncctgcaggaattcggcacgagcaccaaatcacagtcaagactgtgtttttgttcctagtttgatgcccttatgtcccggaggggttcacaaagtgctttgtcaggactgctgcagttagaaggctcactgcttctcctaagccttctgcacagatgtggcacctgcaacccaggagcaggagccggaggagctgccctctgacagcaggtgcagcagagatggctacagctcangagctgggaaggtgatggggcacagggaaagcacagatgttctgcagcgccccaaagtgacccattgcctggagaaagagaagaaaatattttttaaaaagctagtttatttagcttctcattaattcattcaaataaagtcgtgaggtgactaattagagaataaaaattactttggactactcaaaaaaaaaaaaaaaaaactggggggggggccggggccccaattccccctatagggagcggataaca

SEQ ID NO: 20410 - DNA, 456 bp, Homo sapiens
  misc_feature (1)...(456): n = A,T,C or G
ggggcccccaattgatcngcgctgcaatagttcggcacgagccaggacgaagtgctcggcggcatgacaccgctaaagaaaaccaaagctctcatcggagagatggggatgactttttccagtgcttatgtgccaagtgctctctgctgccccagcagagccagtatcctgacaggaaagtacccacataatcatcacgttgtgaacaacactctggaggggaactgcagtagtaaatcctggcagaagatccaagaaccaaatactttcccagcaattctcagatcaatgtgtggttatcagaccttttttgcagggaaatatttaaatgagtacggagcccccgaagcacgtggactataacacgttcctctgggttggagttactggtatgccttggaaaagaattctaagtattataattacaccctgtctatcaatgggaaggcacgcgag

SEQ ID NO: 20411 - DNA, 455 bp, Homo sapiens
  misc_feature (1)...(455): n = A,T,C or G
gggngggnaattgaacnccnntnaattgtacccggctgcaggcccgtgcccaagagcccctctgtggacaagtacaacgtgagcggcaccaacgggacctgcctgctggccagcatggggctgcagctgaacctcacctatgagaggaaggacaacacgacggtgacaaggcttctcaacatcaaccccaacaagacctcggccagcgggagctgcggcgcccacctggtgactctggagctgcacagcgagggcaccaccgtcctgctcttccagttcgggatgaatgcaagttctagccggtttttcctacaaggaatccagttgaatacaattcttcctgacgccagagaccctgcctttaaagctgccaacggctccctgcgagcgctgcaggccacagtcggcaattcctacaagtgcaacgcggaggagcacgtccgtgtcacgaaggc

SEQ ID NO: 20412 - DNA, 530 bp, Homo sapiens
  misc_feature (1)...(530): n = A,T,C or G
ggtttggggnnnaatggacggccgtcngaannnnncncaattgcaccgcctgcaggaattcggcacgagcccaaatgtcagaatgcacccatgtctgaggtcatccttcctttgaaatacctgccacgatgactgcagctcctgcaggtttccctccccaggtcccgtgggaagatgtccgttatctctttgatgagatcatgtatggaggccacatcacagatgacggggattgcaaactgtgtcgggtgtatttagaagaattcatgaatccatctctgctagctgccctgtcaggaacacatgcatgtggtgaaaaaccgagacttccagccaacagccatgtgagcgagccatcttggaagtggatcctccagccccagtcaagccttcagatgactgcagctttggccaacatcttgactgcaacttcctgagagaccctgagcaagaatcacaccatgaagatgttcctagttttctgattctcagaaactggctgccatgtgaagaaagacatgtttgcttcc

SEQ ID NO: 20413 - DNA, 476 bp, Homo sapiens
  misc_feature (1)...(476): n = A,T,C or G
ggtggggnngggnngaccatgagnccttttgatacgcgctgcaggaattcggcacgagatccaaggagaagtaccgcctgcttgaccagagagacaggatcatgcggcaagctcgggtgaagagaaccgatctggacaaagcgaggacttttgttggcacctgcctggatatgtgtcctgagaaggagaggtacatgcgggagacccgtagccagctgagcgtgttcgaagtggtcccagggactgaccaggtggaccacgcagcagctgtgaaagagtacagtcggtcctcggcggatcaggaggagcccctgccccacgagctgcggcccttgccagtgctcagcaggaccatggactacctggtgacccagatcatggaccagaaggagggcagcctgcgggattggtatgacttcgtgtggaaccgcacgcgtggcatacggaaggtattggctgcctccaacctggatgct

SEQ ID NO: 20414 - DNA, 476 bp, Homo sapiens
  misc_feature (1)...(476): n = A,T,C or G
cgtgggntannnnnnnaaattgacctctctgcaggaattcggcacgagctgaagccgagcgtcacttcggctcccacggcagacatggcgacattgacagtggtccagccgctcaccctggacagagatgttgcaagagcaattgaattactggaaaaactacaggaatctggagaagtaccagtgcacaagctacaatccctcaaaaaagtgcttcagagtgagttttgtacagctattcgagaggtgtatcaatatatgcatgaaacgataactgttaatggctgtcccgaattccgtgcgagggcaacagcaaaggcaacagttgcagcttttgcagctagtgaaggccactcccaccctcgagtagttgaactgccaaagactgatgaaggccttggttttaatgtgatgggaggaaaggagcaaaattcccccatttatatctctcgcataattcctggaggggtggctgn

SEQ ID NO: 20415 - DNA, 473 bp, Homo sapiens
  misc_feature (1)...(473): n = A,T,C or G
acgagcgggtgnaatagaatacatggcatcggaattcggcacgaggttagatttatagagttatttcttacttgctatatttctttgcactaaaaaagagctatgtgtttgttttataggacactttagtaccgtattgcctacaataactcactttgctccttaaattccaaactctgggaagttgataaataacttccatgatcacttgtaaaagttacatgcacatctgaaaaaaaatcacaaatctctatgacagtaggttatgttttgagcttgttaccttgcagcattcttctctgttccataggtgaaaacaaagggtgacagaggttatcaggcaggaaatgcctaaatagatacatctctgcatgggacaatttctcatattcatgtattccataaacagtgttttttctctgtttaagcagactgttgtttcttctgagtcagcgatatgagatcttccgtgg

SEQ ID NO: 20416 - DNA, 459 bp, Homo sapiens
  misc_feature (1)...(459): n = A,T,C or G
nttttgccccgcgctgtatgaattcggcacgagggacagccaagtgccaccggagcctaccctgccactggcccctatggcgcccctgctgggccactgattgtgccttataacctgcctttgcctgggggagtggcgcctcgcatgctgataacaattctgggcacggtgaagcccaatgcaaacagaattgctttagatttccaaagagggaatgatgctgccttccactttaacccacgcttcactgagaacaacaggagagtcattgtttgcaatacaaagctggataataactggggaagggaagaaagacagtcggttttcccatttgaaagtgggaaaccattcaaaatacaagtactggttgaacctgaccacttcaaggttgcagtgaatgatgctcacttgttgcagtacaatcatcgggttaaaaaactcaatgaaatcagcaaactg

SEQ ID NO: 20417 - DNA, 465 bp, Homo sapiens
  misc_feature (1)...(465): n = A,T,C or G
gtggatctnnnaattgatttcgatgacgaattccgcacgagggactatcaggatgccatgcagcatgctgcagagtcgcgggatgctgagctggcccagaagttgctgcagtggttcctggaggaaggcaagagggagtgcttcgcagcttgtctcttcacctgctatgacctgcttcgcccagacatggtgcttgagctggcctggaggcacaacctcgtggacttggccatgccctacttcatccaggtgatgagggagtacctgagcaaggtggacaaactggatgccttggagagtctgcgcaagcaagaggagcatgtgacagagcctgcccctctcgtgtttgattttgatgggcatgaatgagacccagctgattgcactaagccctgccgtgggcccagcccctgccagcttcccctatggatatgcctctgctcccaacttcgccagcctccaatg

SEQ ID NO: 20418 - DNA, 468 bp, Homo sapiens
ctcgccccgcctgatagaattgcgctcgagcggagaagtaaagaaataaatttctcccaccctaaaccagtctttgagtgattgcagtatgactccatttccctggtgcattcatataatagttcacctggtgagaacaatgaagattatttacaatgctaccctgctttttctggtgtcctgaacctggaagttgtgctttttaagtcttatgatgtaatcagcgcgatttcacttcctgaatttcgatgaattctaagacatgggcaagatcgggttgtaagacctctgagatttaaggccatgccctggatcatggtgaacttaccaaagcaaacaatgcctgtgagatggtcctgcagcagccaaccagtgaactcttttggtgacatcctgttcttgttggataactttatattcctataaatccattaaggccccaataaagtttgtctctaaaaaaaaaaa

SEQ ID NO: 20419 - DNA, 455 bp, Homo sapiens
  misc_feature (1)...(455): n = A,T,C or G
gccccncccaattgaccccgcgctgcagtaattcggcacgagccattatcctgggccaggatctccatcacagaaatccaaggaaacaagctgtggctgtgccattacccccttactccctcccgttagccccttgctcccagacctcaaacacagagacaaaaccagaactctgctgcaacgtgtttattatgtgccaaaaaaactacaccacagcttactccacacatctgtaggagagtgcagtcttgcctgcatatactacaatgaggtagagacttcacacacagcttcacaaaacccacagagtagctgggatatgcaacaatgcaacgtcagctcagcaggagggaggggttatgacactggttctttggcacacagcttccctaggaggggcaagtagtttttgtgggttttttggttctttttttaaaaaaacggcacgagggggg

SEQ ID NO: 20420 - DNA, 477 bp, Homo sapiens
  misc_feature (1)...(477): n = A,T,C or G
cttcgacccgcctcatttgatccgcgctgcaggaattccgcacgaggttgtcctgtgctggggctgacaggctccaaacaggcatgcgaggtgcctttggaaagccccagggcactgtggccagggttcacattggccaagttatcatgtccatccgcaccaagctgcagaacaaggagcatgtgattgaggccctgcgcagggccaagttcaagtttcctggccgccagaagatccacatctcaaagaagtggggcttcaccaagttcaatgctgatgaatttgaagacatggtggctgaaaagcggctcatcccagatggctgtggggtcaagtacatccccagtcgtggccctctggacaagtggcgggccctgcactcatgagggcttccaatgtgctgcccccctcttaatactcaccaataaattctacttcctgtccaaaaannnnnnnnnnnnnnnnnnnnnnnnnnnn

SEQ ID NO: 20421 - DNA, 480 bp, Homo sapiens
  misc_feature (1)...(480): n = A,T,C or G
cattcgacattgactcgcgctgcaggaattcggcacgagctcttcggcaaggaggcggacaagctggagcaggccaacgatgacgcgcgcaccttctacatcatcgagcgcgagccgctcatcaacacctacatctccgtgcccaaggagaacagcacgctcaactgcgccagcttcacggcgggcatcgtggaggcggtgctcacacacagcggcttccctgccaaggtcacggcgcactggcacaagggcaccacgctcatgatcaagttcgaggaggcagtcatcgctcgagaccgggccctggagggccgctgaccctgccggagataaaggatacagagagcccctcntncntnannangnngngantgaatatataaatattaaaaaaagaaaaaaaaggtggggntggtgtggggggggggggggcccccccccccttttctttatgagaagttaaacaaaataatcgtgcgg

SEQ ID NO: 20422 - DNA, 492 bp, Homo sapiens
  misc_feature (1)...(492): n = A,T,C or G
ggganaagannccttgcancgcctgcatgaattcggcacgaggtgctcaggccctggctggaagtctgagctctcaacaggtgacaggaacaactttgcaagtccctggtcaagtggccattcaacagatttccccaggtggccaacagcagaagcaaggccagtctgtaaccagcagtagtaatagacccaggaagaccagctctttatcgcttttctttagaaaggtataccatttagcagctgtccgccttcgggatctctgtgccaaactagatatttcagatgaactgaggaaaaaaatctggacctgctttgaattctccataattcagtgtcctgaacttatgatggacagacatctggaccagttattaatgtgtgccatttatgtgatggcaaaggtcacaaaagaagataagtccttccagaacattatgcgttgttataggactcagccgcaggcccggagccaggtgtatagaagtgttt

SEQ ID NO: 20423 - DNA, 503 bp, Homo sapiens
  misc_feature (1)...(503): n = A,T,C or G
agtggtttttttatgcgtccgtggacttcgccgaggagaagccgtnagtgcttcctctaagtgaaaaggtgaaagttctcgacttaatcaggaaagacaaaaaatcctatgctgaggttgctaagatctacgggaagaatgaatcttccatccgtgaaattgtgaagaaggaaaaagaaattcgtgctagttttgctgtctcacctccaactgctaaagtgacggccacagtgcgtgataagtgcttagttaagatggaacaggcactgcatttgtgggtggaagagatgaacagaaaacgtgtccccattgacagcaacatgttgcgccagaaagccttgagcctataccaagacttcagcaagggatgctctgaaactgacaccaagccatttactgcgagtaagggatggttacacagattcaggcatagattctcacatcattacaagaagaagaagggcggatcacctgaggttgggagctcgagatcagcctgaccc

SEQ ID NO: 20424 - DNA, 486 bp, Homo sapiens
  misc_feature (1)...(486): n = A,T,C or G
ctttgacacgccccgcnttaagccccgcgctgcaggaattcggcacgaggtcaatctaaacagcacaagtatgaaaattctggagcctccactaatggcatctgttacttgctgagagaccgagaaagaaggagagaggagtgaggacaggcacttctgccttcatgcccaaatgttgcatttgccaagacaaccctggcctgccacgcctctatcctgtgcctataaaaaccccgaagaccctagcaggcagacctacaggtggctggacatggagaggaacacatcggttgaaaaagacacaagaggctagatgtcgagaggacgtcaaagagagcacgccagcggaagagcacaccgatagacgttggcacgccgcacggccatccactggcagaacgaggcagagtttggctggggcagtcggaggagagcccaggccgctaagcagccccactccaggggaaagccatctcccttctggcn

SEQ ID NO: 20425 - DNA, 485 bp, Homo sapiens
  misc_feature (1)...(485): n = A,T,C or G
tgaaagtgccagaaaacaccactgagacctcgctgagcgcctcggaancccacgaggnccagagtcccggcctgagtgtcggccggattcctccttctcccttcgcctcaagcggaagaccattcctcaagaattttgtatccaaggcccaaaagtttgttacccaagatgatgaatgctgacatggatgcagttgatgctgaaaatcaagtggaactggaggaaaaaacaagacttattaatcaagtgttggaactccaacacacacttgaagatctctctgcaagagtagatgcagttaaggaagaaaatctgaagctaaaatcagaaaaccaagttcttggacaatatatagaaaatctcatgtcagcttctagtgtttttcaaacaactgacacaaaaagcaaaagaaagtaagggattgacacccttctgttttatggaattgctgctgatcattttttctttaaaacttggatagattc

SEQ ID NO: 20426 - DNA, 464 bp, Homo sapiens
  misc_feature (1)...(464): n = A,T,C or G
naggttgcgctgtgaatcgcccgagcttaacagtggcactataatattttgggctggacaattcttcatttttagggagctggtctggctcttttaagatgtggagcagcagccctggcctctacccaccagatgcagtattatcttcccctccagttgtgaccaaaaaaagtctgcagatcttgtcaaatatccctggcagagagggggcaaaactacccccagttctatacatatattataaggcatttgctagaatttcagaattatcatttttcacaagatactttggccctagaaatgctgactcaaagccattattttgggccttctaccaatgacgtgtttgtttcccttgaaggcttgccagaatctttatgtaggtgactctagatcatggttatttattttcattttctcagatattaaagcatattttcctcttgagttttgaatggtaaggg

SEQ ID NO: 20427 - DNA, 468 bp, Homo sapiens
  misc_feature (1)...(468): n = A,T,C or G
agctggtantnanaactgatgagtaacgcgcatttncgcacgagcatgattaatggcagctggggcctcagctgggctatcagctggaacatccccccccccacacagtgttctcttctcatgggccaatttgagcttcctcccagcatgatgggctccaggtgaataaggctaaagtgttagcatttttatgacacagtgctatggattgaacatctctcccaaaatttcgtgtgttggaaacttaatctctaaatctctaaatttatatgttgatggtgtttggaagcggggttttaaagaggcaattagaaatagataaggtcatcagggcccccatgatgcaactggtggctttataagaagaggaagaaagaccttagatagcacatttgcttttttagtgatttgatgcctcctgccgtgtcatgacaaagcagaaaggttctcaccagatgcagccacctg

SEQ ID NO: 20428 - DNA, 521 bp, Homo sapiens
  misc_feature (1)...(521): n = A,T,C or G
ngggggnnnnaggggccnggggnnnnnnnnnaaactgatcggcttcggaattcggcacgaggcaacctgtcccgactctagccgcctcttcagctcgccatggatcccaactgctcctgcgccgccggtgactcctgcacctgcgccggctcctgcaaatgcaaagagtgcaaatgcacctcctgcaagaaaagctgctgctcctgctgccctgtgggctgtgccaagtgtgcccagggctgcatctgcaaaggggcgtcggacaagtgcagctgctgcgcctgatgctgggacagccccgctcccagatgtaaagaacgcgacttccacaaacctggattttttatgtacaaccctgaccgtgaccgtttgctatattcctttttctatgaaataatgtgaatgataataaaacagctttgacttggggaannnnnnnnaaaannnnnnnnnnnnnntcctggggggggggccgggccccaaatcccccttaaaggggggggaaaaaaaaacaaggggcc

SEQ ID NO: 20429 - DNA, 479 bp, Homo sapiens
  misc_feature (1)...(479): n = A,T,C or G
atccgaccccccnnaattgctccgcctgcaggaattcggcacgagcacactagcaccctggctgctatgaaactgatgacctccctggtaagagttgccctccaactgagtctgcacgaagatatcaatcagcgtcagtatgaggctgaaagaaacaaggggccagggcagagggcacctgagcggctggagagcctgttggagaaacacaaagagctgcattaatactacattgtcaaagacaaagacgaacatgagacatgcgatatgagttttaaaaggagagaagagcaaaaaaacaatacagctatccaaggagcaagtgctgagcttgtgaaaaaacagcttctattttattaaataatagtgttcctgcagggatgtctgaagtactctgcaaggctaattaggacagatcaatgtacacttacctctccagaaggctgaaaggtgtgtagtgactatgtgtcattaaaaat

SEQ ID NO: 20430 - DNA, 473 bp, Homo sapiens
  misc_feature (1)...(473): n = A,T,C or G
ngggttcatagacctcgtgctgcattcggcacgagctatattcacacacgtatgcgggcgaaaacgtctgacttcctcaaggtgctgaaccgcgcacgcccagatgccgagaaaaaagaaatgaaaacaatcacggggaagacgttttcatcccgctaatcttgggaataagaggaggaagcggctggcaactgaaggctggaacacttgctactggataatcgtagcttttaatgttgcgcctcttcaggttcttaagggattctccgttttggttccattttgtacacgtttggaaaataatctgcagaaacgagctgtgcttgcaaagacttcatagttcccaagaattaaaaaaaaaaaaaaaaaaattcccctggaccaactaaatcccttttttttatcttccctccctcacttcccttttctcccacccttttttccaagctgtttcgttttgcaatatataactg

SEQ ID NO: 20431 - DNA, 451 bp, Homo sapiens
  misc_feature (1)...(451): n = A,T,C or G
ntataccctcgctgcacgactgcaggaattcggcacgagccgcagagatgttgatgcctaagaagaaccgctattgccatttatgaactcctttttaaggagggagtcatggtggccaagaaggatgtccacatgcctaagcacccgtagctggcagacaagaatgtgcccaaccttcatgtcatgaaggccatgcagtctctcaagtcccgaggctacgtgaaggaacagttcgcctggagacatttctactgttaccttaccaatgagggtatccagtatctccgtgattaccttcatctgcccccggagattgagcctgccaccctacgccgtaggcatccagagactggcaggcctcggcctaaaggtctggagggtgagcgacctgcgagactcacaagaggggaagctgacagagatacctacagacggagtgctgtgccacctg

SEQ ID NO: 20432 - DNA, 470 bp, Homo sapiens
  misc_feature (1)...(470): n = A,T,C or G
naaggattgangctgttgcccggctgcggcgcgtcccctcgcaggtgcgccagaactaccaccaggactcagaggccgccatcaaccgccagatcaacctggagctctacgcctcctacgtttacctgtccatgtcttactactttgaccgcgatgatgtggctttgaagaactttgccaaatactttcttcaccaatctcatgaggagagggaacatgctgagaaactgatgaagctgcagaaccaacgaggtggccgaatcttccttcaggatatcaagaaaccagactgtgatgactgggagagcgggctgaatgcaatggagtgtgcattacatttggaaaaaaatgtgaatcagtcactactggaactgcacaaactggccactgacaaaaatgacccccatttgtgtgacttcattgagacacnattacctgatgagcangtganagccatcanagaattggtg

SEQ ID NO: 20433 - DNA, 484 bp, Homo sapiens
cgagaaaaaatggcccgcctgctgattcggcacgagctgagatcaacaagaagatttataagattggccagggctaccttatcaaggacggcaggctgatcaagaacaatgcctccactgactatgacctatctgacaagagcatcaaccctctgtccttgctggagcagaccaagcggcgggctctggagaagattgaccttaagttcattgacaccacctccaagtttggccatggccgcttccagaccatggaggagaagaaagcattcatgggaccactgaagaaagaccgaattgcaaaggaagaaggagcttaatgccaggaacagattttgcagttggcggggtctcaataaaagttattttccactgaaaaaaatgaaaaccaataccttgcctggggggggggccgggcccccaatctcccttatggggggggggttaacattctccgggccgcggtttaacaaggcgggggggg

SEQ ID NO: 20434 - DNA, 472 bp, Homo sapiens
  misc_feature (1)...(472): n = A,T,C or G
nttggaanccttgaccgcctgtagaattcggcacgagcccaagacggccaacgtgccccagaccgtgcccatgaggctccggaagctgcccgactccttcttcaagccgccggagcccaaatcccactcccgacaggccagtactgatgcaggcactgcaggagccctgactccacagcatgttcgagctcattcctctccagcttctctgcagttgggagctgtttctcctgggacactgacccccactggagtagtctctggcccagcagctacacccacagctcagcatcttcgacagtcttcttttgagatacctgatgatgtacctctgccagcaggttgggagatggcaaagacatcttctggtcagagatacttcttaaatcacatcgatcagacaacaacatggcaggaccccaggaaggccatgctgtcccagatgaacgtcacagcccccaccagtccaccc

SEQ ID NO: 20435 - DNA, 453 bp, Homo sapiens
  misc_feature (1)...(453): n = A,T,C or G
cgggtcccannaattgacccccaattgatctgcgctgcaggaatncggcacgaggcgcggagcagtccagaagccgaccccaccccctgcacctcggggaagagggaacccgggtcagcccgtagcaagaatcattcctgactatcccaggagaccacggcagaccaaaaacacctctctgaacagccttccgcaccgctcgctgcaagcattcgtccacacacggtacacagattgcgggcggatcgtaattcactcttgaaatcacaccctttttagggatattcgttttcaatgactttgggaaagccacgaggtactacatttactacgaagagaccgtttctttattttgaagtcagtgactcctgagactgcattggggacaacttttttgcacaatgaccatattttaccatgcagcgcacttcagaaaattataaaagtttacaa

SEQ ID NO: 20436 - DNA, 451 bp, Homo sapiens
  misc_feature (1)...(451): n = A,T,C or G
attganaatctgacccgcgctgcagctatgcaggctattatacgaagggatttgcactactgaattttgtagtaaaatactcccctgaacgacagcgttctcttcgtcctcatcatgatgcttctacatttaccataaacattgcacttaataacgtgggagaagactttcagggaggtggttgcaaatttctaaggtacaattgctctattgagtcaccacgaagaggctggagcttcatgcatcctgggagactcacacatttgcatgaaggacttcctgttaaaaatggaacaagatacattgcagtgtcatttatagatccctaagttatttacttttcattgaattgaaatttattttggatgaatgactggcatgagcacgtctttgaagttgtggctgatgaaatgagaggaatatttatgtaacatcgacagaacatctttcg

SEQ ID NO: 20437 - DNA, 478 bp, Homo sapiens
  misc_feature (1)...(478): n = A,T,C or G
nattgatcngccattgcaccgccctgcggattcggcacgagattgagtaccacagaacctgtgattagcatttcttcaaacaatgcagtgatagaactggcaaaatctccagagagccatggacattggagagagtggtattatggtgtaaacaacgattctttggaggaaaggttatttgtcaatgaagaaaatgttaatgagtttcttgaagaggtcctgagctctccattcaaacagtctatgtccttgaccccaccattaattgaagttcttcaagttactgataataagattcaaattaatgcaaagttgcaagaatgtagtaactctgatcagctacaaggaaaggaggaaagagtaaatgaagaaagtcatctaactgaaaaggaatatatagaacattgtaacacccctacaactgattctgattcatctatagcagttaaagcactacaaatagatagctttggtttag

SEQ ID NO: 20438 - DNA, 472 bp, Homo sapiens
  misc_feature (1)...(472): n = A,T,C or G
nnggcgttcccgctgcatgaattcggcacgaggcaatatttagtactttcctgccttttagttcctgtgcacagcccctaagtcaacttagcattttctgcatctccacttggcattagctaaaaccttccatgtcaagattcagctagtggccaagagatgcagtgccaggaacccttaaacagttgcacagcatctcagctcatcttcactgcaccctggatttgcatacattcttcaagatcccatttgaattttttagtgactaaaccattgtgcattctagagtgcatatatttatattttgcctgttaaaaagaaagtgagcagtgttagcttagttctcttttgatgtaggttattatgattagctttgtcactgtttcactactcagcatggaaacaagatgaaattccatttgtaggtagtgagacaaaattgatgatccattaagtaaaccaataaagtgtc

SEQ ID NO: 20439 - DNA, 472 bp, Homo sapiens
  misc_feature (1)...(472): n = A,T,C or G
gctgggcacattggcttcactgacgattncggcacgagcaggggccgcccccctcgttccccacccactccgggtgttactgatcctcgatgtcaaggaacccgcgcgtcatcgccctccacatcggtctcaacccgaaactaggagcttcgaacctccaagtaccggatcgccccaagcttgagcctaggcctctcggctcttctgagaaacaagattcaggcgtccgcccctgactcctgcccatcccccacagaagtcagatggaccgctctccagtccctctttacctttgatcaaattcggaagtctcggcccactaaggatcgctcctggttcctcggaaccctgagtccaaacgtcctagctcaccaatagactaccctccctcccagggagcgtttcctgcctggggggaggaacatacaggattcgtttgttcaataaacgttttttatgtgcaaggcccatg

SEQ ID NO: 20440 - DNA, 451 bp, Homo sapiens
  misc_feature (1)...(451): n = A,T,C or G
cgatggggannnnnnaattgaccccgctgaggaatctcgcacaagagatgcttggagaagcactgagcaagaaccctggctacatcaaacttcgcaagattcgagcagcccagaatatctacaagacgatcgccacatcacagaatcgtatctatctcacagctgacaaccttgtgctgaacctacaggatgaaagtttcaccaggggaagagacagcctcatcaagggtaagaaatgagcctagtcaccaagaactccacccccagaggaagaggatctgcttctccagtttttgaggagccagccaggggtccagcacagccctaccccgccccagcatcatgcgatggtcccccacaccgggtccctgaacccctcttggattaaggaagactgaagactagccccttttctggggaagtactttcctcctccctgtgtaactggcgg

SEQ ID NO: 20441 - DNA, 477 bp, Homo sapiens
ggagtgttcgacgctgtttgatcggctgtaagaattcggcacgagccagcttcgcccacttccccttgccagcggggtgggcgcggagaagacctgccggagccatggaggacgaagtggtccgctttgccaagaagatggacaagatggtgcagaagaagaacgcggctggagcattggatttgctaaaggagcttaagaatattcctatgaccctggaattactgcagtccacaagaatcggaatgtcagctaatgctattctcaagcagagtacagatgaggaagttacatctttggcaaagattctcattatatcctggaaaaaattattagatgggccatcaactgagaaagaccttgacgaaaagaagaaagaacctgcaattacatcgcagaacagccctgaggcaagagaagaaagcactttcagcggcaatgtaagcaacagaaaggatgagacaaatgctcgagata

SEQ ID NO: 20442 - DNA, 465 bp, Homo sapiens
  misc_feature (1)...(465): n = A,T,C or G
aattcgcccgtcctgcaggaattcggcacgagagattttcagtatttaaaaagacaaagtattttgtccatttgagattctgcactccatgaaaagttcacttggacgctggggccaaaagctgttgattttcttaagttgacggttgtcaatatatcgaactgttcccaagttagtcaagtatgtctcaacactagcatgatataaaaagggacactgcatctgaatgaaaaaggaatcaaaatccactttgtacataagttagagttctaattggatttgtaccgtcctcccattttgttctcggaagattaaatgctacatgtgtaagtctgcctaaataggtagcttaaacttatgtcaaaatgtctgcagcagtttgtcaataaagtttagtccttttttaatcnnnnnnnannnntnnnactncntnccnaacctttggttgtggcctgcgcgcgcgcc

SEQ ID NO: 20443 - DNA, 521 bp, Homo sapiens
  misc_feature (1)...(521): n = A,T,C or G
ngggggnnnnagtgtcccnggnnnnnnnagnnaattgatcgccttcgganatcggcacgcgatccaggttccactttcctaggagagagtggagatgggaagacagggaaaggaaggcagcaggaggccacaagcccaccaggtcttcatgtcaagagagggagtaacatgtcttctcattgcccacggacccaacctctgtccaggtgcccctcatcatcacagtttaacacaagctcccctgctccagccaaattgatctcccagtcttgtccttacccattccaagtgctctgccagcccctgttcatccaagttttaagtcctccaccctgttctaagagactgttccaacggctctgggcctcagtggtcacttgaccaccattgtctcagagctgcccactttgtgtgtgtcacatgctgcctgagtcacatgtacatcttatttctgcctctagttttgtaagctcctggagggcggataacaacttatactactcttgtattctcatggcacc

SEQ ID NO: 20444 - DNA, 384 bp, Homo sapiens
agcgggcatttgaattgactgctctgcggaattcggacgaggccccctctgctcctcctactgctgctgcccgtgggcctcctgctgctggccgctgcctggtgcctgcactggcagaggacgcggcggaggacaccccgccctggggagcaggggaggatactgaggcacacagaggggagtcaccagccagaggatgcatagcctggacacagaggaagttggctagaggccggtcccttccttgggcccctctcattccctccccagaatggaggcaacgccagaatccagcaccggccccatttacccaactctgtacaaagcccttgtccccatgaaattgtatataaatcatccttttctaaaaaaaaaaaaaaaaaa

SEQ ID NO: 20445 - DNA, 466 bp, Homo sapiens
  misc_feature (1)...(466): n = A,T,C or G
nattgcaccgcctgcaggaattcggcacgagtgaaagtattgnggaattatgtaaattctttatatgaaactatctagttcataaatcatagatttcatattactcagtgcaactgaactaaaagttcagaaaagtcattcacattgttccaaatttgtaatggttgtcacatgtcacatgcgtctttttcagtaagtgccagagtgttcccactgtttctgcccagtgcttgacttctcggcccggaagagaacctgctttctctggtttccttcctgagtctggcacagacggggctattgtagttcttgatcaagtcctggagtcagccttgcctggctctccttgtagcagattcagtccacagacctcttgctgcccctcagtgacaagtatgctgtgaattcaacctttggacttgctgcccaagcctttggatgctgccctgactattgtaagaaggaa

SEQ ID NO: 20446 - DNA, 399 bp, Homo sapiens
  misc_feature (1)...(399): n = A,T,C or G
ggggggnnnnaggnccnnggnnnnnnaggggaattgannnccntnnnaaactgaccgccttcggaattcggcacgagccactaccccaggtttctaactttgtaacttgcttctgatgtgggtccctaacctataatctcagcttccctaccctggactgaagggtctgcccatccccccaccaccctccatcctgggggccctcgcacaaatctggggtgggaggggctaggctgaccccatcctcctctccctccaggagcccccagcatgtcctgacctgtgcacggggatggggggacaactcctacccttctttccccacatgccccactaaaccatctgacaacattaatgaataaaatggtgaaaatgtgaaaataaaaaaaaaaaaaaaaa

SEQ ID NO: 20447 - DNA, 488 bp, Homo sapiens
  misc_feature (1)...(488): n = A,T,C or G
agatgccggnnnngnnnnnnnttatctgaccgctctgcggttagagctagacaagctttcaaggtcctttaagtatttgatgatcaactgaacacgtttctattcaaggagaaaacaccattcagtaagaagatggagtagatatcagataaaacaattcacgtttaatatgtaaatgtaccaattatgtgattcagtttcaactttcaagtacttcctgagaggttagtacattattattgagctctcacagaaagcttaatcatagatataattaacctgatccaaatgagtaaagtggaccttagaaaggctaagtgatctttctctggctatccagctagtagtaatgaagtcaggtcttgaaccccggttctgctgactgaattggatgcactatagtacaggcttttagcaccgaagtgtggtcctcagaccagtgcctgccaaccagatgttactggtctgtgaggaaataagtacagata

SEQ ID NO: 20448 - DNA, 483 bp, Homo sapiens
aggaaaaaatttgcccgcctgcatgaattcggcacgagcatagtgcctcaagctatgggagtggggatacgggaatgagtctccccaacattcagaggctccccagagctggcagcccaaggcacaccactaagtgccactgccttctcctcccctctgctggccggatactgaccaatggagaaaccacgactggggcgggaaggagtaggtggcaagattctttttcacttgtttcctgcacctggagacaacagcaagaccattattaggatgagtgattggttagagttttgattgatttggtttgggatgttttagctttacgaaaagaaatgcctattgttcagattgcaaatgagactttctactgcctgtcctagctcactacttttcaagaggccaatccctgggtaaatcttagcgaatagcagtcgactgtgtcatttatctgtgccccatgctggaggtgcagactcggag

SEQ ID NO: 20449 - DNA, 490 bp, Homo sapiens
gcggggattgtattcatcgcctgcggaattcggcacgagaaatgacaaatttcaactcacaatctttgtaagaaaattgttccagtttgaatcttgatattaaagtttatgtttacaaaactgccagttagatgaactaaaagtgtgtaaaacaaatagaaaagacattcgcagacatttcttctatgttattgaatgtgttgtttctggtgtacgtgtcaaaagtttcagttttttagatcagaaataaacgacaaatagtgtgagatgtgttgtgaacaggcatggtgaccgtggtcagcgccactcttgtttcctgaaatgtgcttctaagacagaaaatgtattttctcatcaagggtgtctggagacacagaccgtgaccttggcgcagcggtgtgcatcaaaggcgtgtgctgagaagggtggtgttaagctgtggaaaatgactcaagagcaataaatcagtgccaaagcttccctgcgcatc

SEQ ID NO: 20450 - DNA, 479 bp, Homo sapiens
  misc_feature (1)...(479): n = A,T,C or G
nngggtgttgancgctgttcgcacggctgtaagaattcagcacgagattcacactatcagactagcaaggcactagaactggaaaagaccacagaaaacaaagaatccaaccctttcatcttacaggtgaacaaactgtgatgatgcacatgtatgtgttttgtaagctgtgagcaccgtaacaaaatgtaaatttgccattattaggaagtgctggtggcagtgaagaagcacccaggccacttgactcccagtctggtgccctgtctacaccagacaacacaggagctgggtcagattcccctcagctgcttaacaaagttcctcgaacagaaagtgcttacaaagctgccttctcggatactgaaaggtcgagttttctgaactgcactgattttattgcagttgaaaaaaaaaaaaagttattccaaaaatttcaagctgttttgaaacattttttgatggttttacttcttgaa

SEQ ID NO: 20451 - DNA, 514 bp, Homo sapiens
  misc_feature (1)...(514): n = A,T,C or G
tggcngggccnccaattgacnccntnnnataganccgcgctgcaggaattcggcacgagcatctgcttccttctgcgaaagctggtgctgccagaatactccatccatagcctcttctgcattatgttcctgtgtgcgcaagagtggctcacgctggggctgaatgtccctctacttttctatcacttctggaggtatttccactgtccagcagatagctcagaactagcctacgacccaccggtggtcatgaatgccgacactttgagttactgtcagaaggaggcctggtgtaagctggccttctatctcctctccttcttctactacctttactgcatgatctacactttagtgagctcttaacgcaaagaccatgcacatcatcagagactgagatgggagaggcctgagacggagaggtgcatttctgctggtgactggaggagggaccagaatgaggatacgtgagaaatagacccggcaggcagtcagactgaatgggagctggaan

SEQ ID NO: 20452 - DNA, 408 bp, Homo sapiens
  misc_feature (1)...(408): n = A,T,C or G
ggaattgatcngcgctgngngaannncattgaccctgcgctgcaggaattcggcacgagccccagcctgctaagttaagtggacaggcccacaagatgaccttgcatgtgagcagatggcagagatgggtgtgtgaggggtgaggaggcatcagcagttgagccccgaaggagatcaggcagccccacctgcaggagaacgtcagccctccaggggatcagcccctgccagttccacccagctgcaggtgccagcacggcagggatgggagaggggtggggagcgagtcactgcctcctctgagcagagattcagagtaggatcacatgaataggggaaaaaagagagtctatttttgtctaataataaagaatttctataaactttaaaaaaaaaaaaaaaaaaaaa

SEQ ID NO: 20453 - DNA, 472 bp, Homo sapiens
  misc_feature (1)...(472): n = A,T,C or G
agattgatnccttttnnnnnncaatgagctgcctgcggaattccgcacgagcagcagcctgccagcagttactgtgaatgttccccaccgctgagaggctgcctccgcacctgaccgctgcccaggtggggtttcctgcatggacagttgtttggagaacaacaaggacaactttatgtagagaaaaggaggggacgggacagacgaaggcaaccatttttagaaggaaaaaggattaggcaaaaataatttattttgctcttgtttctaacaaggacttggagacttggtggtctgagctgtcccaagtcctccggttcttcctcgggattggcgggtccacttgccagggctctgggggcagatttgtggggacctcagcctgcaccctcttctcctctggcttccctctctgaaatagccgaactccaggctgggctgagccaaagccagagtggccacggcccagggn

SEQ ID NO: 20454 - DNA, 468 bp, Homo sapiens
  misc_feature (1)...(468): n = A,T,C or G
gctgtnacatgaattcactgacgatttcggcacgaggaggaggagaaagctgaccgcttaggcccgggtagtggtcgtcgtggttttccttgtagttcgtggtctgagaccaggcctcaagtggaaacggcgtgaccatgatcgcacggcggaacccagaacccttacggtttctgccggatgaggcccggagcctgcccccgcccaagctgaccgacccgcggctcctctacatcggcttcttgggctactgctccggcctgattgataacctgatccggcggaggccgatcgcgacggctggtttgcatcgccagcttctatatattacggcctttttttttgctggatattatcttggaaaacgtgaagactacctgtatgctgtgagggaccgtgaaatgtttggatatatgaaattacatccagaggattttcctgaagaagataagaaaacatatggtgaaa

SEQ ID NO: 20455 - DNA, 514 bp, Homo sapiens
  misc_feature (1)...(514): n = A,T,C or G
gggagaancnnnagggnngnnnnnnnaattcgcaccgcncatctggcccgcgctgcaggatataaagtaaaattctgtcagactacaaatgtttagctgttactcatttctagggaagaaattctaaatccctccttcactttgagcagtgttctaattggataaatgatggagagtagctttattctgaacgtaattaaatttagactatgtagtatgcgacagaatttttttaaaattataaaaagattttatttactaattgggatttacttaaaataattttggaataatgctcccagacttgcccagatttgtgtattgtacttattgccactggccgccactttgacttattttctctaatagattatttgccacagtctttattttgatatgctcctagtttttttttaggaggctgttcattatgaaggcttctttatagaggcctaataagaatgcctttctataaagcctgtgcatttatgtaggttgaagctaggaggatctt

SEQ ID NO: 20456 - DNA, 479 bp, Homo sapiens
gctggtccaatgacgctgcagaattatgagagacttggaccccggagcgaggttctgcttacccgaggccgctgctgtgcggagacccccgggtgaagccaccgtcatcatgtctgaccaggaggcaaaaccttcaactgaggacttgggggataagaaggaaggtgaatatattaaactcaaagtcattggacaggatagcagtgagattcacttcaaagtgaaaatgacaacacatctcaagaaactcaaagaatcatactgtcaaagacagggtgttccaatgaattcactcaggtttctctttgagggtcagagaattgctgataatcatactccaaaagaactgggaatggaggaagaagatgtgattgaagtttatcaggaatgatcatttgctgaagatggtgtcaagtgaacctagattaacagccctccactccagatggatatccagtgattcctagaatgggatattt

SEQ ID NO: 20457 - DNA, 443 bp, Homo sapiens
  misc_feature (1)...(443): n = A,T,C or G
nttttgcnccgcgctgcaggaattcggcacgaggtttggagacatcagggtgaacgaaaagtcagagtacaggatgaagacatggagacactggcaagttgtacaagtgaactcatatcataagaaatggaacaattagatggaggtgacacgagcagtgatgaggataaagaagaacatgaaactcctgtggaagtagaactcatgactcaggttgaccaagaggatatcactcttcagagtggcagagatgaactaaatgaggagctcattcaggaagaaagctctgaagacgaaggagaatatgaagaggttagaaaagatcaggattctgttggtgaaatgaaggatgaaggggaagagacattaaattatcctgatactaccattgacttgtctcaccttcaaccccaaaggtccatccagaaattggcttcaaaagn

SEQ ID NO: 20458 - DNA, 499 bp, Homo sapiens
  misc_feature (1)...(499): n = A,T,C or G
nttggaccgcgctgcaaganttcgaccngcgctgcaggaattcggcacgagctcggtttctcggctgctgggtcggtcccgcccacagctggggcggcctatgtcgagtggcgcccatggcgaagagggctcagctcgcatgtggaagactctcaccttcttcgtcgcgctccccggggtggcagtcagcatgctgaatgtgtacctgaagtcgcaccacggagagcacgagagacccgagttcatcgcctacccccatctccgcatcaggaccaagccgtttccctggggagatggtaaccatactctattccataaccctcatgtgaatccacttccaactggctacgaagatgaataaagagaatctggaccactacccgggcaccagggaccacagcactggtttggaccgttactctgcacatggaccagaaaaagtatatgggaccttaagctcaccttctttacttgtatcaaatgatgactgggatactgg

SEQ ID NO: 20459 - DNA, 464 bp, Homo sapiens
  misc_feature (1)...(464): n = A,T,C or G
ngctgatcgcctgcggaanccactgatgaccntctggaaacactattctcacattagatactaaatggtttatactgagcttttacttttgtatagcttgataggggcagggggcaatgggatgtagtttttacccaggttctatccaaatctatgtgggcatgagttgggttataactggatcctactatcattgtggctttggttcaaaaggaaacactacatttgctcacagatgattcttctgaatgctcccgaactactgactttgaagaggtagcctcctgcctgccattaagcaggaatgtcatgttccagttcattacaaaagaaaacaataaaacaatgtgaatttttataataaaatgtgaactgatgtagcaaattacgcaaatgtgaagcctcttctgataacacttgttaggcctcttactgatgtcagtttcagtttgtaaaatatgttt

SEQ ID NO: 20460 - DNA, 439 bp, Homo sapiens
  misc_feature (1)...(439): n = A,T,C or G
atcggaccnccnntggggnnnnnnattgacccgcgctgcaggaattcggcacgagccaagtccctggcaatggacaaggtggctcacttctcctacccattcacgtttgaagccttcttcctccatgaggatgaatcttctgatgcactcccggagtggcctgtgctctactgtgaggtcctctcgctggacttctggcagaggtaccgtgtggaaggctatggggctgtggtgctgcctgccactccagcgacaatgacgtggccttggcactgacttcctgacagtctctccatgtgcttcatgctcctctgattggactcagggtgagaagctgtatggcaaaattggctcatannatatgtgtattgaatgaatcagcattcagtttggaataaaagcatctgtcttttactgtgaaaaaaaaaaaaaaaaaaaa

SEQ ID NO: 20461 - DNA, 502 bp, Homo sapiens
  misc_feature (1)...(502): n = A,T,C or G
ncttgaaccacanntggaagaantttgccaccgcgctgcaggaattcggcacgaggtgcagcgcacgatgctggagttgctcaaccagctcgacggctttgaggccaccaagaacatcaaggttatcatggctactaataggattgatatcctggactcggcactgcttcgcccagggcgcattgacagaaaaattgaattcccaccccccaatgaggaggcccggctggacattttgaagattcattctcggaagatgaacctgacccgggggatcaacctgagaaaaattgctgagctcatgccaggagcatcaggggctgaagtgaagggcgtgtgcacagaagctggcatgtatgccctgcgagaacggcgagtccatgtcactcangaggactttgagatggcagtagccaaggtcatgcagaaggacagtgagaaaaacatgtccatcaagaaattatggaagtgagtggacagcctttgtgtgtatctctccaat

SEQ ID NO: 20462 - DNA, 489 bp, Homo sapiens
  misc_feature (1)...(489): n = A,T,C or G
tttgcccgcctgcaggatttggcacgagctcaagtgcgtgaacaaacgcatcggcaacctgcagaccgacctgagcgacgggctgcggctcatcgcgctgctcgaggtgctcagccagaagcgcatgtaccgcaagtaccatcagcggcccacctttcgccagatgcagctcgagaatgtgtccgtggcgctcgagttcctggaccgtgagagcatcaagctcgtgtccatcgacgggtgggtgtagcagtcccaggcccgcagccacaccccacacctcccagaggaagaaggtgggccctgatcccagcagtcccaggaaagccctgaggttcactgtgattggaccagcctatgtcacctgctcacatctcagcccaccactggcaagggtgtttgactcttgggaatgactcttgggactggcttgcctagatcacatgttctacctgaaattggggacattgcagaggattggtggagtggacn

SEQ ID NO: 20463 - DNA, 485 bp, Homo sapiens
catctacgaccccaaattgatcggctgtaggaattcggcacgagcccaattctaagcagaaaaagaaaaaaaacacaaaaaataaaaaacccctacaaaaaaactttaaaaaaaatggcagcaaagggtagttttcatctggtgtcttttatttaagttttttaagttaagaaaagctggtgacatatttatacgtttttgtgcaaaaataaatgaatggcaatagattttaaaaaatcttattatgtacttctgtgtgaaaaagtctgtataatatttcccttaaatatgcattattttacttgtgagttttttactgaattaatctgaaatgtacaagccctggatttgctacagagtgagaagttattttatttttttttatttttaattttggaaattctgcagaaatcagaactcttaccatggtttgaacaaaaaaaggggaaatggggaggggaaaagggtgggattgtccagcatgc

SEQ ID NO: 20464 - DNA, 484 bp, Homo sapiens
  misc_feature (1)...(484): n = A,T,C or G
cttcgaccgccccnattagancggctgcaggaattcggcacgagtctcaccctgagcaagcccagaacacccccacctctgccagcttccggaagtagtgggaagggtctgtgctttggaatcaggcagccgaacctggctttgagtcaagcctggccgctcaccagcatgcaaccttggacaagtcactcagctcatgtctgattgcatcttcctcatggacagcttcgccctctccttacaggaggatttagctgtgaggatttcagctaagctatgcaaggtgcctcccaggttgctggcacaggtaggcgcctaaaacacagagatcattctctattcactctaatccccaaaacggcttacatttgtcaagtgctaactgtgtgccaggcaccgtgctaagcccttaacactgaatcctcacaacgatacgaggtaggtcctgttgtcatcctgttttatagatgaaaggaaagcgagg

SEQ ID NO: 20465 - DNA, 450 bp, Homo sapiens
  misc_feature (1)...(450): n = A,T,C or G
gaattgatcngccctnggaannntttgaccngcgctgcaggaattcggcacgagtaccctctttatctccaacattggtgggaatgcaccttcctacatctaccgcctgatgagtgaactctaccatcctgatgatcatgttttatgaccgaccacacgtgtcctaagcagattgcttaggcagatacagaatgaagaggagacttgagtgttgctgctgaagcacatccttgcaatgtgggagtgcacaggagtccacctaaaaaaaaaatccttgatactgttgcctgcctttttagtcaccccgtaacaagggcacacatccaggactgtgtcttgcctttcagatcttaacagagcagcagggcttaacttgttgattttggagcctcttagtgacctggttgcgtctgtgtcaggaacttaaactttctggttcagtagtgtgtt

SEQ ID NO: 20466 - DNA, 481 bp, Homo sapiens
  misc_feature (1)...(481): n = A,T,C or G
nattgaccggctgcattaatacggcacgagggagtagggttgccagatgcaatacaagattcctggttaaatttgaatttcagtaaacaatgaatagtttttcattgtaccatgaaatatccagaacatacttatatgtagagtattacttatttgaatctacaaaaaacaacaaataatttttaaatataaggattttcctagatattgcacgggagaatatacaaatagcaaaattgaggccaagggccaagagaatatccgaactttaatttcaggaattgaatgggtttgctagaatgtgatatttgaagcatcacataaaaatgatgggacaataaattttgccataaagtcaaatttagctggaaatcctggatttttttctgttaaatctggcaaccctagtctgctagccaggatccacaagtccttgttccactgtgccttggtttctcctttatttctaagtggaaaaagg

SEQ ID NO: 20467 - DNA, 468 bp, Homo sapiens
  misc_feature (1)...(468): n = A,T,C or G
ngatgttcnaaaatcgacncgctcgagaactctcacgagnaaccctggacgtgagctgtcagagcagaagccactaggccactgcgcgtctgaggctcagaccctgctgtggttggcttggggtggccaatgggctgggaccctccatgagagttttggacacttgggtcacctgacccgtgcctctctgacacatgtctccggggggcagccacctggccaatgtgcatttttgcacatgctggaaccttccatgggggtctgggctattggctggagccaggacatgagtcaggggcaccatggacctcacgtgccagggagacttgaatgtggctgtcactcttccggacgccaagggctgcaggaggctgcttttggcactacccaccccgtgtgacagaataggagccagcgactcaggactgctcacgggtcaggagggcaacgcctgaagtcagacctcct

SEQ ID NO: 20468 - DNA, 473 bp, Homo sapiens
  misc_feature (1)...(473): n = A,T,C or G
gagctccccccccnatagcaccggctgcattaattcggcacgagaggtgttctctgtgggtctgcccgtcccaaaccttacgatcctcctggagagaagatggtagcagcaaaagtaaagggtgagaaactggataagaagctgaaaaaaatggagcaaaacaagacagcagccactaggtaccgccagaagaagagggcggagcaggaggctcttactggtgagtgcaaagagctggaaaagaagaacgaggctctaaaagagagggcggattccctggccaaggagatccagtacctgaaagatttgatagaagaggtccgcaaggcaagggggaagaaaagggtcccctagttgaggatagtcaggagcgtcaatgtgcttgtacatagagtgctgtagctgtgtgttccaataaattattttgtagggaaaaaaaaaaaaaaaaccgcgccgccacaatggtgcgcatg

SEQ ID NO: 20469 - DNA, 443 bp, Homo sapiens
  misc_feature (1)...(443): n = A,T,C or G
ntagacccccttggaccccgcgctgcaggaattcggcacgaggtgatgggtgcactaaaatctcaaatcactattgaacttactcatgtaaccaaacaccacctgttccccaataacctataataaaaaattaagaaaaaaacccccaaaaaacccttgaaagtgcatatgaatgatcaggaatcttgttgacaggcagattctggaagagcaggtctgggatggggcctgaattctctggaggtgccctgctgttctgatgatagcaataactgataagatactttaagaccaggccctgtgcaaacaggtttcagagtaggctagatcttatttggtctctgaaattttgccaatttggccacagaatagattgtcagctccaaaataagtttcattttctagcatattgaaataattagaagaaagggaacctttcttgc

SEQ ID NO: 20470 - DNA, 502 bp, Homo sapiens
  misc_feature (1)...(502): n = A,T,C or G
cgcggatgcnccaaattgaacgccctcgngannnatcgatccgccatgcngaattcgccacgagctgagctctggctatgcccttgggagctccaactggatcatccagtctcattacgagaaagtgtcttatgtctctggatcctccttgcttaccacacacccccagcccatggaccaagcttctctcaaaaacagcgatgttcttgttctgacagggcttacccagatccccactgcaaacccagatggaatggtgggagagttctgcagcaacctagctctgacagtccggaatggaggaaacgtgttggttccctgctacccttctggagtgatctatgacctcctggagtgcctatatcagtacatcgactcagccgggctttccagcgtccccctctacttcatctcccctgtggccaacagttcactggagttttcccagatctttgctgagtggtatgtccgtggcttttttttgagaagcgaccaatattgg

SEQ ID NO: 20471 - DNA, 477 bp, Homo sapiens
  misc_feature (1)...(477): n = A,T,C or G
ngagagtgcnanaaactgaaaggcattgataagcatgcangaanacggcacgagcactcgcccgcgccatggcctctgtctccgagctcgcctgcatctactcggccctcattctgcacgacgatgaggtgacagtcacggaggataagatcaatgccctcattaaagcagccggtgtaaatgttgagcctttttggcctggcttgtttgcaaaggccctggccaacgtcaacattgggagcctcatctgcaatgtaggggccggtggacctgctccagcagctggtgctgcaccagcaggaggtcctgccccctccactgctgctgctccagctgaggagaagaaagtggaagcaaagaaagaagaatccgaggagtctgatgatgacatgggctttggtctttttgactaaacctcttttataacatgttcaataaaaagctgaactttaaaaaananagaaaaaaaaaaataaa

SEQ ID NO: 20472 - DNA, 470 bp, Homo sapiens
  misc_feature (1)...(470): n = A,T,C or G
cgatgttannaaaactgagngngcttgataatcctcgcgagcaccgctggcagagggcaggctgcatgcagtggcggctactgggccctgcccagccccggaactctgcgcgatatcaatactggctattttctcttctcgccgtagtgccgttggtttcacatgattgcacttttgtgggtcgcaaggtgatacatacgtgtattacttggtcactggatgcagaagtacccattcatcacacctgccccatagcccccactctgctgtactgataggatttagttgtgttttaggacattgcaaatcttctagaagttctcccccaaatcaggtcaatgtgtgccctcctgagctcccacccaggcatctccagtgctcatgatcatgtgtcccccaactccacccctcacagtttgggcctgtttctggcaaagagtcaggaaggttactgaattagggaacatttt

SEQ ID NO: 20473 - DNA, 440 bp, Homo sapiens
  misc_feature (1)...(440): n = A,T,C or G
ngtggtgcnaaaatgagacctttgctacgcctgcaagaanncggcacgagacaaggggaaatcattagaaacacagaaaaccacagttgcagctcgacatggattacagagtcttggaaaagtcggtatttcacggcgtatgcctccacctgctaacctcccaagtcttaaagcagaaaacaaaggcaatgatcctaatgtaaacattgtacctaaagatggcacagggtgggcatcaaaacaagagcaacatgaagaagaaaaaacaccagaagtgccaccagcacagccaaaacctggggttgccgctcccccagaagtagcacctgctcccaaatcatgggccagtaacaagcaaggaatccaagtgaatagtcagtttcagcaagaatttcccagcctgcaggcagctggggatcaggaaaaaaaaaaaaaaaaaa

SEQ ID NO: 20474 - DNA, 468 bp, Homo sapiens
  misc_feature (1)...(468): n = A,T,C or G
agagaannnnntttcgccttgatccgcgctgaagaattcggcacgagctgcctccacgtcgccggctcaatctgggcgagaacccagacttccaccgcagccccgcaatctgcagacctcagcggcagcgcatgtggcagacctgcctcctttgcctgtgagtcatggcagctcccatgaatggccaagtgtgtgtggtgactggtgcctccaggggtattggccgtggcattgccttgcagctctgcaaagcaggcgccacagtttacatcactggccgccatctggacacccttcgcgttgttgctcangaggcacaatccctcgggggccaatgtgtgcctgtggtgtgcgattcaagccaggagagtgaagtgcgaagcctgtttgagcaagtggatcgggaacagcaagggcgtctagatgtgctggtcaacaatgcttatgcaggggtccagacgatcctgn

SEQ ID NO: 20475 - DNA, 485 bp, Homo sapiens
  misc_feature (1)...(485): n = A,T,C or G
attgatcngccttcgngaannnattgatccgccttgcggaattcgccacgaggacccaagaagcatctgaagcgggtgggagctccaaagcattgtatgctggataaattgaccggtgtgtttgctcctcgtccatccaccggtccccacaagttgagagagtgtctccccctcatcattttcctgaggaacagacttaagtatgccctgacaggagatgaagtacagaagatttgcatgcagcggttcattaaaatcgatggcaaggtccgaactgatataacctaccctgctggattcatggatgtcatcagcattgacaagacgggagagaatttccgtctgatctatgacaccaagggtcgctttgctgtacatcgtattacacctgaggaggccaagtacaagttgtgcaaagtgagaaagatctttgtgggcacaaaaggaatgcctcatctggtgactcatgatgcccgcaccatccg

SEQ ID NO: 20476 - DNA, 473 bp, Homo sapiens
  misc_feature (1)...(473): n = A,T,C or G
agctggacactgtttgcctgnctgatttcggcacgagtgagaggcgggtgggtgttagttcagagggttatgggagggctctggcgtactggatggaggtgcgttcctttctgtggctggcgctggatccaccctgggtctccaaccagggctgctgatagggtagagccgtttcttatgccacagtggagtgggacaggaggtgccgagagaggactgaggtggcttgtgacatggaagcgctgcagccttcgagcccggcatacagcattgcagccgccgcggcggcctaagagctcgaaccctttcacacgcgcgcangatgaggagcggcggcggcagaacaagacgaccctcacttacgtggccgctgtcgccgtgggcatgctgggggcgtcctacgctgccgtacccctttatcggctctattgccagactactggacttggaggatcagcagttgcatgtcatgc

SEQ ID NO: 20477 - DNA, 495 bp, Homo sapiens
  misc_feature (1)...(495): n = A,T,C or G
gccccccccatcgaccggntgcaggatntatagatgcgcctatgaacctgcggagattatgtgctttcccaagcgagtccaccaccctctcagttttgtccctctgaagataattttggatcaccttgaatttccttttggacgatatttgatgaacagaaataaattgataacaagagttatttttaaacagaactcctcttaccccccaaaacagataaacctcagtgtacaattttgaaagaagttttgccttgtaatgagtaataatttagaaagtagacagtggttgtgtttggctctcgttttattccttttacatttggtgcttgtgggatttacaaaaatactaaattcataagatagttaggtattaaacacttcagaatatcaatgtctaattggaaaataaggaactgggggcatttgtttaggccatgacttctacaagcagatttcttttcttttagtttagaagacaaaaagtttcaatac

SEQ ID NO: 20478 - DNA, 500 bp, Homo sapiens
  misc_feature (1)...(500): n = A,T,C or G
aggagtgcnaggggggnnnnnaatagaaagcatagatgagcntgcaagaattcggcacgaggtagaaaggtgccagagccttaactaaatttttctcaacctagattttcacctgagacaatatggtaatattattaaattagtgtaaagatagcaaattttctgggatactttaaaatcaaagttgtatcaaagatcaagaagcacccataaaagctttataaactttcacaaaaaataagtgaaaattctttgtttttatggccgtgtaaaatgtcatttttataatggaaatgtcttaattttcaaacttaacatatactttaagcaattttagtatttaaacctttgcaaaattgtatttttgaatgtgaagttcaactttggcagtaggttgttgcaatagtgatctggcactatggtgccagtatagccacatagggctatttaaattaattaaataaatgaaaaattttattttttcagttgcattagccaca

SEQ ID NO: 20479 - DNA, 473 bp, Homo sapiens
  misc_feature (1)...(473): n = A,T,C or G
nattgcactgcatcgacgatattcggcacgaggtttttcccgggaaaaattaatgcaaggattcaatgaagatatggcgatagaggcacaacagaagttcaaaataaataagcaacacgctagaagggtttatgaaattcttcgactactggtaactgacatgagtgatgccgaacaatacagaagctacagactggatattaaaagaagactaattagcccatataagaaaaagcagagagatcttgctaagatgagaaaatgtctcagaccagaagaactgacaaaccagatgaaccaaatagaaataagcatgcaacatgaacagctggaagagagttttcaggaactagtggaagattaccggcgtgttattgaacgacttgctcaagagtaaagattatactgctctgtacaggaagcttgcaaattttctgtacaatgtgctgtgaaaaatctgatgactttaattt

SEQ ID NO: 20480 - DNA, 501 bp, Homo sapiens
cgggataaattaaaaataaatgggggaaaagggattttgaaaactttgacccgcctgcaggaattcggcacgagggaacatcaacattggcgatctcaacatcaaagttcccaacctgtcccagtttgtctgaggatcaagtattggcctgaaatagagtccttaagacaagcaaagacaagcaaggcaagcacgtatggaaacagaacccattttgagccttataagagacaagcctcaggacctggaaactttgtgtctggggaagactgtttggcatggaatagggaagggattcctattgacactgctcgggtgcacccagttctcacatgtgcagtcatgccggtctctgatgcatacggccactgcaaatgtgaggggccctgccttcctcagtagggagtcaacatgcccaagtcatttgcacctttacctctcacatggatgctcccaagggttagggactgcattgagcaggcccacctgcttcccagaacc

SEQ ID NO: 20481 - DNA, 482 bp, Homo sapiens
  misc_feature (1)...(482): n = A,T,C or G
aggtagtacccctgatacccttgactganctgcntgcggaattccgcacgagggaaagagagaagttacgtgaagaaaagcgaaagtatgtggaatacttaaaacagtggagtaaacctagagaagatatggaatgtgatgaccttaaggaacttccagaaccaacaccagtgaaaactagactacctcctgaaatctttggtgatgctctgatggttttggagttccttaatgcatttggggaactttttgatcttcaagatgagtttcctgatggagtaaccctagaagtattagaggaagctcttgtaggaaatgacagtgaaggcccactgtgtgaattgctttttttcttcctgactgcaatcttccaggcaatagctgaagaagaagaggaagtagccaaagagcaactaactgatgctgacaccaaaggctgcagtttgaaaagtttggatcttgatagctgcactctttcagaa

SEQ ID NO: 20482 - DNA, 474 bp, Homo sapiens
  misc_feature (1)...(474): n = A,T,C or G
cgtgggnncnnnnnnnnaattgacccgcgctgcagcaattcggcacgaggccggatggagtgcagtggcgcgatcacggctcactgcagcctcgacttcccaggctcagagatgggtttcaccatgtttcccagccttgtgtcaaactcctgacctcaagtgatccgccgtcttgggtcttcgaaagtgctgggacagcaggagtgagccaccgcatctggcccggaaagtgttttggagcgtagaaaaatgcaaattatagggctgccttcaaggatcccgaaggacccacagatttgccgcatcaggctcctatgcacgccggtaatttgatgtgttgagatgcactgcccagggcgttgttttactggaggagcttgtgtgcggagctcctttgtagtgtatgtgttgggaatggaaagaaatgcgggagaactatgagataatgccccttgaccttanggtcttaagaag

SEQ ID NO: 20483 - DNA, 459 bp, Homo sapiens
  misc_feature (1)...(459): n = A,T,C or G
gaaaatttgcccgcctgcggattatgcanccgctgcaggaattcggcacgaggtcgccatgaaggtcgagctgtgcagttttagcgggtacaagatctaccccggacacgggaggcgctacgccaggaccgacgggaaggttttccagtttcttaatgcgaaatgcgagtcggctttcctttccaagaggaatcctcggcagataaactggactgtcctctacagaaggaagcacaaaaagggacagtcggaagaaattcaaaagaaaagaacccgccgagcagtcaaattccagagggccattactggtgcatctcttgctgatataatggccaagaggaatcagaaacctgaagttagaaaggctcaacgagaacaagctatcagggctgctaaggaagcaaaaaaggctaagcaagcatctaaaaagactgcaatggctgctgctaaggcacctac

SEQ ID NO: 20484 - DNA, 497 bp, Homo sapiens
  misc_feature (1)...(497): n = A,T,C or G
cgggataatatattaattaaagggggaaaaggaaattgaccgctttgagagctctgcacgagcggaggcgttcagctgcttcaagatgaagctgaacatctacttcccagccactggctgccagaaactcattgaagtggacgatgaacgcaaacttcgtactttctatgagaagcgtatggccacagaagttgctgctgacgctctgggtgaagaatggaagggttatgtggtccgaatcagcggtgggaacgacaaacaaggtttccccatgaagcagggtgtcttgacccatggccgtgtccgcctgctactgagtaaggggcattcctgttacagaccaaggagaactggagaaagaaagagaaaatcagttcgcggttgcattgtggatgcaaatctgagcgttctcaacttggttattgtaaaaaaaggagagaaggatattcctggactgactgatactacagtgcctcgccgcctgggccccanaagaa

SEQ ID NO: 20485 - DNA, 505 bp, Homo sapiens
  misc_feature (1)...(505): n = A,T,C or G
cgaggggaaatatattaaaatattagcgagaaaacggaattgaaagcttggcccgcctgcaggaattcggcacgaggctaaacgagcagagcttcagaaaaaagtagaggaactacagagagagatttctaaccgatcaacctcatcctcagagagagccagctctcctgcacagtgtgtcactcctgtccaaactgttgtataaaggactgtaagatcaggggcatcattgctatacactcttgattacactggcagctctatgagtagaaagtcttcggaatttagaacccatctatgagagaaagttcagtcactttatttattttaaatctctctaggatgagtctagaactgtagcagtgcaggtggcttaagtgaagtaactccatatgtaattacatgattatgatactaatcttttaagtatccaaagaatattaaaatacttcaatcctggattcacagtgggaacaagtttctattaaaaggcaaatgctggtan

SEQ ID NO: 20486 - DNA, 457 bp, Homo sapiens
  misc_feature (1)...(457): n = A,T,C or G
ggatcgacccgcgnntgaagaannacttgacccngcgctgcaggtgatcatgcaaacatccgagtctgggatcagtgctaaaagtcttcgagggagagattctacccgcaaacaggatgcttcagagaaggacagtgtcccaatgggctctcctgccttccttctctctctctttgatggaggaaccaggggacgccgctgtgccattgaagcagatatgaagatgaaaaagtgaagcctcagagttaccctctttgagccgaacctaaaataaaagtaaacaagatagagcttgggcttgcgggcccagttccagaggtggaagttacagaagaggaggtacctgggccacacgacatgagctggaaaatctctcttagagagttggagtagcacaattgcctgttttagggcagaaaccatgggctatgttaatgtcctaatgtgtagctagcan

SEQ ID NO: 20487 - DNA, 515 bp, Homo sapiens
  misc_feature (1)...(515): n = A,T,C or G
gggtanccccaggacgnnnnnnnatttgaaaaccattgaccgcctgtangaattcggcacgagcaggctcacagattgtgtgtcggctgcagcagtgattccaacaagcagctattgggggggaaacacagcatttaaaaagatcatcattaaaaaacaagatttatacaacaattacttaggatgtttgtgatctgccgaccttgctatagatgccatgttaccaatgatttcctgtggtgggggcttgccattgtttactctcttatttaccaacttctggcctaggcatgacagtgggcaccttcccccagccctggctgggcccagcgcctgtgttctgtgttagaaaggttttatatatatataaaattacatatatatgtagaaatatatgtaatttttggggccctgttccttgcacattttacagttacctcatttttcccatgtatgtatttgagaaaatgctaatatatagagaaaaaaatggttaaaaaaaaaaaaaaaaaaaa

SEQ ID NO: 20488 - DNA, 470 bp, Homo sapiens
  misc_feature (1)...(470): n = A,T,C or G
ctttgcattcgctccgctgcaggaattcggcacgagggaaccagggccgagcccgcgggccggggctagccagccggtcggagatgtccgcccagaggttaatttctaacagaacctcccagcaatcggcatctaattctgattacacctgggaatatgaatattatgagattggaccagtttcctttgaaggactgaaggctcataaatattccattgtgattggattttgggttggtcttgcagtcttcgtgatttttatgttttttgtgctgaccttgctgaccaagacaggagccccacaccaagacaatgcagagtcctcagagaagagattcagaatgaacagctttgtgtcagactttggaagacctctggagccagataaagtattttctcgccaaggcaacgaggagtccaggtctctctttcactgctacatcaatgaggtggaacgcttggacagagcn

SEQ ID NO: 20489 - DNA, 451 bp, Homo sapiens
  misc_feature (1)...(451): n = A,T,C or G
aatagacactcgcccccgcgctgcaggaattcggcacgagattgcaagttatcttgtggtattgggaagttttcaatgagcaataatcacgtctcgggtaaacctcactgactatgatggggccactgtgcagagagcctttctcctttttaaacacagccgccatgttgttatcccacctaacaaaagtactggtgatgcctgatgatcatctaatacacagttcacgttcatgttttctcacttgtctaaaaaatgtctttcataagttgcttggatcctgcttcaaataaagccatttgtatttggtaaaaaaaaaaaaaaaaaaaaaaaaaaaaaaaaaaaaactcggggggggggccgggccccaaattccccttatgggggggggaaaaaaaattccgggcccggggtttaaaacggggggggggggggaaaagngcctgngctg

SEQ ID NO: 20490 - DNA, 474 bp, Homo sapiens
agagggacatgcattgactcgcgctgcacgaattcggcacgagaagctgtagaacaaatgtttggggttaccattgaaaatctaatgtctgcaatatttttctcctcacaacttggaaacgttcccagttcattttcagtcctgttgtgagcacagttctgaagggtttattattgtcaaaataagttttgttttgttttgtttatgttgggtttttaatgttgtctcttgacccttaatgctcaggttcttgtgggagttaatcagccacatccaacgttaccttgagggggaagaagagggtgatgctcagaagctaaacaagacaggggccacatgaccctctattgattatccccaagtagaaagtcctgtggttttgatgttaatggtaatagttgatcatatatggcataattttctatcagcttcctactcagtcactataaacacagacttgaaatagtactttaa

SEQ ID NO: 20491 - DNA, 470 bp, Homo sapiens
  misc_feature (1)...(470): n = A,T,C or G
ngaggttccnaaaatgataggcttgatcgtcatcgggaannncgcacgaggcattcctcaggccttatctctctggttctttctgctacatttgacaccttgggatgactctcaccttctggaatctctctactaccttggtttcagaagagtgaaccctctggattatcacatgaagctacttcctgtgagcagcccagggatggccagtcacttgtgacctactttcagagctggcagttctgacttctagaacaaactcggaacaagcccatctacagctggttgactgagtttcctttgggctcctggcaccagaaagaattgctcactggaaggatcataggtggcactcatgtctcactgccccactcaggcggagtgcggtgactctcgcctataatcccagaattttgagaggccgaggtgggcagctcacttgagctcagatgttcgagaccagcctgggc

SEQ ID NO: 20492 - DNA, 495 bp, Homo sapiens
  misc_feature (1)...(495): n = A,T,C or G
aggggnagggggccgnnnnnnnnnnnttcgatcgatggcggacttcggcacgagcaaaggcgcagtgcttctctacagacttctccagacccaccacaccgcagaagcgggacgagaccctacaggagagggaagagtgcattttcccagatacttcccattttggaagttttcaggacttggtctgatttcaggatactctgtcagatgggaagacatgaatgcacactatcctctccaggaatgcctcctccctgggcagaaagtggccatgccaccctgttttcagctaaagcccaacctcctgacctgtcaccgtgagcagctttggaaacaggaccacaaaaatgaaagcatgtctcaatagtaaaagataacaagatctttcaggaaagacggattgcattagaaatagacagtatatttatagtcacaagagcccagcagggcctcaaagttggggcaggctggctggcccgtcatgttcctcaaaag

SEQ ID NO: 20493 - DNA, 489 bp, Homo sapiens
  misc_feature (1)...(489): n = A,T,C or G
ggaggcaggggnnnnttatgagtttgagattcgcacgagcttagatgctgcacatagtacctggtgctagggtctaggggctgcccaaagcccagcaggaacagctactactcatcctgcagaggccttggcccagaccagctttccatccaaagcctcacctggtttccatgtccatctcaacagtctggccttcctgtgactgtagcctggcagccacaccctcagtaatcccacacagtgagtccagcttctctgggagcttggccttcagttagcccagtccatgagagggcagggtaatgaggaggagtaaaggacctatcttctctgtccacataaggaagttgggaccacaaggtcttttatctccttgttactccccaaccccaccataacctcctactcagcacacagctttatcctggtagattataaggtgagcttccagaacctggcaggaggctgtgtatccccctgcacagaagg

SEQ ID NO: 20494 - DNA, 463 bp, Homo sapiens
  misc_feature (1)...(463): n = A,T,C or G
gggaaaannnattgactgcactgacgtccagcgcaagtggtttgaggtggcctttgtggcagaagagctcgtgcactctgagattcctgcctttctcctgccctggctgcctagccggccagcctcctatgcaagtaggcacagctcctttagccgaagttttggaggacggagccaggcggcagcacttttagctgccactgtcccagagcagaggactgtgaccctggatgttgacgtgaacaaccgcacagaccggctggagtggtgcagctgttattaccatggcaacttttctctgaatgcagcctttgagatcaagctgcactggatggcggtgaccgcagcagtactcttcgagatggtccaaggttggcatcggaaagccacctcctgtggcttcttgttagtcccagttttggaggggccttttgcactgcccagttacctgtatggcgacccc

SEQ ID NO: 20495 - DNA, 513 bp, Homo sapiens
  misc_feature (1)...(513): n = A,T,C or G
ggttgtccncggggnngnnnnnnaattgaccggcttgatgaattcggcacgagaattacctccccaagagaagccttccttattttggagtaaggtcctaagatagctggatgaatcaggaaaaccatgtcccctctaggtattattaatataagcaggaagggatctactataggaatgaagtatttataaaccactgaaagggatagagaagtgaacattggagaaagccagtagcaactgtgagaaatcagcaacttgcaggaggcacagaaaactcctgctgatggtctcagcttccagcagcacaaaagcagatgatgtactggaaaatgctcagaagatgctacaaaacctcatgcctactgtctgccactgctggagaaggaatcatggtttctagaagtgcctctcattagtggactttaaagcaaatcctggctggcaggaaattctgaggaatatagctcttaggcttccagcctctaccatgcaggagagaacacagaagga

SEQ ID NO: 20496 - DNA, 508 bp, Homo sapiens
  misc_feature (1)...(508): n = A,T,C or G
aggtgtccnnagggtgnnnnnntttgatcgccctaggaatccgtcacgagctggctntgggttatttctccatttatggcctatggttcagcaagtcaactcttgaggacctattttcctgaaggaatgagtgaaactttaataagaaacattctctttggagccgtgagagggttgaactatctgcaccaaaatggctgtattcacaggagtattaaagccagccatatcctcatttctggtgatggcctagtgaccctctctggcctgtcccatctgcatagtttggttaagcatggacagaggcatagggctgtgtatgatttcccacagttcagcacatcagtgcagccgtggctgagtccagaactactgagacaggatttacatgggtataatgtgaagtcagatatttacagtgttgggattacagcatgtgaattagccagtgggcaggtgcctttccaggacatgcatagaactcangtaagtgctgctaaaatccctn

SEQ ID NO: 20497 - DNA, 514 bp, Homo sapiens
  misc_feature (1)...(514): n = A,T,C or G
cgcgcatgtataaatattaataaaaaaaacgcgagaaaanggganattttgaanncctttgatccgcgctgcaggaattcagcacgaggaaaaggcaccacctttaagggccagttgtggggttggtaagcacagttatgaaaatttctatctagcctccgttttgaatggttttaagaaattttgtatatggaggatggaaatgcttatatatttattgaaaatccttttatttgaaattaaaattatttggtatataattgtttgatatttggggagggttttggaggggagataatgtcactgataaattaaaagcctgttgattttgcagaaaggtactgttagtgactgataaggatgcctttgttttgtacatgaaccaaatctttgttttacatttcttttatccaaaatatttatgcatctgacattttcaaccagaatttcaattatatactgcgatttttatttgttgcaatacattacaatttcagaggtactttggggctca

SEQ ID NO: 20498 - DNA, 488 bp, Homo sapiens
  misc_feature (1)...(488): n = A,T,C or G
ggtgnnnnnnnnaaggagnnnnntttgatnngcctcattgacccgcgctgcaggaattcggcacgaggtgaactccccttatagcctcaggctgcagtgtccttcccagctgtgtgagaaaatgaaagccgacgtccacagggacccaggcagggttgggtgttgtgactcactccacctctgtgccctgcagaggtactgttgggtccttgtcttgtgagcctggggtgagctctctgtacatgttgttgttccacgtatgggttgacttggcatgctggggggtcctcgttcactctctgaagttggcctcctttcactggggattgaaaagcacctccacccctaccctagtgatgtcccctgaggacccgggtgatagtacagtcaatattgtcagtactttgctttgattgaaggctgtagagctgagttaccaaaatttctatttcaaaggaaaccaaaccttanaaaaaaaaaaaaaaaac

SEQ ID NO: 20499 - DNA, 490 bp, Homo sapiens
  misc_feature (1)...(490): n = A,T,C or G
gggggtggccaaganaaanaaccctgatagcctggactgaaaccgattgctctaaacntagaaattatatccctaaaaattaaaacatgaatactgggtggtaatgataattgaggcaaatgtatttattttggtgacattttgcatatatgaagattttctgaaataggaccttcaagatcctagggggttttgtttggtttttaattgtgaggaataaaaaatcttctgcccacactggcattttaaggtgactgaggtcaaacgttgtttccttaggttgaaatagcagccaaaacattcttcacgcaggggcttgggatatggctgctggcaacacattttgttgtgggctccttaatttaatgataaaatttaagctaaacacaagccaaaaatgaataggtttttttaatttttatttttcactaaacaggcaattgaaatacatggtacaaaaataagtggtaagataattgtaaaatgaaat

SEQ ID NO: 20500 - DNA, 468 bp, Homo sapiens
  misc_feature (1)...(468): n = A,T,C or G
cgggggccggaggaaattggaactgagggctgaggcagnggcacgaggctgtcctgtcctggtgggagagaagtgggtggccaacaagtggatacatgagtatggacaggaattccgcagaccctgcagctccagccctgaagactgaactgttggcagagagaagctggtggagtcctgtggctttccagagaagccaggagccaaaagctggggtaggagaggagaaagcagagcagcctcctggaagaaggccttgtcagctttgtctgtgcctcgcaaatcagaggcaagggagaggttgttaccaggggacactgagaatgtacatttgatctgccccagccacggaagtcagagtaggatgcacagtacaaaggaggggggagtggaggcctgagagggaagtttctggagttcagatactctctgttgggaacaggacatctcaacagtctcaggttcgat

SEQ ID NO: 20501 - DNA, 478 bp, Homo sapiens
  misc_feature (1)...(478): n = A,T,C or G
attgacncccttnggaannattgaccgcctgtcagaattcccacgagatttttaaactcctagaggcttttctgagttggaaaaggccaattaatttacttctagaactcagaaacctgctgattctgttgcaacctacccaatctgtcttcactgacatgcttccactgttttgttttgacatttccaccaccgaacaagcacatattaggctggtttatgatgtcttgacacagctactgggcatggctcccactcctgactggcatggcctggggccggccagccactccatctgatctaccaggtctactagcccaatttgcatcatattaaagacaaattaatgaaactaaatgtgtggccttgggcatagatgtttcttggaccgtggtgttttcacctattaaaatcaggagactgggctgtctcgaaggctcacgcctataatcccagcacttcaggaggccaaggcggg

SEQ ID NO: 20502 - DNA, 378 bp, Homo sapiens
  misc_feature (1)...(378): n = A,T,C or G
nttggaaggccaanaaaatttgcccccgctgcaggattcggcacgagaagaggaaggtcatggatgaggaacacagggacaaggtccggcagagccttcagcagcagcatcataaggaggcgaaggccaagcccacgggggcccggccatctgccctggacagatttgtgcgctgagccagactccagggttgcctgggaacagtctctccccaagatcacctgtagggaaatgagtgttccctggaacaaggaggtgggggcagtgtggccccttccccaactgggggtggacagctgtctcctggggtgggttggtattaaagaggaaagcgattttttggaaaaaaaaaaaaaaaaaaaaaaactcaacggccca

SEQ ID NO: 20503 - DNA, 501 bp, Homo sapiens
  misc_feature (1)...(501): n = A,T,C or G
tggggaagaaaatattagataaaaaaggggaaanagggaatttgancgcttgatgaacctggcacgagcttcaatctatggagcagattcggcgaattatgcgaccaactgatgtaccagatcaaggtcttctttgtgatcttttgcggtctgaccccgataaagatgtcttaggctggggtgaaaatgacagaggagtgtccttcacatttggtgcataagtggctgcaaaatttctccatatgcatgatttggatcttatatgtagagcccatcaggtggttgaagatggatatgaattttttgcaaagaggcagttggtcactctgttttctgcgcccaattattgcggagagtttgacaatgcatgtgccatgatgagtgtggatgaaacactaatgtgttcttttcagattttaaagcctgcagagaaaaagaagccaaatgccacgagacctgtaacgcctcccatgggtatgatcacagagcaagcatagatat

SEQ ID NO: 20504 - DNA, 464 bp, Homo sapiens
  misc_feature (1)...(464): n = A,T,C or G
nttgcctgcccgcctgcaggaatcgcacgagagagatcctcctgccttgcctcccaagtgctcagattagagatgtgagccgccatgtctggccagataaattaagtcaaacatttggtttccagaaaataaagacaaatagagaaggttagatttttttttttccaacaagtggataaaagtctgtgactcgggggaaagtggaaggagaaatgcacccgatatagagtcattatgtttgcaaagcccctggtcatacaggccagggaacataagaccgcaattctaagtttctagataaacagcgatctccaagtcaagactgaggatgaagagggagaatgtcagaactcaagtgaagggcaatcagggcagactgcctggaggagtgatgccagaaggtttgggaagaaggtgtgggacaagacgaaagggtatttattcattcattcaacagaggttta

SEQ ID NO: 20505 - DNA, 486 bp, Homo sapiens
  misc_feature (1)...(486): n = A,T,C or G
ggattagaacacactgattaccnttnactgangtgcntgcggaattcccacgaggcaaggcgttcctgaatgcagccaacatcaactggtaaacaaaaaactgtgagaacggatcctgaatcttgcgcttaccaggggaaattcaggagagatatgaacctgagcaagatgaggttgaagttactcaatgcggcattaagcctgttcacggccacttcctccggcgtcaccaacacacacactgtacaccagcagtatttttacacggggtatgtgtgttaagtactatcaggtggataattattacttcacctgtatttgctgccttgataccattagagaaactcatgaattataaatagcatagtgaatttgtgattccctgaagatatactaaggtggacttttaaaaaggcttctattccaaagggaactaatatggaggaaatggtttcgagaaagaaaaaagaaaaaacggagtccttg

SEQ ID NO: 20506 - DNA, 472 bp, Homo sapiens
atttgaccttcgctcgccatgcacgaattccgcacgagattgaatacctgcttaagaagcttacagaagctatgggaggaggttggcagcaagaacaatttgaacattataaaatcaactttgatgacagtgaaaatggcctttctgcatgggaacttattgagcttattggaaatggacagtttagcaaaggcatggaccggcagactgtgtctatggcaattaatgaagtctttaatgaacttatattagatgtgttaaagcagggttacatgatgaaaaagggccacagacggaaaaactggactgaaagatggtttgtactaaaacccaacataatttctcaccttaaaggagactacccctttgccccatattgtcaacctaattttctctcgtactctctctagtgaatgatgtgctaccaagtatatgccaggctgtgagaggattatactgagtagtagaaaga

SEQ ID NO: 20507 - DNA, 508 bp, Homo sapiens
  misc_feature (1)...(508): n = A,T,C or G
aggggnnaagnnngnncaggggnccnngnnnnccttgatnaacttgacccgcgctgcaggaattccgcacgaggcaagacgtgcctactcatgagctatgccaacgacgccttcccggaggagtacgtgcccaccgtcttcgaccactacgcagtcagcgtcaccgtggggggcaagcagtacctcctaggactctatgacacggccggacaggaagactatgaccgtctgaggcctttatcttacccaatgaccgatgtcttccttatatgcttctcggcggtaaatccagcctcatttcaaaatgtgaaagaggagtgggtaccggaacttaaggaatacgcaccaaatgtaccctttttattaataggaactcagattgatctccgagatgaccccaaaactttaccaagactgaatgatatgaaagaaaaacctatatgtgtggaacaaggacagaaactagcaaaagagatgtcagcacatgtggacgccacacagcagggac

SEQ ID NO: 20508 - DNA, 467 bp, Homo sapiens
  misc_feature (1)...(467): n = A,T,C or G
cgccccccccattgcccgcctgatgaattcggcacgaggtcacacctctgacattcaccaaggtctctgagggtcaagcagacatcatgatatcttttgtcaggggagatcatcgggacaactctccttttgatggacctggaggaaatcttgctcatgcttttcaaccaggcccaggtattggaggggatgctcattttgatgaagatgaaaggtggaccaacaatttcagagagtacaacttacatcgtgttgcagctcatgaactcggccattctcttggactctcccattctactgatatcggggctttgatgtaccctagctacaccttcagtggtgatgttcagctagctcaggatgacattgatggcatccaagccatatatggacgttcccaaaatcctgtccagcccatcggcccacaaaccccaaaagcgtgtgacagtaagctaacctttgatgcn

SEQ ID NO: 20509 - DNA, 422 bp, Homo sapiens
attagacctcgcccccgcgctgcaggaattcggcacgaggagcaataaaaataagaagaaaggaaaagccagaaaaatagagaagaaaggaaccatgaagaaacaggccaacaaaactgcctcctcaggcagttcagacaaagacagttcagctgagagctcagcccctgaggaaggtgaagtgtcagactctgacagcaacagctcctcttccagttcagattcagactcttcctcagaagatgaagagttccatgatggctatggagaagacctcatgggagatgaggaagacagggcccgtctggaacagatgacagagaaagagagagagcaagaactgttcaatcgcatagagaagagggaggtgttgaaaagaagatttgaaatcaagaaaaaactaaaaacagccaaaaaaaaaa

SEQ ID NO: 20510 - DNA, 471 bp, Homo sapiens
  misc_feature (1)...(471): n = A,T,C or G
nttctgccttgcctgcacgaattcggcacgagattttaggaaacactaagaagatacagggatctttactgatacctaaaaagattacaattgagtaattgctcaattgagtgtaggggcatacctgaaggaagaatttgcatttgggacttcgaaggaagcttccaagagatttgggaagagacctgaacaaaaagttaaagcatggtgaatgtgatatcactgtcaatccagtataaaagcagaggaagttgaaggaaaatctgtatcccatatgcacattttttctgtctttttagatcttagatgctagcgttacatccacaaaaccagtgttgccttgtataactattatattggcctgctgacctgtgctacctcagatctgtcaaggaaccagtatgtcgcatattcttggttcttcattcagttgaatatggnttttcatcatttctcttcaaaataatttag

SEQ ID NO: 20511 - DNA, 469 bp, Homo sapiens
tgtggacatgaactgactcgcctgcacgctatacccggctaatttttgtatttgtagtagagacaggggtttcaccatattggccaggctggtctcgaactcctgacctcgtgatccacctgccttgacctcccaaagtgctaggataacaggtgtgagccaccgcaccctgccaagttattttaaaacgtaccattattattgactatagtcacctggctgtgttatcaaatagtatgtcttattcattctttctttgtgtgagtgtgtgtgcgtgtgcgtgcgtgtgtgtgtgtgtgtacctgacacaaaagccgataatatctgtgtgcgagactatagataatctccacagcctacaagagactgacacacaatgttatctgagtgagaacatgtgtgagcatgcagatacacaagatctgcgcacacgcgaaaaaaaaagaatacacacgaggggggctaccgc

SEQ ID NO: 20512 - DNA, 480 bp, Homo sapiens
  misc_feature (1)...(480): n = A,T,C or G
aatttgaacgtcctgangacttcggcacgaggaccacccggagtgattgcccggcagagcgcggtaaagaatctcatttggacacattgagtcgggcacaactgacccaacttttcttagcctcagtcctggaatgccctttctataagggtccaaaactccttcctaaatatcaagtgaagtcatttcttaccccatgctgttccctggagacccctgtggattctcagctttatagatatgtgaagattgggctgactaaccttttaggagcaagattatattttgctccaaaagtgttgacaccctattgttatacaatagatgttgaaattaaattagatgaagaaggatttgtattgccatccacagctaatgaagatatccataaaaggatagcactgtgtattgatggtccaaaaaggttttgctccaatagcaaacacttactgnggaaagaagctattaaacaaagacacc

SEQ ID NO: 20513 - DNA, 298 bp, Homo sapiens
cgaggtgacctgcagttattactgctacaaatcttgacgcatgtaccactgagggaggagctgatgctaagggattagattatatgttgataagatttgtagcagtaataactgcaggtcacttgtatgtaatggatgtgaggtagccgaagtttggttcagtaagcagggaatacagtcgttccatcagagctggtctgcacactcacattatcttgctatcactgtaaccaactaatgccaaaagaacggttttgtaataaaattatagctgtatctaaaaaaaaaaaaaaaaaaa

SEQ ID NO: 20514 - DNA, 495 bp, Homo sapiens
  misc_feature (1)...(495): n = A,T,C or G
aggggnaagggggnccggggnnnnnnnccttgatcgctggcggacatccgacgaggagccgcgaggacacgggctgcaacctgcagcacatcagcgaccgggagaacatagacgatttgaacatggaattcaatccttcagatcatcctcgggccagcacaatattcctcagtaaatctcagacggacgtgagagaaaaacgcaagagtctcttcattaaccataaatccgaagtgccaccagattatgacaaacacaacccagagcagaagcagatttaccggttcgttcggacactgttcagtgctgctcagctgacggctgaatgtgccatcgtcaccctggtgtaccttgaaagacttttaacatacgcagagatagatatctgtccggccaactggaagcggattgttttaggggcgatcctgctggcctccaaggtgtgggatgaccaggctgtatggaatgtggattactgccagatcctgaaagaca

SEQ ID NO: 20515 - DNA, 505 bp, Homo sapiens
  misc_feature (1)...(505): n = A,T,C or G
gggagggcagggngccnnnnnnnccttgatcgctcgtgcgcctgcggacttcgcacgagcttgcttgtgactctaccaaaaaatatttttgcaaacacttaagtttgtgtttttctaagaaaactccccttgtggccagtgtggatggtcaaatggagcagggaaaaactggaggcaataaattaaatatttattgatagagtttgtggaggcaggaaaatgagaggcgaataattctgtgtagctggagtagattaataataatgtgttgcaatgtgatatagtaaatgagaaaaagctagttacaaaacaatattcagtatgatctcatttttataaaaaatatgtgtgtagaaaaatatctggattgaagacctcaatggctgaaggcgagaggaagacagccctggaaatggtccaggcagctggaacagatagacactgtgtgacatttgtattgcacgaggaagaccataccctangaaattctctacgttacatgatc

SEQ ID NO: 20516 - DNA, 452 bp, Homo sapiens
attgcctcgtccccgctgcaggaattcggcacgaggccttcggcgcaccttgcaatagctgtcgaagctgctggttgggcacatccagatacaatctgcctcatgggtgcaaacacgctgattggcaactgggatcgctcttttgggggaggaatgaatttatctatcaagctggcccagctcacttgtcatggcaatctttgccatagctttcagtctttcaacacttcctacacagatacaggattatggggactgtatatggcttgtgaatcatacactgttgcagacatgctacatgttgttcaagacgaatggatgcgactctgtaccagtgtcacagaaagtgagggtgcacgagccaaaaatcttctgaaaacaaacatgttgatgcagcttgatggatcaactccaacttgtgaagatattgagaggcatatgttatgctataa

SEQ ID NO: 20517 - DNA, 461 bp, Homo sapiens
  misc_feature (1)...(461): n = A,T,C or G
nttgcatcgatcgcctgcggaattcgccgagcacaagaccttctatgtcctgaaccctcacataacctgtcaagcacagaggagcaatttcgagccaatttcagcagtgaagctggctggagaggagtggttggggaggtgccaagacctgaacaggtgcaggaagccctgacaaagcatgatttgtatatctatgcagggcatggggctggtgcccgcttccttgatgggcaggctgtcctgcggctgagctgtcgggcagtggccctgctgtttggctgtagcagtgcggccctggctgtgcatggaaacctggagggggctggcatcgtgctcaagtacatcatggctgggtgccccttgtttctgggtaatctcttggatgtgactgaccgcgacattgaccgctacacggaagctctgctgcaaggctggcttggagcaggcccaggggcccccct

SEQ ID NO: 20518 - DNA, 493 bp, Homo sapiens
  misc_feature (1)...(493): n = A,T,C or G
tgaggcttnnnnnnnaattgatcgttngtaggacttcggcacgaggcgcggtggctcacgcctgtaatcccagcactttgggaggccaaggtgggcggatcacaaggtcaggagttcgagaccaacctagccaacatggtgaaaccccgtctctactaaaaataagaaattagccgggtgtggtggcacgcacctgtagtcccagctacttgggagcctgaggcaggagaatcgcttgaacctgggaagtggaggttgagtgagccgggaccgtgccattgtactccagcctgggtgacagagcgagattccgtctcaaaaaaaaaaaaaaaaaacttcgggggggggcccggccccaatttccccttttgggggggggattaaaaataaatggcccggggtttaaaaccggggggatggggaaaaacngnncntttnccttgtgtgngcccctttgggttggggtgtgtttcgctgctttcgtgtgttttct

SEQ ID NO: 20519 - DNA, 480 bp, Homo sapiens
  misc_feature (1)...(480): n = A,T,C or G
cttcgaccattgaccgcctgcaggaattcggcacgaggagactttgaggtaacatggtctggtggtggcatgagtcctcagaaggtatttgtaataaggttccacacccagctctctcagctgtttttaaatgaatgtgtgtgaggaacagatgggaaagttgggagatctgtctacagagaagcaaagttgtggttctcttgctaacttcaaggtgagggacattgggcaccctaagtttgggaacttggttgataaatacgtatatggtccattccataaatcagtggtgagtgactggcctgggttctagacctctgggaaccagcacctgagtcacagctgtctaggcctcggtgctggcctgggttctagatctctgggaaccagtgcctgagtcacagctgtcagtgcagccatttgcccagggctgctcccgagggggatgatgggaaattcagcagtgtagactcactttan

SEQ ID NO: 20520 - DNA, 500 bp, Homo sapiens
  misc_feature (1)...(500): n = A,T,C or G
gggggggaggggggnngnnnaattgaccgtctgcggacttcggcacgagctcccctgaggccccgttcctgggaggggcacccctcaactgtcactttatggactgtctgtgcaattacgtccaccaaagacccgtgttgggggtactgaaggagaggccctgggggaccctctgaagcatttctgcctcactttatgtcatctgcttctcccctgttggggctaaggaaggagataggtggctcctaatagaggaggccatcttctcacccaccccttcctctttggcacagctactcctggctgggggtggggccttgggggtctgggctgggcatccatggtcactgcctcagcccagccaggctgtgcctttgactttaaaataaaagtccacccagtgctgtgtgtggcaaaaannannaaaaaaaaaaaaaataaaaaaaaaataaaaannnttttnnnnnnnnnncccttgggatataagccctttttttttc

SEQ ID NO: 20521 - DNA, 365 bp, Homo sapiens
  misc_feature (1)...(365): n = A,T,C or G
nattgacccctcgtgcagcaattcggcacgagcgacagtggaattacgtagccagtatgtcaactcctagaagcacagttggtgttgttgcattaaacaacaaattatatgctattggtggacgtgatggaagttcctgcctcaaatcaatggaatactttgacccacacactaacaagtggagtttgtgtgctccaatgtccaaaagacgtggaggtgtgggagttgccacatacaatggattcttatatgttgtaggggggcatgatgcccctgcttccaaccattgctccaggctttctgactgtgtggaacggtatgatccaaaaggtgattcatggtcaactgtggcacctctgagtgtt

SEQ ID NO: 20522 - DNA, 513 bp, Homo sapiens
  misc_feature (1)...(513): n = A,T,C or G
tggtgnccncaagctgnnnnnnnttttgaaaaccattgaccgcctgtcacgaattcggcacgagatcagatactgaatatatcaatgggctagagtgtattatagtacatatgggtatgttgttttcccccttttgactaaataaactctcccctctctgcaacaggtaaatttccagtttacctttttcttgctgtttttaattttttttattttgaaggctttgtatctttatatctcagctgaaaatattacattctaactccccaaagctattctcacattatttgcaagtattttttcatagtttacatgtttgtgtatttgtttaatacattccacaagactgaaagtcttggtgagggcaggaactctgtctaggttgttcatctggcagccagcaaacccaaaataagtattagttgaatgaatagctaaatagatgagccatggggtagcatatctgttttagctactgcttgcctgttatcatcctgggatgctgcttgcttc

SEQ ID NO: 20523 - DNA, 502 bp, Homo sapiens
  misc_feature (1)...(502): n = A,T,C or G
tgatgtgccnaggttnnnnnaatcgacgccttggaatccgtccagagaaaaccacttaccccttctcaccgaggaagagcgggagaaagggtatggcacagtcacaagggtgggtgaaaagatacatcaaggccttttgtaaaggcttctttgtggcggtgcctgtggcagtgactttcttggatcgggtcgcctgtgtggcaagagtagaaggagcatcgatgcagccttctttgaatcctggggggagccagtcatctgatgtggtgcttttgaaccactggaaagtgaggaattttgaagtacaccgtggtgacattgtatcattggtgtctcctaaaaacccagaacagaagatcattaagagagtgattgctcttgaaggagatattgtcagaaccataggacacaaaaaccggtatgtcaaagtcccccgtggtcacatctgggttgaaggtgatcatcatggacacacgtttgacagtaattcttttgggccggt

SEQ ID NO: 20524 - DNA, 468 bp, Homo sapiens
  misc_feature (1)...(468): n = A,T,C or G
nggagtcnntttgaccgcctgtggtaattcgctcgagcagacaggccgtggtcaggcccaggccaccggccgggttctgccacagcttcccacgtgcttgctgacatgcgtgtgcctgtgtgtggtgtctgttgctgtgtcgtgaaactgtgaccatcactcagtccaaacaagtgagtggccctcgaggccacagttatgcaactttcagtgtgtgtcataacgacgtcactgctttttaaactcgataactctttattttagtaaaatgcccaggagtcctggaagctacgcggacttgcagaggttttattttttggccttagaatctgcagaaattaggaggcaccgagcccagcgcagcagcctcggacccggattgcgtttgccttagcggatatgtttatacagatgaatataaaatgtttttttctttggaaaacaaaaaaaaaaaaaaaaaaaactggg

SEQ ID NO: 20525 - DNA, 498 bp, Homo sapiens
  misc_feature (1)...(498): n = A,T,C or G
aggggnagnnngnacgggnccngnnnaattgaccctcgtcccgctctgcggaattcggcacgagcagcagtggaatgggaggaagagctcctctatcacgtggaagagatagttatggaggtccacctcgaagggaaccgctcccctctcgtagagatgtttatttgtccccaagagatgatgggtattctactaaagacagctattcaagcagagattacccaagttctcgtgatacaagagattatgcaccaccaccacgagattatacttaccgtgattatggtcattccagttcacgtgatgactatccatcaagaggctatggcgatagagatggatatggtcgtgatcgtgactattcagatcatccaagtggaggttcctacagagattcatatgagagttatggtaactcacgtagtgctccacttacacgagggcccccgccatcttatggtggaagcagtcgctatgatgattatagcagctcacgtg

SEQ ID NO: 20526 - DNA, 505 bp, Homo sapiens
  misc_feature (1)...(505): n = A,T,C or G
agggcngnnnnnnnattgcaatcgctccgcctgcangaattcggcacgagcgcaaacatgcagatctttgtgaagaccctcactggcaaaaccatcacccttgaggtcgagcccagtgacaccattgagaatgtcaaagccaaaattcaagacaaggagggtatcccacctgaccagcagcgtctgatatttgccggcaaacagctggaggatggccgcactctctcagactacaacatccagaaagagtccaccctgcacctggtgttgcgcctgcgaggtggcattattgagccttctctccgccagcttgcccagaaatacaactgcgacaagatgatctgccgcaagtgctatgctcgccttcaccctcgtgctgtcaactgccgcaagaagaagtgtggtcacaccaacaacctgcgtcccaagaagaaggtcaaataaggttgttctttccttgaagggcagcctcctgcccaggccccgtggccctggagccctcata

SEQ ID NO: 20527 - DNA, 496 bp, Homo sapiens
  misc_feature (1)...(496): n = A,T,C or G
aggcccaaaanaaanttttgatcgcctgtggaattctgcacgagcattgatgtagtctcccagcacctgatgatgcaacgcaagggtgagaaaatgggccgctttcaggtgcgggggaacccagagggacaaggggtagttgcctttggccaaaccaaggacatcatcaggcagatcctgcaggctgatggacttcgcggcttctatcgaggctatgtggcttcactgcttacctatatcccaaacagtgctgtctggtggcccttctatcacttctatgcagctgtctcggggcccctggctgcagccactgcctccatcctcaccaatcccatggatgtcatacgaacccgtgtgcagtccagtcagtcttctcctgaacatctaagccccttctgtgtgcttagcatctgcagaagccagcccacagccaggcacagtggctcacgcctgtaatcccagcattttgggaggccgaagccggcagatcacctga

SEQ ID NO: 20528 - DNA, 487 bp, Homo sapiens
  misc_feature (1)...(487): n = A,T,C or G
nttgatcgccntcacgaaantttgatagccttcggaantncgcccagctggatctagatccagggccagggtagaaagcagagccccataccttagacaaacgcgtatcctgactgccccttcctgctgcgacatgtgcgtgatagagattcttaccagccgtgccacattgttggagcttacagttacccaattgcaactctgtctagaacaatgaacccttattcaaacgatattcttgaatataaaaatgcccatggcaagatcatcattctgtatgacgatgatgaaaggctggccagtcaggcggtcaccaccatgtgcgagcgtggatttgaaaacctcttcatgctttccggaggtctaaaagtcttagctcacaaattcccggaaggactgattactggttccctgccaacatcttggcagcaggcccttcctcctgggtctgcccggaaacgatccagccccaaagggccacccctac

SEQ ID NO: 20529 - DNA, 492 bp, Homo sapiens
  misc_feature (1)...(492): n = A,T,C or G
aggggnagnnngncaggggnnnnnnnaatgaccgatgggngcctacagaattcgagacatacttaattttgaatttctccttgccacgttaataaagccaaaagcagcgggtgctattcgtggcaacacacttcactgaacccacttgcttccaaaacgatgccagcccgaggcactgctacgccagcagctgccacatgggatggtggctcaggcgctccctccaggattctgcccctgcctgtccacagactcctttgtgctggaacctgggctcctccagctgccaggcaggagtcggtaggactgtgcctgtgcctccctcagcggggccctgggcggggttccaaggcctgcgagctgggaaaggacagatgaggggacctcgtgccttcttgctgtcatgcaatgaccccgccttatgttgccgaaataagcaactcttaagtttgcctgactgccttatgctggtaaagaaaagggattcaactg

SEQ ID NO: 20530 - DNA, 455 bp, Homo sapiens
atttgccctgcgctgcacgaattcggcacgagatttcagcctacattgatgccaagcttttttgccacaaagaagattcttaccaagagtgggctttgtggaaacagctggtactgatgttcacctttatatatgtactagcattttccacgctgatgtttatgtactgtaaacagttctgcactcttgtacaaaagaaaaaacacctgtcacatccaaatatagtatctgtcttttcgtcaaaatagagagtggggaatgagtgtgccgattcaatacctcaatccctgaacgacactctcctaatcctaagccttacctgagtgagaagccctttacctaacaaaagtccaatatagctgaaatgtcgctctaatactctttacacatatgaggttatatgtagaaaaaaattttactactaaatgatttcaactattggctttctatatttt

SEQ ID NO: 20531 - DNA, 503 bp, Homo sapiens
  misc_feature (1)...(503): n = A,T,C or G
aggccnnnnnccnttcgcattcgcaccggctgcaggaattcggcacgagtgttgagggagtcgggccgcgactgtggtcgtttttataccttcccgcgcggacgccggcgctgccaacggaagggcgggtagggcggctctgctgccatgaaggtgaagattaagtgctggaacggcgtggccacttggctctgggtggccaacgatgagaactgtggcatctgcaggatggcatttaacggatgctgccctgactgcaaggtgcccggcgacgactgcccgctggtgtggggccagtgctcccactgcttccacatgcattgcatcctcaagtggctgcacgcacagcaagtgcagcagcactgccccatgtgccgccaggaatggaagttcaaggagtgaggcccgacctggctctcgctggaggggcatcctgagactcctttctcatgctggcgccgatggctgctggggacagcgcccctgagctgcacaaggtggaa

SEQ ID NO: 20532 - DNA, 461 bp, Homo sapiens
atttgaccccttttgccccgcgctgcaggaattcggcacgagacaaattgaccatgctaaactaatcatgttccaatgaatacatcacctttcttcatttcttgatgctcttcccaatccttgtctacctgataataaattcttacttgtccttcaagacccaactcagatagatagagcttcctgagtgaaacctgctttgattgttcaggcacttggccaccttctcctcactcctcccacagccttctgtcttggccttgtcatcacatcaatcctgttgtgtggtgctgtgtgtcttctgggtcagtcctaggcacatgctgcccagcacatgtccacctgggaaatgagatgccatcgtcacattcatttggtcaccctcagtccagccagtgggcttgctctcatttggcctgttctcaggggtgggaaggaagagcgtcccttccttctccttt

SEQ ID NO: 20533 - DNA, 479 bp, Homo sapiens
  misc_feature (1)...(479): n = A,T,C or G
nttgatcgccttaagaatctcgcgagcccttctgtacaataaatctggaggaaaagtgagactcacctttaaactagaacaagaccagctgtggattggcactaaagagcggactgagaaattgcccatgggctccataaaaaatgtggtcagtgaacctatcgaaggacatgaagactaccacatgatggcgtttcagttgggccccacggaagcctcttactactgggtgtactgggttccaactcaatatgtggatgcaatcaaagacactgtgctggggaaatggcagtatttttgaaagcactttcacctctggcccaagagactgacccaaagtgaaggacattgccgggagaggcctgcagcatccctggatttcagagttctggaactttgttcataaaaaatctatattcaatctgaggtgatgtggtgactgaagccagaggtgatgtactttcaccattagcttaatt

SEQ ID NO: 20534 - DNA, 490 bp, Homo sapiens
  misc_feature (1)...(490): n = A,T,C or G
ntttgatcgccntcggaanttttgacagcctgtctgaattcagcacgagctgagaggccgcgaaatcggcatgtggtacgcgaaaaaacaggggctgaagaacaaggaagcggagaggcaagagagagctgtagtacacatggatgaacgacgagaagaacaaattgtacagttactgaattctgttcaagcgaagaatgataaagagtcagaagcacagatatcctggtttgctcctgaggatcatggatacggtactgaagtttctactaagaacacaccatgctcagagaacaaacttgacatccaggaaaagaagttgataaatcaagaaaaaaaaatgtttagaatcaggaacagatcatatattgaccgagattctgagtatctcttgcaagaaaatgaaccagatggaactttagaccaaaaattattggaagatttacaaaagaaaaaaaatgaccttcggtatattgaaatgcaggtagta

SEQ ID NO: 20535 - DNA, 497 bp, Homo sapiens
  misc_feature (1)...(497): n = A,T,C or G
tggggngcnnnnnnnaattganntttcgcccgcctgcaggaattcggcacgaggacctgcgcccggtgcattggggatgagagctttgccctgggcagccagaacgaggtgtactgcctggacgacttctacaggcacacagcagctaagtacccaaagtctctccacaggtaagtattgaagctcttggtaagtatgcacatccccaaggacctgactttggggccctgctctgaaagcccagacctcggggtctgcccttggagctgaatgatgcagtggggacacacagataaccgctggactcaatccctgcccatgagttgctcaccactcaagcggagagacagatgtgcctcttaagaaagaaagaagtactggctgggcacagtggctcacgcctgtaatcccagcactttgggaggccaaggtgggcggatcacgaggtcaggagttcaagaccagcctgaccaacatggtgaaaccccgtctctact

SEQ ID NO: 20536 - DNA, 453 bp, Homo sapiens
  misc_feature (1)...(453): n = A,T,C or G
nttttgcccctgcgctgcacgaattcggcacgagcacagttttacaatttgtcaatggcacagatacttgagacatataaattggatgatcacagagatattgtggtaaatatctgggcttggaatcaaaggaccctgggttcaaatctcagcttcgaatcaaagaagctaaattctttggctgagtaaaccaaaacacctcccaccagaccccacctccaaatttcaacatgaaatttggagaggataaatatccaaattatttcagtgcattcatctggaaactgagaataacaatgctcactttgcaaatttgtgggaattaaatggcataggcaaaatattggtcttttcttctcttactcctctgagttttgctttcttccacttgaactttaccactcaattgttaaaagccttgaattttgccattggattctatttaataaactt

SEQ ID NO: 20537 - DNA, 477 bp, Homo sapiens
  misc_feature (1)...(477): n = A,T,C or G
gcgggatttttatgacgcatggagaactctcacgagggattangtgatcggagcttgaaaagaaaaaaagccaaacaaataaacaaaacccacccaccctaacaaatatgaggctgctggagagaatgaggaaagactggttcatggtcggaatagtgctggcgatcgctggagctaaactggagccgtccataggggtgaatgggggaccactgaagccagaataactgtatcctacattgctgttgcaacaatattctttaacagtggactatcattgaaaacagaggagctgaccagtgctttggtgcatctaaaactgcatctttttattcagatctttactcttgcattcttcccagcaacaatatggctttttcttcagcttttatcaatcacacccatcaacgaatggcttttaaaaggtttgcagacagtangttgcatgcctccgcctgtgtcttctgcagtgatttt

SEQ ID NO: 20538 - DNA, 475 bp, Homo sapiens
  misc_feature (1)...(475): n = A,T,C or G
ngcgcgttgcnncccaattgcccggctgtcacgaattcggcacgagagaaagcgtaagagacccatacagaaagtagaaatgggtacatcaagtcagaatgatgttgacatgagttggattcctcaggaaacattgaatcaaatcaataaagcttcaccaagaaggttgcccaggaaacgggcacagaagagatcagtgggatctgatgagtaaatgttcctttgtgcaacaattcggtctttacttaacctgccctaatatttttcggcctgatgggaattagtgcagagaagccatgtcaccatagaaggcaactcctacttgtgtgtggactgagcaatcagagtctggcgataatattgctgaaaatgcactgcattcatttttctaaagtaacaaatttggtttttttttaaaccattnnnnnnnnnnnannnnnnnnnnnnnnnnnnnnnnnnntcttcgggggggggc

SEQ ID NO: 20539 - DNA, 505 bp, Homo sapiens
  misc_feature (1)...(505): n = A,T,C or G
agcccngcnnnnnattgccattgctccccatgcaggaattcggcacgagacagaatttcattcatttgtgcttttgcattaaactgtgaatgttccaacacctgcctccacttctcccctcaagaaattttcaacgccaggaatcatgaagagacttctgcttttcaacccccaccctcctcaagaagtaataatttgtttacttgtaaattgatgggagaaatgaggaaaagaaaatctttttaaaaatgatttcaaggtttgtgctgagctccttgattgccttagggacagaattaccccagcctcttgagctgaagtaatgtgtgggccgcatgcataaagtaagtaaggtgcaatgaagaagtgttgattgccaaattgacatgttgtcacattctcattgtgaattatgtaaagttgttaagagacataccctctaaaaaagaactttagcatggtattgaaggaattagaaatgaatttggagtggcttttatgtatg

SEQ ID NO: 20540 - DNA, 459 bp, Homo sapiens
aatttgccccgctctgcaggaattcggcacgagtttaaatctcatgggttctattaaaaaaatatatatatagggccccaatccattgccatcaaattgcccttggacttttccaaggtatattatggggttttatgcaaaattccaagctaccatgtaactttttttaaccatttaacaaggagggggaactgtttcctaccttctttacatgttgtgcattgttgtggtccagaaatgccaaacctttttaaagatggtgcaactttgagtccttggcttgactatacaggccttgaacttcatggcatatcaactttgccatatctgcaggagagctgttctatatgaaatagctcagagttgcaaatatcacatgtgaatgatacggtaacttttaagaaatgtctgtattgtatttgaagactggttgccataaatctgaaatttgaacctatg

SEQ ID NO: 20541 - DNA, 460 bp, Homo sapiens
attgacccccgtttgccccgggctgcaggaattcggcacgagcggcagcggggtgaccagctagtcccattctccaccaagtctggggataccttactgctcctgcaccacggggacttctcagcagaggaggtgtttcatagagaactaaggagcaactccatgaagacctggggcctgcgggcagctggctggatggccatgttcatgggcctcaaccttatgacacggatcctctacaccttggtggactggtttcctgttttccgagacctggtcaacattggcctgaaagcctttgccttctgtgtggccacctcgctgaccctgctgaccgtggcggctggctggctcttctaccgacccctgtgggccctcctcattgccggcctggcccttgtgcccatccttgttgctcggacacgggtgccagccaaaaagttggagtgaaaagaccctg

SEQ ID NO: 20542 - DNA, 507 bp, Homo sapiens
  misc_feature (1)...(507): n = A,T,C or G
aggccngncccccaattgccatggctgcagcaattcggcacgagcttagccaaaccatttacccaaataaagtataggcgatagaaattgaaacctggcgcaatagatatagtaccgcaaagaaaaatgaacccaaacatagacttgcaagacatggcctgtatgagaagaaaaagacctcaagaaagcaacgaaaggaacgcaagaacagaatgaagaaagtcagggggactgcaaaggccaatgttggtgctggcaaaaagtgagctggagattggatcacagccgaaggagtaaaggtgctgcaatgatgttagctgtggccactgtggatttttcgcaagaacattaataaactaaaaacttcaaaaaaaaaaaaaaaaacctcgggggggggccgggcccccaattcgccttatagggaggggaataacaattcccgggcccgcggtttacaaccggggggagggggggaaaanncgnntcttgggtgctttttttccctct

SEQ ID NO: 20543 - DNA, 476 bp, Homo sapiens
  misc_feature (1)...(476): n = A,T,C or G
gggggcccnnnnnnnaattgacnatcgtnccgcgctgcacgaattcggcacgagaggtgctgatatctacaatgtcagcaatgaagaaataccaaattgggatccaaatacataaaatagatatgttttaccagtaaatttggttccagtggcaaaaggacccatttctctggggacataggcttagaaaagataccttaatttgtggtatggctgtacacacctgtgctttatgtgaatttgggtctgtttgtcactagcaaaagtcaacatttttaaaaatctttttttaatctataaaacttaatgattcactgcaaaaattatgataatagaagtcattatattttgaacctctatgtgccaggtatcatgttaagcactttatatgtattatctcctttaatccttaccgtaattttataaagtagttactattgtcatcatcgctgttttatgaaggaagaaactatggg

SEQ ID NO: 20544 - DNA, 513 bp, Homo sapiens
  misc_feature (1)...(513): n = A,T,C or G
nggggggttnnnnnnnaaattgancgaattgtcaccggctgcaggaattcggcacgagacgagctgaagcgcaagcttctcctctctcagaggaagcgggagctggcagatgtcctggatgcccatatcgagatgctcagccccttctaggcagtggccacacgcttaaaagagcaatacaggacatttgctacggtcctggacactaccaggcacgagctgcccgtgaggtccatccacctggagggagatgggcagcagctcttacacgccctgcagcatgaactggtgaccactcagcgcctcctgggagaacttgatgttggtgattcggaagaaaatgtgcacgtgctggacttactgagcgaactcaaggacgtgacagcgaaaaagggccttgagctccgaaggagctttgcccaggtgctggaactctctgcagaggcaagcacagaggcagccttggcaaaccaggaagtctgggaagagacccagggcatggcgccccccaac

SEQ ID NO: 20545 - DNA, 319 bp, Homo sapiens
atctgcttggttggctggcacctgagagccctgctgtgggagagcgaagggggtcaaaggaagacttgaagcacagagggctagggaggtggggtacatttctctgagcagtcagggtgggaagaaagaatgcaagagtggactgaatgtgcctaacggagaagacccacgtgctaggggatgaggggcttcctgggtcctgttccctaccccatttgtggtcacagccatgaagtcaccgggatgaacctatccttccagtggctcgctccctgtagctctgcctccctctccatatatccttcccctacacctaccg

SEQ ID NO: 20546 - DNA, 510 bp, Homo sapiens
  misc_feature (1)...(510): n = A,T,C or G
ggggcngnnnnnnnnatttgcaatcgcagcgcgctgcaggaattcggcacgaggggactccagccgggagcgggtaacccggactagagtctcgcccccactaagcgggatgaccgctggcagatttgtcggcaaagtttcagtttcttagtctggcggctgtcatcttcccaggccggtgtgtgaattgaggaaagctgtcctgcgagctcccagggggtgacgtgcacttagagaaactcggggaaggcctgggtgtgcgacccctcctctgcggcagcagcgccggggccgactctgaaggcttccatggggaaaggagggtttttcagcaagtggtggcggaaccgggaggacgatagggcaagtgtgtgagcagaagcagccagagggctgggtctgtggctgccccctgaccacgtncctctccctgctcttcgtggcccagctctccctccggacggtgaactcctcgcgcactgcctatgcctgctttctctttgccccgcc

SEQ ID NO: 20547 - DNA, 499 bp, Homo sapiens
  misc_feature (1)...(499): n = A,T,C or G
aggccggnnnnaatccccggctgcggcattcggcacgaggggactccagccgggagcgggtaacccggactagagtctcgcccccactaggcgggatgaccgctggcagatttgtcggcaaagtttcagtttcttagtctggcggctgtcatcttcccaggccggtgtgtgaattgaggaaagctgtcctgcgagctcccagggggtgacgtgcacttagagaaactcggggaaggcctgggtgtgcgacccctcctctgcggcagcagcgccggggccgactctgaaggcttccatggggaaaggagggtttttcagcaggtggtggcggagcgggaggacgatagggcaagtgtgtgagcagaagcagccacagggctgggcttgtggctgccccctgaccacgtacttctccctgctcttcgtggcccagctcttcctccggacggagaactcctcccgctctgcctatgcctgctttctctttgcctcgctctct

SEQ ID NO: 20548 - DNA, 498 bp, Homo sapiens
  misc_feature (1)...(498): n = A,T,C or G
ggggggtnnnnnaaaagcccgatcgcagaattctgacgaggcgctgccctcgggggagtattggccctggcggaacgcagcaaccgcgagggatccagccagaggatgccacaccagcccagcgctaccaggctgcccaaggggggcgggcctgggaagagccctacgcagggcagcacctaggatggggcagagacttgtcacatctttgtccccagcaaaggctacatgttacctccttcagttgataataaacctttctgagatgcaaaaaaaaaaaaaaaaaaaaatctcgggggggggccgggcccccaattccccttatgggggggggaataacaattcacggcccgccgtttaacaacgccgggacgggggaaaagnnnnnnnntgttctggtgcgttcccaccgtgacctgcctggcctgccctgtctcanggagcgcggccatggtcaccatggagaatttgagcagaactggggggatgtgcaacacc

SEQ ID NO: 20549 - DNA, 487 bp, Homo sapiens
cgtgcgccagcccattgacggctgcatcgagcgcatcttgagcttgtgaaagctaaccatgctaaccaccaaggcaaagcagcacagtgtgaatagaacagagcgggatcaagaatttcacagaagacaggtcagctgaggggcctgcacacacagggtgttgaggaaccacagatgggcgccgagaggcctgccttttgcctggcccaggctcacccccaccttgggcctcacctcctctaggaagccttcccagctacccgaagctcaggtggccttcttgcaggtccccgtagcaccctgagcctgtaccttgggtggcacttgttatgctatcctgtgctagccgtttgtgcctcgtctcgctgttagattgtgagttcccatgggcagagacccactgtcgttccccgtgtgtccccagcccggtccctgtcacatttgttaaatgaaagaacaatgaagcccagtgtaacgtcagtccaca

SEQ ID NO: 20550 - DNA, 478 bp, Homo sapiens
  misc_feature (1)...(478): n = A,T,C or G
ntttgcccgcctgcatgaattcggcacgagaaaacactaggctttagtaggtacttatataaaatctagtccagttctctcatttaaaaaaatgaagacactgaagtacagacttaaatagctcagatagctaattaggaaatttcaagttggccaataatagcattctctctgacatttaaaaataatttctattcaaaatacatgcataattgattttacacctcattactggtggataatttatgtgatgtggattgctggtgtccagcatgacccataaacaggtcagaagaatgatggaatgttttagaataaactcctgcttatagtatactacacagttcaaaagatgtttaaaatgcttttgtatttactgccatgtaattgaaatatatagattattgtaacctttcaacctgaaaatcaagcagtatgagagtttagttatttgtatgtgtcactagtgtctaatgaa

SEQ ID NO: 20551 - DNA, 475 bp, Homo sapiens
  misc_feature (1)...(475): n = A,T,C or G
cgagcgggnnnnnnattgaaatcgatccgcgctgcaggaattcggcacgagtgggtgtgcaccaccacacctggctaatttttgtattttttgtggagacagggtcttgccatgttgcccaggctggtctgtaactcctgagctcaagggatccacccacctcagccttccaaaatgctgggattacaggcatgagccactgcgctaccgagaaatcgtcattctttaccaccactgctgcagctagcagctcactcttcagtgctttaagcaaatgatcctcaggaaagaaaagcagagtttctattgaaactcctagggtgtgtttatggaagacaaactgagatgtgctgtcccagccttaggccctggcagtacgccttgccttttcacggcacacccactacagcctttcccacactgtgacactggagctggtgagtcagagttgaagattattctctcttctaaagaa

SEQ ID NO: 20552 - DNA, 485 bp, Homo sapiens
  misc_feature (1)...(485): n = A,T,C or G
acgtggggtttttnaactcaacggcttgcaagaactcggcacgagagggctgggagccttgtcgctgactgactcacactcggacgccccgctggtgttggtgccctcggagggggtgggcaccgtggctagggtgagccgcttgcaggctggctggacacggtacttgagggggagaggcccgttccgccgccaggggtagatgtaggcgatgtccatgagggtgtagtattccttcagtggctcgtcctcgtacagaacctccaccttgtacttgctgggcacatccatcttgttgcggagaaacttggcaagatgcatgacggtcatggctgctgggcatcgcangaagcgcacccctgttttctctttgtccccatccccattctccagggggcccttcttctcgtcccggtccctggcaccttcgtagaattcgatggagaggctgacaatctcatcatcagggggggcccggtacccaa

SEQ ID NO: 20553 - DNA, 514 bp, Homo sapiens
  misc_feature (1)...(514): n = A,T,C or G
gtggtaaacacanatttgaccgcctgaggaaatgngacgaggaacnanaattgccccgcctgcaggaattcggcacgagatttgcaaagccagtagtcccagtcaggattagaacaactctgatgtacaagtctgtgcccctttctcccaggtgaacttctcagtgcacccccaaggactcctctccccatgtaagagttctttgttaaattgaaagagcagttcttgcctgtagtaaaaaggtcagtggtgcaaaagcatacaaagagatgtgagactccctcccagtccacataaccagtctcctaccccagtggtagctatttttaaatgtcttgatttttcctcaagatagtcccagcatttacaaccttatgtatcccccttaaagaaacacgcacaaaaaatgaaaagcttacgatacagtctacaccttgcttttttcagtgtcttggagatggctttctattagcctgtaagatctacctcatttttttcactgctttgtgatatg

SEQ ID NO: 20554 - DNA, 382 bp, Homo sapiens
  misc_feature (1)...(382): n = A,T,C or G
agtgggggnnnnnttttgaaattgatccgcgctgcaggaattcggcacgaggtggaaagggctgggggcaggaggaggtggggaggggcactgcctgcggaaggtaggattagatcattagctcagtgacctcctagggtttcgatgtgctatgttctcatcctacagttggtttggtaatgatctgcaagtcccggagagcaacagcacagctctgcctgacgctctcattaaaatctatgcagccaagctcggcactttgtagcagccggccttgcgaagcctcctcagctcggggggccggggacccagtgagccgagaggccctctgggctccacttatgcatatgcaccaaaaaaaaaaaaaaaggggggccgggcc

SEQ ID NO: 20555 - DNA, 497 bp, Homo sapiens
  misc_feature (1)...(497): n = A,T,C or G
cgtggggggnnnnnnnaattgaccgcctttggaattccgcacgagcagagtggccgctcagtgcccagcccgccagcctcgctcttggaggctgctctttatcctgcctgtggttttcagctcagagctggacttctatttataagttacctgtatttatatttatatgcccgctctcatggtgaaggctggacaaggtgctcctctggcccctccttcttacctcagatgcctgaacagaacaaggcaaacccgtagcagcctctcaggagctgacaggtcctctttcggggctcaggagggtgggcacacacccagcggcctgcagagtaagcttattacccacaactgtgcccgctttgtgcttctaaggtgcacacctagcctaggtgagacactgcagccaggcaaccaccgacacacgccccttctcaaagccagaggtgagtggggcaggtgcccggngctgggtgagtggaattaggacacacacaggn

SEQ ID NO: 20556 - DNA, 484 bp, Homo sapiens
aatagaccgcctgcaggaatttggcacgacgtcttcccacccctctgtggggacgggctcctgagtgggaaagaagaaacaaggaaaattccagtcccagctaacagatacacaccattgaaagaaaactggatgaagatatttactcctattgtggaacatttgggacttcagatacgctttaacttgaaatcaaggaatgtagaaatcaggacttgtaaagaaaccaaggatgttagtgctctgacaaaagcagctgattttgtgaaagcttttattctcggctttcaggtggaggatgcacttgccctcatcaggttggatgacctcttcctagagtcttttgaaattacagatgttaaacccctaaagggagaccatctatccagggcaataggaagaatcgctggcaaaggaggaaaaaccacattcaccatagagaatgtgacacggacaacgatagttttggctgatgtgaaagttt

SEQ ID NO: 20557 - DNA, 503 bp, Homo sapiens
  misc_feature (1)...(503): n = A,T,C or G
gagaggggnnnnnngnaattgaacgccaatcgaccggcctgcaggaattcggcacgaggagagagagagagagagagagagagagagagagagagagagatacatatacagagaaagagagaaggaaacgcgggaggaaacgcctggtgcagagccctagtgagtactttatggatgtgaaatgcccaggatgctataaaatcaccacggactttagccatgcacaaacggtagttttgtgtgttggctgctccactgtcctctgccagcctacaggaggaaaagcaaggcttacagaaggatgttccttcaggaggaagcagcactaaaagcactctgagtcaagatgagtgggaaaccatctcaataaacacattttggataaaaaaaaaaaaaaaaaaaaaactcgggggggggccgggcccccaattccccttatagggggtggaattaacaataattggccgcggttttacaacgcggggacgggggaagacngngtg

SEQ ID NO: 20558 - DNA, 486 bp, Homo sapiens
  misc_feature (1)...(486): n = A,T,C or G
ntttgccccgccttgangaattcggcacgaggagactcggcgggcgctgttgagggagtcgggccgcgactgtggtcgtttttataccttcccgcgcggacgccggcgctgccaacggaagggcgggtagggcgagacggagtttcgtcatgttggccaggcccatttgagatctttgaagatatcctcaacgtgaggctctgctgccatgaaggtgaagattaagtgctggaacggcgtggccacttggctctgggtggccaacgatgagaactgtggcatctgcaggatggcatttaacggatgctgccctgactgcaaggtgcccggcgacgactgcccgctggtgtggggccagtgctcccactgcttccacatgcattgcatcctcaagtggctgcacgcacagcaggtgcagcagcactgccccatgtgccgccaggaaatgaagttcaaggagtgaggcccgacctggctctcgctgga

SEQ ID NO: 20559 - DNA, 508 bp, Homo sapiens
  misc_feature (1)...(508): n = A,T,C or G
agccnngnnnngnnnatatgacgccgtgganatgaacgcgtgcgaaaggaggtggccaccgccatccgtggggccatcatcctggccaagctctccatcgtccccgtgcgcataggctactgggggaacaagatcggcaagccccacactgtcccttgcaaggtgacaggccgctgcggctctgtgctggtacgcctcatccctgcacccaggggcactggcatcgtctccgcacctgtgcctaagaagctgctcatgatggctggtatcgatgactgctacacctcatcccggggctgcactgccaccctgggcaacttcgccaaggccacctttgatgccatttctaagacctacagctacctgacccccgacctctggaaggagactgtattcaccaagtctccctatcaggagttcactgaccacctcgtctagacccacaccagagtctccgtgcagcggactcaggctccagctgtggctacaacatagaggttttatacaa

SEQ ID NO: 20560 - DNA, 493 bp, Homo sapiens
  misc_feature (1)...(493): n = A,T,C or G
tggggnnaggagggggnttttgaattgcatggcatgtggacgagccgcgggacatccacggggcgcgagtgacacgcgggagggagagcagtgttctgctggagccgatgccaaaaaccatgcatttcttattcagattcattgttttcttttatctgtggggcctttttactgctcagagacaaaagaaagaggagagcaccgaagaagtgaaaatagaagttttgcatcgtccagaaaactgctctaagacaagcaagaagggagacctactaaatgcccattatgacggctacctggctaaagacggctcgaaattctactgcagccggacacaaaatgaaggccaccccaaatggtttgttcttggcgttgggcaagtcataaaaggcctatacattgctatgacagatatgtgccctggagaaaagcgaaaagtagttatacccccttcatttgcatacggaaaggaaggctatgaaggcaagattcn

SEQ ID NO: 20561 - DNA, 489 bp, Homo sapiens
  misc_feature (1)...(489): n = A,T,C or G
attagccncgcgcttgaggaattcggcacgagccctgacccattctggatttttactacaggcccttcaatatccatggagtctcttctgagccatacagggcacttgagaagtccttcttaacttctagctaacaactacttagtgggactattacacacaaaacaaattaaaaacaaattattccaggtggaccaagaattcacagtttaataatctaacctgaaaaataatgaagagaatcctgactgatgaggcatctgaaggattttatttacagatacctcaaggattcaaaatcaagggaagaagaaatcacagcaaagaaccaccatcttattcaggattgcttgaaaggtgcaaggagaaattgccagaatgctgcagttcagcacaagatatgtgctggtgtggcttctcacaatgaaacggactctgctttgacatcgccccttcccaccatactgctcataataacattttaggggg

SEQ ID NO: 20562 - DNA, 508 bp, Homo sapiens
  misc_feature (1)...(508): n = A,T,C or G
aggggnggggnnnnngnnntttcgtcggctgcgganatcggcacgacagcggaaggcgaggaggacggcttcggggaagcagaatacgctgccatcaactccatgctggaccagatcaactcctgtctggaccacctggaggagaagaatgaccacctccacgcccgcctccaggagctgctggagtccaaccggcagacacgcctggagttccagcagcagctcggggaggcccccagtgatgccagcccctaggctccaagagcccccaaccgggacccaaccctgcctccctgggctaggctctggcctgggcactcaccccctggcttagacaccttctcaagggctggccttcagggacccctggtgggtctgcctgcctgggccacccttcctgcctgggcctccccttggcctacctgggccagcccccaccacctggcatgccctcctggggccaagagtgggcctgcaacccacccacttgcctgcccacccaactcct

SEQ ID NO: 20563 - DNA, 474 bp, Homo sapiens
  misc_feature (1)...(474): n = A,T,C or G
nattgacnnacctgaccggcctgcagaattcggcacgaggagagagagagagagagagagagagagagagagagagagagagagagagagcacactcaaaaatatgtgttagtgagattttttatgacctagcgcggcaaattcacaaaaaaactcccgtgcctgggagggctcacaaaaagtcatcatgtccgctgcttttatatactaaatgcattgtatctctgacccatgtctgaaaaactgtcgcccaattcaacagcgcccgcattccatctttgatacacctacccacatcttatatgcacttttctgtgggggccccctttaagaggcgggtgagagcttctatatcagtgcgcacattctactctctttccagtctcacgagagagatttttacttatataatagccctagagtgcgcagctggaaaaaccagacgctacatccagtattactgctgagagacan

SEQ ID NO: 20564 - DNA, 503 bp, Homo sapiens
  misc_feature (1)...(503): n = A,T,C or G
ccgccccctttcancggctntcngaattgcaccgcgctgcaggaattcggcacgagcccacccggtcggcccggcacagccatgatcaaggcgatcctaatcttcaacaaccacgggaagccgcggctctccaagttctaccagccctactgtgaagatacacaacagcaaatcatcagggagactttccatttggtatctaacagagatgaaaatgtttgtaatttcctagaaggaggattattaattggaggatctgacaacaaactgatttatagacattatgcaacgttatattttggcttctgtgtggattcttcagaaagtgaacttggcattttagatctaattcaagtatttgtggaaacattagacaaatgttttgaaaatgtctgtgagctggatttgattttccatgtagacaaggttcacaatattcttgcagaaatggtgatggggggaatggtattggagacaaatatgaatgagattgttacacaaat

SEQ ID NO: 20565 - DNA, 491 bp, Homo sapiens
catcgacccgcttttgaccacgctgcaggaattcggcacgagacaatgtttaatagaacttgaaccagttttgagaacatttgaagagataacttttcttgaagctgttattcagctaaagaaaacaaagttacagagtgtttcaagtgccattcacctatgtgacaagaagaaaatggaattatctctgaacatacctgtaaatcatggtccacaagaggaatcatgtggatcctctcagctccatgaaaatagtggttctcctgaaacttcaaggtccctgccagctcctcaagacaatgattttttatctagaaaagctcaagactgttattttatgaagctgcatcactgtcctggaaatcacagttgggatagcaccatttctggatctcaaagggctgcattctgtgatcacaagaccactccatgctcttcagcaataataaatccactctcaactgcaggaaactcagaacgtctgcagcctg

SEQ ID NO: 20566 - DNA, 501 bp, Homo sapiens
  misc_feature (1)...(501): n = A,T,C or G
gaaacttctggcggctgcggaaatcggcacgacattntatttaaataaatcctccagtaggaaatggagaattcattgcctttacttagaaggctatgtaaatagctatctgtcaaatttatatatgcagctcaccaatattcccttactggaaacatcagtatttccacatcacatcacagttcccaaaacgactttaaagtctcaaaattccgcgtctcctttggcttgcttctctcttgattccacccaggctttattaatgggtcgcttcatatcatcgtctccatcttcataaattttctttagaacattcatcaatccctcactaggatctgcttcagtgtcataggagggcttctctttttctttgcactccttttcaacctgggtcaggtaatcccaccttgtgttttccactttctttctacacaatataagaactgtatcagtcttgactgtgtttgaactgccttccacagagatgggtttcaagagatt

SEQ ID NO: 20567 - DNA, 507 bp, Homo sapiens
  misc_feature (1)...(507): n = A,T,C or G
gaagcgttgcacggctgtgngatttgcctcgcctgtcggaattcggcacgaggagaaattgttttctatatgtagaaggaaaacctgagcatttgcaggcatctggttaaagcagggtctgtgtgtacaattttaaaacgggtaatatgtcatgctcttagttcatcttcacaacaaaactatgagtaagcggtattagcctcacttaacagatgaggaagcaagattccagaaagtaccagaaggtcattttatacaacaggagattggttcctgcccagatgacagaaaatgggagctctgtctagttgtccttaagtctgactgacttcagtggctcataaccgtgagccaagtatttgttggttcataactgttggtttgtgaactatgtcttacatgtctagagttctgctggatctanggaaaggaggagctatcgaagtacaacggatcanaaaaccacagggcttttgggcactggcctccttggaaagtagtggccac

SEQ ID NO: 20568 - DNA, 494 bp, Homo sapiens
  misc_feature (1)...(494): n = A,T,C or G
cggggnnaagacggnnnnttttgaccttcatcgccttcggaattcggcacgagagtaaatagactagcgcggcacttacctctctctaatggtgggataaagaccctgccagtttggggccgggataaggttgttgttactgagattctgctggtggtactgctggacgctggtgctgctggagttggctggctttttacgggggaatatatcagcagccatcttcttctttttagtcttcaaggtaattatttcataacaaactggtggcaacttgctgctgttgctactgctgctgctggtatttgctttctttgagcttttcttggacctgttctttaccggctctggaagcatcaagaagaaggtcagcaagatgggctggagctgcgtgagtctgttcagccggctgaagttgtgtggtgaatggatcggaggagagtaggtattacagccctgcagatggagtcagacagccagtgctccgagccaat

SEQ ID NO: 20569 - DNA, 472 bp, Homo sapiens
  misc_feature (1)...(472): n = A,T,C or G
aactgtcgctttggaanncttggagacgagtcctgccaggcagagggcccccgggcctacaagcgctgggtgtgctccctgccctttggccatgttcaattctcagagaagagtcagcgcttcacacccttctccctcggctttgagttcttacctggagagacttactactacatctcggtgcccactccagagagttctggccagtgcttgaggctccaggtgtctgtctgctgcaaggagaggaagtctgagtcagcccatcctgttgggagccctggagagagtggcacatcanggtggcgagggggggacactcccagccccctctgtctcttgctattactgctgcttctgattcttcgtcttctgcgaattctgtgagccaagcagaccttccctctcatcccaaggagccagagtcctcccaagatcccctggaggaggagggatccctgctggctgctactgn

SEQ ID NO: 20570 - DNA, 469 bp, Homo sapiens
  misc_feature (1)...(469): n = A,T,C or G
nttgacacctctgccccgcgctgcaggaattggcacgagcctagttacatgttggctgtaatgtatgttgagaagtcagtccaaggaggtatgttcttccacaacagccttctcagcctctgctatttcctttgaggaaggtagaagtgagtttccatgtttgcagagtatttaaatacctcagattttattaatgagaaatacagtacccctccctccactccatctggtaatttatggtaaanatgtggttctgtgaaccagctattagtctcatcttcttaactccctcaggcatcatcaaattctttgatcttctcttccacctctctggctctcatggaagaatcctttacacatgaaaacaatggaactggaaaatcttgtcttttagaaaagaaattaatcacaactatctctcttgcctaaaagataaatataggtaaacccaaggaaaggggaatttagt

SEQ ID NO: 20571 - DNA, 488 bp, Homo sapiens
  misc_feature (1)...(488): n = A,T,C or G
cgcccccgaggnnnttttggattgatggcatccgcangagcgcaangggnnggagaanaaggaaaaaagaagggctcagcgcctccccgacgggccgcggacagaggggcacagtttctgcaggcgggtgaagtcgctgagggcccgccggagatgttttccttgtcgagcacggtgcaaccccaggttacagatcctctgagtcatctcatcaatgccttccatacaccaaaaaacacttctgtttctctcagtggagtggcagtttctcaaaaccagcatcgagatgtagttcctgagcatgaggctcccagcagtgagccttcacttaacttaagggaccttggattatctgaactaagaattggacagagtgatcagctggtagaaaatctacttcctggattttgtaaaggcaaaaacatttcttcccattggcatacatcccatgtctctgcacaatccttctttgaaaataaatatggtag

SEQ ID NO: 20572 - DNA, 483 bp, Homo sapiens
  misc_feature (1)...(483): n = A,T,C or G
aggatgtgccnagntgcnccctactaccgccgtcagaatncgctcagcnggnctcaaactcctgacctcttgatctgcccgccccagcctcccaaagcgctgggattacaggtgtgagccaccgcgcctggctgaaacttttaattttaaatcataggttttttttctgaaagatgaatatataattttttcagaaaatggtatatgtttattcattaagtagaaaatatatgtgtaaccacttctaatgtaacatttcccttggctaatattatcctggactgcttatccaacaaccagtgtagttgacctcagagaataatccaaaaaagtggtaagggctgaatcaagcttaataagtggcctacctcttgcatctgcaagatttgtcttgggaacactgtatgacacaactgtggctgcagttgcagctgaactgttatggttcagaatgttccaaaactcaagtcttcctcttcttaa

SEQ ID NO: 20573 - DNA, 500 bp, Homo sapiens
  misc_feature (1)...(500): n = A,T,C or G
nggacgagnnnnngnccttgannccccctcgaccgcctgtangaattcggcacgagatcgcctggccccggctctctggaccttgtctcgctcgggagcggaaacagcggcagccagagaactgttttaatcatggacaaacaaaactcacagatgaatgcttctcacccggaaacaaacttgccagttgggtatcctcctcagtatccaccgacagcattccaagatagatcagatactgattcatcagcaaattgaacttctggaagattaaatctcttgatgaacagtgtgtggttggcaaaatttccaagcactggactggaattttgagagaggcatttacagacgctgataactttggaatccagttccctttagaccttgatgttaaaatgaaagctgtaatgattggtgcctgtttcctcattgacttcatgttttttgaaagcactggcagccaggaacaaaaatcangagtgtggtagtggattagtgan

SEQ ID NO: 20574 - DNA, 495 bp, Homo sapiens
  misc_feature (1)...(495): n = A,T,C or G
cgcccgcattgctcggctgcaggattgcggcaccacgggaaatggggaccccgtcttctggacaccagtagtccctggtcccatggaaccagatggcaaggatgaggaggaggaggaggaggaagagaaggcagagaaaggcctcatgttgcctccacccccagcactcgaggatgacatggagtcccagctggacggctccctcatctcacggcgggcagtttatgtgtgacctggacacagacagagacagagccaggcccggccctcccgcccccgacctgaccacgccggcctagggttccagactggttggacttgttcgtctggacgacactggagtggaacactgcctcccactttcttgggacttggagggaggtggaacagcacactggacttctcccgtctctagggctgcatggggagcccggcgagctgagtagtggggatccagagaggacccccgcccccagagacttggttntggctccc

SEQ ID NO: 20575 - DNA, 502 bp, Homo sapiens
agaaaccttggcggctgcggaactggcacgaccttggatctgctgctgcaccacaagaagtactcagagtaccagtccataaattaaggcccgctctctggagggaaggacattactgaacctgtcttgctgtgcctcgaaactctggaggttggagcatcaagttccagccggccccttcactcccccatcttgcttttctgtggaacctcagaggccagcctcgacttcctggagacccccagaccagtgtgcttttcttggagaaagaagaaaagaagaaagaaggaagaagaagaagaaagaaaggaggaagaaggaagaagaagagccagtgtgataatacattgagtgattttttaaaaagtgcatatatgagcaaaaagttatttttcccttttctgaagtatggcagcatactatatagactgtctctgcatgtttatttttcccccatttaatatatcctggagatcattttatatcaatataaaaatggttt

SEQ ID NO: 20576 - DNA, 496 bp, Homo sapiens
  misc_feature (1)...(496): n = A,T,C or G
gggggacattgcancgcctgcaggattgcggcacgagcctatcttgacctgctgcgcacctgggtcttccaggtgggctccagcggttcccagcgcgatgtcaactgctcggttatgggaccacaagaaaaaaaagtagtggtgtaccttcagaagctggatacagcatatgatgaccttggcaattctggccatttcaccatcatttacaaccaaggctttgagattgtgttgaatgactacaagtggtttgccttttttaaggatgtcactgattttatcagtcatttgttcatgcagctgggaactgtggggatatatgatttgccacatctgaggaacaaactggccatgaacagacgttggggctaagagacagagcagcctgcgacagtgtggacctacctgtagcagctagcaaaggcctctagcagctacagtcccttctggagtctttatttgcatgcaaaatgcacaggagtcctggtgacctacc

SEQ ID NO: 20577 - DNA, 496 bp, Homo sapiens
  misc_feature (1)...(496): n = A,T,C or G
naattgcaccgccatgcagnngaattcccaattgacccgctctgcaggaattcggcacgagcccatcttctggacagccaagtgccaccggagcctaccctgccactggcccctatggcgcccctgctgggccactgattgtgccttataacctgcctttgcctgggggagtggtgcctcgcatgctgataacaattctgggcacggagaagcccaatgcacacagaattgctttagatttccaaagagggaatgatgttgccttccactttaacccacgcttcaatgagaacaacaggagagtcattgtttgcaatacaaagctggataataactggggaagggaagaaagacagaccgttttcccatttgaaagtgggaaaccattcaaaatacaagtactggttgaacctgaccacttcaaggttgcagtgaatgatgctcacttgttgcagtacaatcatctggttaaaaaactcaatgaaatcagcgngcn

SEQ ID NO: 20578 - DNA, 507 bp, Homo sapiens
  misc_feature (1)...(507): n = A,T,C or G
cgccccccatttgcancggcctgtagngattggcaccgcgctgcaggaattcggcacgagaataaatgatgtttctcaggcttctgaagaactctgaaggcctaatttcactctgtaaaaagaaagtttggtttctgaattgcgtcttttcaactcttggagaaattccttcaacaacccctggaaggaagaaacatttaatttcacttttgtatatccctgaggattgtactttgtatcaccttctttgaatagaagaaaatgtggagaaatctaacacatgctgacactctgtaggagtaacttaagtcttctgcttaaagaagcattatttagaaaagcaaaggagcttgaaattgtaattggagatgagcacatatcttttaccacatcaaaaataggttctcttattgatgtaaatcagtcaaaggatcctgaaggccttcgagtattttactatttggtacaagacttgaaatgtttagttttcagtcttattggattacc

SEQ ID NO: 20579 - DNA, 486 bp, Homo sapiens
  misc_feature (1)...(486): n = A,T,C or G
cattgcccgcctgcangaattcggcacgagacagccaagatgctgcggaatctgctggctcttcgtcagattgggcagaggacgataagcactgcttcccgcaggcattttaaaaataaagttccggagaagcaaaaactgttccaggaggatgatgaaattccactgtatctaaagggtggggtagctgatgccctcctgtatagagccaccatgattcttacagttggtggaacagcatatgccatatatgagctggctgtggcttcatttcccaagaagcaggagtgacttcagtcatcccagcaatcgcttgggtcagtttcattcagctctctatggaccagtaatctgataaataaccgagctcttctttggggatcaatatttattgacttgtagtaactgccaccaataaagcagtctttaccatgaannannnngnnnnnnnnnnnnnnnnnaaaaacctcgggggggggccgggcc

SEQ ID NO: 20580 - DNA, 477 bp, Homo sapiens
  misc_feature (1)...(477): n = A,T,C or G
nttgaccgcctgagaatcgcatagcccctatgagaacggcgcgggtgtcagctaaacctcctgcaaaagtggaagcgaagcccaaaaaggcagcagcgaaggataaatcttcagacaaaaaagtgcaaacaaaagggaaaaggggagcaaagggaaaacaggccgaagtggctaaccaagaaactaaagaagacttacctgcggaaaacggggaaacgaagactgaggagagtccagcctctgatgaagcatgagagaaagaagccaagtctgagtaataaccatataccatgtcttatcagtgggccctgtctcccttcttgtacaatccagaggaatatttttatcaactattttgtaaatgcaagttttttagtagctctagaaacatttttaagaaggagggaatcccacctcatcccattttttaagtgtagatgcttttttttaagaggtgaaatcatttgctggttgttn

SEQ ID NO: 20581 - DNA, 488 bp, Homo sapiens
gccccatccacggctgcagaattcgcaccggtttctaaaaaaaattatttagattagctaggcattgtgatgtgcacctgtggtccctgctacttgggagcctgaggcaggagaatcgcttgaaccttggaggttgtggctgcagtgagccctgatcgcaccactacaccccagcctgggtaacagagcaagaccctgtctcaaggaaaaaaaaaatcatctggcccatcctgttacttaacagagaaggtacctgaggctcaaaaaggatgactgacagtcctagtggcagaatggaggtgggatctggaacccacaacttgattcctaggactcttttttttttaattcccacattggctgggtgtgggggctcacgcctgtaatcccagcactttgggaggctgaggtgggtggatcacctggggtcaggagttccagaccagcctgaccaacatggtgaaaccccgtctgtactaaaaatacaa

SEQ ID NO: 20582 - DNA, 498 bp, Homo sapiens
  misc_feature (1)...(498): n = A,T,C or G
gccgcctttgacggccgangaattgcaccgcctgcaggaattcggcacgagcagcgccttgccccctcatctgcaatatgcctggtccgacccccagtggcactaacgtgggatcctcagggcgctctcccagcaaagcagaggccgcccgggcggcgggatccactgtccggcagaggaaaaatgccagctgtgggacaaggagtgcaggccgcacaacctcggcaggcaccggggggatgtggcgattctacacagaagattcacctgggctcaaagttggccctgttccagtattggttatgagtcttctgttcatcgcttctgtatttatgttgcacatttggggcaagtacactcgatcgtagattcagttacatccatctgtcatctgaagaaggaggaaaaaacccatcatttcttggaccaaaagtatagtgactatctgttcatgagagaaattatctgtaagcttgctgctttacaggggatttatca

SEQ ID NO: 20583 - DNA, 485 bp, Homo sapiens
  misc_feature (1)...(485): n = A,T,C or G
cgcggggnnttnnttctgaatggctgcagcgattcggcacgagcaggagttcaagaccagcctggccaacatggtgaaaccctgtctctactaaaaatacaaaaattagcctggtgtggtggcgggcatctgtaatcccagctacttgggaggctgaggcaggagaatcgcttgaaacaaggaggcggaggttacagtgagccaagattgcaccactgtactccagcctgggtgacagaacaagactccttctcaaaaaaaaaaaagaaactaagtgtcacatggattaaacaactttttcacactcagggaaatgcacaaacaacttctttgcagggtcttcctttggtaaaattggggcttttgctaatttctgtggacttaaaaaaaactcctaattccattgcccttcagcttttaggtaaatactgagagttctgggcagtgcatcttcaggaggaaagctagtctggttgtcgttttta

SEQ ID NO: 20584 - DNA, 501 bp, Homo sapiens
  misc_feature (1)...(501): n = A,T,C or G
gagcgttgnnnngggaattgatcgccnctcgaccgcctgtangaattcggcacgagcaggtgttcatcctgggcttgccctcccgcatcgcctcagtgtggtttgggcccaaagaggtgtccacagcttgtgccaccgccgtgctgggcaatcagcttggaactgcagttggctttttgctaccaccagttttagtacccaacacacagaatgacacaaatctcctggcttgtaatatcagcaccatgttttatggaacatcagctgttgccacacttttatttattttaacagcaattgccttcaaagaaaaacctcggtatccaccaagtcaggctcaagcagctcttcaagacagtccccctgaagagtactcctataagaaatcaataagaaacctgtttaaaaacattccttttgtccttctgttgatcacttatggtatcatgactggtgccttttattcagtctcaacgttattaaatcaaatgatattgacat

SEQ ID NO: 20585 - DNA, 496 bp, Homo sapiens
  misc_feature (1)...(496): n = A,T,C or G
agggnnnnattgaccctcgaccgcctgcaggaattcggcacgagctttgtggtcctcaagctgtgtgaccatcagctcgcacggtggcgtctcttccagtgcctcacaggccacttctggtccaaggtctgtgacgtgctccagttccactttgcgtttttgtttctgacgcatttcaacactcacccaagattccatccctctggcgggaagacgcgttgaacccagggaagaacctgctgaaaaccgatgacccccagcattgaaatggactctgagatggcagcgtggtgccagtgtcagacatcctgtgtgtgatgatatgcactgatcacacaagactgccctttcctgagaagctgcgggcttcggtgtggaggggtggagtgctgtgatctcgacaacttactttcaaagacataaagcacagatctccgcacaggggatgtgtgtgtccctgatgtattgcataactttctgtagttgaaatgttcca

SEQ ID NO: 20586 - DNA, 487 bp, Homo sapiens
  misc_feature (1)...(487): n = A,T,C or G
cgcggcgggtnnnaattgaattgcttggctgtangaattcggcacgaggatgtacgtcataaaggaaaacgtggaaaaagggctaaagatacttcaagtgaagaagttaacctgagtcacattgtaccatgtgagccagttccagaagaaaagccaaaagaattacctgaatggagtgaaaaagtggctcacaacattttgtcaggtgcttcctgggtgagttggggtttagtcaaaggtgctgagattactggtaaggcaatccagaaaggtgcttctaaactccgagagcggattcaaccagaagaaaaacccgtggaagttagtccagctgtcaccaagggactttatatagcgaagcaagctacaggaggagcagcaaaagtcagtcagttcctggttgatggagtttgcactgtagcaaattgcgttggaaaagaactagctccacatgtcaagaagcatggaagcaaacttgttccagaan

SEQ ID NO: 20587 - DNA, 470 bp, Homo sapiens
  misc_feature (1)...(470): n = A,T,C or G
nattgaacggttgtatgacttcggcacgagagaaggctatggggatagatgtgtggacacattggacctttcctgaggaagagggactgttcttttgtcccagaaaagcagtggctccattggtgttgacatacatccaacattaaaagccacccccaaatgcccaagaaaaaaagaaagacttatcaacatttgttccatgagcagaaaactggagctctggcctcagtgttacagctaaataatctttaattaaggcaagtcactttcttcttcttaaagctgttttctagtttgagaaatgatgggattttagcagccagtcttgaaggtctctttcagtatcaacattctaagatgctgggacttactgtgtcatcaaatgtgcggttaagattctctgggatattgatactgtttgtgtttttagttgggagatctgagagacctggctttggcaagagcagatg

SEQ ID NO: 20588 - DNA, 501 bp, Homo sapiens
  misc_feature (1)...(501): n = A,T,C or G
tggtgntnnttttgtccgactgcatgaattcggcacgagcacgttctacctgagcaacgtcgcgccccaggtgccccacctcaaccagaatgcctggaacaacctggagaaatatagccgcagcttgacccgcagctaccaaaacgtctatgtctgcacagggccactcttcctgcccaggacagaggctgatgggaaatcctacgtaaagtaccaggtcatcggcaagaaccacgtggcagtgcccacacacttcttcaaggtgctgatcctggaggcagcaggtgggcaaattgagctccgcacctacgtgatgcccaacgcacctgtggatgaggccatcccactggagcgcttcctggtgcccatcgagagcattgagcgggcttcggggctgctctttgtgccaaacatcctggcgcgggcaggcagcctcaaggccatcacggcgggcagtaagtgagggtggagcccagtgagactgtgggtgtgtgcangccc

SEQ ID NO: 20589 - DNA, 466 bp, Homo sapiens
  misc_feature (1)...(466): n = A,T,C or G
gagcggaaaaaaaaanattgactgcgctgcgctgcagaattcggcacgagggagtgtggtacttctactagttgcagtcaggcttcatacgctattgtcctgcccgttagagcagccagcgggtacataatggattttggaagagggagtcaccactggacctccaaggaagccacgtgcagacatctacaaccttcgatctcctgacgagtttattgttggccaaaaccacgctttgattgaaccatgatgaatgcgggtgttgcaagtagaatatatatatacatataaaattgaaactggcgatggaatatgagaggagccctctggaaagaaaaggacagaccctgtgctttcatgacagtgaagatctggctgaaccagttccacaaggctactgtatacatagcctgagtttaaaaagctgtgcccactccaagaatgtcagtgctagactttgaagatt

SEQ ID NO: 20590 - DNA, 473 bp, Homo sapiens
attgcccgcctgcggaattcggccttggttggcggcttgtgcagcaatggccaagatcaaggctcgagatcttcgcgggaagaagaaggaggagctgctgaaacagctggacgacctgaaggtggagctgtcccagctgcgcgtcgccaaagtgacaggcggtgcggcctccaagctctctaagatccgagtcgtccggaaatccattgcccgtgttctcacagttattaaccagactcagaaagaaaacctcaggaaattctacaagggcgagaagtacaagcccctggacctgcggcctaagaagacacgtgccatgcgccgccggctcaacaagcacgaggagaacctgaagaccaagaagcagcagcggaaggagcggctgtacccgctgcggaagtacgcggtcaaggcctgaggggcgcattgtcaataaagcacagctggctgagaaaaaaaaaaaacaaaacata

SEQ ID NO: 20591 - DNA, 474 bp, Homo sapiens
  misc_feature (1)...(474): n = A,T,C or G
nattgacngctcgatcgaccttcagngaattcggcacgaggcaattttgtacctggtgactttgtggtgcactcacctctgatagtgacttgaattcggtatgtaaaaaggggttagtggtatttcattgctgctaaaaatgacaactccctctgtgtcctgtttttcttaaagctgtcagtgtacaagtgggtatttgaataccagaccttactgtaaaaaataaaaaaggtggtatctagagcatgtaaattggatataaagttctgctcttaaagagttgatctaagagtatggctaaacatctatatatgcaatctattaaaagaacttaattcggctattatgtcttgatttgattgcagttgtttcctaattataacaaatttttcctcattggcctgtttttaatcctgtgcctagaaggagtacaaaatgcacactttacagaattgatatttaacacttacccac

SEQ ID NO: 20592 - DNA, 468 bp, Homo sapiens
  misc_feature (1)...(468): n = A,T,C or G
nattgaccgcttgaggacctcgcgcgagccgccctacaccgtggtctatttcccagttcgaggccgctgcgcggccctgcgcatgctgctggcagatcagggccagagctggaaggaggaggtggtgaccgtggagacgtggcaggagggctcactcaaagcctcctgcctatacgggcagctccccaagttccaggacggagacctcaccctgtaccagtccaataccatcctgcgtcacctgggccgcacccttgggctctatgggaaggaccagcaggaggcagccctggtggacatggtgaatgacggcgtggaggacctccgctgcaaatacatctccctcatctacaccaactatgaggcgggcaaggatgactatgtgaaggcactgcccgggcaactgaagccttttgagaccctgctgtcccagaaccatggaggcaagaccttcattgtgggagacca

SEQ ID NO: 20593 - DNA, 484 bp, Homo sapiens
  misc_feature (1)...(484): n = A,T,C or G
cgcgcngnttttnnccttgatggctgtgcgattcggcacgagaaaccacttagtttttaataagtggctcagtattacaattgcagcgatgcctggcaaattgaagttgcaagcctttgtcttactctttcagtcaggacctatttcagactgttgatgacattgacatttcatggattcggatgatgcaaggagacacatgccaccccagcagtacacaaagcacttaccttgactggtgaagtcagccagccatctcagcagggaagaacaaccttctcaaccaaaactgcaatcaggaaagcagcagcccactccttcccatggaatctagacagcatttatccctctggtgggggaatctcacactgactaactgaatggacgctttgtattcagagatggcttccaggcaaggaagttctatcttgtgatacggaaacaataaattcctgagatacattcttccaatctgtggtaataa

SEQ ID NO: 20594 - DNA, 469 bp, Homo sapiens
  misc_feature (1)...(469): n = A,T,C or G
nattgaacgctttaggaccttgcacgagataaaaatgtcctaaaattgactgtagcgatggtcacacaactctgaatatgcttaagaccattgaattacacactttacgttggtgaattgtatggtatgtaaattatagttcaataacatagttacaaaagataatcaaaagcatgaaagcactattgatgtggtttggatctgtgtcctcaccgagtctcatgttgaaatgtaagccccctggtgggaggcgatgggattatggggcagagtcctcacaaacggtttagcaccacccgctcagtgctgttctcctgatattgagtcctcatcacatctggttgcttcaaagtgtgtggtgcctcccctctgtctccctcctgctctggccatataagatgtgcctgcttctccttcgccttctaacatgattgtaagtttcctgaggcctccctagaagcaaaagctg

SEQ ID NO: 20595 - DNA, 486 bp, Homo sapiens
  misc_feature (1)...(486): n = A,T,C or G
cgcgggcggtnnncctggtttgctcggctgtangaattcggcacgaggcacagcggacaccaagactccagaatggcgtcagctgtaccactgaatgacacgaaacttctggaggtcagactgggggagctgccaagctggatcttgatgcgggacttcagtcctagtggcattttcggagcgttacaaagaggttactaccggtactacaacaagtacatcaatgtgaagaaggggagcatctcggggattaccatggtgctggcatgctacgtgctctttagctactccttttcctacaagcatctcaagcacgagcggctccgcaaataccactgaagaggacacactctgcacccccccaccccacgaccttgggccgagcccctccgtgaggaacacaatctcaatcgctgctgaatcctttcatatgctaataggaattaacctccaaataaaacatgactggtaaaaaaaaaaaaaaaa

SEQ ID NO: 20596 - DNA, 475 bp, Homo sapiens
  misc_feature (1)...(475): n = A,T,C or G
tggggnntccnnntttgaancccttttcccccgcgctgcaggaattcggcacgaggaaacacaagaaaaagaagaagaaagaaaagcataagaaaaggaagaaagaaaagaaaaagaagaaaaaacggaagcacaaatcttccaagtcaaatgagggttctgactcagagtgacaaggatgtgacttgttcaacattctcttctcaaacactgaccaaggaacagaggaagatgcagtcagagaaagcagcaggatagagacgccgagagaggagtatatgtgggtcacagcagtgagctcccacccgccttgcagtgaagatgtgaccccaggagagggagtgtctccttccaggtgctagctctggacagcagctgattttaggcaggaaagtttcttcatcgttgtcctccctgctggtcacatgagtttacgattcctttgaagtgtctcccacagggtggcaggactggg

SEQ ID NO: 20597 - DNA, 471 bp, Homo sapiens
  misc_feature (1)...(471): n = A,T,C or G
ntttgacggctgtggaatcgtcgcgagacctagtctagtagggggtcagaaatacagatgggcctgaacataatgatggtttgacttccagtttttcaactttaggattgtgcaaaagctatgcacattcggtagaaacagtacttcaagtatccatacaatcagtacagtattcaataaattacatgagacattcaacactttattataaaataggctttgtgttagatgagtttgcccaactgtaagctaatgtaagtgatctgagtaggtttaaggtagcctaggtgtattaaatgcatttttcacttaacggtattttcaacttttgttgggtttattgggatgtagccccattataagctgaaaagcatctgtagtataataaatgtggggagtgctgtgagagaaataagtgtactgggtttagttcccactgcccaaaaaaggaactggctaatggtaacctgg

SEQ ID NO: 20598 - DNA, 456 bp, Homo sapiens
  misc_feature (1)...(456): n = A,T,C or G
agaattgaccngcgntgnangnaannnaatcgacccccctctgcaggaattcggcacgagaacacaggaccagtttgccatcccaaggccgaaggattatagaacacatgtgctccttaaagaaaaacactgtgcatggagataacagtcatcaaacatggaaacctttgagttgaatagctcatccagtttccccacattatttccagtggaggacccagcactcagagacgcccttctttaaagagtgtttccatgggcctgctaccattcagctgtgtcactggttagctgctggcaagacatctgtgaattcctttccatcctgacagaagcagtttatccattctgcatatccagaggttctcctcatgactcagagcccctctgagaagagaaacaggtcttagaagaacactccctctggagccatcacgtacgcgtgaggacattgag

SEQ ID NO: 20599 - DNA, 504 bp, Homo sapiens
  misc_feature (1)...(504): n = A,T,C or G
atgcgtgntnntaactgacggacctcgtgaattcgccacgagctaaccaaaggggcttccttgtcagggcctggtggagttggtgggtcatcggggctcactgcctcctgcccttctctcctgtctgacccccacttagcccttctctccttgcagcctagcagtttatagttctgagatggaaagttgaagggggcaagcaagacctctcctcagcccatgcccagctgtcaggagagaggtgcagggaggaaggccttgtgctgggacaacctctctcttgccttacctcagagagggactatgccctgacccctcctttctgaaaatcagtgccctccctgttgctctaggaggctcctgctggcttggtagaagacagaattcgatctgcctgtccctttttcccctggggtttgacacacaggctcctctcagcatgaggtggagcagtgaccatgtggagcagtgaccaggacgcctctggcccagtgctgcccagcc

SEQ ID NO: 20600 - DNA, 474 bp, Homo sapiens
  misc_feature (1)...(474): n = A,T,C or G
nttgaccgcctgagtcttgcggggcctcgtgcaaggggagactgacaccaagaacagccagtaggttcttctcccctgcactctgctccctgcgcggtaaccccaccactcctgaagcctgcccagtctccttccttccctgcttggtgagtcgcgcatctccgtggttatcccgctgtctcctctccaagaacaagcagagcccgggccactggcccttgcccaaggcagggaagaaggatgtgtgtgtccaggaaggaaaaaaaggtggatcagtgattttacttgaaaacaagctccatcccttttctatatttataagaagagaagatcttgagtgaagcagcacgcgacccaggtgtgtgtgaattgaatggagacgtttcttttctctttctttaatttttggttttggtctttttttctttaaggaaagttttattttactgttcattttactttcttggtaacaaa

SEQ ID NO: 20601 - DNA, 479 bp, Homo sapiens
  misc_feature (1)...(479): n = A,T,C or G
cgcgtgggnagggcngnaaactgaganccattgnaggtcctgcgannangcagcaattgggcattgccaggccccgagtggaatatccagctcaccaggccatgaatcttgtgggcccccagagcattgaaggtggagctcatgaaggacttcagcatttgggtccttttggcaacatccccaacatcgtggcagagttgactggagacaacattcctaaggactttagtgaggatcaggggtacccagaccctccaaatccctgtcctgttggaaaaacagcagatgatggatgtctagaaaacacccctgacactgcagagttcagtcgagagttccagttgcaccagcatctctttgatccggaacatgactatccaggcttgggcaagtggaacaagaaactcctttacgagaagatgaagggaggagagagacgaaagcggaggagtgtcaatccatatctacaaggacagagg

SEQ ID NO: 20602 - DNA, 490 bp, Homo sapiens
agagccgaattgaaatcgatcggcatgcgcaacgagggctgttggaaattgagcggagagcgacgcggctgttggaactgccgctgcgggcgccgcgtattaataagccgggatctaccatacccattgactggctatggaagactataccagaggagagaaaattggagaaggtacctatggagttgtgtataagggtagacacaaaactacaggtcaagtggtagccatgaaaaaaatcagactagaaagtgaagaggaaggggttcctagtactgcaattcgggaaatttctctattaaaggaacttcgtcatccaaatatagtcagtcttcaggatgtgcttatgcaggattccaggttatatctcatctttgagtttctttccatggatctgaagaaatacttggactctatccctcctggtcagtacatggattcttcacttgttaagagttatttataccaaatcctacaggggattgtgttt

SEQ ID NO: 20603 - DNA, 538 bp, Homo sapiens
  misc_feature (1)...(538): n = A,T,C or G
nggcgtcgcggcgtgatcgccggccgcggatttttcttccttgatatacacgcaaggactcatatgggagagaagccatatgaatgtaaggattgtgggaaagcattcagctagcctggttccttttatggacatgaatagactcacactggaaggaagcactatgaatgcaagcaatgtggcaaaactttcacattttccagttcttttcgatatcatgaaaggactcacactggggagaaaccctatcaatgtaagcagtgtgggaaagccttcattccttttacttcttttcaatgtcatgaaaggactcacacgggagagaaaccctatgagtgtattctagttccgtttgatatcatgaaaggacttacactggagtgaaaccctatgaatgtaagcaatgtgggaaagccttcagatgtgcctcgcaccttcaacggcatgggagggttcacacttgggagaaactctatgaatgtaagcagtatgggaagccctcagatctgccaagatctttgatacaganattaatggg

SEQ ID NO: 20604 - DNA, 478 bp, Homo sapiens
cttgaaagcattgagatttgatccgcgctgcggaattcggcacgagtcccctcccccgcagtctgatttccctcttccccccaaaggcaagcacgaggagcggcaggacgagcatggctacatctcccggtgcttcacgcggaaatacacgtgagtcctggcgccaggtcggggtgggtgggtggcgtgggggtggggtcagggaagagggcacagggacccacccggtgtgtaatgtaacgcttgcctttcctctctgcacgttcaggctgccccccggtgtggaccccacccaagtttcctcctccctgttccctgagggcacactgaccgtggaggcccccatgcccaagctagccacgcagtccaacgagatcaccatcccaggcaccttcgagtcgcggcccagcttgggggcccaaaagctggaaaatccgatgagactggcgccaagtaaagccttaagccggatgcccag

SEQ ID NO: 20605 - DNA, 445 bp, Homo sapiens
  misc_feature (1)...(445): n = A,T,C or G
agaattgacccgcgctgcaggaattcactgagagccnctcccactcccttccacaacaaccagctccaactgactctggtcttgggaggtgaggcttcccaaccacggaagactactttaaatgaaaaaaagaaattgaataataaaatcaggagtcaaaattcatcgtcttcaagcccctctttctagccttttctactactctctgcttggtcaaggtttgcgccccactacagaacagggctaaattagccaccaccactgaaaactcagccgaatttttttataccactctgatgtcagcattttttccatctgtttggggctttttcctcttttttccattctccccaaatattttatctggcttcaaaattaagaggattatttttcagattgtttttattcagtgtggccgattcctcatctgattcaggctgtccag

SEQ ID NO: 20606 - DNA, 503 bp, Homo sapiens
  misc_feature (1)...(503): n = A,T,C or G
agcgggtnnnaactttagactgcctgaggcggcngcntgctgccgaaatgggcaagttcatgaaacctgggaaggtggtgcttgtcctggctggacgctactccggacgcaaagctgtcatcgtgaagaacattgatgatggcacctcagatcgcccctacagccatgctctggtggctggaattgaccgctacccccgcaaagtgacagctgccatgggcaagaagaagatcgccaagagatcaaagataaaatcttttgtgaaagtgtataactacaatcacctaatgcccacaaggtactctgtggatatccccttggacaaaactgtcgtcaataaggatgtcttcagagatcctgctcttaaacgcaaggcccgacgggaggccaaggtcaagtttgaagagagatacaagacaggcaagaacaagtggttcttccagaaactgcggttttagatggctgtgtttgatcattaanaattataaagaanaaacaaaaaa

SEQ ID NO: 20607 - DNA, 471 bp, Homo sapiens
  misc_feature (1)...(471): n = A,T,C or G
ntttgatcgccttaggaattcggcacgacctggcacattcactggtggggactccaaactacatcgcacccgaggtgctcctccgcaaaggtacatgcgccatggccagccaccccgcaggaggtctccttcccttcagacgtgagctgagtctcgctggctctagctttccaaggacctaatgcttccagtcatatttttgtcctcatagaagcctgaaagctactaatttctgcaacatacaagcctccctcctgtcctggaagtgctcttgcttcagggggttggaagacatgcaccattagaccagtgtctgctggccctcgggctctacctagacccaagggaatgactccagccctgattttcacagtcagatgatggaaaccactctgagggccacaggacctctgctcagtctgcccagaccacacatttccgggctctagctttaacttctgtctcaggctc

SEQ ID NO: 20608 - DNA, 441 bp, Homo sapiens
aggctgcccgcctgcggaattcctgcgaggcggagattaagaaggagccagagaaaccgatcgaccgcgagaagacatgcccactgttgctacgggtcttcaccaccaataacggccgccaccaccgaatggacgagttctcccggggaaatgtaccgtccagcgagttgcagatctacacttgagtcttgctctgtcatccaggctggagtgcagtggcgcgatctcggctcactgcaacctctgcctcccaggtataagcgattctcctgcctcagcctcctgagtagctgggattacaggcgtgcaccaaacttcctttcatgcacacaattacttaaaatgatgtataaaattatattccagctgtgtataaggatggatgcaactttgaaagaactgacaagcttagtaaaagaagtctacccagaagctagaaag

SEQ ID NO: 20609 - DNA, 447 bp, Homo sapiens
atttgaccttcgctcccgctgcaggaattcggcacgagcttcggtttaaaaaaggtcagtgtctatctggaaatttctatgtgagaggtgatggaaccagagtttacttcttcacacaaggaactggacacgcttttcaccactgctggactggaaaaagttcagaacctggtggaccgccgactgcaggtgaaccgagggaagcaactgacaatgtaccgggtttggattcagtgcaaatactgcaagccccttctgtccagcaccagctaagaggcacctgctgccaacacgatgcaagcccgttgtgtttccgagcttttttaaaaaaaaaatttgtagcaccgggcatggtgcatgcctgtaatcccagccactcaggaggctgaggcagggaggatccattgagcccaggagtccagcctgggcaaaatagcgagagaccct

SEQ ID NO: 20610 - DNA, 409 bp, Homo sapiens
cgagccacctgggggagattggcaccaagaccacactgaggtactcagtgcagctgctgaccccggccaacttgcttgctaaaatcaacgggaaggacagcattgagaaagagcatgtcgaagagatcagtgaacttttctatgatgccaagtcctccgccaaaatcctggctgaccagcaggataagtacatgaagtgagatggctgaggttttcagcagcaagagactccccaggtgtgcctggcctgggtccagcctgtgggcgcttgcccctgggcttggggctgccgtccccactcaagcgtgggctgcagcgctgtcagttcagtgtggaaagcatttctttttaagttatcgtaactgttcctgtggttgctttgaaagaacccttccttacctggtgtgtt

SEQ ID NO: 20611 - DNA, 504 bp, Homo sapiens
  misc_feature (1)...(504): n = A,T,C or G
cgtatgtacanaggnngnnnnnnaattgantngcccattgacccgcgctgcaggaattcggcacgaggtcatttggtggatgaagtactcttgtttgaaagggagctacacagtgttcatggctatcctggcacttttgctagttgcatgcatattctatcagaggaaacctgttttcagagatggttgacggtggagagaaaatttgctcttcaaaaaatggactcaatgctttcctcagaagctgcctgggtatcgcaatataaggatatcactgacgtggatgaaatgaaagttccagattgtgcagaaacttttatgactctactcttgcgtataactgacaggtataaaaatcttcccacagcttcccgaaagcttcagttcctggagttacagaaggacttagtagatgattntaggatacgattaacacacgtgatgaaagaagagactagagcttcccttggctgtcgaactgtgcaattctaatgctgtgaactg

SEQ ID NO: 20612 - DNA, 488 bp, Homo sapiens
  misc_feature (1)...(488): n = A,T,C or G
acttagaaccgcgctgcagttagcnccgcgctgcaggaattcggcacgagaccgcactgagatcaacaagaagatttataagattggccagggctaccttatcaaggacggcaagctgatcaagaacaatgcctccactgactatgacctatctgacaagagcatcaaccctctgggtggctttgtccactatggtgaagtgaccaatgactttgtcatgctgaaaggctgtgtggtgggaaccaagaagcgggtgctcaccctccgcaagtccttgctggtgcagacgaagcggcgggctctggagaagattgaccttaagttcattgacaccacctccaagtttggccatggccgcttccagaccatggaggagaagaaagcattcatgggaccactgaagaaagaccgaattgcaaaggaagaaggagcttaatgccaggaacagattttgcagttggtggggtctcaataaaagttattttccn

SEQ ID NO: 20613 - DNA, 436 bp, Homo sapiens
  misc_feature (1)...(436): n = A,T,C or G
ntttgccccgtgctgcaggaattcggcacgaggcaagatggcgccgtccgccttgctgcgtcccctttcccggctgctggcccccgccaggctcccgagcggcccttcagtgcgatcaaagttctacgtgcgagagccgccgaatgccaaacctgactggctgaaagttgggttcaccttgggcaccactgtcttcttgtggatctatctcatcaaacaacacaatgaagatattttagagtacaaaagaagaaatgggctggaataaacttttgaaacactaatgtagtatgctccgtatagtgattggagctgttcctctggattcaccatctgttgagttgtaaatgtgagagaaaaagttatatgtgaatatatatcaagccagcatttgtattttgcatcattaaataaaaagaaataaaaataaaaaaaa

SEQ ID NO: 20614 - DNA, 476 bp, Homo sapiens
  misc_feature (1)...(476): n = A,T,C or G
tggatncccnnagggttnnnnnnaattgatcgccataggaatccgtacgaggcgcggccaggcgctggagcctccgctgccgggagcaatcagaccttccagctgcctctcatgtacttgtctgttgggggcttgtgttgatcaagagtgaattcacagtctaccatgaattggaaggttcttgagcacgtgcccctgctgctgtatatcttggcagcaaaaacattaattctctgcctgacatttgctggggtgaaaatgtatcaaagaaaaaggttggaggcaaaacaacaaaaactggaggctgaaaggaagaagcaatcagagaaaaaagataactgaagattctgccatgtaaatgtcagcttgagtggactccagctgagaagaaagagaagaaagacttaattattgaataatttgtcagaggataaactcccaacctagacctttcacttaaaaaaaaaaaaaaaaaa

SEQ ID NO: 20615 - DNA, 376 bp, Homo sapiens
  misc_feature (1)...(376): n = A,T,C or G
gcgcncatgcctcatcgcctgggattcgcacgagataactcctacacattcccccctgtggagatgccacactaactgctgttagggagttttgggcgacgactccttctggctacttcttgttgcaaaagggcgtcgaatggggaagagcagctagggctcctcctggggtcaatctaagggtcctcagaagaatgatgtgtctatgtgtggttctgtttacagcaccatttggagtttgattgcttctagatgagaagaaacaatttgagttatagtattgtgtatacagggtccaaatatcaatacaagacacataagcaagagagggcttaataaaggggttaaccaattccataaaaaaaaaaaaaaaaaa

SEQ ID NO: 20616 - DNA, 475 bp, Homo sapiens
  misc_feature (1)...(475): n = A,T,C or G
ctagaccgcctgcgtttgtccgcctagcttatctctccccttactgtgctcttactttctgaaaaccctactgatcttcttagtcccagcttctgcccagggaggcttctacccagacttcttttgcaatttgtccctgggaagagggggtctcccagtgcccccagcttcatcccagcagaaccagcaggatcctcctggtctctcactggccttcctccacacttggtttctatcctcaggggtagaagctcagagctttttatggcccaggagaaaatgtagaccctgagaaacctgtccctgcagaaaggttcccttgggccatgctttgggccctctgctctttatatgtttattctattctacatttttccaccccgtccttaccctaggcctaaacacaggtacagatatgtgcatgctcacggcagctcctaggcctggactgagctctcaggggggaattagatan

SEQ ID NO: 20617 - DNA, 447 bp, Homo sapiens
  misc_feature (1)...(447): n = A,T,C or G
cgaggcgacccancaatgaccgccttaggcttccgcgaagngaaactgtgtgagaagatggcccagtttgatgctaaaaagtttgcagagacccaacctaaaaaggacacaccacggaaagagaagggttcacgggaagagaagcagaagccccaggctgagcggaaggaggagaaaaaggcggctgcccctgctcctgaggaggagatggatgaatgtgagcaggcgctggctgctgagcccaaggccaaggaccccttcgctcacctgcccaagagtacctttgtgttggatgaatttaagcgcaagtactccaatgaggacacactctctgtggcactgccatatttctgggagcactttgataaggacggctggtccctgtggtactcagagtatcgcttccctgaagaactcactcagaccttcatgagctgcaatctcatn

SEQ ID NO: 20618 - DNA, 447 bp, Homo sapiens
  misc_feature (1)...(447): n = A,T,C or G
ntttgaccttcggtgcgcaattcggcacgagaagtccagtgtcttgttaatccctgttctactgtgccagacactatcttgaatgcttttatatgttcaggttcaaaatcgctctttcataccaggggatgatagtaacgtgtaacttgcaatagattccttcatcttagtaataagatgatcagtctagttaggacaaaatagagattgaataaattaacttttccaagtttacagagtaaaaatgagcagatctctgcctggttttgtgaaaaagagttagcactggtcaatagaatatttctactcctacccccattctttcagtatatcatcactgaagacaggaagataggcacacagattcttcctcgtagtaattcatagtgcactaggtgaaagagatgaagtatgtattaaaagtacaatgtgatggcatttattatn

SEQ ID NO: 20619 - DNA, 498 bp, Homo sapiens
  misc_feature (1)...(498): n = A,T,C or G
attggaaaccccnaaaaantttgccccgcgctgcaggattcggcacgagcatatttgaatcagagggcttcttgttctgagaaataggttcaaaatcattggaactaggaacaagaatagcttattgttatctgtgataacactgttttctaaacacaaggattttcttttttattaatatgcaacatagacattgccataacagaataataaaccacatgtggggttttaaaaatgaaatttggctaataggagcaattcagctatttttctatacagtaattggtgtgtggtatagaagaaaaacgggttcaaaccccacttctgccacctaccagctatatggccttgaatgagtcattcagctttaataagggtcattttcttctgtttaaaaagacacaaaacttgaaagtcagctttggccatctacctgagaattagaaagtctgatttttggaattagaaatcatgattgtaggctgggcacagtggctn

SEQ ID NO: 20620 - DNA, 473 bp, Homo sapiens
  misc_feature (1)...(473): n = A,T,C or G
ntttgaccgtttgacccgcgctgcaggaattcggcacgagccggagcggcccggggacgtggtgaacgtggtgttcgtagaccgctcaggccagcggatcccagtgagtggcagagtcggggacaatgttcttcacctggcccagcgccacggggtggacctggaaggggcctgtgaagcctccctggcctgctccacctgccatgtgtatgtgagtgaagaccacctggatctcctgcctcctcccgaggagagggaagacgacatgctagacatggcccccctcctccaggagaactcgcggctgggctgccagattgtgctgacaccggagctggaaggagcggaattcaccctgcccaagatcaccaggaacttctacgtggatggccatgtccccaagccccactgacatgaacacctggaccattccacattgccatggccccagggcccagattgagggaatagcn

SEQ ID NO: 20621 - DNA, 399 bp, Homo sapiens
aatagaacagcctgagttagccccgcgctgcaggaattcggcacgagcagagactcccaccccagctcagagggagcaggggcccagccagggacggaccctcattcctcccagggaccccagacctctgtctctctcgggccttggctccttgaacttttggccgccatgtgcttcccgaaggtcctctctgatgacatgaagaagctgaaggcccgaatgcaccaggccatagaaagattttatgataaaatgcaaaatgcagaatcaggacgtggacaggtgatgtcgagcctggcagagctggaggacgacttcaaagagggctacctggagacagtggcggcttattatgaggagcagcacccagagctcactcctctacttgaaaaaaaaaaa

SEQ ID NO: 20622 - DNA, 473 bp, Homo sapiens
atagaccgcctgcgtagttcgcctgaagatcccaagcttgccggatgcccgcgactgtggacgaccactgtgaggggtccacagaaaagtatttctttaatctaagttccatgacatgtgaaaaattcttttccggtgggtgtcaccggaaccggattgagaacaggtttccagatgaagctacttgtatgggcttctgcgcaccaaagaaaaatacagaacctgtgatgctttcacctatactggctgtggagggaatgacaataactttgttagcagggaggattgcaaacgtgcatgtgcaaaagctttgaaaaagaaaaagaagatgccaaagcttcgctttgccagtagaatccggaaaattcggaagaagcaattttaaacattcttaatatgtcatcttgtttgtctttatggcttatttgcctttatggttgtatctgaagaataatatgacagcatgaggaaac

SEQ ID NO: 20623 - DNA, 487 bp, Homo sapiens
  misc_feature (1)...(487): n = A,T,C or G
acttggacccgcctgnaggtagaccccgcnctgcaggcggcaattaccgtcattcaactaactcactccccagctccttagctcttgctggccctgcagctgctgctcatctgtccatccctaaaggtctgtccacaggggcaggcaccactcagaacagacccttccactgatcttgcccatctgatgttaccatgtttgttgtgaaggaagagactggcattctggacaactggcatcagagactggctgacatggagaacccactctgtgtgtgctgagggcagggcactcaccagtgcagaggcagaagtgggtgcctgtcctcgagggttaacccgctttgcctcccgcccacagcccctccaccttctaaaagctcaagagatgatcagactgaaacacccgcccatcttgctgttctgcctaggctggaagacctggcccaggtcatggaggcccctgctccacttgccagattcgcagg

SEQ ID NO: 20624 - DNA, 475 bp, Homo sapiens
  misc_feature (1)...(475): n = A,T,C or G
cttgaccgcctgcggtgtaccgcctagggcttgggttgagaccattcatttgtgccaaattgcgtagcgttttttttgcttttgcttttggttttattttgtttcgtttttggggcttttctgtataaggaataacttgtccgatagggttaggatgagaccaccaaactcattttcacttgtatcttaacaggcattgaatccagctctccagaggtgaaaggctattggggtaatgattaaaaaaaaaaaatctgtagtattctactggtatattaataaactggggggagtcttgtttcactgcccatgaaccataccagcaacatgctcatggcaaacaggagctgaaagagcaaaggggtgggcctggagcccccgagggtcccttgatggatctggccaacccccttctaaaaatgatgagacagcagccatagctgagatcaggactaagcttgagtgttagccagcn

SEQ ID NO: 20625 - DNA, 478 bp, Homo sapiens
cattgacattcgactcggctgcaggaattcagcacgagccaagtcccagcgaacccgcgtgcaacctgtcccgactctagccgcctcttcagctcgccatggatcccaactgctcctgcgccgccggtgactcctgcacctgcgccggctcctgcaaatgcaaagagtgcaaatgcacctcctgcaagaaaagctgctgctcctgctgccctgtgggctgtgccaagtgtgcccagggctgcatctgcaaaggggcgtcggacaagtgcagctgctgcgcctgatgctgggacagccccgctcccagatgtaaagaacgcgacttccacaaacctggattttttatgtacaaccctgaccgtgaccgtttgctatattcctttttctatgaaataatgtgaatgataataaaacagctttgacttgaaaaaaaaaaaaaaaaaaaaaaaactcggggggggccccggcccccaattcc

SEQ ID NO: 20626 - DNA, 509 bp, Homo sapiens
  misc_feature (1)...(509): n = A,T,C or G
ggggnagtgggattgacgnccgtattgcccggctgtangaattcggcacgaggaagatttggcctgggccagtgagactgaaatcaagaaaaacagaagggatgtgcagggtgggggggtccacttcctgctcccatgtcaacccccagggcctccagcgtgcagacgcgtgtcctactcatctgctcccacggatgaccctggtcttcaatggttagcagaagggagaaaagaaagcaggaaaatgtgctattgagattccagtggtgacttcactgatatttagtgaatatttgatttagccaacatgcctttctttatgtgattttgtattaaagtaaaatgatttttatactttcaaaaaaaaaaaaaaaaaaaaacctgggggggggcccgggcccccattcccccttatggggaggggtttaacaatccatggcccgcggtttaaaaccgcggggggggggggggaaagaaaannnnnnncnnnctncnggcctttgcttctt

SEQ ID NO: 20627 - DNA, 488 bp, Homo sapiens
  misc_feature (1)...(488): n = A,T,C or G
ctccgacgnccntnaatcgaccggctgtangaattcggcacgagcggngagggagggtatcacacttttagcacttgtttgactgtctcctggttgcaggaggaccagtatgatcatttggatgctgctgacatgacaaaggtagaaaaaagcacaaatgaagcaatggagtggatgaataacaagctaaatctgcagaacaagcagagtttgaccatggatccagttgtcaagtcaaaagagattgaagctaaaattaaggagctgacaagtacttgtagccctataatttcaaagcccaaacccaaagtggaacctccaaaagaggaacaaaaaaatgcagagcagaatggaccagtggatggacaaggagacaacccaggcccccaggctgctgagcagggtacagacacagctgtgccttcggattcagacaagaagcttcctgaaatggacattgattgattccaacacttgtttctattaaa

SEQ ID NO: 20628 - DNA, 472 bp, Homo sapiens
  misc_feature (1)...(472): n = A,T,C or G
nttgacgccttggaatctttgcgagccgtaggagacccggcgaaagacagtatcgtggtcacgtatgcttatgaagcagcacagccgtgtccttagggatgttcgcgtacagtacagacactggtaactgcggtttcagccaacactcttcatggcagtgtcgacctcgggttagcttctgttgtctttgtggatggttttcctggagcggcctgacgttgacgtgttctctggtcccatgtcttagcggggcatggtacggtttcgtgcctgacgcgtgcattagggtgttctcttatactttcagtagcatctttccacagcaagggccaaaccctcctggctcccttcagagtctttttggcctgatgatgactcttgagtgataccctgtgatgcagacatgccccagatggattctactttctttaaaactagggactttcaagattaaaaaaaagatcgtcactag

SEQ ID NO: 20629 - DNA, 496 bp, Homo sapiens
  misc_feature (1)...(496): n = A,T,C or G
agagccacgggtgctgnctacagttaggcccgatancatcngcaagcactcgatgagccaaaagcctatcgcaagcctctgttttaactttaataacaccttcctcagtcagggtgctggtctctattacagggaatccttcagactgcaaatctgtaaatattttctgatcatcttcagaaagttcagctattctcttcacatcacatttgttggctacaactatgagaggcttgttgatgaagagaggtctgatgttctggaagagttctagctgctccctcagcccatgcccacactgctcagacaaatccatcacatacaggaccgcagcacggaggtgggccagggcagtgatggcctgcatctcgatggtgttcctatcctccagagggtggtccaggatcccaggagtgtctacaacctgccaacgtagatacttataatccatgtgcccaacaaacagagacttggttgtgaacgcatagggctggan

SEQ ID NO: 20630 - DNA, 522 bp, Homo sapiens
  misc_feature (1)...(522): n = A,T,C or G
aagttctnccnngnncnnnnagcnccaattgctcggccttcngatttgatcgccatgcaggaattcggcacgagcttttactgaaacactatccttagctgccttatgatttaagagaggattatagaacttcagccctaactttttcattatgagcatttttcttcattcatgtcacgttggatttggtctagggagtcccagaaagaagtagaaaaagagagagaagcctaccgtcggagaactgctgcttttcaacaggatctggaagccaagtaccacgccatgatctcagaaaatcggcgtgctgtcgctcaactgtccttggaactcgaaaaggaacaaaacagaactgctagttaccgagaagcccttatctctcagggacgcaagatggtagaagaaaagaagcttctggaacaggaacgggcccacgtgatgcaagaaaaaagacaggtgcagcctttgagaagtgcgtatttgagctgcctgcaaagggaagaaaactggccaaggagagcc

SEQ ID NO: 20631 - DNA, 512 bp, Homo sapiens
  misc_feature (1)...(512): n = A,T,C or G
ngggggaggggaattgacggcttaatagaccgcctgtagaattcggcacgagcgcttgtgctgcagccatgtctctagtgatccctgaaaagttccagcatattttgcgagtactcaacaccaacatcgatgggcggcggaaaatagcctttgtcatcactgccattaagggtgtgggccgaagatatgctcatgtggtggtgaggaaagcagacattgacctcaccaagagggcgggagaactcactgaggatgaggtggaacgtgtgatcaccattatgcagaatccacgccagtacaagatcccagactggttcttgaacagacagaatgatgtaaaggatggaaaatacagccaggtcctagccaatggtctggacaacaagctccgtgaagacctggagcgactgaagaagattcgggcccatagagggctgcgtcacttctggagccttcgtgtccgaggccagcacaccaagaccactggccgccgtggccgcacccgcggtgtg

SEQ ID NO: 20632 - DNA, 470 bp, Homo sapiens
  misc_feature (1)...(470): n = A,T,C or G
ntttganccgctctgcaggcattcggcacgagactttgtgatgcttcattctgtggaattttgtgcttactactgtatagtgcatgtggtgtaagttactctaactggttttgtcgacgtaaacatttaaagtgttatattttttataaaaatgtttatttttaatgatatgagaaaaattttgttaggccacaaaaacactgcactgtgaacattttagaaaaggtatgtcagactgggattaatgacagcatgattttcaatgactgtaaattgcgataaggaaatgtactgattgccaatacaccccaccctcattacatcatcaggacttgaagccaagggttaacccagcaagctacaaagagggtgtgtcacactgaaactcaatagttgagtttggctgttgttgcaggaaaatgattataactaaaagctctctgatagtgcagagacttaccagaagacac

SEQ ID NO: 20633 - DNA, 462 bp, Homo sapiens
  misc_feature (1)...(462): n = A,T,C or G
nggganannaaaattgtactggtgacgtttggcattaacacgtgtttgcccttccttggaatttgctatatattatgctttgcaataaatcacagccttttccatatagacatttttcgtatttgggaccattatccctctggcaatatatttttaatgtgctgtaactgtaaagtattaaatcagtcttgttacttgatagccatgccccaagtatagctatttgtgtatactaaacacatcatttttggtatttgtgtctctgtgtgtttggctagtgttactacttcataagttcattgtaaaatggctttactgccatcaacatgggtcatctacctagcagttaatgagtattgctggatcaggtgtccaccttccaatgatgaagcaaggtaaggggtaatgttttgctcttgacacagagaaatttaatagctttatgtactaaaatataatatc

SEQ ID NO: 20634 - DNA, 474 bp, Homo sapiens
  misc_feature (1)...(474): n = A,T,C or G
atttggaccngcttgtacccgcgctgcaggtgaaatatctttggcttgcagccaacaatggggtatgcgatctcagtggacaagcatgttggggatgaagcctgataagagaagggattttggaactggtactgagttcttctgtgcttaggagattgttggataggagccttggcctggcttcaagccttagcgctcactgacttactgtgtgaccgttgggcagttgcagtagtacgccagagctggcttgcaccaggctgtgagagctgttggcagcttaaaatctgctatggtgggaatatttgcaccacagaaattgctaaatgccataaaacagggctttttccctcctcgagagccagttgttcaacatttaccagcacactactgggcctggtcacttcttgattcaaacctgtttcctcgtctttaaaatcagaataataaaaaaaaaaaaaaaaaaactcgggg

SEQ ID NO: 20635 - DNA, 478 bp, Homo sapiens
  misc_feature (1)...(478): n = A,T,C or G
ngggcccncattgcncgtctgcangcaattcggcacgagcaacattccactaaaacatcttgcagacagagtggccatgtatgtgcatgcatatacactctacagtgctgttagaccttttggctgcagtttcatgttagggtcttacagtgtgaatgacggtgcgcaactctacatgattgacccatcaggtgtttcatacggttattggggctgtgccatcggcaaagccaggcaagctgcatagacggaaatagagaagcttcagatgaaagaaatgacctgccgtgatatcgctaaagaagttgcaaaaataatttacatagtacatgacgaagttaaggataaagcttttgaactagaactcagctgggttggtgaattaactaatggaagacatgaaattgttccaaaagatataagagaagaagcagagaaatatgctcaggaatctctgcaggatgaagatgaatcatat

SEQ ID NO: 20636 - DNA, 512 bp, Homo sapiens
  misc_feature (1)...(512): n = A,T,C or G
ggggnaggcnaattgacggctgtatagatcgtctgtaagaatacggcacgagaaagcacagacctagggtcttgagagtgctgtctagataaacacattctacttgggcagataatagcatgctaataataccacgctataaataggagccaagtgaattatatttgagataggcgtttgaagagttttgaaagggaggaggctgaagggcctatcctgccaaacctaattagtgtaatgtcttcctcatgaggttactcatttggtcactagagctgctctgctttttaaggctctggctgtagatgtattattccctttgaagagtctgcaaatgtgttaaaacttcagcaacaaattgtgactattgaaaatgcagagaaggaaaaaaatgaaaattctgacctaaaacagcaaatcagtagtttgcagatccaagtgacttcacttgcacagtcagagaatgacttgctgaattcaaaccaaatgctgaaggaaatggtggagagatt

SEQ ID NO: 20637 - DNA, 469 bp, Homo sapiens
  misc_feature (1)...(469): n = A,T,C or G
nggggctgcgctctgaatggccgcagacttgtttatttagaactgatttccgcgagacaatgacagaaaccctacctatctgataagattagcttgtctcanggtgggaagtgggagggcagggcaaagaaaggattagaccagaggatttaggatgcctccttctaagaaccagaagttctcattccccattatgaactgagctataatatggagctttcataaaaatgggatgcattgaggacagaactagtgatgggagtatgcgtagctttgatttggatgattaggtctttaatagtgttgagtggcacaaccttgtaaatgtgaaagtacaactcgtatttatctctgatgtgccgctggctgaactttgggttcatttggggtcaaagccagtttttcttttaaaattgaattcattctgatgcttggcccccatacccccaaccctgtncagtggagccca

SEQ ID NO: 20638 - DNA, 361 bp, Homo sapiens
  misc_feature (1)...(361): n = A,T,C or G
nattgacccgctctgaggccttcggcacgagggcaacagtattatgatgagactaaaaacaaaactctatgcagaaacgcccagaacgactcctatttaccagatccaaaccctttctctcggttctctactctagccactcttggcatcagctagaggctccagatgcttagaaagcaccctttggcctatattggaactgtggagcacgggtgtgtcggcacaggcatatcagctaaatagacagaggcgtgtgggttaggaacaatcaagccatccttctttctaattcctctaaagcaaggggaactcttaggatatccagcttataatgaaaatttaaaaaaaaaaaaaaaaaaaa

SEQ ID NO: 20639 - DNA, 476 bp, Homo sapiens
  misc_feature (1)...(476): n = A,T,C or G
aggcccccctcnccatcgacccgcctgcangaattcggcacgagcttggctatactagtggattttccttgagctgtatggtttttttcctaattgtggttatttacaagaaatttcaaattccctgcattgttccagagctaaattcaacaataagtgctaattcaacaaatgctgacacgtgtacgccaaaatatgttaccttcaattcaaagaccgtgtatgctttacccaccattgcatttgcatttgtttgccacccgtcagtcctgccaatttacagtgagcttaaagaccgatcacagaaaaaaatgcagatggtttcaaacatctcctttttcgccatgtttgttatgtacttcttgactgccatttttggctacttgacattctatgacaacgtgcagtccgacctccttcacaaatatcagagtaaagatgacattctcatcctgacagtgcggctggctgtcatt

SEQ ID NO: 20640 - DNA, 438 bp, Homo sapiens
  misc_feature (1)...(438): n = A,T,C or G
cgcgggggnnttttnaactganctgctgtctgcattcggcacgagagaacctggagggctagaacctggaagggctagaacctgtagagctagaacatggagagctagaacccggcaggctagaacctggcaagctagaacctggagggaatgaacctggagggctagaacctggagaatgagaaaaatttacatggcaaagagcccataaatcctgaccaatccaactctgaattttaaagcaaaagcgtcaaaaaaaagattccctccttacccccaacccactcttttttcccaccacccactctcctctgcctcagtaagtatctggaggaagaaaacaggtgaaagaagaagtaaaaaccatttagtattagtattagaatgaagtcaaactgtgccacacatggtgaatgaaaaaaaaaaaaaaaaaactcg

SEQ ID NO: 20641 - DNA, 502 bp, Homo sapiens
  misc_feature (1)...(502): n = A,T,C or G
gtgcgggtganaatttanaccttgaccggctgtcgaattcggcacgagagacagtctattttcttttaatttgttactacttagtcacaaaccccacattattccagtttggaattacttattaaggagaattggaaatacatatgcccatgcttaaattttatagctttaatttgtgttatttctttattgacgggaagaggtacatctttttttccttactgaaaacaaatatggattaattgcctcaaatttgtataagtgattggctagtgattcttgttttcagaagggagagtggtatagatagaaaatgacaaagatggcaatatacacttaatgttgttattgtatgttgttactgaagtacttagatttttaaaatttcaaatcctaaatcacttcttgtaggagggttttcattaactgcagtatatacagttcactacatatgggttgtttgagttttttgtgtgctggatttctttctggtttttaatac

SEQ ID NO: 20642 - DNA, 490 bp, Homo sapiens
  misc_feature (1)...(490): n = A,T,C or G
cgaccacttcgtacgccttcagaaaantttgcaccgcccttcggaattcggcacgagtaagaaaaggaaagaaagaaagaaagagaaagaaagaaagaaacttcagagagagccaaaatgtggaaagacttgggtttcaaaggatttcaataaagtaggtttggcggcagagatttaggaagagtccaacttaagagataatgggctcttaaaacatgtgcaaaagtttagttcaaagtcccaaatgttaggttaaaggtaatgccttttctattgcactaaattctagaaagggagcagaggtggttgcacagtaataaataagtacaaccaagatgtatatatggtggttaaaaaaaaaataaaaccaccacccaaatttaaccctgtgtaaaagccttgagtaaagggattcagcaagactgtggagaaacttgggagaagaaaaaagagctttggaagaggaagaactgagaaatctccagagaaa

SEQ ID NO: 20643 - DNA, 496 bp, Homo sapiens
  misc_feature (1)...(496): n = A,T,C or G
ataggccngcccctgcngaaanncanggcacggcgctgcaggaattccgcacgaggaaatgcatgcactgcggtttgcttctggagaagcaaagttgtccaaaagccttcagttagaaggattagtactacctctcctaggagcactgtcatgcctgcttgggtgatagataaatatgggaagaatgaagtgcttcgattcactcagaacatgatgatgcctatcatacactatccaaatgaagtcattgtcaaagttcacgctgccagtgtaaatcctatagacgttaatatgagaagtggttatggagctacagctttaaatatgaagcgtgatcctttacacgtgaaaatcaannnnnncaatttcctctgactctgggtcgggatgtctctggcgtggtgatggaatgtgggcttgatgtgaaatacttcaagcctggagatgaggtctgggctgcagtttctccttggaaacaggcactctttcagagttg

SEQ ID NO: 20644 - DNA, 461 bp, Homo sapiens
aattgaccgcctgcggaatattgcacgacctggggacttggccgcttccctacccacagggcctgacttttacagcttttctctttttttaaaaagttgataggagacttgtacagttgactggctttcctctcgttggtagttgagacgctgttgcaaattccacccctccttccctggtccagattgtagctcttagtcctccctgctcagctggccgggttggaggcctcaccctgcttggggcctggcgtggggggagctctggtgggaaaatgtcccccacctcttttcctagttttatgtttcttgggaaaatatcactttgtattctctgtccagggcttcagatattttgcacgaattttaaaacatggcaataaatggctcgtgggctctggcaaaaaaaaaaaaaaaaaaaactcgggggggggccgggcccccatttccccttatagggg

SEQ ID NO: 20645 - DNA, 477 bp, Homo sapiens
aattggcaccgcgctgctggaattccgcacgaggtcgcttcggcggagcctgggctgaccagccaggacagcggggtaaacccgaacaattctgcgcgaggtagggaggccatggcgtccggcagtaactggctctccggggtgaatgtcgtgctggtgatggcctacgggagcctggtgtttgtactgctatttatttttgtgaagaggcaaatcatgcgctttgcaatgaaatctcgaaggggacctcatgtccctgtgggacacaatgcccccaaggacttgaaagaggagattgatattcgactctccagggttcaggatatcaagtatgagccccagctccttgcagatgatgatgctagactactacaactggaaacccagggaaatcaaagttgctacaactatctgtataggatgaaagctctggatgccattcgtacctctgagatcccatttcattctgaaggccgg

SEQ ID NO: 20646 - DNA, 412 bp, Homo sapiens
atttgcaacggctgcaagaattcgtggcgagccccagtcctgcctgccaagaactcaagtgtaactgtgataaaataacctttcccaggtatattggcaggtatgtgtgtaatctcagaatacacaggtgacatagatatgatatgacaactggtaatggtggattcatttacattgtttacacttctatgaccaggccttaagggaaggtcagttttttaaaaaaccaagtagtgtcttcctacctatctccagatacatgtcaaaaaaagaaaggtgtttgtgcttccgttttgtttctgctcagtaatatagtcaagcaagtttgttccaagtgacccattgagctgtgtatgcatttttgtttatttcaataaaatatatttgtattattaaaaaaaaaaaaaaaaaa

SEQ ID NO: 20647 - DNA, 475 bp, Homo sapiens
cgcgcccctcgccatcgcccgcctgcacgaattcggcacgaggtggttttgaggtgcgtggtgaaggggtttccacgttcgggtacaggaataagaatgtgaaacagaagacatggcggcctaaccacccgcaagccttcgtggggagcgttcgcaagggacaaggctttgcttttcgaagaaaactgagaatacagcaaagttaaaagaaattgctacggaaggaaaagaaggcccaaacgtcactggaatctcaattcacagatcgatacccagataatctgaaacatctctattttcagatagaggaaagacttaggaagcaaccaaaaaaagttgaccatcctttgtcagaacaagttcaccagcctttgcttgaagaacagtgtagcattgaccaggctttatttgaagatcagtgtagctttgaccagcctcagccagaagaacaatgtagtaaaacagtaaactcctt

SEQ ID NO: 20648 - DNA, 333 bp, Homo sapiens
agaacaaaatgcggagaagggaggcagcctggtggtgggggacttcgagatcgcagccaagtacgtgtgtcggaccctggagacacagccgcagagcagccccttctcatgcatggacctcacctacgtcagcctgctactccaggagttcggcttcccaagagcaaagtgctgaagctcactcggaaaattgacaatgttgagaccagctgggctctgggggccatttttcattacatcgactccctgaacagacagaagagtccagcctcatagtggccgagccatccctgtccccgtcagcagtgtctgtgtgtctgcataaaccctccc

SEQ ID NO: 20649 - DNA, 495 bp, Homo sapiens
  misc_feature (1)...(495): n = A,T,C or G
cggaggntnnnnnnaaattgcacgtctgcggacttcggcacgagggattgcaaacgtgcatgtgcaaaagctttgaaaaagaaaaagaagatgccaaagcttcgctttgccagtagaatccggaaaattcggaagaagcaattttaaacattcttaatatgtcatcttgtttgtctttatggcttatttgcctttatggttgtatctgaagaataatatgacagcatgaggaaacaaatcattggtgatttattcaccagtttttattaatacaagtcactttttaaaaaatttggatttttttatatataactagctgctattcaaatgtgagtctaccatttttaatttatggttcaactgtttgtgagactgaattcttgcaatgcataagatataaaagcaaatatgactcactcatttcttggggtcgtattcctgatttcagaagaggatcataactgaaacaacataagacaatataatcatgtgctt

SEQ ID NO: 20650 - DNA, 497 bp, Homo sapiens
  misc_feature (1)...(497): n = A,T,C or G
cgcgtgaagntttaacctcgaaggatcgaccgaccgtacgaattaggcacgagacaattcggatactatacagaacatgcgcgaacgctaagacagtagggcatcctgtgtttactgactggaagacttaatcgccttaagatggtagccctccccaaattggtctgccagttcaacacaattcttatcgtaatctgaactgtgttatgttgcagaaaagggcaggctgatcctaaaatccatatggtattgcaagagtcccaaaatagcctaagcaatcttgaaaaataacaaagtctcacactgtttgactaatcttaaaatttgtaagcaagggtaataagacactgtagtgctagcctgactgtatcagtggaatagaattgagagtccaaaatcactcctcctattatctgcgcttgaacccttgcattttggttaaaggtgctgagacggatccgtgaacgaaagagctttctcagcatatggtgcaggga

SEQ ID NO: 20651 - DNA, 483 bp, Homo sapiens
  misc_feature (1)...(483): n = A,T,C or G
ntttggaccgccnttaagaannttttgaccgcctgtangaattcggcacgagctcgtgccgccaaacatcacactatttaattccccaataaaacattggaaaaaggactatcagtgctaacacatttacatataaaatttccacctaataggtaatagaagcctatgtaccaatttctaaaacagttataagatatatacacaatttggggtatattaacaaaacagaatattacaaaatattaaaggcaatcctcctggtccacggacccttgttgccgcttacttgaagttggcataatctgagaatgcatcaatatactcctgcaccaccttgtagcagaactcatactgttccagtgtctggaccatgtgtggcctctgtagccgcaggctcttgacagtctggaagacatccaaaatcccctctgctttcacacgctccaggacggtgctcagggcacagaaggtccccgtccttcc

SEQ ID NO: 20652 - DNA, 489 bp, Homo sapiens
  misc_feature (1)...(489): n = A,T,C or G
cttcgccgccctnggnnnnatagaccccgctgcggcaaatcggctgcacttaccagtgggctaccatggccgtgcctcctctgtcgtggtgtctggcaccccaatccgaaggcccatgggacagatgaaacctgatgactctaagcctcccgtatatggtgcctgcaagctcttggacatggagctggaaatggctttttttgtaggccctggaaacagattgggagagccgatccccatttccaaggcccatgagcacatttttggaatggtccttatgaacgactggagtgcacgagacattcagaagggggagtatgtccctctncggccattccttgggaagagtttgggaccactgtctctccgtggtggggcccatggatgctctcatgccctttggctgtgccaaccccaagcaagaccccaggccccttgccgatctgtggcatgacaaccctacacatttgacaataaccttctctggta

SEQ ID NO: 20653 - DNA, 465 bp, Homo sapiens
  misc_feature (1)...(465): n = A,T,C or G
atttgattcccttcgaaancttgatccgcctgcggaannccgccgaggctccgtgcatggcattttcacccccagagcttcctaatcctgttttcacacaggaagtttctaggtctttctagaacagctagaaatagtagctgactcccgcccaaggcccaaccttcaaaccctgagctcttcaggctgcatcctctggtgagctatagaggagaacgtggctcctaaactctagccatcctgtgggaggaaatagacttctttgggctgtggcttgcagaacaaactacactttttttccctctattgtttaaattttatttaataatttgtgtgtttttctgtctttattttctgtatttcacgtgttccttcactccctagaaactgcactttctttgaaaccataggtaatgaatcttactaggagaggcatggggatagagacagttctgggagtgtgaa

SEQ ID NO: 20654 - DNA, 459 bp, Homo sapiens
  misc_feature (1)...(459): n = A,T,C or G
atacctagngcctcggaatttgacgacctcacatangctncaacgtggaaaccgtggagtacaagaacatcagcttcactgtgtggtacgtgggtggccaggacaagatccggcccctgtggcgccactacttccagaacacacaaggcctgatcttcgtggtggacagcaatgacagagagcgtgtgaatgaggcccgtgaggagctcatgaggatgctggccgaggacgagctccgggatgctgtcctcctggtgttcgccaacaagcaggacctccccaacgccatgaatgcggccgagatcacagacaagctggggctgcactcactacgccacaggaactggtacattcaggccacctgcgccaccagcggcgacgggctctatgaaggactggactggctgtccaatcagctccggaaccagaagtgaacgcgacccccctccctctcactcn

SEQ ID NO: 20655 - DNA, 500 bp, Homo sapiens
  misc_feature (1)...(500): n = A,T,C or G
gggggggnnnnnntttcgcctggctgcagcaattcggcacgaggtgattcccgtgattgcgttacaagctttgtctccttcgacttggagtctttgtccacgacgatgagacactcaaagagaacttactgtcctgattgggatgacaaggattgggattatggaaaatggaggagcagcagcagtcataaaagaaggaagagatcacatagcagtgcccaagagaacaagcgctgcacatacaatcactctaaaatgtgtgatagccattatttggaaagcaggtctataaatgagaaagactatcatagtcgacgctacattgatgagtacagaaatgactacactcaaggatgtgaacctggacatcgccaaagagaccatgaaagccggtctcagaaccatagtagcaagtcttctggtagaagtggaagaagtagttataaaagcaaacacaggattcaccacagtacttcacatcgtcgttcacataggggtat

SEQ ID NO: 20656 - DNA, 485 bp, Homo sapiens
  misc_feature (1)...(485): n = A,T,C or G
attgacccgcctgcggaattcgtgacgaggccttgtgcagagggccagagaatggcttatgggggcccaggttggatggggaaaggctaatggggtcagaccccaccccgtctacccctccagtcagcccagcgcccatcctgcagctcagctgggagcatcattctcctgctttgtacatagggtgtggtcccctggcacgtggccaccatcatgtctaggcctatgctaggaggcaaatggccaggctctgcctgtgtttttctcaacactacttttctgatatgagggcagcacctgcctctgaatgggaaatcatgcaactactcagaatgtgtcctcctcntctccgctcatctgtttaatggtgatgcctcgcgtacaggatctggttacctgtgcagttgtgaatacccagaggttgggcagatcagtgtctctagtcctacccagttttaaagttcatggtaagatttgacctcatc

SEQ ID NO: 20657 - DNA, 468 bp, Homo sapiens
  misc_feature (1)...(468): n = A,T,C or G
aatgtgacccgcgctgcacgaattcggcacgaggactttgggagccttaaacaactctggcctcttccctcatcaccacttctacttgctataggagattcttgctttctgatgcagaggcttttactcttggctgaccatgtgtgtagaaaaatgtctacacacagtatgtgctgccattctgtactatgcagtgatacatgaaagcatgggctcgggttaataggcctaggcaccagctttagctcggctgaagctggcggcccctggcaaattactttgattgaatcacctgtgatgttgaaggctgcctacttggtgaaatttaagtgagctgtatgtaaaatggcacagggtaggtgttcagtaaatgactccctttcccactactgaggctagagggacctggcaatcactacaggagggtgagaaagctagtanggaatttaagaaaatagaacattccct

SEQ ID NO: 20658 - DNA, 490 bp, Homo sapiens
  misc_feature (1)...(490): n = A,T,C or G
cttagccccgcgntgcaggaatatcgcacgccatcccttctatgagcacattcttagcagaagaaaacaatccaactaccaacacccgactctattggtgcatttaaaatgtgattccattttttcttacaattcttcagggaacttacctgcattaagtgaggttaaatgcattcaggaggttgtttgtttcttctatctagttttagaataatatttcttcggcaaaccctgctaactgcggttcacccttgaaaacgttaatctgaggactttttccaccaactcattaatgatggtggaagcaagtgtattatttgtttcctggagaatttgatgaagagcagtcttcctctgctgccctttactaagcaaaacctggagcgatttaaataggctaaatgggtttgattaaatcttgagctcccagttgggagggagaaaatgagaaagtaaccccctgagccatgtggtctctttacaatcaaan

SEQ ID NO: 20659 - DNA, 446 bp, Homo sapiens
attagacatttgtcccgcctgcaggaattcggcacgaggaggacggccgctgagccataatggagatatcaatgcctccacctcagatatatgtagaaaaaactctggccattatcaaaccagatattgttgacaaagaggaggagatacaagatattattcttagatccggattcaccattgttcagagaagaaaactacgcctcagccctgagcaatgtagtaacttttatgtggaaaagtatggaaaaatgtttttccccaacttaacagcttacatgagttctggaccacttgtcgccatgatattagctagacataaagccatctcttattggttagaacttttgggaccaaataatagcttagtagcgaaggagacacatccagacagtctgagggcaatttatggcacagatgacctaaggaatgcacttcatgggagt

SEQ ID NO: 20660 - DNA, 472 bp, Homo sapiens
  misc_feature (1)...(472): n = A,T,C or G
atttgcccatttgcgccgcgctgcaggaattcggcacgagctgaccttcagcgcctcggctccagcgccatggcgccctccaggaagttcttcgttgggggaaactggaagatgaacgggcggaagcagagtatgggggagctcatcggcactctgaacgcggccaaggtgccggccgacaccgaggtggtttgcgctccccctactgcctatatcgacttcgcccggcagaagctagatcccaagattgctgtggctgcgcagaactgctacaaagtgactaatggggcttttactggggagatcagccctggcatgatcaaagactgcggagccacgtgggtggtcctggcgcactcacagagaaggcatgtctttggggagtcagatgagctgattgggcagaaagtgtgccatgctctggcagagggactcggagtaatcgcctgcattggggagaagctagatgaan

SEQ ID NO: 20661 - DNA, 496 bp, Homo sapiens
  misc_feature (1)...(496): n = A,T,C or G
aggnnnnnnnnnnttttgcctggctgcgcattcggacgagcggacaaagccctcgcgtcggacccttgccagaactcaattaatggatgcctcgaagttgacgtacatatatattcagaaatgttttgccacctgagacctatgaggaggttatgtctagagaagatatttccacactggtttcccttttcaagagctttatcgggagctgaagcagtcaatgccttgaggcctttctattttgcagtacatccagatttctttggacagcaccccgtacaaagggaaatcaatgaaaattctcttaaaaggttaagtgtctacctagaaaacctccagaaaccaggcttcatgtctttgaaaccaactcagcttacattttatgtaagagaaacagaccacagttcctccgatggccaggaaccttttagtacttccgtttatctgttgaacatatccaaagcttgaatactaatatgcatacccagcctctcaa

SEQ ID NO: 20662 - DNA, 506 bp, Homo sapiens
  misc_feature (1)...(506): n = A,T,C or G
acgcgggaannggtgaaccttggagccatcgatcggccgtacgaattcggcacgagggcaaggcaaagatccgagacgaggaaggcattcctcctgaccagcagaggttgatactttgctgggaaacagctggaagatggacgcaccctgtctgactacaacatccagaaagagtccaccctgcacctggtgctccgtctcagaggtgggatgcagatcttcgtgaagaccctgactggtaagaccatcaccctcgaggtggagcccagtgacaccatcgagaatgtcaaggcaaagatccaagataaggaaggcatccctcctgatcagcagaggttgatctttgctgggaaacagctggaagatggacgcaccctgtctgactacaacatccagaaagagtccactctgcacttggtcctgcgcttgagggggggtgtctaagtttccccttttaaggtttcaacaaatttcattgcactttcctttncaataaaggtggtgcg

SEQ ID NO: 20663 - DNA, 492 bp, Homo sapiens
  misc_feature (1)...(492): n = A,T,C or G
aagggattgacttcgattgccatgtcggaattcggcacgaggttttgtgttgccatgtaagcttctcagttggtggatcataggcaggaaggtatgtgctgtgctgtttgagttaaacattctggaggtgggagatgagcagacatgtttcagagagcagagtttctgtggctcagctgagctaatagcatcaacatcaaaagattaaagcaagtgcaaacttaaattgctgggactagggtccatgcagggtttttatttgcacagagctgtgcatataccagagtccctatctttgctgtttatgaatactttgtacttttttaaaggataagtcagtccatgacaaagttaccttattagtaaaaacacaaggcaaagcttgtggttaagatgacagattgattacacacatctaaaatctttctgtctcataaccctatataactttttttcaaaaaagntgtaaacacacaaggatggngagaacag

SEQ ID NO: 20664 - DNA, 496 bp, Homo sapiens
  misc_feature (1)...(496): n = A,T,C or G
gggagagcggggngnnnnnnncatgatcgcctgtagaattcgcacgagggccggcgcccgagctgnggttgtgtccctgctgggctgccgttccagctggactgccgccatggaactcagcgccgaatacctccgcgagaagctgcagcgggacctggaggcggagcatgtggaggtggaggacacgaccctcaaccgttgctcctgtagcttccgagtcctggtggtgtcggccaagttcgaggggaaaccgctgcttcagagacacagcttggatcctagcatgactatacattgtgacatggtcattacatatggattagaccaactggagaattgccagacttgtggtaccaattatatcatctcagtcttgaatttactcacgctgattgttgaacagataaatacgaaactgccatcatcatttgtagaaaaactgtttataccatcatctaaactactattcttgcgttatcataaagaaaaagaggtg

SEQ ID NO: 20665 - DNA, 470 bp, Homo sapiens
  misc_feature (1)...(470): n = A,T,C or G
nttttgcccgtgctgcaggaattcggcacgagcagctgtggcgcactgcaaacgcggcaatggtctcatcaaggtgaacgggcggcccctggagatgattgagccgcgcacgctacagtacaagctgctggagccagttctgcttctcggcaaggagcgatttgctggtgtagacatccgtgtccgtgtaaagggtggtggtcacgtggcccagatttatgctatccgtcagtccatctccaaagccctggtggcctattaccagaaatatgtggatgaggcttccaagaaggagatcaaagacatcctcatccagtatgaccggaccctgctggtagctgaccctcgtcgctgcgagtccaaaaagtttggaggccctggtgcccgcgctcgctaccagaaatcctaccgataagcccatcgtgactcanaactcacttgtataataaacagtttttgagggataaaaa

SEQ ID NO: 20666 - DNA, 477 bp, Homo sapiens
  misc_feature (1)...(477): n = A,T,C or G
aggcggnngtgnaaatagaccatacgagcgtcggactncggcacgagcttaatcctgctgctgcctgacatgctgattctcatttattatgctgcatcaacacattagaggtacaggagcggctcagtcatgaaaaaagaaggtcttttgccccatttctttatttcagagatgtgggctttcagtgggaatttgctgactcctactttataggctgagtcaatgagggaagatgactggcgtttcctctgtctaaatgggaggttgccagagcgctggctgggactaggatgtgtaactaagatttcagtttgaaatcttagatttcagttcacggcgataaagaagtaggtgctgcacacaaatatgtaaagcaattgtaggaaatttgaaaggaaaaaaagaaaccgaagccagtattttaataattgctttttctgtgtattttgtattgggctgggggatagcatcaaaggt

SEQ ID NO: 20667 - DNA, 506 bp, Homo sapiens
  misc_feature (1)...(506): n = A,T,C or G
ttggaggnnnggggcttgacgccattgaccgcctgtaagaattcggcacgaggctaaattaaattaataaaaatctgagcagagaactcaagcacaggagccagtgctaactccaggaaattctgatgacatttccaggataaaggcagcgtgtcataagttttgggtagaatgtactgatttttggttgcaggtatagctcacttatcgacagtctctgcatgccagttagcaggagtgcccatgaggtacacaagccttgtcctaagagcagcctaaccaaggagacggactttaggagctgtattttccaataagtgactcaatccaaatctgaaatgactaacgcagtgcataaaatattttattcacattttaactccactggagtcacagatgaagtatcatcttctattccaagaatgaagacttcaggtactgtctcaggtgctatctgagctaactggtcatcataagaacgtagggtccataatttctctaattca

SEQ ID NO: 20668 - DNA, 463 bp, Homo sapiens
  misc_feature (1)...(463): n = A,T,C or G
ntttgccccccctgtcccccgcgctgcaggaattcggcacgaggatttctgccctgaggcagagtccaaggtcaatcaatggtgcaggggttgaggaaagctgggggaggccctgtactagccatctgggcttcatttaaaaactactggccccattcatccatcttacacaagctacctcttgggagattaggaaagccatagatcccagtaggactaaggctggccatccctgttccattccatatcaggctgtcttctcctacccttccagctccttaaatctggcccccgccctcccaagctcccaataaggccttttgtggggaagcctgtggagtgtttattggagctaaagccaggccattattagcactgcctaagcctgtccgtcacctcagcagggtgaagggccaattataacaaaagtaggtaaggggcttgcctcctctctaataaggga

SEQ ID NO: 20669 - DNA, 356 bp, Homo sapiens
  misc_feature (1)...(356): n = A,T,C or G
gggggtcnnnnnaattcgacgtttgaggtacgactatagctgtgtccatctcccagaagctcctcatcaatcaccatctggccgagaacttgcttcaaatactggaaatcagcgtagtcgccagaggcacccagcatggtactgttgttgactcgcataatgcgagagatgttgcggaaacgagccaaggagccgtaggatcccagcatgtctgcggcaatcaccactccgccctcgaacttaacgccgaggactgaggtcccggtcaccatggggttctgggtccgcgtgattggacctctgtaaagtgcagacgccggatccatgaaggaatcgggagtggatggaatgcggta

SEQ ID NO: 20670 - DNA, 261 bp, Homo sapiens
gtttgaaacccctttttgacccgcgctgcggaattcggcacgagattggaacgggcttttggctactatggaccactccgaagtgtgtgggttgctagaaacccacccggctttgcttttgttgaatttgaagatccccgagatgcagctgatgcagtccgagagctagatggaagaacactatgtggctgccgtgtaagagtggaactgtcgaatggtgaaaaaagaagtagaaatcgtggcccacctccctcttggggt

SEQ ID NO: 20671 - DNA, 497 bp, Homo sapiens
  misc_feature (1)...(497): n = A,T,C or G
cggcgggcgngtgaagattgacggaatgcagggccgtgcgcgaganatcacggagaagatggtttcagggatggtgaagcatattacaggcagttacaaggtcacctaccacccagatggcccagagggccaagcctacgatgttgacttcaccccacccttccggcgaatcaacatggtagaagagcttgagaaagccctggggatgaagctgccagaaacgaacctctttgaaactgaagaaactcgcaaaattcttgatgatatctgtgtggcaaaagctgttgaatgccctccacctcggaccacagccaggctccttgacaagcttgttggggagttcctggaagtgacttgcatcaatcctacattcatctgtgatcacccacagataatgagccctttggctaaatggcaccgctctaaagagggtctgactgagcgctttgagctgtttgtcatgaagaaagagatatgcaatgcgtatactgagctga

SEQ ID NO: 20672 - DNA, 503 bp, Homo sapiens
  misc_feature (1)...(503): n = A,T,C or G
ngcggcgggnanngtgaaaattgacggatcgatgaccgtacgaaatcggcacgaggacagatcagcaacaaccgaaaatgcaccagccccaggtcctcggacaccgaggagaatgtcaagaggcgaacacacaacgtcttggagcgccagaggaggaacgagctaaaacggagcttttttgccctgcgtgaccagatcccggagttggaaaacaatgaaaaggcccccaaggtagttatccttaaaaaagccacagcatacatcctgtccgtccaagcagaggagcaaaagctcatttctgaagaggacttgttgcggaaacgacgagaacagttgaaacacaaacttgaacagctacggaactcttgtgcgtaaggaaaagtaaggaaaacgattccttctaacagaaatgtcctgagcaatcacctatgaacttgtttcaaatgcatgatcaaatgcaacctcacaaccttggctgagtcttgagactgaaagatttagcc

SEQ ID NO: 20673 - DNA, 460 bp, Homo sapiens
  misc_feature (1)...(460): n = A,T,C or G
ctttgacccccccgtatgccccgcgctgcaggttttagtaccgggttaagataactggcaactgggaagaagtggcctcataggcacttaatttgatttttattttttaaatgctgtcaaagttacagtttacgcaggacattcttgccgtattctcatgatcccagataagtgtgagttttatactgcaacaatatgcagcaatggtaagcgtaaagttttttttttgtttttgtttctgtttttttttatatgatgaagtcttttaacagtctctctttatataaatacacagagtttggtatgatatttaaatacatcatctggccaggcatgggggcttacgcctgtaatcctaacactttgggaggccaagacgggcggatcacctgaggtgaggagttcaagaccagcctgcccaacatggcgaaactccgtgtctaccaatatacaaaaattn

SEQ ID NO: 20674 - DNA, 498 bp, Homo sapiens
  misc_feature (1)...(498): n = A,T,C or G
tgggntnnnnnnnaattgaccgtttgcccgcctgcggttttctctggactggaagccacatttgatccctggttctcagaaatctgggtttggtggttctgtctttatagatacttgtacacatcacaaaatcaccaaatttggggaaatgccaaccatactttgagagaataaatatgagcagttgtgcctacttgcataggggagcctgtgtaaaaagtcagtgattccgtaggctcttttcctgcactaaccagtgcagttaatacctcactttcatgaacagcaaactcatggcaacattaagtgaatcatggccgggcgcagtggctcacgcctgtaatcccagtactttgggaggccaaggcgggtggatcacctgaggtcaggagttcaagacgagcctggccaacatagtgaaaccagatctctactaaaaaatacaaaaaattagccgggcgtggtggcagacgcctgtaatctcagctgctcgggagg

SEQ ID NO: 20675 - DNA, 495 bp, Homo sapiens
  misc_feature (1)...(495): n = A,T,C or G
ggggcccnnnnattcgacgattgacngacctgcaggaattcggcacgagaagtctgatagaaaaaatactcaattcctaatttaagtgttagagactttaatgtaagctatctaatctgaactagtttcattatttgtgtgtgggtacatgttatgtgctccgtaaggcatctttcaatttgaaaatttcataattgtaatttcactgcctttataaattgctttttttttttttttttttggaggcggggtctttgacccccaggttgaaaagcagggccacattattatttaattgcaccctaaaacaccggggttgaaggaaccccccttctttaccccccaaaagggccggaattacgggcttaacttactgccccggcccaaaaaatggccatcttttaaaaaacccttttccccaaggttttttcaaattctccccaagactcattcccggatcccaaataattaaaaatttggtttttaggcaaggcg

SEQ ID NO: 20676 - DNA, 521 bp, Homo sapiens
  misc_feature (1)...(521): n = A,T,C or G
ggcacttcccaggcngcccccccaatagancgccatagancgccttccgaagacgcaccacgaaattctgggataagcttgagtntaagtagaccatgtgcgtttccaaacagtgagaacaggtcactagcaaacaatggcattttgtttgagaaatggggagcgagcaaaactggagcattaccatcatgatggcctgtcacgcttttcagagaagaaatgaactgattaaccacaaatgcattattccaacaagccaaaagtcttccatcccatgggccagggtaattttcccaggttagatccagggtttgggtgaaatttaactttaagatgtgggtgccaaaagagagaattggcttgtggggcctttcaccagagacccatgccagtgactgaatgacctggattaggtatgcatacttgcaagcctcttatttgggaattacactaatgggtacctgttttgtgtgaccaaaaatgttgagaactgaagacatcaaattataactgcagtatan

SEQ ID NO: 20677 - DNA, 510 bp, Homo sapiens
  misc_feature (1)...(510): n = A,T,C or G
cgcggcgnaattgattaacgaacnccgtaggaatncggcacgagaagaagatcttggacagcgtgggtatcgaggcggacgacgaccggctcaacaaggttatcagtgagctgaatggaaaaaacattgaagacgtcattgcccagggtattggcaagcttgccagtgtacctgctggtggggctgtagccgtctctgctgccccaggctctgcagcccctgctgctggttctgcccctgctgcagcagaggagaagaaagatgagaagaaggaggagtctgaagagtcagatgatgacatgggatttggcctttttgattaaattcctgctcccctgcaaataaagcctttttacacatcaaaaaaaaaaaaaaaaaaaaaacccgccccaaggggggcccggaacccaaatcccccttatagggaggggaataaaaatcaacggcccgcggtttaacaccgcggggaggggagaaaacnnnnnnnnnnnnnnnnnnnnnnnnnnntnt

SEQ ID NO: 20678 - DNA, 454 bp, Homo sapiens
  misc_feature (1)...(454): n = A,T,C or G
ntttgcccggctgcagaattcggcacgaggagagagagagagagagagagagagagagagagagagagagagagagagagagagagagagagagagagagagagagggaatgtgtgacactgtttgtttgtggaaacaagacaggggggggcgtgtgtctgcaacaacacaccacgccccggggcgcacccacgcgcgcacggcacacgctgagacgggagattatatggacacaatatctattataaaagatctttctctcaagagatcaccgcaagagaagaatgtgtccccatatatacacagagagcggttttgtgttttgaccaacacacctctttttttctatgtatgtgacaaagagagggggggccacaaaaggagacccattgaaataaaaaaacacatgtgtggggagagagtatctctcggggcgcacacgcctggagagaga

SEQ ID NO: 20679 - DNA, 446 bp, Homo sapiens
  misc_feature (1)...(446): n = A,T,C or G
attgactttcgtgagcngtctcnngaagaanaaaattactcaaagcaaatcaagagttaacaaacctaacgtaacctgaggtttaatattctactatcatattttttagagctataacttttgattatattaaactgcctccagctgtactatgtaaaacagatttacttttaaaaattacagtatacctgctttgttctatatgtgtatgtttaactcatgaagtggactcttagaaggatttgaaatggactctggccacagaatttgtgagcagacagtagtagtgataataataaaagaaggcaatcaaaatttaattttatcatgccctctcacaggtttgtgttataattgtaagcccatattacttgtgttagtagttttgtctctataggtaacataatgacagtggtgtaaagtttctgttcaagaaacatatgttg

SEQ ID NO: 20680 - DNA, 475 bp, Homo sapiens
  misc_feature (1)...(475): n = A,T,C or G
natttgaccggcttaatagaaacgcccttcaggaaaaccgcacgaggcgagatggccaaacgtaccaagaaagtcgggatcgtccgtaaatacgggacccgctatggggcctccctccggaaaaaggcgaagaaaattgaaatcagccagcacgccaagtacacttgctctttctgtggcaaaaccaagatgaagagacgagctgtggggatctggcactgtggttcctgcatgaagacagtggctggcggtgcctggacgtacaataccacttccgctgtcacggtaaagtccgccatcagaagactgaaggagttgaaagaccagtagacgctcctctactctttgagacatcactggcctataataaatgggttaatttatgtaacaaaaaaaaaaaaaaaaaaactcgggggggggcccggcccccaattccccttaaaggggggcgtataacaattcattggccgtggtt

SEQ ID NO: 20681 - DNA, 520 bp, Homo sapiens
  misc_feature (1)...(520): n = A,T,C or G
agggctnnccaagccnctcccccccaatagaccggcattagaattcggcacgagagatgctccacactcgcttatgctacttaatgagaatcttgagaaaatagaccacaatgattccctgttgtattaaaattgcagtccaaatcccataggatggcaagcaaagttcttctagaattccacatgcaattcactctggcgaccctgtgctttcctgacactgcgaatacattccttaacccgctgcctcagtggtaataaatggtgctagatattgctactattttatagatttcctggtgcttagccttataaaaaaggttgtaaaatgtacatttatattttatcttttttttttttttttttttttaaaacccaatttggttttttgtcccccaggctgaagggcaggggctcaatttttgttcatgtgaagctccgcctccggggttaacccctttttcttgcttaagcctcccaagaagttggaactacaggcccccgccaccacgcccggtta

SEQ ID NO: 20682 - DNA, 513 bp, Homo sapiens
  misc_feature (1)...(513): n = A,T,C or G
ggaggagggnnnnnnnttttgancggccataggcaccgcctgcaggaattcggcacgagcgctgagcgagttcgactccttggcgggcagcatcccggccaccaaggtggagatcaccgtgtcctgcatgaacctcctggacaaagacatgttttccaagtccgacccactgtgcgtcatgtatacccaagggatggagaacaagcagtggcgggagtttgggcgcaccgaagtcatcgacaacacgctcaatcctgacttcgtgcgcaagttcattgtggattactttttcgaggagaagcagaacctccgttttgatctatacgacgttgactctaagagtcctgatttatccaaacacgatttcctgggccaggccttctgcacccttggagagattgtggggtcccctgggagccgcctggaaaagcccctcacggaaaagctgttactctgaagcgggctctgggatgaggaatccaaggcttctcacagtggagcctgatgatgtct

SEQ ID NO: 20683 - DNA, 505 bp, Homo sapiens
  misc_feature (1)...(505): n = A,T,C or G
ggagagtgnnnnnnccttgacggccatagcatgtctcgcgagcagagctcacttctgtaccacgtctgctggtctccagccttgtatggagttagaagcgtctgtatctctggagcagccaggcgctctggagccagctggagagagagagatcctgatacctctgtggggactgtggggacttttgggaccccacacactccaggtgggatcagatgctgctccaaccatgcagttcctggtgagggtcagaaggggacggtaccaagagcagcgcttagcccttacccaggaaatatccttcatggccacagaaatggagggcgcccaggatccaggcagccaccgggaacagtcagctttctttattaaatgtgctcacaaagcaaaaaaaaaaaaaaaaaaaaaacctggggggggggccgggcccccatttccccttatagggggcggattaaaattcccgggcccgcggttttacaccgtggggaggggtgggaaaann

SEQ ID NO: 20684 - DNA, 488 bp, Homo sapiens
cttcgacccgcttttgctccgcgctgcaggaattcggcacgaggcaggttggcactcacacccagcgcgcaggatggcaggcaagaatagcacatttcaaacctacaagaaagaagtgtgcctcccccgtcattcgatgcaccctggcccctgggccatctgctgtgaatgccagaccagattcgggggccgcctgcctgtgtccagggtggaagcagcactgccttactgggtccctctgtccctgagaccccgaaagcagcacccctgctggatgcatgctgctggcacaactgctggcggatctgcggtgatgagtgcctgttgtccaagttccagcagctccaggccccctaccaggaccagctaccggctcctgcagcgcgtctgctggccctcggcctcctgaccctcctccaggccatcccgagggtcatcatggccattcgccagtgttttggggtttgaagttggaatcttcagctact

SEQ ID NO: 20685 - DNA, 478 bp, Homo sapiens
  misc_feature (1)...(478): n = A,T,C or G
aattgatcggcttcgngaatatttcgaagccatgctggngctcttgagtgaggaagagatccagcagacatgtgagatgctacagcagtgtaaagaggaattcattattctacaagaattacttgatcgagtgctggaacgttttcaggcatctggactaatagtgaaagagtggaatagtgtgaaactgcatgctacagttatgaatacactattcaggaaagaccccaatgctgaaggcaggtacaatctctacacagcggaaggcaaatatatcttcaaggaaagagaatcatttgatggccgaaatattttaaagttgtttgagaacttctactttggctccctaaagctgaattcaattcacatctctcagaggttcaccgtagacagctttggaaactacgcttcctgtggacaaattgacttctcctgaggtggatcttggaaagcactagaaactaaacatcttcaccag

SEQ ID NO: 20686 - DNA, 478 bp, Homo sapiens
  misc_feature (1)...(478): n = A,T,C or G
agcggggaattgacgtctgtangacttcggcacgagccaggtttctaattcatgggtgaatccgagagaataggtatcagattagggattacaaaatgtagcatgggtactaaatatcagtacaaagcagccacaataatattgatttatggatttaagtaacccgaccaaaccttgatgtatctcatcatgttgaatttctgctccagataataaagtattgtttgatcttgtgcattggccttttatttttcagaatgattcaaaggatggctttggggattcactgtaagattttttgtcatctaaattatacttgaggtggagaggcataatttaaacaacttcataggcaaagaaaagagctatacacagcagatcctggattaggaaaataaatacgttttattattcagaacatgcttttatgaactccttttaaaaaattgcaagccttgcagtgagctgagattgcacc

SEQ ID NO: 20687 - DNA, 482 bp, Homo sapiens
  misc_feature (1)...(482): n = A,T,C or G
aggggggnattgaattcgatcggctgcangaattcggcacgagcttggcagcctcatcattgcatgcaatcttcacagacaatatctcactgcagccacctttctgcaggagtacaggtgtgacattatactgatgacatcattctcagagaaaattcattttacacactgaagatacacagacacaaagagccttatacaaagggaatggacctttccccaacacagtagtgcaaggccctgccactttgcttcaattcctgaaaattccttggtaaacttggggctgctctatacctgacactttcaagaaatagctattcatcctctcagcatccacaacgttaatacaagcccaacattctctaatttgtgttttggattttggagacacagacttgctctgtcacacaagctggaatgaagtggcatgatctcagctcactgcaggcttgacctcccgacctcaagcaattctcccn

SEQ ID NO: 20688 - DNA, 523 bp, Homo sapiens
  misc_feature (1)...(523): n = A,T,C or G
ggggnntnnaaggcngcncccncaatgngaccccattagaccgcctgtangaattcggcacgagctgtagtgaccttacctgtattccctgtgctatcctgtgggaaggtaggaatgggctaagtatgatgaatgtataggttagggatcttttggttttaaatcacagaaaacctaattcaaactggcttaaaataaaaaggatttattggttcatgtaactagaaagtccataggtagtgctggctccaggtgaagacttgacccagtagttcagtatgtctctaaataccggactgacttttttctcactgttgcatcttctgtaggaccatttaagtctgggccacttaatggctgccagcattcctaagattacacttttccccatttatgtccaatcagaaaaagaaggcatctttgtaccagaaatctcagcaaaagccctaatattcacactgattaggcctgggtcacatgtccaccctgaccaatcactgtggccaggaggatgatacatgct

SEQ ID NO: 20689 - DNA, 479 bp, Homo sapiens
  misc_feature (1)...(479): n = A,T,C or G
natagatcgtccgtagccagggccgaggatttttggtccgcacgctcctgctcctgactcaccgctgttcgctctcgccgaggaacaagtcggtcaggaagcccgcgcgcaacagccatggcttttaaggataccggaaaaacacccgtggagccggaggtggcaattcaccgaattcgaatcaccctaacaagccgcaacgtaaaatccttggaaaaggtgtgtgctgacttgataagaggcgcaaaagaaaagaatctcaaagtgaaaggaccagttcgaatgcctaccaagactttgagaatcactacaagaaaaactccttgtggtgaaggttctaagacgtgggatcgtttccagatgagaattcacaagcgactcattgacttgcacagtccttctgagattgttaagcagattacttccatcagtattgagccaggagttgaggtggaagtcaccattgcagatgcttaagn

SEQ ID NO: 20690 - DNA, 483 bp, Homo sapiens
  misc_feature (1)...(483): n = A,T,C or G
nataggacgattcgctccgcctgcaggaattcggcacgaggcgaagcggaggccggagttaatacacgaggaactcatgcaaaggaggggactttcggaaatccaaacttagagtgccttgtatttagaatccggaaggaaaaggaaatgaaatgtgaagaaactcatgcaccaaactcgaactgggtatatgtgatgttacctagtaagaagactgttagaatgccctcggtaacacagaggctgagagatcctgacataaatccttgtttgtcggaatctgatgcttccaccagatgtctggatgaaaataactatgacagggaaaggtgttccacttacttcttgaggtacaaaaactgccggagattctggaattctatcgtgatgcagagaagaaagaacggagtgaagccatttatgcctacggcagcagaaagagatgaaatcttgagagcagtgggaaatatgccctattgaatg

SEQ ID NO: 20691 - DNA, 480 bp, Homo sapiens
  misc_feature (1)...(480): n = A,T,C or G
nattgancgtctgtangacttcggcacgagctggagggcgtcagtgaaaagcagtacaccatctacatcgcacctggaggcggngcgttcacgacgttgaatggctcgctgaccctggagctggtgaatgagaaattctggaaagtgtcccggccactggagctgtgctatgctcccaccaaggatccaaagtgaccccaccaggggacagccagaggaaggggaccatggggtatccctgtgtcctggtctatcaccccagcttctttgtcccccagtacccccagcccagccagccaataagaggacacaaatgaggacacgtggcttttatacaaagtatctatatgagattcttctatattgtacagagaggggcaaaacacgcccccatctgctgccttttctattgccctgcaacagcccatctatactaggtggtggtgaaggtgaagaaccctcccattcacgcccgcctac

SEQ ID NO: 20692 - DNA, 388 bp, Homo sapiens
  misc_feature (1)...(388): n = A,T,C or G
aggnccnnnnnaattgacggttgaggaactcggcacgagcaaaagctgccgctcagctttgatggaacaacgcttattttggaagttcgaaggggctgtcgtgtgtgtggccctgatcttcgcttgtcttgtcatcattcgtcagcgacaattggacagaaaggctctggaaaaggtccggaagcaaatcgagtccatatagctacattccacccttgtatcctgggtcttagagaccctatctcagacagtgaaagtgaaatggactgatttgcactcttggttctttggagccttgtggtggaatccccttttccccatcttcttctttcagatcattaatgagcagaataaaaagagtaaaatggtaaaaaaaaaaaaaaaaaaa

SEQ ID NO: 20693 - DNA, 492 bp, Homo sapiens
  misc_feature (1)...(492): n = A,T,C or G
cgccccttcgaccgcctgcagatnctttgcacccgctgcaggaattcggcacgaggtttttctctcgtcccagctgtgtggacagtgccacacgccctcctggacaacgacggctcttgcgtgcattttccagtgttgcttttgtcagagaggccagcagagccacggttcttccagaaccagccctgagctgagtgaggagtgcccacgagagatggtgaaaatgacaaagtccaaaactttccaagcgtatctgccgaactgtcaccgaacgtacagctgtatccactgcagagcacacctggccaatcatgacgagctcatctccaagtcctttcaggggagccagggacgcgcctacctcttcaattccgtggtgaacgtgggctgcggccctgcagaggagagggtccttctcaccgggctgcatgcggttgccgacatctactgcgagaactgcaagaccacgctcgggtggaaatacgagcatgg

SEQ ID NO: 20694 - DNA, 456 bp, Homo sapiens
  misc_feature (1)...(456): n = A,T,C or G
nttttgccccgcgctgcacgaattcggcacgaggaagatggcggacattcagactgagcgtgcctaccaaaagcagccgaccatctttcaaaacaagaagagggtcctgctgggagaaactggcaaggagaagctcccgcggtactacaagaacatcggtctgggcttcaagacacccaaggaggctattgagggcacctacattgacaagaaatgccccttcactggtaatgtgtccattcgagggcggatcctctctggcgtggtgaccaagatgaagatgcagaggaccattgtcatccgccgagactatctgcactacatccgcaagtacaaccgcttcgagaagcgccacaagaacatgtctgtacacctgtccccctgcttcagggacgtccagatcggtgacatcgtcacagtgggcgagtgccggcctctgagcaagacagtgcgctt

SEQ ID NO: 20695 - DNA, 475 bp, Homo sapiens
  misc_feature (1)...(475): n = A,T,C or G
ctttggcgcctgcagattcttgcacacgtggttgaggccgtagccatccatggtggcaaagaccatgaggaacggactaaggccatcgaggcattccgggagggcaagaaggatgtcctagtagccacagacgttgcctccaagggcctggacttccctgccatccagcacgtcatcaattatgacatgccagaggagattgagaactatgtacaccggattggccgcaccgggcgctcgggaaacacaggcatcgccactaccttcatcaacaaagcgtgtgatgagtcagtgctgatggacctcaaagcgctgctgctagaagccaagcagaaggtgccgcccgtgctgcaggtgctgcattgcggggatgagtccatgctggacattggaggagagcgcggctgtgccttctgcggnggcctgggtcatcggatcactgactggcccaaactcgaggctatgcagaccaagc

SEQ ID NO: 20696 - DNA, 509 bp, Homo sapiens
  misc_feature (1)...(509): n = A,T,C or G
ggagagtgnnnnnnccttgcacgccatagaacgcctgcggaattcggcacgagattggcccaaatgacgaacacaaatggaaagaggagaggcacccgacatatgttctctatgccttttacaaaacatggagatgttcctttggccacatatatgcgaatctatcagaaaggcgatattggagacatcaagggaatgggtactgttcaaaaaggaatgccccacaagtgttaccatggcaaaactggaagagactacaatgttacccagcatgctgatggcattgttgtaaacaaacaagttaagggcaagattcttgccaagagaattaatgtgcgtattgagcacattaagcactctaagagccgagatagcttcctgaaacgtgtgaaggaaaatgatcagaaaaagaacgaagcccacgagaagggtacctgggttcaactaaagcgccagcctgctccacccagagaagcacactntgtgagaaccaatgggaatgagacnta

SEQ ID NO: 20697 - DNA, 478 bp, Homo sapiens
cctagaccatagaccggctgcacaactacatgtcctcccttcactgcctgccttttggggaaagaccaccttttgtgtgtttgttttttctctctctttctttccctttctctttctatctctctttatttttctttctttttctttgtttttgagttttctataggaaataaatagctttctatatatgagttgctggggaccttcacattctcttttagaaagctgtggcatgcagtctcattgcaggactcctggaatattgtctggttcttggtatttactgtatgtaagcaacaacttgaaaggtggcaatatggtgtcgatttggactatgaatcaaaagacctttttcaggttctttcactattgtctgggggactcagaacaagattggtctctgtatttattggttggccatttaggtaacatctgtcttaccttcctcacagactttgtacagaccaaagcaacaaat

SEQ ID NO: 20698 - DNA, 495 bp, Homo sapiens
  misc_feature (1)...(495): n = A,T,C or G
cgccccatggaaccgcgnngaggaanntttgccnccgcgctgcaggaattcggcacgagatcacactgacccaagagaaggcccacagtgaggaggccccaccgaagcatccccagcaacagggactgaggcatctgaggcagccagcccactcggaaaggcctgctgactgcactccggatgtcaagagcacccttgggaaaaagaaaggcaggagtgcagcactttctagagcctcagctcacttctctccttctagctccagccggagtgatggaagaggctgcgctgggagctgcctccctgggagcctaccctgcccagcctgagagtggaggctaccagcatcacgcttcccctagtgaaatccatctgtcctgaagggaaccctgggacggggtcaaggaaaccctgttcacccccaccacggggtcaggtcttcaccaaagggaggccgcacggattcccagtcgcaaacccaaagccttgctgctt

SEQ ID NO: 20699 - DNA, 505 bp, Homo sapiens
  misc_feature (1)...(505): n = A,T,C or G
ggggccggatggngnctnccnnncaatagatnnactgaccgactgtcacgaattcggcacgagattagttatatatggggatgggagttttttcatcttcagttgtctctgatgcagcttatacgaaataattgttgttctgttaactgaataccactctgtaattgcaaaaaaaaaaaaaagtggcacgtgtttgggggactttcgaaaggctttaaagaaaacacaattttttttataagaatgggggccctttctataggggaaaaatttttttttttggggggaagcaaactttttgttttggccctttttgattcacaggatttattacggggttttccttttcttatagtgggcaaaaaaaaagcttttgtttaccccccctgcttataatacggggggaaaggtaatttggaaaaagttttcttccatatgggaacatcaaaaatttgagtgagtaaaaaaatttcacttggcccctttacttttacaaactgaaaag

SEQ ID NO: 20700 - DNA, 481 bp, Homo sapiens
aggggggaattgatttcgtcggctgcaggaattcggcacgagcccaggaggagctcccaagccgcagggtggacgctggagacaagaacctcagggtcacaagtttactgtttttctcccttttccatccctacattggtctgctggggaaggcggggctaggcatcactgacacacgcagactccgtggttgaggcattttattggacctttggcaattggtggtggggaggcatctgctccaactggtgcggggccctgcagatgggaccatctcaggctgggtccttgtagcccaggagcacagactggactaagcctcctgggccttgtatgaaaaaggtgttgtacctggccgtttttgccagtaataatcaatagaataaccataataaaaatcaaaaaaaaaaaaaaaaaaaacctagggggggggccgcggccccatttgcccttatggggggtggaatcacattccacgtgc

SEQ ID NO: 20701 - DNA, 493 bp, Homo sapiens
  misc_feature (1)...(493): n = A,T,C or G
aggcggngttttnaaccgactagcagaagcatncggcacgagccttttntggtncagaaccacaccaggagctgcgaggaaattaaccagagtctacaagggaaatgtacattgactgtatcnntggagaaggggacattatttcggacacgatctggtggacgttccgcaagctgatggttagccctggcaaagggtnagaagagcagaggatggctctgtcattgattatgaactgattgaccaagatgctcgggatctctatgacgctggagtgaagaggaaaggaactgatgttcccaagtggatcagcatcatgaccgagcggagcgtgccccacctccagaaagtatttgataggtacaagagttacagcccttatgacatgttggaaagcatcaggaaagaggttaaaggagacctggaaaatgctttcctgaacctggttcagtgcattcagaacaagcccctgtattttgctgatcggctgttn

SEQ ID NO: 20702 - DNA, 451 bp, Homo sapiens
aattgaccctcgctgcacgaattcggcacgagtggtggttaagttttgggggagtcaaaagttacatgcaaattttttactgtgcggggtgtcagcatccctaaccccatgttgttcaagggtcaactgtagtttaaaatgactcctgtctcaaaaaaccaaaggataacctttaagggattggtaactttgactcaaaactgctttgtaatcttttcacaatgtactgaaaagtgtggctagttatgtttgatccacattctagagaaatttgtaggttttaatttcttttctcttggtcctctcttcatgtataatggttgcttttaacagctgttcgctgatgtggtcctgctctgtcccagtctagcagctttagtgtatggaaaaattgaactaggaattgagttttgaagaaataaaggtgtaagagcaaacattcaacagttgc

SEQ ID NO: 20703 - DNA, 479 bp, Homo sapiens
  misc_feature (1)...(479): n = A,T,C or G
agggaggncagggnggannnnattatgaccgccttcggaattcggcacgagagaaaatgtaaggattctggaatacatattccatgggactttccttccctctcctgcttcctcttttcctgctccctaacctttcgccgaatggggcagcaccactgacgtttctgggcggccagtgcggctgccaggttcctgtactactgccttgtacttttcattttggctcaccgtggattttctcataggaagtttggtcagagtgaattgaatattgtaagtcagccactgggacccgaggatttctgggaccccgcagttgggaggaggaagtagtccagccttccaggtggcgtgagaggcaatgactcgttacctgccgcccatcaccttggaggccttccctggccttgagtagaaaagtcggggatcggggcaagagaggctgagtacggatgggaaactattgtgcacaagtcttt

SEQ ID NO: 20704 - DNA, 522 bp, Homo sapiens
  misc_feature (1)...(522): n = A,T,C or G
aggggnnnnnagggagcccccncaatagaacnnctttagcccgcctgcggcagttttcctgaggacagctcanaagaaaggaatcttgtatcctgggaaagccaaactcaacctcaagtgcaggtgcaggatgaagaaattacagaggatgacctccgtcttattcatgagagagaatcttctatcaggcaacttgaagctgatattatggatattaatgaaatatttaaagatttgggaatgatgattcatgaacaaggagatgtaatagatagcatagaagccaatgtggaaaatgcagaggtgcacgttcagcaagcaaatcagcagctgtcaagggcagcagattatcagcgcaaatccagaaaaaccctgtgcatcatcattcttatccttgtcattggagttgcgattatcagtctcatcatatggggattgaaccactgaagttataaaggagcacactgtcgcactacattgtctaaattatttcggtactgaaggcggtgttaacttggcaga

SEQ ID NO: 20705 - DNA, 471 bp, Homo sapiens
  misc_feature (1)...(471): n = A,T,C or G
aggggnttttnaactgaattgcgtggcattcggccgaggccggtctgccctccccattcaagccccttctccactgtagcaaaataagcacccccaccccatctgccttcaggtcttcttcacagcctgcactgcccagtgggccactaggggcagtctctggaagggctggttcaaggctgtttgggtataggggtcaggtaccaatgaagaatcacgacttgtctcactcctttggaaattgttttctttcctgtgtaattacttcatacctctgtttttgagaaactgttccgtttgtcatctgtcatggtctccttccaccaaatcttgatctgggaatagcagcggtatccctccacccaagtatggccacctgtttgtcttcatatagaacaggggcttctggtctggtcatgtccctagagacttactagagactggctgaccatgaaaaaaaaaaaaaaaaaa

SEQ ID NO: 20706 - DNA, 493 bp, Homo sapiens
  misc_feature (1)...(493): n = A,T,C or G
ggagncacattgacggcctngatcgatcggctgtgggaaangcggctttgtccgagagggcatgactctgtggtgtgtcctttgtatgaattgggaaaggggactcctttctccatgtggatgccacccttctctggggctcataggtgtgagcagaacctggactggatttgatgccccacttgcccctttgtctggattcctttgtgcagtgaacaacctgtgcagctgtacatggtggtgcatacacacacacacacacacacacacacacacacacacacacacacacacgntctcttctcttctctctttctttttcttttttgagacagggtctctctctgtcacccacgctgtggcgcagtggcatgattttggctcaacacagtctcagtctcccaggctcaagcaattctgtagtcccagatactcaagaggctgaggctggagaatggcgtgaacccgggaggcagaggttgcagtgagctta

SEQ ID NO: 20707 - DNA, 480 bp, Homo sapiens
gcatggaccgcctgcagaattcgtatgagggcatgtacccagccaccctaccttctctcctctggggtccccactttagggcgactttgcccgaggcccacgcatccatccactcctttagtgccttgaatctcattcacaagcagccccctcccttcccctccccttctcactctgttgatgtaatcctcccacccccagtgtccatcctaagacaggcatcaaaagaggccctaactttacttcccaaatggtgctttttaaaaaacaccatcactacattaggggcaattttttcacacctccctgtcttcagaatgtaaagggtggggattatgtctctgtttaatatgcagccccctgcactgtggggtttggggcatgttcagtaataagaatgaatacaatagacaaagggggtgtgatgagtgttaacttggttgttccagaggtaaaccaggtctcagggaagaagcctga

SEQ ID NO: 20708 - DNA, 481 bp, Homo sapiens
  misc_feature (1)...(481): n = A,T,C or G
ggtggggcatagatgtcgtgtctgaattcggcacgagccgagtttgggattcggctgttgggaaaaaaaaatcgcgtttgtaccttttccccccacagatgagaagtgtttgtaatggatttgtatttttcttaattttatgctctttagacgtttaaaagaaccaaaaaagaaacttttgcttcttcgttttcggttgggatttgcagtttaatggcctcagatccttctccagatccccagggtttctttgtcttatttatggagaaaaaccggtcactttgtccagcgcactgtgaggcccccactcaggccagccctggcccccccttggtacttggaaccgaagttacagattatattaaaataataatgtgcccccaaaaacccaaataaaaaaaaaaagncttggggggttttccccttctcccccaatttttttttaaattggggtgaaaaggcccggccccctctttgactt

SEQ ID NO: 20709 - DNA, 444 bp, Homo sapiens
  misc_feature (1)...(444): n = A,T,C or G
ntttgcccccgcttggagaactcggcacgagcgcccagctaatttttgtatttttagtagagaaagggttcaccatgttggccaggatggtctcgaactcctgacctcaagtgatccacctgcctcccaaagtgctgggattacagacgtgagccaatgtgcctggccgagagagattcaagttagggaatatatatgtgtgttgacctggtcctatatggccaagctatgggctagcaggatgccctgtgtatgccagtcccagggcttgttctttgaccccttgggagccagagtcagatgctcagtgtgagactgaaaccccaagagccatagctatagctatagtcagctgttttgtgagcagcctcaggaggaactttttggacctggaactacccgcttgcaggtccatggagcacatttatctcggggcctgaggct

SEQ ID NO: 20710 - DNA, 480 bp, Homo sapiens
  misc_feature (1)...(480): n = A,T,C or G
cctagcccgcctgcaggaattctgcacgagcngtaattgagatcttatccctatatgatgctgagaacctaggcaaagagcacttcagaaaacctgtgcctcctatcccagaagacctgagcgtcatctgcttcaccagtgggaccacaggtgaccccaaaggagccatgataacccatcaaaatattgtttcaaatgctgctgcctttctcaaatgtgtggagcatgcttatgagcccactcctgatgatgtggccatatcctacctccctctggctcatatgtttgagaggattgtacaggctgttgtgtacagctgtggagccagagttggattcttccaaggggatattcggttgctggctgacgacatgaagactttgaagcccacattggttcccgcggtgcctcgactccttaacaggatctacgataaggtacaaaatgaggccaagacacccttgaagaagtntcttgtgn

SEQ ID NO: 20711 - DNA, 507 bp, Homo sapiens
  misc_feature (1)...(507): n = A,T,C or G
tgggngtttttatgaatctgcatggcgtacgacttcggcacgagctgcgagaccgctatcccgtggaagattatctggacctctttgacctggccgcacaccagatccatcaaggactgcaggccagctctgcaaaggagcagagcaagatgaatacaatcattatcggggaggccagtgcctccacgatgtgggataataatgcctggacgttcttctacgacaacagcacggatggcgagccgccgtttctgacgcaggacttcatccacgcctttcagccaaatgccagactgattgtcatgctcagggaccctgtggagaggttgtactcagactatctctactttgcaagttcgaataaatccgcggacgacttccatgagaaagtgacagaagcactgcagctgtttgaaaattgcatgcttgattattcactgcgcgcctgcgtctacaacaacaccctcaacaacgccatgcctgtgaggctccaggttgggctctatg

SEQ ID NO: 20712 - DNA, 448 bp, Homo sapiens
  misc_feature (1)...(448): n = A,T,C or G
ntgtgggttttnnaaactgaagtctcttggcaattcgccgagccctgcgccacacggccgtcgccatggtgaagctgagcaaagaggccaagcagagactacagcagctcttcaaggggagccagtttgccattcgctggggctttatccctcttgtgatttacctgggatttaagaggggtgcagatcccggaatgcctgaaccaactgttttgagcctactttggggataaaggattatttggtcttctggatttggaggcaatcagcggacagcatggaagatgtgtgctctggctcggataagagatgggacatcattcagtcactagttggatggcacaaggctcttcacagacgcatctgtagcagagtggaacttgtactaacttatgatagaatgtatcagaataaatgtttttaacagtgtaaaaaaaaaaaaaaaaaa

SEQ ID NO: 20713 - DNA, 480 bp, Homo sapiens
  misc_feature (1)...(480): n = A,T,C or G
attagataaaccctnnnnantttgcaccgcctgtcagaattcggcacgaggggaagtcgtgtgaatacctcggtctcttagccacagggatagaatggcggcctgacggagccgcggcgccggcgaagtcgctgaggcgcgagctggaacccccagaccagctcaaacgggagccaaaactcgaagcttggaagaattagcaggaaatggcggatgaggcgttgtttttgcttctccataacgagatggtgtctggagtgtacaagtccgcggagcagggggaggtggaaaacggacgatgtattactaagctggaaaacatggggtttcgagtgggacaaggattgatagaaaggtttacaaaagatactgcaaggttcaaggatgagttagatatcatgaagttcatttgtaaagatttttggactacggtattcaagaaacaaatcgacaatctaaggacaaatcatcagggcatct

SEQ ID NO: 20714 - DNA, 504 bp, Homo sapiens
  misc_feature (1)...(504): n = A,T,C or G
agtgggtccccccaatcgacgcctgtngattgatcggctgtangaattcggcacgaggttcggtgtccgtcgagctagccacaccctgacaccatgttcaagggtaccggaagagaagggtgtctgcccccaacctcccctgtgggtgtcactggccagatgtcatgagggaagcaggccttgtgagtggacactgaccatgagtccctggggggagtgatcccccaggcatcgtgtgccatgttgcacttctgcccaagcagcagggtgggtgggtaccatgggtgcccacccctccaccacatggggccccaaagcactgcaggccaagcagggcaaccccacacccttgacataaaagcatcttgaagcttttaaaagaaaaaaaaaaaataaaaaaacctcgggggggggcccggcccccaattccccttatagggggtcgaattacaatacactggccgccttttaacaacgtcgggagaggggaaaccgggntncntg

SEQ ID NO: 20715 - DNA, 486 bp, Homo sapiens
  misc_feature (1)...(486): n = A,T,C or G
gggggggggnnncnaatttgancgccccnttttgctccggctgcaggaattcggcacgagggaacaaggtctgtaccccacttttcctcctgtgagcagtctggacttctcactgctacatgatgagtatcctcccctttccggatctgctgagccggacagcagtgctggactgcacagccccggggctccacattgctgtacgcacagagatgatatgcaagttcctggtacagctcagcatggatttcagctcctactacaaccgggagcctcgaccacacctctttggtcagatgttcgtccgcctgcagcttctgagagctgtgcgtgaggtgctccatactggcctggctatgctgggtctccctccactgagccacatttaaggccacagaggctccaatacctgggaatgttcacaaagtcatcaactggaaaaaaagcaaaaacccacggccaaaataaattggtactgttggtaca

SEQ ID NO: 20716 - DNA, 407 bp, Homo sapiens
acgagctccggcgaggaggacggtgcacacgccagcgaggaagatgatacaattaccaatgaacaggcgcacagtattctacattttttgaagtcaacacaggaaatgtatttttatgacgagatgcagcttcagctgccctcgcagatgccgctgaggagctgctggaccgccttgcgtcacacagcatgctgccctcagacgtgtccatcctgtaccacatgaaaacgctgctggtcctgcaagatactgagagattgaagcatgctctggaaatgttgccagaacattgcacgatgcctactgaccatgccagagtaatctcagctttctttagttactggatcacacatatccttcctgagaagagcagtgaccaccatggaatatctgtttaagaacagctc

SEQ ID NO: 20717 - DNA, 492 bp, Homo sapiens
  misc_feature (1)...(492): n = A,T,C or G
ggattatgcccgcgctgcaggaattcnatatgcacccgctgcacgaattcggcacgagctaaatgctggggaggtaaattaagacagaaccaaatgagctaagttgcaaatatatatatatacacacacacacatatatgtacatgtgtatgtacatatatattttaaaagactgtttactgcagttgctcaggaactgcttttgattcacattaagctgctttcagaaattaaaaaaacactttttaaagggtgcattgataaaatctgaggttttttggttgtcgtttttttctgtgtacatttttttcctaagtttatggcacagggtagaccttaagtattcctcctccatccttcattcttcaccctccattggatcctcaagttttaatgaattccaattataccttacatcagcaagttaaaaaaagtactttaaaataaagcaaagggagactgttgctcaaccatcaggaaacagttgtcaga

SEQ ID NO: 20718 - DNA, 493 bp, Homo sapiens
  misc_feature (1)...(493): n = A,T,C or G
catagatccgtctgcgcgaattngacacgcgtcttcagcaagccatagaaaaggacaaagaagaacatggcaaaattaagagagaagaattatatgtgaagcatgcactgagctacaatcagaggcaactgaaagaattgaaagatagtaaaactgatcgactcaaaagatttggccctaatgttccagctcttcttgaagccatagatgatgcttatagacaaggacattttacctataaacctgtaggccctttaggagcttgcattcatcttcgggacccagaacttgctttggctattgaatcttgcttaaaagggcttctgcaggcctattgttgccataatcatgctgatgaaagggtccttcaggcactcatganaaggttttatttaccagggacctcacggccaccgataatagtttctgagtttcggaatgagatatatgatgtaagacacagagctgcttatcatccagacttttccacagg

SEQ ID NO: 20719 - DNA, 466 bp, Homo sapiens
  misc_feature (1)...(466): n = A,T,C or G
atgtgccctcgacgccgcgctgcaggaattcggcacgagccctggtccacccttcccctgtgcacctccggctgggtttgccaagtcagggagcagggctggccgcaggaactcccaaaccttggctttgaatattgttgtggaggtgtgctcgtccctttctggacgtgcaaggtacctgtcccagcaggtcagatggggccagctgaggcgctcccccaggcaggaagggccagccttcaccatcgcgtgggattgggaggagggnnnnnnnnnnnnanncnatnntntgncgntgnnnnngnnnagggcntttttcggagccttggnagactcccgcaacatagacactagcgttcacaagcggcctaaggggcatgtgaggaggctgcaccctgtcagacgcgctagattcctctaaggtctttgagatgcaccgttttttaaaaaggcgtgggtgaattgg

SEQ ID NO: 20720 - DNA, 413 bp, Homo sapiens
gaattcggcacgagcgcttaccctccgggggtaaaagagatcaccgacaagatcaccacggacgagatgatcaaacgcctgaaggggaaaaccaactgccttttcacttgagctgtctagaaaggcccatgtagtgtggaactgaagcctttcaacaacagcaagtgtcaacttataaccgtaagaatgagttaccttcaaaacacaccctccacgcccagtcaagccttcagataactgcagccttgaccagatggtagtgaaaacctttatggatatggatcaggactcagaagatgaaaaacagcagtatctcccactagccttgcatcttgcatctgaattcttcctcaggaaccccaataaagatgtgcgtctccttgtagcatgttgtttggctgatatctttcgta

SEQ ID NO: 20721 - DNA, 475 bp, Homo sapiens
  misc_feature (1)...(475): n = A,T,C or G
ggggtgtgggngngnnngnaccacgattnccatcgatgagcctcnccgagggccgcagccttcaaggaggagcacatctaccccaccatcatcggcaccgagcgggacgaacgctccatggcccagtggctgagcaccttgcccatccacaacttcagtgccaccgctctcacggcaggtggcacgggcgccaaggtgcccagtcccctggaaggcagtgaaggggacggagacactgactgaggcgatgggagctgcccaccagagtgcctctgagcagctcacagtgtgtgcccagatgtgccacccctgtgggcagcaagaagctgggatcgctgcagccatgttttcccggccatgccggcgttgtaacctcaggaccttcccttgtaggaacagcctttctcgaatctgttttcagctcttgcattgcatagatgaacctcagcatgtaaagaactatttttttaaagaa

SEQ ID NO: 20722 - DNA, 499 bp, Homo sapiens
  misc_feature (1)...(499): n = A,T,C or G
aagaaaaaaaacagaaaattagacggcttangaannctcgatcgcctgtaggaattcggcacgagaaaaccttgaaaatcagattctaactggatttgtatgcaactaagtatttttctgaacacctatgcaggtcttatttacagtagttactaagggaacacacaaagaattacacaacgttttcctcaagaaaatggtacaaaacacaaccgaggagcgtatacagttgaaaacatttttgttttgattggaaggcagattattttatattagtattaaaaatcaaaccctatgtttctttcagatgaatcttccaaagtggattatattaagcaggtattagatttaggaaaacctttccatttcttaaagtattatcaagtgtcaagatcagcaagtgtccttaagtcaaacaggttttttttgttgttgtttttgctttgtttccttttttagaaagttctagaaaataggaaaatgaaaaatttcattgagg

SEQ ID NO: 20723 - DNA, 451 bp, Homo sapiens
  misc_feature (1)...(451): n = A,T,C or G
aattganattcgctcccgctgcaggaattcggcacgagaaaaagatgtaaataaagcaaaaagacagattaagaaacgagcgaacaaagcagcacctgaaatcaacaatttaattgaagaagcaacagaatttatcaagcagaacattgtgatatccagtggatttgtgggaggctttttgctcggacttgcatcttaaggacatgaatattctcccataacggattcaactatgagaagagaagtggcagcaataaggcagtctctcaaaagtcatactgccagagtctctagggcaaggagaaacaactagctggacaatactcaattcacaacttagcattttgccatctgaagcttggcaaactagtatctgctgtaaaacaacctatatggtatgtgaaccgtagtattcctgagcaaaacgtggctttcatcgctttgtaaaaat

SEQ ID NO: 20724 - DNA, 477 bp, Homo sapiens
  misc_feature (1)...(477): n = A,T,C or G
ggttgaccgcctgcggaanncgatcgaccgcgctgcaggaattcggcacgaggccagctgtcctgctacgaccaggccaagcagctggtccttagcaccgggtacctctctgacaacatcttcactcactttgtcgccagctttattgcaggtggatgtgccacgttcctgtgccagcccctggatgtgctgaagactcgcctgatgaactccaagggggagtatcagagaagacttcttggcccggcgcagtggctcatgcctgtaaccccagcactttgggagcctgaggcaggcagactgcttgagtctaggagttcaagaccagcctgggcaacatactgaaaccctgtctctaccaaaattacaaaaattaggggccaggtgcggtggctcatgcctatcatcccagcactttgggaggtcgaggcaagcagatcacctgaggtcaggagttcaagaccagcctggccaacn

SEQ ID NO: 20725 - DNA, 344 bp, Homo sapiens
ccctccgcccgccgagactggaaaaacatccccaaattgcccccgccccggggaaaaaacccaacggggtttttttttttaaaaccgggggggccccaaagggggccgggcaaaaaggggggaaaaaatttttaatcctttggaaaacctttttaaaaaggggggggccccccccaattttgccccccccccccccggggggggtttttttttttttttcccgggggcccccccggggaaaaaaaggggggggttaaagggcccccccccccttttttttttttttggcccccacccccgcccaatctttttttccccccgggggcttaagggggcaaaaggtt

SEQ ID NO: 20726 - DNA, 507 bp, Homo sapiens
  misc_feature (1)...(507): n = A,T,C or G
ggggcannnnnnnttttgatcgacncgcctgcaggaattcggcacgagcccgtttgagccctttctgttttgtagtcttggctgaattgttatttcttccacttgttggcctcagcattccccttgtggccaccaaaggcagaaacaatgctttagagatttttaggtagttatcatagctctcctgtgcagcctactctcctggctgaagaccccaggttccgctgccttgggtggttattgactggcttgggtcatgaactctaggccctacctccctgctcagggtggcactgtggtcaggtgttgggtcatgccagagcccaccctgatttggcatttggccctagccctcctcttctagccctggagctgggaccttcctcccagctcctctccctaaactgtggggtctggcttctgcggccagcctgactgggatgttccactggcacagagaaagctccagtgtctctggctcatgtatacacaattctgaccctggga

SEQ ID NO: 20727 - DNA, 350 bp, Homo sapiens
aatctactacggatggactgggagagataacgtatcagaacacagatttaagtgaaattaaggaagaagagcaggtaaagtctactgacagaaagtcagcagtggaagcccaaaacgaggtgactgaaaatccaaaacagaaaattgcagcagaaagcagtgaaaatgttgattgtccggagaatcctaatattaagttggatggaaaacttgaccaagaaggtgatgatgtacaaacagcagctgaggaggtactagctgatggagacacattacattttgaggatgacaccgttcaatcatcaggcccgagggctggtggtgaagaattagatgaaggtgttgcacat

SEQ ID NO: 20728 - DNA, 458 bp, Homo sapiens
  misc_feature (1)...(458): n = A,T,C or G
atttgccttcgctgccggaagtcggcacgagcacacgtcacacagtgtggacaacatcagtgagcaaggagatggcttggacaacagtgtagctttccccatcacaggtgacgatgatgaccctgataaggacaaaaagcgtcacaaaaagcgtggcatctttcccaaagtagccacaaatatcatgagggcgtggctgttccagcatctaacacacccttacccttctgaagaacagaaaaagcagttggcacaagacacgggactcaccatccttcaagtgaacaattggtttattaatgcccggagaagaatagtgcagcccatgatagaccagtccaaccgagcagtaagtcaaggaacaccttataatcctgatggacagcccatgggaggtttcgtaatggacggtcagcaacatatgggaattagagcaccatggctgctaagtatgccan

SEQ ID NO: 20729 - DNA, 444 bp, Homo sapiens
aatagacagctttgaagcattccgcacgagccatggccggtgagtcttttactgttccaagaacaggtccctgggaagaaagagttgcggaaagggctggctcttctggaagccataattagtatctgtggaagtttagacaaggtcctgaaggagaagagaaagctgtttatccattccatgggtgaaggtacaataaatggcttactggatgaattattacagacaagggtgctgaaccaggaagagatggagaaagttaaacgtgaaaatgctacagttatggataagacccgagctttgattgactccgttattccgaaaggggcacaggcatgccaaatttgcatcacatacatttgtgaagaagacagttacctggcagagacgctgggactctcagcagctcttcaggcagtgcaggacaacccagctatgcccaca

SEQ ID NO: 20730 - DNA, 494 bp, Homo sapiens
  misc_feature (1)...(494): n = A,T,C or G
cataggcccgctctgcaggaattcggcacgaganaaggtgttctgtgagaagaaaaatgtacaataatggaagacaggcactctctcagactgtactcaattaaggtaaaagaggaccattaatgagtctcagaactacagagagaatataaatgcatattggctgggctgaatatatagacgtcagcaggtcccaagaggccttgccattctgttgttacatctttgactgtttctgctgtcatgtaagaaaatccagctggactacctaatgaagaaactgcatgatgaaagcggctcacacaacagccatcaccgaggcaccagacaggaatccagaagtttctgccaaaacccacagggagcatggaagatagctgaggagagagtcagaggcttgcactgaagaggcagtggccaagtggcataaaggaagctgaacccaccacatcagagacacctggcccanggaggtangctgaggcacangagag

SEQ ID NO: 20731 - DNA, 481 bp, Homo sapiens
  misc_feature (1)...(481): n = A,T,C or G
tggggnnaagggggnnnntttgaattgcccggctgcaggccaagtgcaggacatcaaaaacaacctgaaagaggcgattgaaaccattgtggccgccatgagcaacctggtgccccccgtggagctggccaaccccgagaaccagttcagagtggactacatcctgagtgtgatgaacgtgcctgactttgacttccctcccgaattctatgagcatgccaaggctctgtgggaggatgaaggagtgcgtgcctgctacgaacgctccaacgagtaccagctgattgactgtgcccagtacttcctggacaagatcgacgtgatcaagcaggctgactatgtgccgagcgatcaggacctgcttcgctgccgtgtcctgacttctggaatctttgagaccaagttccaggtggacaaagtcaacttccacatgtttgacgtgggtggccagcgcgatgaacgccgcaagtggatccagtgc

SEQ ID NO: 20732 - DNA, 460 bp, Homo sapiens
  misc_feature (1)...(460): n = A,T,C or G
ctagaccgccctaggcttcacattgcctgtgatcaaacttaataactgtgttattgatgagcccagtatagataacatcactgaagatgctgacaacctcaaaagtaggtcaaggaatttgtcaatggattcccttgtggttcctttgcccaacaccagtgaatccttccagcccgtcagcacagtgctaccaaggaataattccattggggagtcgttgtcgagtcagtacaagtcatctatggctctcggacctggggctggacagctcttgtctcctggggctgccagaagacagtttgggtccaatacatccttgcatttgctctcgtcacactcaaagtccttggacttagaccggggtccctccactctaactgttcaggcagaacaacggaaacatccaagttggcctaagttggatcggaacaacagcaagggatatatgaaactagagaan

SEQ ID NO: 20733 - DNA, 468 bp, Homo sapiens
  misc_feature (1)...(468): n = A,T,C or G
cctcgaccgccctttgaccgcctgcaggaattcggcacgagcggaataacaccttggcccgccggaagggcaggcacatgggcataggtaagcggaagggtacagccaatgcccgaatgccanaggaggtcacatggatgaggagaatgaggattttgcgccggctgctcanaaaataccgtgaatctaagaagatcgatcgccacatgtatcacagcctgtacctgaaggtgaaggggaatgtgttcaaaaacaagcggattctcatggaacacatccacaagctgaaggcagacaaggcccgcacgaagctcctggctgaccaggctgaggcccgcaggtctaagaccaaggaagcacgcaagcgccgtgaagagcgcctccaggccaagaaggaggagatcatcaagactttatccaaggaggaagagaccaagaaataaaacctcccactttgtctgtacatac

SEQ ID NO: 20734 - DNA, 490 bp, Homo sapiens
  misc_feature (1)...(490): n = A,T,C or G
ggcgggggtnnttctgatctgccgcggctgcacgaattcagcacgagcttttttgatcttttcctccacctcaaaaaatacttacacacagattcttcttgtacaggcatcaaaaccaactcctctgcccctaaggctgtgtccctgaggtctccagccacccctaccccagtcactcgccccttcctcatctctggaatttggccaggcagtcccagaagactctggagtgacctcctttgcctaaaaagcagacagataggcatgccccaggccctgagtgagcanaggaggactgtagggtgagagggaaagaaaatgaaggtgactttcatggaagtttcatttcttttccccgattgtaccaactgcatgtacttttggcctggctgcaaggagcaatattggtttactctcgtatccttaaaaagttacagaactgtgtcttaagagaattatttatagttactataactgaattgacaaatgt

SEQ ID NO: 20735 - DNA, 449 bp, Homo sapiens
  misc_feature (1)...(449): n = A,T,C or G
nattgacctcgctgcacgaattcggcacgagccgcctggaacctgagagcgagtattataagctgcggctggggcgctaccatggcaatgcgggtgactcctttacatggcacaacggcaagcagttcaccaccctggacagagatcatgatgtctacacaggaaactgtgcccactaccagaagggaggctggtggtataacgcctgtgcccactccaacctcaacggggtctggtaccgcgggggccattaccggagccgctaccaggacggagtctactgggctgagttccgaggaggctcttactcactcaagaaagtggtgatgatgatccgaccgaaccccaacaccttccactaagccagctccccctcctgacctctcgtggccattgccaggagcccaccctggtcacgctggccacagcacaaagaacaactcctcacc

SEQ ID NO: 20736 - DNA, 516 bp, Homo sapiens
  misc_feature (1)...(516): n = A,T,C or G
agagtaatccaccaaacacagacccccctttcgcatcggccctnanngaannngttgcatccgcctgcangaattcggcacgagggattaagaagatactgcgaagcccctgccctttctgagattctcctgtcttctaaataatcattgacgggaagatggaagggcatgatgaactctgccatagaaaacttcctccagcctgaagagaaggatgcactggaggaagccggaccctcacgagtggagagaagtccttggtgattgtaaagagggcccctggagctcatttctgaatcgcactctccatttccagagactaaaggatgtcctttgaaatggctggactcacagagttggagtcgttttgagatgagcattagccccagctttgtaaccaatgaggaacacttacttatttttaagtatcttgacagaagcaatttgaacacagtgtcccgtcatttataaaaacagaatggtctcttctagagagcttggataaggaccttgctg

SEQ ID NO: 20737 - DNA, 447 bp, Homo sapiens
attgacctcgctgagcgattcggcacgaggaaaacttcaggttggcaatatttgaaggtttcgttgtagaagagtttaacattaactcctattttgacttacaaatcttgtttctcatcactaaaatgcttttgaattaataatccaacccacatgagctgagagtttttcttttgttagaaaagaaacagacatctttctgtatgaaagtataaattgtatggttttagatacataagaattgacaaaagcgagcgaaatctttgtacttctgagttcttgctgtatgtatgttttgttttaaatctgattagggacacccagcagctggccgggattcttggattgctccttgggagttaagattgtcaatactcctgtgaagcaagggatttcagccatagaacaaagatttattgttgccacctgaaaagtttacaagtattt

SEQ ID NO: 20738 - DNA, 506 bp, Homo sapiens
  misc_feature (1)...(506): n = A,T,C or G
aggggggnnnnnnaatcgatcggctgcagaattcgcacgagcctggccctcctgcacccccgggcacatgcccaccttgcctccgtaccagcctgcctccggcctgtgctatgtgcagaaccactttggtccaaaccccacctcctccagtgtctacccagcttctgcgggcacctccctgggcatccagccccccacgcctgtgaacagccctggcacggtgtattctggggccttgggcacaccaggggctgcaggctccaaggagtcctccagggtccccatgccctgagagaatttctagggaagtcatctcacttggccttctgaaggtcctccctaagagtctcctgacaaaagttacttattgaacacctctatgtgccaggctctgtgttgggtactttgatcaatgcccctgtttcagtctcatctgtactcacggcagccctgtggagtacggtgtactggcccagcttacagatgcagaaagggagacgttctgn

SEQ ID NO: 20739 - DNA, 484 bp, Homo sapiens
ataaaaccttgatccgcgctgcaggaatttggcacgacattaccctctagcccagtggcttaaaacaatagaaatttattatcttgttgttttggaggccaaaagtccaaaattgaggggttggcagggctgaacgtcttctggagactctaagggaaacactcttcccgtgtcttccagtttcttgtggctgccatcattccttggtttgtgactgcatctccctctcctctgtcttcacatcacttcccctctgtatatataatctacctctgcctctctcttataaggacacttgtgacgggacttagggcccatccagattacccatgataattcccttattccaagattcttaattatatctgaaaggaccttttttccaaataaggtactatcacaggttccagggagtaggatattgaatatcttttttggggagggggcaccatgcagctcactacactattcattgcacacaaat

SEQ ID NO: 20740 - DNA, 450 bp, Homo sapiens
  misc_feature (1)...(450): n = A,T,C or G
attganatcgaccccgctgcaggaattcggcacgagaaaacctcggattagcaagcaataaaaacatgacctcactcttcctcaaaggagcccctggtcttccctgtgtgactcagttctttccatctgtttgtcccgctgcaagcctctttctgcgctgactgtgacatcggaacgtggccttcctgtcaccccctccgtgccacgcactgaaggccacccccccccacctgggaaactaagaactggatattttgcctcattcacttgtactgtaacaatgtatataatttggttgggatttcactatttaatttttaagaagcctattttactagtgttttatatgaacaaagtactgcagaagttaaacctgtgttgtattttttctgagatgttttgctttaagagatactttttgctcagtttttatatgccagatacagagaa

SEQ ID NO: 20741 - DNA, 463 bp, Homo sapiens
  misc_feature (1)...(463): n = A,T,C or G
ctagaccgcctgtggaattcgcgcacgaggtttacggccgtatcaagctacagccgcagcctacagctgtttgattccccttttggccacaagaaagttttattcgaactacttgctttcctttatcaagaaaatggcaacgcacacacatacatgcacacacaaataaaaacacaaagctacgtttttcaggttttgttctagatcgtgtttgtggctgtgttcttcaggatattttccctcaccttgaggatttccctcatctacctttctttgggagatacgactgaaaccaacaaaagccaagtttggtaaataagaagtttaaacaagtgcttctctgtacagctcatccacttcctcatctgtaaaccgatcccccatggttgtcagcagctctctcaaggaatcttcctgtatggtgcctggagaataaagaacaagggatcagaatacatactan

SEQ ID NO: 20742 - DNA, 473 bp, Homo sapiens
  misc_feature (1)...(473): n = A,T,C or G
ngagcgatcgccgctgctgaattcggcacgagctttagaacccctctgggaccgctctcttctaggagtgccccagcctctcccaatcacgcgggagtgctgtctgctcactctagtggcgcccagacccctgagagcctgtcgagggaaggttcgccggcccccctggagcctgagcctggcgctgcacagcccaaactcgctgtcatccaggaagcccggtttgcccagagcgccccagggtcacctctgtccagtcagccagtcttaatcaccgtccagcggcagctaccacaggccatcaagcctgtcacctacactgtggccaccccagtgaccacctcgacctcccagccacccgtcgtgcagacggttcacgtcgtccaccagatcccagcggtgtcggtcaccagtgtggccggactggccccagcgaacacgtacactgtctctggacaagctgtggtcacccc

SEQ ID NO: 20743 - DNA, 498 bp, Homo sapiens
  misc_feature (1)...(498): n = A,T,C or G
tgggagtgccnaggnaaanaaaccatgatagcctccatgattgcactagnngaanccancacctatggtactatagaaaaattgtttttaatactctgtggagtcagtttatagtttgcaaatataagaagctttgtcaaaattgttctatataagtgctcaaacaataatttccacaattacaaaagtaaaaataatttccacagcttaacatgagatgtaattgtgcaggtctttaattagtatgaacactcatcagccttcactattctgttttctaggcctgttacatgaacagaatatggcaaaaatgagactacttacttttatgggaatggcagtagaaaataaggaaatttcttttgacacaatgcagcaagaacttcagattggagctgatgatgttgaagcatttgttattgacggtaaggcagacagaacattttcatttatttctagaatttctcatctactacatggatcatagtaagatttttt

SEQ ID NO: 20744 - DNA, 469 bp, Homo sapiens
cattgaccgccataggaagcgtcacgagcaggctcacaccctccacccccagctggagatggaaggaggatgctcaccgcccattcctcatgcaggccatcgatggaaatgtcagacagtgcgagtccacgcctgaacacttctggggtccgctctgggactgacactggcagatccatcggtgagctcccgcctgccacctctgggcctgcattgcggtgatagggccaagggcctgggccttcaattctccagacttgccaaaatgctcagcgcaggcctcgtcggcaactgcagacaagcagaggcagcacctgggctctgcctgtgcctggcacagtgaagcgagggtgggggcaggaatgagggtcctctccatgcaaggggggaagatagaagaacaaaatttcaccctaatgtagtgtctttagaccgtgcaatgttgtgctcctgttagtctgatatcagg

SEQ ID NO: 20745 - DNA, 516 bp, Homo sapiens
  misc_feature (1)...(516): n = A,T,C or G
agatgtctcnnaggtgcnncccaattgaaagccnnccagcnnaggctgcggagaancccgccgagagaatgagatccagtcatttacaacaacatgggtggaactggagatcgttatgttaagtgaaataggcacacaaagacaagcatcacatgttcttgtttgtgggatctaaaaatcaaaacaagcggacttgtcatatagagagtagaaggatggttaccagaagctgagaacttctggtggcgggaggtggggatggttaatgggtacaaaaagaaaaaagaatgaattagaccaactatttgatagcacgacagcgtgactaaagtcaataacttagttacatattttaaaataacttagagtgtaattggattgtttgtacctcaaagaaaaaatgcaataaaactttacagtggagaaacctaacaagcactacctcagccaagtaatcaaggttaacatcaacagtcacgagtcatgttgatatatacccttgataaggtgtgatgn

SEQ ID NO: 20746 - DNA, 487 bp, Homo sapiens
  misc_feature (1)...(487): n = A,T,C or G
aggcggggttnnnttatcgctgtctgcagcaatacgacacgaggganaaagtcagcgggtcaagctagcctgtggcccagccacaactagctgacaaagcttgctggccttccctttaacacagttctgctgccatagttccatctataaaatgggaatggagggaaataggggaactgggagagagaacacagccttgccaagcagcaatgttagcctgatccttcctccacctagctcgccatctcgcccttggaaaatggctcctggaggattaggcagccatctgcaaggagaggggcaacctgggacaagacacccagagggtaaggattccaggaatgaagctgccatttctggttgggaggagagaggaaactcttaagagaaagggctccattatgagcatgggttcagggccctgcattacccaatcagaacagcccggatgagcaggaggccagcttccatgagggaggggaacccc

SEQ ID NO: 20747 - DNA, 488 bp, Homo sapiens
  misc_feature (1)...(488): n = A,T,C or G
cgtggggttttaattccattgcgcggctgtacgaatccagcacgaggaaatatctagtcgggattcaaggacagaactgaagttcaaatagaaaaagaatgttgcctcaaggattaggagctgagctggctatcagagctcctagtacatggtgatcaaataaggggcagttagagataaagactggattaagcaagagaaatcaggaccaagaaagattctaggtattcacaataattaaatgaaaacaagacagaccatgcagctttaaatttcctagcatagtagttccaggattctcagtacagaaataatctctggaaattaaggcgagaagataatgccactcttaagctcctgtgctatgtagaatgtttcccagagaaataatatctgagaaatcaggcagttatctggccaggggctacatcaggttcttcagttccctcanaacaacttaatcacatacagtttgtcttaaaaggaag

SEQ ID NO: 20748 - DNA, 471 bp, Homo sapiens
  misc_feature (1)...(471): n = A,T,C or G
gggccccattgcccgtcctgangcattcggcacgagcaacagtgtatattctattaaaaagtaaattggctgggtgtggtggctcatgcatgtaatcccagcactttgggaggccgaggcaggaggatcgcttgagcccaagagtttgagaccagcctaggtgacaaagtgagaccccatctctacaaaaaaattaaaaaattatccacatgtggtggtgtttgcctgcggtcctagctacacaggaagttgaggcaggaggattgcttgagtgcaagagtttgaggctgcagagagccaagattgcaccattgcactccagcctgggtgacagagcgagaccctgtctcaaaaaataaaggaaattggctttgactatgaaaaacagccattttcaacctttttataaaacctcttcagggaatattggaatattatttntgtcaggcanagataatccagggcttgagc

SEQ ID NO: 20749 - DNA, 495 bp, Homo sapiens
  misc_feature (1)...(495): n = A,T,C or G
cattgcccgcctgcagaattcggacgagcccctgcagcccacattntaagtatattccttcaagtgagttttcctccagcccctgagagttgctgtctcccagtggaatgttcactgacgtcttttcttggtagccatcatcgaaactaatggggggacagacttgatagccaaggtcccttctggtccagttttctgatttagggttctctcaagattaataaaggaagatggggaaatttgactcattaatgagctcgctaacctacgatctggtgataattttgtgtgcacagcccaaggaccacgaggctttctgcactttctgcacccccttccaaagtgaccacaaaatttcaaagggactcatacaatttgagaaaaaacagtcaacctgatttgagaaattaaccagtatggctaactatatcacagaaaatgggattgagttaaaactattntattttaaatatacattttaaagcagntcttttt

SEQ ID NO: 20750 - DNA, 477 bp, Homo sapiens
  misc_feature (1)...(477): n = A,T,C or G
caatcgcacccccattgcaccgcatgcacgaattcgccacgagaaaatacaaaaagtagccagccgtgatgacaggcacctgtaatcccagctactcgggaggctgaggcatgagaattgcttgaacccgggaggcggaggttgcagtgagcctagatcatgccgctgcactccaacctgggcagcagagcaagactctgtctcaaaaggggaaaaaaaaaattgctgatgtgacccatgaagggaactcattttcctcgtaattttggactgccacacattggtacctttagttctctgaaggcccacgtttttatcattaagacctatttgttagctagtagagctttatgttcgctgtccatgaaaccttctgtaaccacagtgactacaagnagttctttctctattgaattattaggtccagaatagaagatgtcattgtacactttatttccctcacactgtgttatgctg

SEQ ID NO: 20751 - DNA, 473 bp, Homo sapiens
cgcggcccattgcccatcgtcccgcctgcaggaattcggcacgagcccatagaagcccactgacctccaccacagcccaaatggagggctgtgatagccagatctggttggcttttgtgggctgacccagacatttaatcaccatctcttatgttgttgccgtaagaaatgcattccaggttgggacttgggatcctgagagcacattcgccccctgtggtggccgcttgccaccttgcaagatggaagcccagtctccttactaccaaactgtagttgtaagcagagggaggggtgagatgtttataggacattccctaagctggggagtgatttttatcactattcatgtcaactgtactttggtatagactccctatcaatttaataatatgaaaagcctataataaaactatgcatgctattctatgtgctattttatatcagtaaataagcttatgctggccagttgg

SEQ ID NO: 20752 - DNA, 468 bp, Homo sapiens
  misc_feature (1)...(468): n = A,T,C or G
aggcccaaggcccgtctgcaggaattcggcacgagcaagagcccacaagacacatggataagtaggggaacatagtggggcatgctaattttatgctgggctatgactactcatgcttccttatctttgccttcctccagacccagtaaagtaccaaggcctaggtcgcctcaccttcagtggactgctcaatgccttggatggtgtggcttccaccgaggcccgcatcgtgttcatgaccaccaaccacgttgacaggtaggaaggagccaggcatcctgagacttaagcaagagcccacctcctcccctagtgccttgggaggaacaggaggtcgaggggccatctctgttgggtgctagtgtgacctgctttccctgtcttctctcaagctggaccctgccctgatacgcccggngcgagtggacctgaaagagtacgtgggctactgctcacactggcagctga

SEQ ID NO: 20753 - DNA, 470 bp, Homo sapiens
  misc_feature (1)...(470): n = A,T,C or G
ngggggccattgcccctctgcggcattcggcacgagcaaaggcttaagggtgtaacctcagaatggggccctgaatcagctgtgggcgagctcctagagtatcttaattcctgcttcatctctttccattttgcagatgggccaactgcggctcacaaagatacagaacttctccggagcgaaaaagctgctaagaatgtatcccaaactccgcacgaagtctggaacgttttttcttacagttccacaattgcgactgaagtgtacccagagacacaaagaaatacagaagtccagaatgatcaaatgagatcactacccaatgaaatgatatgccgaggagccagaaaatgtgctactacctgctttccaggtccagattccacgagagccttctgggctcccaccacagaccctcagtgaagactctgttgaagactttaagaccatgctaganagcctcccggcag

SEQ ID NO: 20754 - DNA, 410 bp, Homo sapiens
  misc_feature (1)...(410): n = A,T,C or G
naaagaccatcgatccccgctgcacgaattcggtacgagcttctggaagcccataggaccggaccaggggcgtggtggggagccgtagacccgagtttttatccttctctggcgccgacactcggctgcggaatcgagtttgagctcggtgtagctgaagtttaaattgtagctgtttcaaagatgccttgggagtctgaggaaccccagattcagcacccctgcttaacctgcttttaagaagaaaaaaatggaacttgataaacttcactcaaaggagagacccactaataactccacacacctcacaccgagtgaaggtctggctgtccctctgtcttcatcttttcaggctgctgtaataaaatgctataagtgggtgacttaaaaaaaaaaaaaaaaaaactctg

SEQ ID NO: 20755 - DNA, 487 bp, Homo sapiens
  misc_feature (1)...(487): n = A,T,C or G
ntttggaccgccctgcaggaatcccgcccgcgcgctgcaggaattcggcacgagtggctcctgtggaggcctgctgggaacgggacttctaaaaggaactatgtctggaaggctgtggtccaaggccatttttgctggctataagcggggtctccggaaccaaagggagcacacagctcttcttaaaattgaaggtgtttacgcccgagatgaaacagaattctatttgggcaagagatgcgcttatgtatataaagcaaagaacaacacagtcactcctggcggcaaaccaaacaaaaccagagtcatctggggaaaagtaactcgggcccatggaaacagtggcatggttcgtgccaaattccgaagcaatcttcctgctaaggccattggacacagaatccgagtgatgctgtacccctcaaggatttaaactaacgaaaaatcaataaataaatgtggatttgtgctcttgtatttttaagtg

SEQ ID NO: 20756 - DNA, 514 bp, Homo sapiens
  misc_feature (1)...(514): n = A,T,C or G
cggcccccccattggcaccgccccgnannaatttgccccgcgctgcaggaattcggcacgagtcctcttctcagacccgggagcgtccgggacgcggagcccggagctggggcgacgaggcgattgcgggggcctgggctagagatggagtctcactatggtgcctactctgattttgaactcctggcttcaagcaatcctcccaccttggccttccaaagtgctgggattacagaatctccctggaaaaggagacatgaatgtctgcaatgatacttcctgacaagaagttgatacaagaaaaggaaaggagattaacagctagtgagcagaatttcgaacagcaggatttcgtattttttgcttccaactgcacacttccgttgcccacttttaaatcagagatacctacactcaaaacccagacaaggcaaaaggatacttttcttgtatattttttgagatcgaagaaacgacaatgtccaggaaacagaaccagaaggattcatcagga

SEQ ID NO: 20757 - DNA, 520 bp, Homo sapiens
  misc_feature (1)...(520): n = A,T,C or G
agcggtgtnnaaatgacgctgtggaanatgcacgagcaatcctccgctcctccttcctgcaccctggggctcctgaaactcacatgggtaaaaaagatacagtaaagacataaataccacatttgacaaatggaaaaaaaggagtgtccagaaaagagtagcagcagtgaggaagagctgccgagacgggtatacagggagctaccctgtgtttctgagaccctttgtgacatctcacattttttccaagaagatgatgagacagaggcagagccattattgatccgtgctgttcctgagtgtcaactatctgggggggacattcccaggcacctaattacaacaagcatgcacattttggtgcattcaagaatggaaaatcagaatagcagcattgattcttctggtgcagctcagtggaagatgatgacaaccagaagacatgagctaagggtaagggactgttctgaagaacctttccatttagtgatcaagatatggaagctgatttctgaaaatg

SEQ ID NO: 20758 - DNA, 499 bp, Homo sapiens
  misc_feature (1)...(499): n = A,T,C or G
agagttccnaggaggcccaatgaaaccncctgcgtagctagcgggaanncgcacgagattttgagaagaagttggagagaatcccaagtggatgaactgaatatctggatgaggacaagatctgtggggagagactgtaagatagaatgagtgcatttaagtcccaggacggtggaaactagctagtagattgcagccatgttgtggaagctgctgctgagatcccagtcctgcaggctgtgttctttcagaaagatgcgatcacctccaaaatacagacctttcttagcatgcttcacctatacaactgataaacagtcgagcaaagaaaatacaagaacagtggaaaagctctataaatgttcagttgacattaggaaaattcgtagattaaaaggatgggtacttttagaggatgaaacctatgttgaagaaattgcgaatattttacaagaactaggtgccgatgagactgctgtagccagtattttggaacgcn

SEQ ID NO: 20759 - DNA, 482 bp, Homo sapiens
  misc_feature (1)...(482): n = A,T,C or G
attgacccgcctgcagcgaaattgaagacccttagaacaaccgacctacaagtgaccttagtacaagtttctttcccaggagctagttgcatatcaatacttctggggatgtgtatgtttgtgagtatgtacaaaggaagagttttactctttaagagacatataatgacttaagatactcaatgtgggacgacatattgagaagttaatatttttattaaatgtgtgtgagttttggtcgactttctaaaaggtgatcatttaataaaaccttgaataggagttggtataaataaggaagggaatagactgacaagtcagcccataagcacagacactttatnnnccaaatgaatgtctgtggttatccactcacaacttagactttgaaatccctgctttctgactgcctcccaggtttctctgctattttgcanatgagccctcactatctcaggtcagcctctcacctactttatctt

SEQ ID NO: 20760 - DNA, 488 bp, Homo sapiens
  misc_feature (1)...(488): n = A,T,C or G
agatctgcncnccattgatcgcctgaggtattcgccacgagcaaagagtgcctggagagggctctagctaaaaatgagcaagttaaaggcaagatcgacaccatgaagaaatttaaaagcctgttgattcaagaactttctaaagtatttccggaagacatggctaagtatcgaagcatccggggggaggatcacccgccttcttaaccagctcaccctccctgtgtgaagatcccccgggactgcgatgcggcgtgaggctgggactgcgagtgctgacgccaccttcctgctgaggtgggactgggccctggacacacccctcagcccctctgtcctcattgtttggcctcatgggaccgaggggctggaggagaggcggagctgtgccccagctgttccagcagcttgtctggcgtcaactggctttcagagtgctgacccctcatcactgtggggatcattctctctgagggcagatgaggcgn

SEQ ID NO: 20761 - DNA, 497 bp, Homo sapiens
  misc_feature (1)...(497): n = A,T,C or G
gcagttccnaggtttgccccccaggtgctaattgantatcgtacgagaanngctaaaancagcaatcattcccttgctgctaaaaacctcctgagtagctttttgtcactgtaaaagttaagctttcatatagaatctcctttatagtccaattcctgcctcaattttttctcatcatttccctttctgtgtcctcccccttgaactttatgctatagcaatgtcaaattacatatgttgctgctactcacctttgcatatgctagtacctctgtaggcaccaccttttcctcccctccttccttagtcagcatggtacattcctgttcaattttcagaaccctacttaggtgccatctctctaaagagaaacctgtgaaccatcacctccctcacctcaggaaagcaccagntcatttgctagtctaaactactactgctcctggcaggcacggtgggtcatgcctgtaatcccagcactttgggaagctgacgcn

SEQ ID NO: 20762 - DNA, 499 bp, Homo sapiens
  misc_feature (1)...(499): n = A,T,C or G
ggagtgcccaggaggccncaatgaaaccncctgcntgcttcggaaanncgccgagggcaggtggatcacctgaggtcaggagttcgagaccagcctggccaacatggtgaaaccccgtctctactaaaaatacaaaaattagccgggcatggtggcaggcacctgtcattccagctagttgggaggctggggcaggagaatcgcttgaacccgggaggcggaggttgcagtgagccaaaatggcaccactgcattccagaaaaaaaaaaaagctatgagctctatatactgcacattgcagtacatccaggtcctaggcttttattcagtaaattacagaaaatattaaagatataaagcagaaagtaaggcaatattaggccttagtcaatctcagatagcttcaccaattcagctccttaaaaggttgcttatgaagtgtgaattgtagtggtagctactgtttcatggtggtaaatattcgttttgactttatgtn

SEQ ID NO: 20763 - DNA, 465 bp, Homo sapiens
  misc_feature (1)...(465): n = A,T,C or G
natggatgcgtccgaatncgacgagacaaatcctttccatacccagcttgcttccatgaccaatctaagggcagagaagaataaagtggagaaaccatctccttctaccacaaatgcacatatgaaccaatccagtaactacttaaaacagagtaagactttattcacaaatccaatctttccagttggatttagtacaggacacaatgcccccagaaaagtaacagccgtcatttatgctagaaaaggaagtgtcctccagagcatagagaaaataagttcctctgttgatgcaacaactgttacttcacaacagtgtgttttcagagaccaagaaccaaagatccataatgagatggcatcaacatcagataaaggtgcccaaggaagaaatgacaagaaagattctcaaggaagaagtaataaggcattacatctgaagagtgatgctgaatttaaaaagaa

SEQ ID NO: 20764 - DNA, 496 bp, Homo sapiens
  misc_feature (1)...(496): n = A,T,C or G
agacggccgggggnannttttnaccttgacggatcgtagaacctgcacgaggttctgggtgagttttaaaacatttaatatacctatgatttgttttacaacttgaagaaaaggcaggcagtcttgtgtctaatgagcttaatgcaaattctaattatactgcaaataatttaaagttttgattgcattctacaattgtctgtttggaaaattacatattatgaagtcattatatattttatcaaatcagaaaaagtcagctcaggaactgtagcagcagggagttctaaagatgacatgaactatactataggggtgccctactctatatggcctagggctttggtttgggtcagtcttgttctttcagatacataacaccagcagtactttcgggctcacttcaagaaccagataactctcccaaaccatgatacatgaagtgtataatcaagatttttaattaagctttagaattctttatttgtgtagagtg

SEQ ID NO: 20765 - DNA, 494 bp, Homo sapiens
cccccccccgccccccccccatcgaccgccctgaggaaattggcacgcgctgaaccaccccagcttgaccaccctgagtcttgcgtccaacggcatctccacagaaggaggaaagagccttgcgagggccctgcagcagaacacgtctctagaaatactgtggctgacccaaaatgaactcaacgatgaagtggcacagagtttggcagaaatgttgaaagtcaaccagacgttaaagcatttatggcttatccagaatcagatcacagctaaggggactgcccagctggcagatgcgttacagagcaacactggcataacagagatttgcctaaatggaaacctgataaaaccagaggaggccaaagtctatgaagatgataagcggattatctgtttctgagaggatgctttcctgttcatggggtttttgccctggagcctcagcagcaaatgccactctgggcagtcttttgtgtcagtgtcttagaggg

SEQ ID NO: 20766 - DNA, 477 bp, Homo sapiens
  misc_feature (1)...(477): n = A,T,C or G
cttcgccattctgctcgcgctgcaggaattcggcacgagcctgcattgtctaggcctgcagttcccaggcttgggttcactttcaccatgcattggcaaaactagaaaagtaagcttgtgacaaattgttctcggccgggcacagtggcgcacgcctataatccctgtactttgggaggctgaggtgggtggatcacttgaggccaggagttcgagaccagcctggccaacatggtgaaaccccatctctactcaaaatacaaaaattagccaggcgtggtgatgcgcacctgcagtcccagctactcgggaggctgaggcaggaaaatggcttgaacctgggaggcagaggttgcagtgagccgagactgcaccactgcactccagcctgggtgacagagcaagactctgtctcanaaaaaaaaaaaaaaaaaaaactggggggggggccgggacccaatttccccttaaagagan

SEQ ID NO: 20767 - DNA, 507 bp, Homo sapiens
  misc_feature (1)...(507): n = A,T,C or G
gannactgganagggaaaaanaaatttgatcgccctagtagatccgcctgcaggaattcggcacgagacgggctgggcttcgcttctgctgtcccctgcgatccaactccccaatggcagcggccgccagccccgcgttccttctacgcctcccgcttctgctcctgctgtccagctggtgcaggaccgggctggccgaccctcactctctttgctatgacatcaccgtcatccctaagttcagacctggaccacggtggtgtgcggttcaaggccaggtggatgaaaagacttttcttcactatgactgtggcagcaagagagtcacacccgtcagtcccctggggaagaaactaaatgtcacaacggcctggaaagcacagaacccagtactgagagaggtggtggacatacttacagagcaactgcttgacattcagctggagaattacatacccaaggaacccctcaccctgcaggccaggatgtcttgtgagcagatagccg

SEQ ID NO: 20768 - DNA, 509 bp, Homo sapiens
  misc_feature (1)...(509): n = A,T,C or G
tggagtcncnagggtnnnnnaaatgacnccctgatcagcttcggatggngtcggnggntagtttctgcgacttgtgttgggactgctgataggaagatgtcttcaggaaatgctaaaattgggcaccctgcccccaacttcaaagccacagctgttatgccagatggtcagtttaaagatatcagcctgtctgactacaaaggaaaatatgttgcgttcttcttttaccctcttgacttcacctttgtgtgccccacggagatcattgctttcagtgatagggcagaagaatttaagaaactcaactgccaagtgattggtgcttctgtggattctcacttctgtcatctagcatgggtcaatacacctaagaaacaaggaggactgggacccatgaacattcctttgtatcagacccgaagcgcaccattgctcaagattatggngtcttaaaggctgatgaaggcatctcgttcaggggcctttntatcattgatgataacggtatt

SEQ ID NO: 20769 - DNA, 492 bp, Homo sapiens
  misc_feature (1)...(492): n = A,T,C or G
tggggnnnnnggcggggnnnaattgattgccttcggcgtgaacatccagtttcctgataaggacgatgggaaccagccccaggaccaaattaccatcacagggtacgaaaagaacacagaagctgccagggatgctatactgagaattgtgggtgaacttgagcagatggtttctgaggacgtcccgctggaccaccgcgttcacgcccgcatcattggtgcccgcggcaaagccattcgcaaaatcatggacgaattcaaggtggacattcgcttcccacagagcggagccccagaccccaactgcgtcactgtgacggggctcccagagaatgtggaggaagcccatcgaccacatcctcaatctggaggaggaatacctatctgacgtggtggacagtgaggcgctgcacgtatacatgaaacccccagcacacgaagaggccaaggcaccttccagaggctttgtggtgcgggacgcaccctggaccg

SEQ ID NO: 20770 - DNA, 486 bp, Homo sapiens
  misc_feature (1)...(486): n = A,T,C or G
aggacacacncaaattgaccgccctgaaattgctccgcgctgcaggaattcggcacgagcagccatttagaattcaccttccaggcgttcccttggtgacttccaaacagacggatcctaaaaatcacctggagccttgacaatcacacagactcctgcggggcagagctcatctctcaaacaaagggaacagaaaataaatacatgctaattcctggaggccacaggcttcacacatttattttcttactgtgaagtctctcctgagaggcctgctctaagtccctctctttattcaccttcctcctgagggccttggtgtgctctctctctcccagcttagagcttctgccctgcaactttccactattccaggaccaaatgtccatgctcatttcaggatgggatggcagagacctcaatggcctcattcacagacacctctgctgtccacataaccgacgttgtgaatttttgtacaaatcc

SEQ ID NO: 20771 - DNA, 495 bp, Homo sapiens
  misc_feature (1)...(495): n = A,T,C or G
ggagtgcccaggttcccccaatgatcgccgctgagancgtacgaggcccgggggggtcgctgatgaggttcctcatcaagggaagtgtggctgggggcgccgtctacctggtgtacgaccaggagctgctggggcccagcgacaagagccaggcagccctacagaaggctggggaggtggtcccccccgccatgtaccagttcagccagtacgtgtgtcagcagacaggcctgcagataccccagctcccagcccctccaaagatttactttcccatccgtgactcctggaatgcagggatctaaaagggaaaggaggccgagcacagtggctcacgcctgtaatcccagcactttgggaggctgaggtgggcggatcatctgaagtcaggagttcgagaccagcctgggcaacatggtgaaaccccatctctactaaaaatacaaaaattaaccgtgcgtggtggtgcacacctgtaatcccagctgctgcttg

SEQ ID NO: 20772 - DNA, 529 bp, Homo sapiens
  misc_feature (1)...(529): n = A,T,C or G
cgccccccccccccgccccccccccccattcggccncgccattcaggaccgcnctgcaggagttctgcacgagagcgacagcagcgacagcgaggatggcagtgaggacaccgtgtccgatctctccgtgcggagacaccgccgcttcgagaggactttgaacaagaatgtgttcacctctgcggaggagctggagcgcgcccagcggctggaggagcgcgagcgcatcatcaaggagatctggatgaatggccagcctgaggtgcccgggaccaggagcctgaatcgctactattagggagcagcaggaccccggaaaccactggaggccgcctggaaaggagagcgtctgcagggacagtgggcacaaggaactgaacccagctctgctaatattgtgatttcagagaaaaagcaggacatgccccttttctagccaggaggattgctcctttttggccaaatgtatggagaagtagaaaaatcaaagcaggtcatcaccctttccaggtctcggaatggtgctgaa

SEQ ID NO: 20773 - DNA, 511 bp, Homo sapiens
  misc_feature (1)...(511): n = A,T,C or G
agagcggnnnnnannttttgatggcttcggaannnccacannnattgaccgcctgtcagattcggcacgagcagagcctggggccagccagtacagtcctgagccgatgaggagggactgcaagtggaagagagccagtctggaaggaagagctttccaggtggacagggcttcttggaagacccccaaagccccaggtatcctgggtgaagcctgtttgcctctcttgaaaatggcaggtgctcttgttttacccatgttgggtcagcctgaaactgccaaccagtaggaagcatggactctcctgagtgagaagagactgaaataggagcaagcagaaccctgagaggtgtcccatcttattgctgttgaggaccctgaaacaccgttgtttaaagacttcacacagaaggctctgaactgagccactggggaagggaagtttcagtaacatgacactaaaatggcagagacgttaaannaaaaaaaaaaaaaaaaaaaaaaaaaataa

SEQ ID NO: 20774 - DNA, 504 bp, Homo sapiens
  misc_feature (1)...(504): n = A,T,C or G
agagggtnnnnnnnttgcgatgcccgtatgaattcggcacgagcagttgcatgccctatcttctttgatgaactggactctttggccccaagccgggggcgaagtggagattctggaggagtgatggacagggtggtgtctcagctccttgtcgagctagatgggctgcacagcactcaagatgtgtttgtgattggagccaccaacagaccagatctcctggaccctgcccttctgcggcctggcagatttgacaagctggtgtttgtgggggcaaatgaggaccgggcctcccagctacgcgttctaagtgccatcacacgcaaattcaagctagagccatctgtgagcctggtaaacgtgctagattgctgccctccccagctgacgggcgcggacctctactctctctgctctgatgctatgacagctgccctcaaacgcaaggttcatgacctggaggaagggctggaacaaggtagctcagcactgatgctcaccatg

SEQ ID NO: 20775 - DNA, 491 bp, Homo sapiens
  misc_feature (1)...(491): n = A,T,C or G
ctcgcccgccctggggannatagacctcgctgcaggaattcggcacgaggcgagccagagtggtggctggtcccgcgcgaaaattctgagctgtacacctctaggaaatgaaacactagttcagaagaagcctgtaaactctcttacaaatacatttggttattcaccatgaggttagcaaagcctaaagcgggtatttctcggagctcaagccaaggaaaggcctatgagaacaagcgcaaaacaggccggcagcggcagaagtggggcatgactattcgatttgactcaagcttcagtagactcagaagaagcttggatgacaaaccctataaatgtactgaatgtgaaaagagtttcagtcagagttcaactctttttcaacaccagaagatccatactggaaagaaatcccataaatgtgctgattgtgggaaaagtttctttcagagttctaatctcattcagcatcgacggatccatacggggga

SEQ ID NO: 20776 - DNA, 446 bp, Homo sapiens
gattgacccgcgctgcaggaattcgtcgcgagacggcctacatcaaggactgtgtatcccccagcgagcacactgcagcctgctcccggctcctggtacaatacacagctgtcttcacgcaggtccagggctcataaatcagctctattgacgaattctgccgcaagttccgcctggactgcccgctggccatggagcggatcaaggaggaccggcccatcaccatcaacgacgacaagggcaacctcaaccgctgcatcgcatacgtggactcgctcttcatcacggtcatggacaagctgcgcctggagatccgcgccatggatgagatccagcccgacctgcgagagctgatggagaccatgcaccgcatgagccacctcccacccgactttgaaggccgccagacagtcagccagtggctgcagaccctgagcggcatgtct

SEQ ID NO: 20777 - DNA, 486 bp, Homo sapiens
  misc_feature (1)...(486): n = A,T,C or G
attttgaccgccnttttttgacccgccctgcagaattcggcacgagctttcctccgcctcagtttggggcgggtcgggggaatggctgaggagatggagtcgtcgctcgaggcaagcttttcgtccagcggggcagtgtcaggggcctcagggtttttgcctcctgcccgctcccgcatcttcaagataatcgtgatcggcgactccaatgtgggcaagacatgcctgacctaccgcttctgcgctggccgcttccccgaccgcaccgaggccacgataggggtggatttccgagaacgagcggtggagattgatggggagcgcatcaagatccagctatgggacacagcaggacaagaacgattcagaaagagcatggttcagcactactacagaaatgtacatgctgttgtcttcgtgtatgatatgaccaacatggctagttttcatagcctaccatcttggatagaagaatgcaaacaacat

SEQ ID NO: 20778 - DNA, 497 bp, Homo sapiens
agacggccgggaagatttaaaaattggacggttgtacgaactctgcacgaggcctcctggagcagattgttaagctgatgcgagtctgggctctgcctcaccacttgtctcagagaatgtccagtgctaggagactcataagttggagagaaacggcctgatttatagaaactgagcgagactccggaccacctgatgcagagaaacctgtgacctgaaaaagtctatttgtgtttcctctaggaatctcggccaagaagacagggacaagctcccaactctgactaccccttttacagggaaaaaaaaaaaatcccgtgccttctttgcagcaagtgacaaatccttgtcatatcgagatggcttttcctcctcctcttcaaacatcttttagcagcaacagcagctcaagtaactggaattatttcagagttaaaatgcaggctttgtagaccctcttagacagacagattcaatttcaaaggaaacttctttgg

SEQ ID NO: 20779 - DNA, 491 bp, Homo sapiens
  misc_feature (1)...(491): n = A,T,C or G
cgacgangccgngagattganccatcgacggccgtacgctttggtgaaatttcaggaaccatagccattgaaatggatgagggaacctatatacatgcactcgataatggtctttttaccctgggagctccacacaaagaagttgatgagggccctagtcctccagagcagttttcggctgtcaaattatctgattccagaatcaccctgaaatctggctatggaaaatatcttggtataaattcagatgaacttgttgttgggcgttcagatgcaattggaccaagagaacaatgggaaccagtctttaaaattgggaaaatggctttgtcgacctcaaatagctgctttattagatacagtgaagcagaggacatagaagcaaaaagtaaaacagcaggagaagaagaaatgatcaaggctctcctaatctctgtcagaccttcacctttatgaccttgccttatctaccagaacacagatccctctta

SEQ ID NO: 20780 - DNA, 491 bp, Homo sapiens
  misc_feature (1)...(491): n = A,T,C or G
gacgccgggngattttaaattgatgattgacgaacgtgcgcgagcaacgcggngcgcaccaacttcactaccaagcagctcacggaactggagaaggagttccacttcaacaagtacctgacgcgcgcccgcagggtggagatcgctgcatccctgcagctcaacgagacccaagtgaagatctggttccagaaccgccgaatgaagcaaaagaaacgtgagaaggagggtctcttgcccatctctccggccaccccgccaggaaacgacgagaaggccgaggaatcctcagagaagtccagctcttcgccctgcgttccttccccggggtcttctacctcagacactctgactacctcccactgaggcggctccagccccagacaacagcccaggcatctccttgggctgggacttcttacccaaagcacatgcttagcttatctttctttccatttacagnctctttcttcctttctaatcctatctgg

SEQ ID NO: 20781 - DNA, 475 bp, Homo sapiens
  misc_feature (1)...(475): n = A,T,C or G
ngtggggnnnnnaattgacatcgatgcacgaattcggcacgagaaagtgtttagctgtcaagccggatgcctaagtagaccaaatcttgttattgaagtgttctgagctgtatcttgatgtttagaaaagtattcgttacatcttgtaggatctactttttgaacttttcattccctgtagttgacaattctgcatgtactagtcctctagaaataggttaaactgaagcaacttgatggaaggatctctccacagggcttgttttccaaagaaaagtattgtttggaggagcaaagttaaaagcctacctaagcatatcgtaaagctgttcaaaaataactcagacccagtcttgtggatggaaatgtagtgctcgagtcacattctgcttaaagttgtaacaaatacagatgagttaaaaaaaaaaaaaaaaaaaaaaaaaacctcgggggggggcccgcgcccaattccgcc

SEQ ID NO: 20782 - DNA, 472 bp, Homo sapiens
cattgcccgcctgcatttgctccgcctgcaggaattcggcacgagcagcagtttacacctgctagggtgttcaaaggtcagtgctatacaaattcagtatctggcatcgttggttttcttggctttgtgcttgttaaacctggtatttctactgatacagtatttgtgtacgtttctcagagtgctcagtttgatatactctaaaatagtaagcaatgcttttttttccagggtgtcaaattgagaaccatgtagatccccaccacctacagtaaaaaggaccctacagtaaattggttgaagaaattagatcccaaagattcttggtgaattttgaagtcttcatcagtatatccatattaaaacgagatgacagaagccaaagtaattatgggctgacaggacaactggatcagtttcattaaaaagggcacacttgaagataaatcttttgactccagctctttagagg

SEQ ID NO: 20783 - DNA, 474 bp, Homo sapiens
  misc_feature (1)...(474): n = A,T,C or G
cgcgccccatttgccatctgtcccgcgctgcaggaattcggcacgagctggcctcatcaccaaggtgacagaggacacaggggagggggaaaacccacacacactccttggaatgggtcctgttatttatgcttgctgcacagacatattagaagaaaaaaaaaagctttgtattattcttccacatatgctggctgctgtttacacaccctgccaatgccttagcactggagagctttttgcaatatgctggggaaaggggagggagggaatgaaagtgccaaagaaaacatgtttttaagaactcgggttttatacaatagaatgttttctagcagatgcctcttgttttaatatattaaaattttgcaaagccctttgaaaaaaaaaaaaagcaaaaaaataaagaaaaaaanacctttgggggggggcgcgggccccaattccccttaagggggggggaaaaaaattgcg

SEQ ID NO: 20784 - DNA, 504 bp, Homo sapiens
  misc_feature (1)...(504): n = A,T,C or G
aggatgagcaganncnnnnnnnaatagatttttcgtccgcctgcaggaattcggcacgagcggacattcagactgagcgtgcctaccaaaagcagccgaccatctttcaaaacaagaagagggtcctgctgggagaaactggcaaggagaagctcccgcggtactacaagaacatcggtctgggcttcaagacacccaaggaggctattgagggcacctacattgacaagaaatgccccttcactggtaatgtgtccattcgagggcggatcctctctggcgtggtgaccaagatgaagatgcagaggaccattgtcatccgccgagactatctgcactacatccgcaagtacaaccgcttcgagaagcgccacaagaacatgtctgtacacctgtccccctgcttcagggacgtccagatcggtgacatcgtcacagtgggcgagtgccggcctctgagcaagacagtgcgcttcaacgtgctcaaggtcaccaaggctgccg

SEQ ID NO: 20785 - DNA, 471 bp, Homo sapiens
cattgcactgcatcgcctgcagaatccgcacgaaggcgcatgcatgctcccgggaagggcctgtcccactcggctttaccctatctacgcagcgtccccactcggttgaatgtgacatctgacgacgcgaaggaactgattacaaactggccaagaagggccttactccttcacagatcggtgtaatcctgagagattcacatggtgttgcacaagtacgttttgtgacaggcaataaaattttaagaattcttaagtctaagggacttgctcctgatcttcctgaagatctctaccatttaattaagaaagcagttgctgttcgaaagcatcttgagaggaacagaaaggataaggatgctaaattccgtctgattctaatagagagccggattcaccgtttggctcgatattataagaccaagcgagtcctccctcccaattggaaatatgaatcatctacagcctctg

SEQ ID NO: 20786 - DNA, 492 bp, Homo sapiens
  misc_feature (1)...(492): n = A,T,C or G
agcgccggggangtgnnaattganaattgacggctgtcgctggngtcnccgnatctctggtgaatccccagccatccaatggccacttctcaaccaaaattgaaatcacgcaaggagataactgtgattccataatcaggcgtttaatgaaaatgaatcgaggaattaaagacctttccaaagtgaaactgatgagatttgatgatccactgttggggcctcgacgagttcctgtcctgggaaaggagtacaccgagaagacccccatttctgagcatgctgttttcaatgtggacctcatgagcaagaaaattcatctgactgagaatgggataagggtggatattggcgatacaataatctatctggttcattaaactcatgcacattggagatttatcctggcttcttaggaatactactactctgattgtgtctactgattgtgtatcagaaccttaggctggacctaaatagattgatttcatttct

SEQ ID NO: 20787 - DNA, 484 bp, Homo sapiens
  misc_feature (1)...(484): n = A,T,C or G
naattgatgncgccctgcggaattccgcattagcgttatcccatttctccccgcgagtaacctgttcttccgagtgggcttcgtggtcgcagagcgtgtcctctacctccccagcgttgggtactgtgtgctgctgacttttggattcggagccctgagcaaacataccaagaaaaagaaactcattgccgctgtcgtgctgggaatcttattcatcaacacgctgagatgtgtgctgcgcagcggcgagtggcggagtgaggaacagcttttcagaagtgctctgtctgtgtgtcccctcaatgctaaggttcactacaacattggcaaaaacctggctgataaaggcaaccagacagctgccatcagatactaccgggaagctgtaagattaaatcccaagtatgttcatgccatgaataatcttggaaatatcttaaaagaaaggaatgagctacaggaagctgaggagctgctgtctttt

SEQ ID NO: 20788 - DNA, 498 bp, Homo sapiens
  misc_feature (1)...(498): n = A,T,C or G
ggagggccngnnnnatgganncgtctgcagcggctgtaagaattcggcacgaggaagactgcagtttcaacatgacagctaaaacctttttcatcattcacggatggacgatgagcggtatctttgaaaactggctgcacaaactcgtgtcagccctgcacacaagagagaaagacgccaatgtagttgtggttgactggctccccctggcccaccagctttacacggatgcggtcaataataccagggtggtgggacacagcattgccaggatgctcgactggctgcaggagaaggacgatttttctctcgggaatgtccacttgatcggctacagcctcggagcgcacgtggccgggtatgcaggcaacttcgtgaaaggaacggtgggccgaatcacaggtttggatcctgccgggcccatgtttgaaggggccgacatccacaagaggctctctccggacgatgcagaatttgtgtgtgtcctccacacctacc

SEQ ID NO: 20789 - DNA, 471 bp, Homo sapiens
  misc_feature (1)...(471): n = A,T,C or G
nattcgcccgcgctgcatgaattcggcacgagccgaagagagcaggatgagactccagcccttccccgcgcacatcgggaggagtgcacttgtgacctcctcttcatctctgccttccttcccctccacactttcctggtcgagggacgaaagcgcccgaagggcatccaggctggagaagcagaacagcacacctgagagtgactacgacaacactcccaacgacatggagccagatggcatggggtcaagccgaaagggacggcaaagaagtatggtgtggccaggggatggcttggtaccagacacagcagaaccccatgtggccccaagccccactctccctagcaccgaagatgtcatcaggaagactgaacagatcaccaaaaacatacaggagctcttaagagcagcccaagaaaataaacatgacagttatattccctgctcagagaggatacacgtagctgt

SEQ ID NO: 20790 - DNA, 493 bp, Homo sapiens
  misc_feature (1)...(493): n = A,T,C or G
ggcggccggggnnttttnatattgatgcatcgagaacctgcacgagacacactgtaccctgctcccagcatcacaaggcacttgtctacaagtgtgtcccaacacagtcctgggccactttccccaccctggggagcacataaagaagcttgccaaggggggcgtccttgctccccagttgtcctgtttctgtaacttatgatgtcttttccctgagatgggggctcagagggggaaggcctgtggcctgcatgcttcccgatggcccacggcaggaggtgtgtggaagtgtaaggcctaagatgctcacagaggtccctcatgacctcccttccccaactcccgaatcctctcttgagtgtggacctcaacaccttgagccctagtaaaggaactatgcaaatgcaggccactctccccaccacgtctgtgccccgcactgtccccacagccttccacaccctgtgcataggcagccctctcacgtcttgag

SEQ ID NO: 20791 - DNA, 492 bp, Homo sapiens
  misc_feature (1)...(492): n = A,T,C or G
aggggccnnnnnntttagccggtagtcagattctgcacgagcagactgccagacgactacatcattctgcccacagacctgcgctgccacagccatcgccatccatcgcatcccaccgacagactgctgctcctagtgatctggactcacctcggaggtatctgggctggccacagtccctggacagtgatccagacagctggccgccccccaagggatctgtcaccttcagcgagacctatttcctccccacccccagaaacctcttgtgttcttgcctatgcccaggtgttcctggcagccaaatcgagtctctcattttctcttgtggaccagttagttttgcccataacgcagtattctgagtttgcaactgtctctctgatgtgtgccttttgttcaacacagtaacccctgcattctgctctgctctaatacactacctaggaaaagtcttttccttattttcaataaatgtcagacattattgaa

SEQ ID NO: 20792 - DNA, 499 bp, Homo sapiens
  misc_feature (1)...(499): n = A,T,C or G
gaggggccnnnnnnttttgannngattcgcaccggctgcaggaattcggcacgagcagccacgcgtgtcagccctccagttctccttcagttgacgccagcctctccacaggcccactgctgtgccattctggaagctccagctgctgctgggctgcctggcactgcccgcttgccggtcagggcctgccgagctgcctgccccttccagctgggcagagtcccctgcaaggaggcagggcccagcttccacatccggagccctggtcagcatagccgcccacggtctgttctcagattcctaatcattccagaagtattaaacgtcattgctgcggaaaaaaaaaaaaaaaaaaaaaaaaaaaaccccggggggggggcccggcccccaatccccccttaaggggggggaaaaaaaattccgggggcggggttttaaaacgggggggggggggggaaaacgnnnnnnnnnnnngggnnnnnnngngnnnnnnntnngn

SEQ ID NO: 20793 - DNA, 493 bp, Homo sapiens
  misc_feature (1)...(493): n = A,T,C or G
nattgcancgcctgcaggaattcggcaatagcaccgcctgcacgaattccgcacgaggttcctaggaagccagacccggagccgtggcctgccgggccggcgacatggatcccctgttccagcaaacgcacaagcaggtccacgagatccagtcttgcatgggacgcctggagacggcagacaagcagtctgtgcacatagtagaaaacgaaatccaagcaagcatagaccagatattcagccgtctagaacgtctggagattttgtccagcaaggagccccctaacaaaaggcaaaatgccaaacttcgggttgaccagttaaagtatgatgtccagcacctgcagactgcgctcagaaacttccagcatcggcgccatgcaagggagcagcaggagagacagcgagaagagcttctgtctcgaaccttcaccactaacgactctgacaccaccataccaatggacgaatcactgcagtttaactcctccct

SEQ ID NO: 20794 - DNA, 454 bp, Homo sapiens
  misc_feature (1)...(454): n = A,T,C or G
aattgccccgctctgacgaattcggcacgagcctttgagcatacaccgagagagtgaggagccagacgacaagcacacactatggcgctgaaacggattaataaggaacttagtgatttggcccgtgaccctccagcacaatgttctgcaggtccagttggggatgatatgtttcattggcaagccacaattatgggacctaatgacagcccatatcaaggcggtgtattctttttgacaattcattttcctacagactaccccttcaaaccacctaaggttgcatttacaacaagaatttatcatccaaatattaacagtaatggcagcatttgtctcgatattctaagatcacagtggtcgcctgctttaacaatttctaaagttcttttatccatttgttcactgctatgtgatccaaacccagatgaccccctagtgccagagattgcan

SEQ ID NO: 20795 - DNA, 465 bp, Homo sapiens
attccccgcctgcatttattcccttttagtttcatgccttgatttgacttgtgtggtgggaacatgtgaactatgaaacttaaacctgctgcccacccagagcagctgtgaccaagggctgcctcaaggggttgtccacgcaggttgggctcctctctgctgctggacccaagactctgaaccttccaagggacaggcagttcttctaagaagggctcccctgtgtgtgagcaagaccacagctctccttctatctacagatgcatgagggttggaagagtctgggctgtttttagaccttctggtcagctgtatttgtgtaacaacttttgtaataaatagaaaaaccctcaaaaaaaaaaaaaaaaaaaaaattgggggggggcccgggcccccaattccccttatagggagcggaataacaataaatggcccgccgtttaaaaacgccgggacggagggagc

SEQ ID NO: 20796 - DNA, 494 bp, Homo sapiens
  misc_feature (1)...(494): n = A,T,C or G
agggtnccnnnaattgatcgtctgaggacttcggcacgagcactgacttccagatcatggttctcccttcctccctgaggacaccaaattggatgagagcaagtttgagagaagaatgaatcaactgctatccttcccctcacccctcagcccaggagggaaagggcattttctttttcatctttgaaaggcattgtgggtctgtctttaaagtgtttacaaaaaaaaattatataaaaaaaagtctagtgtcgactggtgttttccctcgtgatgtttacagcttgctgtttgctgcccagccataacccactcagtgacagacgaacacagctaaggcctcgctgccagccttctgacggcgggcgagcacacggtctcttcccctgccccaactggccctctccaccaccaacttctctactttgggtttgtttggttttttccctctatttttctggctggttttttgctcttttctccccttgagacca

SEQ ID NO: 20797 - DNA, 469 bp, Homo sapiens
aatgcccgcctgaattgcccgcctgcaggttctgtcgccgctctagggtaaaggagagctgcccctgcccctgcccccgcctatccgagaatacagacattgaagtttgggacaagatatttatctaacttctgtgtcaaaattagcgacctgctatggcaatgaagaaagaaactgaatttgtcattttcacctgaagaaaaatgatagacaaaaatcaaacctgtggtgtaggacaggatcctgtgccctatatgatttgactgattcacatactccaagaatggtttggtgtggagcagctggaggactatttgaattttgcgaactatctcttgtgggtttttacaccactaatacttttaatacttgcttactttactatctttgttctctaccttactattattttcttacacatttataacagacagaacgcgtggaaagacacctactcttgtagttcagg

SEQ ID NO: 20798 - DNA, 481 bp, Homo sapiens
  misc_feature (1)...(481): n = A,T,C or G
aggggggaattgaactcgatcggctgtcangaattcggcacgagaagaagcatagactgttggcccgggccgagaagaaggctgctggcaaaggggacgtcccaacgaagagaccacctgtccttcgagcaggagttaacaccgtcaccaccttggtggagaacaagaaagctcagctggtggtgattgcacacgacgtggatcccatcgagctggttgtcttcttgcctgccctgtgtcgtaaaatgggggtcccttactgcattatcaagggaaaggcaagactgggacgtctagtccacaggaagacctgcaccactgtcgccttcacacaggtgaactcggaagacaaaggcgctttggctaagctggtggaagctatcatgaccaattacaatgacagatacgaagagatccgccgtcactggggtggcaatgtcctgggtcctaagtctgtggctcgtatcgccaagctcgaaan

SEQ ID NO: 20799 - DNA, 489 bp, Homo sapiens
  misc_feature (1)...(489): n = A,T,C or G
tggggnttnnnnnnattgcancgtctgcaggaattcggcacgaggcgcggtggctcacgcctgtaatcccagcactttgggaggccaaggtgggcggatcacaaggtcaggagttcgagaccaacctagccaacatggtgaaaccccgtctctactaaaaataagaaattagccgggtgtggtggcacgcacctgtagtcccagctacttgggagcctgaggcaggagaatcgcttgaacctgggaagtggaggttgagtgagccgggaccgtgccattgtactccagcctgggtgacagagcgagattccgtctcaaaaaaaaaaaaaaaaaaactcgggggggggccgggcccccaattccccttatagggaggcgtataacaattcattggccgcggtttaacaacgccgggacggggggaaaaannnnnngnnngnnnnntnnnnntnnntnttggggnngnnnnnggtgntgtttgntgggccc

SEQ ID NO: 20800 - DNA, 486 bp, Homo sapiens
  misc_feature (1)...(486): n = A,T,C or G
agttgaacgcccttnatttganncgcgctgcaggaattcggcacgaggtggaacagagccccagaactttttcattttcaaagctgaaactctgtacccattaaatgactacctgttccccagtcccggcacccaccattctccttgcacccaccattctccttttggtttctatgaatgggactactctggatacctaatagaagtggaattagacaacatttgtcatttttacatctggttcatttcactcagcataatgtcctcagggttcatccatttggtagcatgtggcagaaatttcttttttttttttttagggctgaaaaatattccatggtttgtatatcccacaggttatttatccttgcagctgcccatggacactggcatggtttccatttttgggctatgggaaatagggctgctggaaatgtgctgggcaaatatatcttcaaaactctgtttttaataatttggggaata

SEQ ID NO: 20801 - DNA, 415 bp, Homo sapiens
  misc_feature (1)...(415): n = A,T,C or G
ggcgananaaaaaatttacttcactgcggaattcggcacgagcagcagagcatcgtcattcttcaggattgccctgctggccctacctcacagctgaaactttaaaaaacaggatgggccaccagccacctcctccaactcaacaacattctataactgataactccctgagcctcaagacacctgcggagtgtctgctctatccccttccaccctcagcggatgataatctcaagacacctccgagtgtctgctcactcccctttcaccctcagctccaccctcagcggatgataatctcaagacacctcccaagtgtgtctgctcactccccttccaccctcagtggatgataatctgaagaaactaacgaagaataaataaataatatagaaataaaaaaaaaaaaaaaaaa

SEQ ID NO: 20802 - DNA, 498 bp, Homo sapiens
  misc_feature (1)...(498): n = A,T,C or G
aggggnnannnatnccgnnnnnnnnnnnnattgatcgactgaaggacttcgccacgagctatagaagacacttcaacctttgccttatccaacccctcttcagagaaaggtgtcccatggccccaaaaagaactgccaagttttggtgaggagtaacaccctggcatgacattccttctctttcctggccctcaaccacttccttcctttggctcttaagacctagcaggttctgtgaactctcaggccttggccagcactagttaggggaggtcaggtggtcaatgtcctggtgattttatgagactgccccactgagaaaacttacttacttcaggcatccagtgcccccacccagggttcaggccctgtctaaggtgttgcttaaagacaaaaaggcaacatgtgcctcactggtggtgtgccactgttctcatgctgcctcctaagtgactccgattttcagccctggtagaataaggaagacagctgatgcct

SEQ ID NO: 20803 - DNA, 448 bp, Homo sapiens
aattgacccttgcgtgcgcaattcggcacgagcaccaatctcttctggacaggtgctgggtaggccttcctggtctctggccgcctgctgccagggtgtggccatccccagcaaccggagctggccaaaccagaggcctcgctccgcactccacactttcctttctgtgctccttccaagttaaattaaaccccctctccacgattcccacggcaggcgtcattcccgagatgggagccagtccaggggtcagcaggagccagcgctgggcacacgtgccctggctgaggccagcggcatcctgggtggcccaggtccatcctgggcagcaaaggcgtgtccccttctgtcagacagcttcacagagtgtggcttcaccagtcagagggagcagtccggagaggcaagatgaccccaccgggactgcagagcctcctccttactaaca

SEQ ID NO: 20804 - DNA, 397 bp, Homo sapiens
  misc_feature (1)...(397): n = A,T,C or G
tgagcccngnnnnnnngnnnaattgacgcctgcagattcggtcgaggacnatgccactctctccaccccattttacagaggagaacaccaaggcccagaggaagttaagggagagtcaatgggcagagccagggctaggccctggtggtgtgtggagcacccaggcagacccagtcctggttgggatcacacccacgggtgctactgcacgtaacactcctccttaggcctggaggccaaggtgtgggtccccacgcctgatctttgaaaacactacacagggctgctgtcacttcccagggcccaggcctcagcccaggcctcgggaccaactctttgtataacctacctgaatgtattaaaaactaattttggagaaaaaaaaaaaaaaaaaaaa

SEQ ID NO: 20805 - DNA, 499 bp, Homo sapiens
  misc_feature (1)...(499): n = A,T,C or G
tggcccncnnnnaattgaaattttgagcgcctttaggaattcggcaccagccacaggatgggagggaatcagcttttcagaatcaatgaagcaaatcaactcatgcatgtatgaccagtgtttgacaaagggagctgatggatcaaaagttatgattacacactgtaatctaaatgaatttaaggaatggcagtacttcaagaacctgcacagatttactcatattccttcaggaaagtgtttagatcgctcagaggtcctgcatcaagtattcatctccaattgtgactccagtaaaacgactcaaaaatgggaaatgaataacatccatagtgtttagagagaaaaaaataaaccaataacctacctactgacaagtaaatttatacaggactgaaaaccgcctgaaacctgctgcaactattgttattaactctgtatagctccaaacctggaacctcctgatcagtttgaaggacattgataaactgtgatttta

SEQ ID NO: 20806 - DNA, 465 bp, Homo sapiens
  misc_feature (1)...(465): n = A,T,C or G
gtgcggggaaaanaaaaaatgactgcactgcaagaattcggcacgagaaaccgtgtactattagccatggtcaaccccaccgtgttcttcgacattgccgtcgactgcgagcccttgggccgcgtgtcctttgagctgagtgcagacaaggtcccaaagacagcagaaaattttcgtgctctgagcactggagagaaaggatttggttataagggttcctgctttcacagaattattccagggtttatgtgtgacggtggtgacttcacacgccataatggcactggtggcaagtccatctatggggagaaatttgaagatgagaacttcattctaaagcatacgggtcctggcatcttgtccatggcaaatgctggacccaacacaaatggttcccagtttttcatctgcactgccaagactgagtggctggatggcaagcatgtggtgcttggcaaagtgaaa

SEQ ID NO: 20807 - DNA, 506 bp, Homo sapiens
gcccccccccccattgctttgcttcgcctgcaggaattcggcacgagctcaaaccatgtttggacctgtttggaagctccctctgctctccctagaaagcttcattatgtgagtgatacatcttttcatatcttcttggtgtgtgtgtgtggtatcatcagcctcaacatctgaagcaaatgttgggtgggggtacatcccactacttcagagtgacaacagatgtttagagttaaatattgaaagaaatttcatattacgataaatgacaatttcagaccaggtgcagtgagctcacgcctgtaatcacagcattttgggaggccaaggaggggggatcacctgaggtcgggggtttgagaccagcctgaccaacatggagaaaccctgtctctactaaaaatacaaaattagcaaggcatggtggcgcatgcctgtaatcccagcaatctcggggaagtctgagggaggagaatcactcgagcccaggagggtggggttgcggt

SEQ ID NO: 20808 - DNA, 478 bp, Homo sapiens
attgcccgcctgcagaattcgcataggtggcctacaattttgttaccgacaagaactctggagaagtcatgacagtaggaatcaatgctataaaggagataacagctcgatgtcctctggccatgactgaagaacttctccaagacctggctcagtataaaacacacaaggataagaatgtaatgatgtctgctagaactttgattcacctcttccgaacactgaatcctcagatgctgcagaagaaattccggggtaagcctacagaggcctccatagaagcaagagtacaagaatatggagaattagatgctaaagattacattccaggagcagaagttctggaagttgagaaagaagagaatgctgaaaatgatgaagatggatgggaaagtaccagtctcagtgaggaggaggatgctgatggtgaatggattgatgtgcaacactcttccgatgaagaacagcacgagatctc

SEQ ID NO: 20809 - DNA, 468 bp, Homo sapiens
tgagagggaaaaaaaaaatttgacttgcctgcactgcatcggcacaagacatataagatgatgcaggagaccatgtacatgactgcgcacattattgatcgccgcatgcagaataatagtgtgcccaacaagatgctgcagctggttggcgtcactgccatgtttattgcaagcaaatatgaagaaatgtaccctccagaaattggtgactttgcttttgtgactgacaacacttatactaagcaccaaatcagacagatggaaatgaagattctaagagctttaaactttggtctgggtcggcctctacctttgcacttacttcggagagcatctaagattggagaggttgatgtcgagcaacatactttggccaaatacctgatggaactaactatgttggactatgacatggtgcactttcctccttctcatattgcagcaagagctttttgcttagcactgaaa

SEQ ID NO: 20810 - DNA, 503 bp, Homo sapiens
  misc_feature (1)...(503): n = A,T,C or G
gccccccccgcgccccgnnnntttgancgaattgattgncctgtcagaattcggcacgagccgactggagctcaggctcgcgacccagactggtgggccaggcctccaagccggccttacacccaatccaaggaggacagaccggacacagagggacggagcgagcaaggagacatggcttcatcattcctgcccgcgggggccatcaccggcgacagcggtggagagctgagctcatgggacgactccggggaggtggagttcccccatagccctgagatcgaggagaccagttgcctggccgagctgtttgagaaggctgccgcgcacctgcaaggcctgattcaggtggccagcagggagcagctcttgtacctgtatgccaggtacaaacaggtcaaagttggaaattgtaatactcctaaaccaagcttctttgattttgaaggaaagcaaaaatgggaagcttggaaagcacttggtgattcaagccccagccaagc

SEQ ID NO: 20811 - DNA, 459 bp, Homo sapiens
  misc_feature (1)...(459): n = A,T,C or G
attgaccccgctgcaggaattcggcacgagtaaacaatgaaatgaagttaacaaaaggattaatgggttgcttaaattagtgagcttcatcagttttatttttaattccttgagataatgaattttaaaagcaataaatacaatgctgtagtttttgacttcttttctaaatatttacatggatttacatgaaagaactaaagagatagtatttgtggaaccaatttaaactcttacatgcctttcaggatttgggaatgtattaacacctgctgctttgtatccagtctaagggagcctatttgtttgttatcacattgacttnttttgatgtcttttagtgttaccctcactcagacccaaggattatgtcttttggggctcccatcatcctgagctagagacacgtgacagggtaaatctctgcccccaggtagaggctgtagccttcttggtttg

SEQ ID NO: 20812 - DNA, 523 bp, Homo sapiens
  misc_feature (1)...(523): n = A,T,C or G
cccccccccccccccccccccccccatccgacccgcgctgcagganatcggcacgccggacagtgtacaaggcccgtgatccccacagtggccactttgtggccctcaagagtgtgagagtccccaatggatgaggaggtggaggaggccttcccatcagcacagttcgtgaggtggctttactgaggcgactggaggcttttgagcatcccaatgttgtccggctgatggacgtctgtgccacatcccgaactgaccgggagatcaaggtaaccctggtgtttgagcatgtagaccaggacctaaggacatatctggacaaggcacccccaccaggcttgccagccgaaacgatcaaggatctgatgcgccagcttctaagaggcctagatttccttcatgccaattgcatcgttcaccgagatctgaagccagagaacattctggtgacaagtggtggaacagtcaagctggctgactttggcctggccagaatctacagctaccagatggcacttacacc

SEQ ID NO: 20813 - DNA, 464 bp, Homo sapiens
  misc_feature (1)...(464): n = A,T,C or G
tggcgaanaaaaanaacctgactgctctncgtctgacaatncggnacgagcctgaaattgcactggaactgctgatggctgcgaacttcttagattgttaaataaaataaattataataaactgttaactcttttcagtatttaatacctgtagttcagttagtaactttttcatatatagcatgttgcctgtatgcagttgaactatataaagttcattgcaaagcagattatcttgtttttttgcatagcaatcaaagttgaaatttgtttgctacatcaacaaattaaggacattttctcaaactgagaaataaacaaatatgccaattcgtaggtggatgtgccttatcctttgaatgtgacttaaaatcagcaatgatgatatagtaaatactgaaatttaggtgtaaatcaatacgttctacagggaaataatgaggctaagtatttttatgttaata

SEQ ID NO: 20814 - DNA, 322 bp, Homo sapiens
  misc_feature (1)...(322): n = A,T,C or G
gggggggnncccaattgcatgcgctccggctgcangaattcggcacgagcagaggctctcctcacctcagctgagctcctttgaaagtgattcaagggactatgtcactcagcctcatttgctggaccaaatctggagggagaacccctaaaacccctaagtgaggttgcccagggggttgtccccaggtggggggaagcaggggagagaaaatggtagccatttttacattgttttgtatagtatttattgattcaggaaacaaacacaaaattctgaataaaatgacttggaaactgaaaaaaaaaaaaaaaaaactggg

SEQ ID NO: 20815 - DNA, 385 bp, Homo sapiens
  misc_feature (1)...(385): n = A,T,C or G
cggcggcnaannanaacctgacttcgctgcggtattcgcacgagaatactcctacaacattcccccctgtggagatgccacactaactgctgttagggagttttgggcgacgactccttctggctacttcttgttgcaaaagggcgtcgaatggggaagagcagctagggctcctcctggggtcaatctaagggtcctcagaagaatgatgtgtctatgtgtggttctgtttacagcaccatttggagtttgattgcttctagatgagaagaaacaatttgagttatagtattgtgtatacagggtccaaatatcaatacaagacacatatgcaagagagggcttaataaaggggttaaccaattccataaaaaaaaaaaaaaaa

SEQ ID NO: 20816 - DNA, 499 bp, Homo sapiens
  misc_feature (1)...(499): n = A,T,C or G
tggnnnagggtgnccccaggnnaannnnnnaattgatcgccttaggaattcggcacgagcagaagcccagnaactgccctttccctgcatatgcttctgatggagtcatctgctccttcctgtggcctcatccaaactgtatcttcctttactgtttatatcttcaccctgtaatggttgggaccaggccaatcccttctccacttactataatggttggaactaaacgtcaccaaggtggcttctccttggctgagagatggaaggcgtggtgggatttgctcctgggttccctaggccctagtgagggcagaagagaaaccatcctctcccttcttacaccgtgaggccaagatcccctcataaggcaggagtgctgccctctcccatggtgcccgtgcctctgtgctgtgtatgtgaaccacccatgtgagggaataaacctggcactaggaaaaaaaaaaaaaaaaaaaaacttggggggggccccggaccccaa

SEQ ID NO: 20817 - DNA, 459 bp, Homo sapiens
aattgcaccgcgctgttagaattcggcacgaggattccgggtcggatctggcaggtctgagcgctccgacttccagaggagcgctgtgcacgtggagaagagcggggactcggcgaccctgccctcccgaccctcatgttcgaagagcctgagtgggccgaggcggccccagtagccgcgggccttgggcccgtaatctcacgacctccgcctgcggcctcctcgcaaaacaagctttccagctttgaaaacctgcagcattcccattgaagccaagaacaaaataaggatgcctactgtaatggataaagttcaacctcggactggacattcaacagtatgtgataccctccaccatgggatgagactctcgccagatgctcttggacttcccagcctccagaaccatgaaccaaataaacttttattctttataaattaaaaaaaaaaaaaaaaaaa

SEQ ID NO: 20818 - DNA, 380 bp, Homo sapiens
  misc_feature (1)...(380): n = A,T,C or G
ggtgggtannannnaaagacccctatgaggcttcgtgggggcagcaggagcctctcagctttttcgtatttggagatataaccaagaactaaaagctaaagcacacaaataaaagagttcctgatcacctgaacaatctagatgtggacaaaaccattgggacctagtttattatttggttattgataaagcaaagctaactgtgtgtttagaaggcactgtaactggtagctagtgcttgattcaatagaaaaatacagcaaacttttaataacagtctctctacatgacttaaggaacttatctatggatattagtaacatttttctaccatttgtccgtaataaaccatacttgctcgtaaaaaaaaaaaaaaaaaa

SEQ ID NO: 20819 - DNA, 468 bp, Homo sapiens
  misc_feature (1)...(468): n = A,T,C or G
cgagcgacnaaaaaaaaatttgactgccctgcgctgcaggaattcggcacgagcaaacaagaggaccacttgtctctaatttatgaatggtgtccatcctttccccatccctgcctcctgcccctgacgcccatttccccccttagagcagcgaaactgccccctcctgcccgcccttgcctgtcggtgaggcaggtttttactgtgaggtgaacgtggacctgtttctgtttccagtctgtggtgatgctgtctgtctgtctgagtctcgtggccgcccctggaccagtgatgactgatgaatcttatgagcttctgattgatctcggggtccatctgtgatatttctttgtgccaaaaagaaaaaaaaagagtggatcagtttgctaaatgaacattgaaattgaaatgctttatctgtgttttctgtaaataaaagagtgcaataatcaaaaaaaaaaaaaaaan

SEQ ID NO: 20820 - DNA, 491 bp, Homo sapiens
  misc_feature (1)...(491): n = A,T,C or G
aatttgacncccgcttgnggnnnnncatagaccnngcgctgcaggaattcggcacgagttttaagacagtcattttaaaatggtggctgaatttcccaacccacccccaaactaaacactaagtttaattttcagctcctctgttggacatataagtgcatctcttgttggacataggcaaaataacttggcaaacttagttctggtgatttcttgatggtttggaagtctattgctgggaagaaattccatcatacatattcatgcttataataagctggggattttttgtttgtttttgcaaatgcttgcccctacttttcaacaattttctatgttagttgtgaagaactacnnnnaggcgacctactacaagctgagtaatggtatgagtatataccagaattctgattggcagcaagttttattaatcagaataacactttggtatggaagtgactaatgctgaaaaaatgattattttaattaat

SEQ ID NO: 20821 - DNA, 509 bp, Homo sapiens
  misc_feature (1)...(509): n = A,T,C or G
cgtggggttttaattggactgcatggcgtccgacancggcacgaggcccggcggcgctccaggtgctgacagcgcgagagagcgcggccctcaggagcaaggcgaatgtatgacaacatgtccacaatggtgtacataaaggaagacaagttggagaagcttacacaggatgaaattatttctaagacaaagcaagtaattcaggggctggaagctttgaagaatgagcacaattccattttacaaagtttgctggagacactgaagtgtttgaagaaagatgatgaaagtaatttggtggaggagaaatcaaacatgatccggaagtcactggagatgttggagctcggcctgagtgaggcacaggttatgatggctttgtcaaatcacctgaatgctgtggagtccgagaagcagaaactgcgtgcgcaggttcgtcgtctgtgccaggagaatcagtggctacgggatgaactggccaacacgcagcagaaactgcagaagagtga

SEQ ID NO: 20822 - DNA, 475 bp, Homo sapiens
attgcattcgactccgctgcaggaattcagcacgaggaaattgtagattcctacactccccctttctagagttctgggtctaagcgaattgactcctatttctgttgtgaatgttgtagtttcccttcccattctcttggtggccctggaagcttctaggcacagtgagccaccctgattattcccactactccgtccaacttttctctctctgtggtgtctgcaccacaagctgcctaccctccaggtgcctcaatggtccggccaccagttgtgcctcggcgccccccggcccacatcagcagtgtcaggcaggcctccacccaggtgccacgcacggcgcctcatacccagagagtagccaacattggtactcagaccacaggacccagtggggtaggatgctgtacaccaggccggccgctcctgccgtgcacatgttcctcagcagcacatagcacctatcgggtgcagg

SEQ ID NO: 20823 - DNA, 459 bp, Homo sapiens
  misc_feature (1)...(459): n = A,T,C or G
nggggtgtccgngatganaaaactagagctaggntagttcgcacgaggtcacattctggttgtctatgcagctaggggtgaccctggcgtgagtatctggaacaggccaggcttggctccctggccgggggtcttgtctgtcgagtgagcacctgagctggggtccctgagatctgttctgaggctgcctctgtcatgcagcactttgagatgcgccccccttggagccctccaggagctgagaatcagaagagatcctgtggggagaggtgagattttctgtacctctgtttccttacctgaggtgggtcataacaaagctctgccgcttggtagtgctgaggattgagacccccaatgcggtgtgcttagaacagtgcctagcgtgtcataagcacaggtgaaatatcaggcattattctgaaaggcggcagggtatcctgtgtaagggaatgctgn

SEQ ID NO: 20824 - DNA, 478 bp, Homo sapiens
  misc_feature (1)...(478): n = A,T,C or G
gtgggttannattgaccggcttgaggaactctgcacgagaacagactgcaacaaccacaaacaaaaagcctggccagggaactccaaattcagctaatacccaaggaaattcaacaccaaatcctcaggtccctgattaccctccaaactatattttattccttaataacttaccagaagagactaatgagatgatgttatccatgctgtttaatcagttccctggcttcaaggaagtacgtctggtaccagggaggcatgacattgcttttgttgaatttgaaaatgatgggcaggctggagctgccagggatgctttacagggatttaagatcacaccgtcccatgctatgaagatcacctatgccaagaaataacatttgggatagtcgtctttaaaagacttggtgttatttacagtgtttggtttgataacatttggctgggtcattntaatagttagagatgaggaggagtg

SEQ ID NO: 20825 - DNA, 471 bp, Homo sapiens
  misc_feature (1)...(471): n = A,T,C or G
gggaatgggnaggnnggaaactgacngcattgagaacatgcacgagaacaggnngncagaagactctagaactgtgctaatatggtaaccacatgcggcttagtaaattgaaattaacagattagataaaatttaaaattcagtttttcaagtgtataccagacacgtttcaagcactcagtagtcatgaggcctgtggctaccgtattaatagagacacagaacatttccatcatcatagaacattcttttggatagcactgttctacaagtgttttgttaacagtatcgtcttggacctcatgttcatagccacttttgtggttcctaagacaacaccttttttgccctgagtgtcattaaaggggttgttaagaagtacttttgggtcttctattaaaactaaaaaacaaaatgagaaaaataatgggagaagaggaaaagttgaccagagaagggtaagaaagtttg

SEQ ID NO: 20826 - DNA, 503 bp, Homo sapiens
  misc_feature (1)...(503): n = A,T,C or G
agtggttttnaatcgacgtccgtggcgccatccctcctgagaacaagatggctggaacagtttccacattgccagtcgagaaggcgaccctctgatcctccagtacctgctcactgtttgcccaggtgcctggaagacagagagcaaaattagaaggactcctctgcatactgcagcaatgcatggccatttggaggcagtcaaggtgcttcttaagaggtgccaatatgaaccagactacagagacaactgtggcgtcaccgccttgatggacgcaatccagtgtggtcacatcgacgtcgctaggctgctcctcgatgaacatggggcttgcctttcagcagaagacagcctgggtgcccaggctctgcacagggcagctgtcacagggcaggacgaagccatccgattcttggtctctgaacttggcgtcgatgtagatgtgagagccacatcaacccacctcacagcacttcattatgcagctaaggaaggacatacaa

SEQ ID NO: 20827 - DNA, 482 bp, Homo sapiens
  misc_feature (1)...(482): n = A,T,C or G
cgggggcgannattgannccattgacccgcgctgcaggaattcggcacgaggattgagtcacttggggagaaagatattggagaagtcagagaaggtgtaaatcagtggtgccacaaacaccagtttacttccacttttcaccccccgggtctgttttgtctgcgtgcagctctcctcgtgtcggagacgctgagtcagttctctactggtcttgccctcttccggaaaaagaaaacacacctgagaagtggtagttcctatcctaacctactggggccctttataccaggtgccaaacttcattatccaccccaccaccttgcccgggagggagatctgtgaaagcgaaacgtgatttaagctgggatctggcagcaacttcgtggactctgaagggcacgtgggaaaggagttttgattgaaggtgagggatttagcgaggtaaaattatatccaaattatagtttggtaaaggcttcca

SEQ ID NO: 20828 - DNA, 484 bp, Homo sapiens
  misc_feature (1)...(484): n = A,T,C or G
ggaggtcccnnnaggtgnnnnnaactgaccgcgctgctgaattccgctcgagatagacagagagagagagagagacagagagacagagagagatacagacagagagagctactaatacctagccactatgcgagagagcatcttcatccacgttggccaggctggtgtccagattggcactgcctgctcagagctctactgcctggaacacggcatccagcccgatggccagatgccaagtgacaagaccattgggggaggagatgactccttcaacaccttcttcagtgagacgggcgctggcaagcacgtgccccgggctgtgtttgtagacttggaacccacagtcattgatgaagttcgcactggcacctaccgccagctcttccaccctgagcagctcatcacaggcaaggaagatgctgccaataactatgcccgagggcactacaccattggcaaggagatcattgaccttgtgttg

SEQ ID NO: 20829 - DNA, 499 bp, Homo sapiens
  misc_feature (1)...(499): n = A,T,C or G
cggggtgcnnaattggcggctgcggaattcggcacgacgaggtaccgtttacatggttttgtgtatatagagttggcttgcattttaggggccattttgtataaaaagtgcatatgattaaaattagactcagtcatcactgtgagatgcctttgctaagaggataaaggaactgagaccagatgagaaaaagaaaggatatagattccttgagtggaatagtgggctagattaatataccgaaatatttccattgtttcccttttttgcagagcatgtggaagttaaacctgcttgattctactatacatcttgggcaactagttaccaaatgaattgtgccaccataactgattttaattttgcattatttatgattttaaaatatttgttgcccaggtgttatgaaagaataaagcttttaagtatagactaccttagcatgaagatgctcatgcctaagaatgaaaattgttgaggttatctcccattcaatcat

SEQ ID NO: 20830 - DNA, 421 bp, Homo sapiens
  misc_feature (1)...(421): n = A,T,C or G
gcacgagccgtctccaggaaaaggagaggggttaagatgcaccgaggctgtagctgggctacttgatcttgctgaaagtgtttctaaagatagcaccactttttttttttaaagcttttatatattaaaaaacgtatcatgcaccaactgtgaatagctgccgcttgcgcaaaggacccggggaggggtcccgagaggctccccatgcaacactggaaatgactgttccagagagcgggcagacctggcaaagcgcccctggcgcctgagactaccacccactccgttcctgccagaaacgaccctctgtggccgatgggccatgcgggcccctcgcagccaactcagccagtgttgggactggctcaaaacccatgggggctggaggggggcagctgggactctggaatcttctttatan

SEQ ID NO: 20831 - DNA, 451 bp, Homo sapiens
  misc_feature (1)...(451): n = A,T,C or G
nttgtgccccgcgctgcacgaattcggcacgaggggtgatgctctaacagtgacctggaattttcgtcctctagacgggggacctgagcagtttgtattctactaccacatagatcccttccaacccatgagtgggcggtttaaggaccgggtgtcttgggatgggaatcctgagcggtacgatgcctccatccttctctggaaactgcagttcgacgacaatgggacatacacctgccaggtgaagaacccacctgatgttgatggggtgataggggagatccggctcagcgtcgtgcacactgtacgcttctctgagatccacttcctggctctggccattggctctgcctgtgcactgatgatcataatagtaattgtagtggtcctcttccagcattaccggaaaaagcgatgggccgaaagagctcataaagtggtggagataaaa

SEQ ID NO: 20832 - DNA, 454 bp, Homo sapiens
attagaccctcgccccccggctgcaggaattcggcacgagcacatcgacgtcgctaggctgctcctcgatgaacatggagcttgcctttcatcagaagacagcctgggtgcccaggctctgcacagggcagctgtgacagggcaggacgaagccatccgattcttggtctctgaacttggcgtcgatgtagatgtgagagccacatgaacccacctcacagcacttgattatgcagctaacgaaggacatacaagcacaattcatactctcttatccttgggagctgacatcaattctaaagatgaaaaaaatcgatcagccctgcatctggcctgtgcatgtcagcacttggcctgtgccaagtttctcctgcagtcgggactgaaggattctgaagacatcacgggcaccctggctcagcagctgccaaggagagcagatgtccttcggcgc

SEQ ID NO: 20833 - DNA, 478 bp, Homo sapiens
  misc_feature (1)...(478): n = A,T,C or G
tggtgcttnnaattgaccgcgttgaggaactctgcacgagtataaacagtgaacttaatatgtttctgtgagagtgacagagctgtgcccgtttatcttcattgtattaattattacataaagattaacaaatacattgcaaatgcaaattataggatgtttggaggatttattaatgagcatgtattgattgcctattccatatccagtgcaatgctaggtatgtctatggaaggagtattattacttcatttctaaacaaatgaagtcaagcaaattgagatctttctgaaattatgaagacatcttctgataacttatctgttgtatttcctagtctcaaagtcaagaaacccgtatatgtggacctagggctaataggaggtccctatggcactaactgngaaaattacatggtgcttttcaactacagaaagaagtaatgactaatgggcctgtctgtagagaagaaaaggag

SEQ ID NO: 20834 - DNA, 485 bp, Homo sapiens
  misc_feature (1)...(485): n = A,T,C or G
ctttgcccgccttgangaattcggcacgagcaaacattnttaaagggctggttattcttcctgaaatgagtttggtgattagaaatctgcagcgagtcatccccatcaggagagcgccacttcgcagtaagatcgagattgtaaggaggattttaagagtgcagaaatttgacctggggatcatctgtgttgacaacaagaatattcagcacattaatagaatctacagagatagaaatgtcccaaccgatgtgctttcttttccatttcatgagcatctgaaagcaggtgaatttccccagcctgattttccagatgactacaatttgggagacattttcctaggagtggagtatatcttccatcagtgtaaagaaaatgaagattaccctgacgtcctgactgtaagcggggatgctgaaatcatataacctggctcatggaacatgggccttgcaaaggggtcaagatcacaaccctgcatc

SEQ ID NO: 20835 - DNA, 511 bp, Homo sapiens
  misc_feature (1)...(511): n = A,T,C or G
agggggggnnnnnntttccatcggctgcacgattcggcacgagaaaagctctgctttgtacttcctcaccctgctttcgtacaaggaagggggacgatgggaaatcatggacttgtaagttgtatttaaacataaaaatgaacttggtaacttctgggtttagtagagcctcagtgtcgctttaacttagtttactttttttttatttttaaagcagcaatggatggttttaaaggagtattatgattgtaaaattgctaaatatgactgtaacacagctttgtggtagctgtgacacagttcacttgggcaaaggagtggtgatggactcgttaaaatcatatatacttgaatagtccattgaccgaaactctttatagactattgtgtaaatgtggaatcacagactgttaacattgcctggacttcagcagagtcctggagctgctgggacctctcctatcatgatgaacttggacttttttttttgatttctggttttaaaaaacaa

SEQ ID NO: 20836 - DNA, 484 bp, Homo sapiens
  misc_feature (1)...(484): n = A,T,C or G
cgcgggctnnnnattgancgccattgaccnccgctgcaggcacgacaagatgaagagttcaatccgtgctgtctgaactcacagtgtagcaggcgagatagacgggaagatcggtagggtgggagatgccggaaaggcttcccgtgagactggataagaaatcaaaaatctggtgaaattgccggcaagagggagttaaggacattccaggcagaggcaagctatttgacagaccatatgctctattgaactttgccactgcatcacaactagaccctgaacaggatggatttctggacttctgaaagttggtccttgctggctgatccagcttccccgtcagcatatggtgagcagttcggtgagaggaccacacttccaatactggcagatgaagccagatactcctctatgaagttaaatgactggttcagtgttaacactgctagtgagcgacagagatggaatttgaacgcacacctgt

SEQ ID NO: 20837 - DNA, 493 bp, Homo sapiens
  misc_feature (1)...(493): n = A,T,C or G
agggtcnnnnnnaattctcgtctgaggacttcggcacgaggacttcctgagccaggaggggctggagaagagccctgaggagatccgccatctgttccaggagaagaaagtggacctgtctaagccactggtggccacgtgtggctctggcgtcacagcctgccacgtggcactaggggcctacctctgcggcaagccagacgtgcccatctacgatggctcctgggtggagtggtacatgcgcgcccggcccgaggatgtcatctcagagggccgggggaagacccactgaagctgggcaggacacaggcgagctcacgtgatgccggccaccagcaatgcctggcctggtagctccgcttctgctttcaccaagagagtgtttcttcactcaactcaggtggcatttggggtgacatctcaaaggccaggaattccgttgacttgttggctgccagtangggcgggaggaaaggcggaggcgagccctggn

SEQ ID NO: 20838 - DNA, 479 bp, Homo sapiens
cggcgcccattgcccgtcgtgcagcattcggcacgagctctggctagtgaaatgcccctcatggacaatccctacgacctggccaacagtggcctgtctcaaacagacccagaaaaccctgacctggggatggaggccacagataagacaaaaagcagggtgtttatgatggctcggcagtacagtcagaagattaagaaggcgaatcaacttttaaaagtgaaaagtctggagctggagcagccgccggccagtcagcatcagaaatccatgcacaaagacctggctgccatcttggaagagaagaagcaaggagggcccgccattggtgccaggattgctgagtattcccagttgtatgaccagattgtattcagagagtctcccttgaaaattcagaaggatggctgggccagccctcaagaatcctccctcctgaggtctgtgtcacctttacaggtccaccatggtagtggaga

SEQ ID NO: 20839 - DNA, 481 bp, Homo sapiens
cctagcccgcctgcaggaattctgcacgaggaattcctcatggagaacagagtgcagagcttttaccagcaggagctggaaatggtggagtctttgctgtcccttgccaatcagcctgtgattcacagtgcctgctccgaccaagtgaattttaagaaggacaccacttccaaggcaattcatagtatatttaagaatgctatacaactgctgcaggaaaaaggacttgttttccagaaagatgatggttttgataacctatactatgtaaccagagaagacaaagacctgcacagaaagatccaccggatcattcagcaggactgccagaaaccaaatcacatggagaagggctgtcacttcctgcacatcttagcctgtgctcgcctgagcatccgcccgggcctgagcgaggctgtgctgcagcaagttctggagctcctggaggaccagagtgacattgtcagcacaatggagcacc

SEQ ID NO: 20840 - DNA, 494 bp, Homo sapiens
  misc_feature (1)...(494): n = A,T,C or G
gagaaaaagatttgatnccngttgcancncntgcaggaattcggcacgaggagagacaagacttgggctccagctgcctttgatcaagattcgggtgcaagtggagcaggagccatatacctggagggaatgtgctttgtcacaccaaagatgatttttttttcttcaaacttgtatgttgcctaggtttcaaattctttgccgcaaggctgatctgctttcattaactggaattctgtaggagatactggtgacctaagctaacctgcactcatcatactcattgtcaagctaatgaggctctattataaaggttctacttttaatctgagggaaaacatgttcagggcttctagaacactaaaaaatttggcttaaaccagtgttcagtctggtgccaaagcttgaatggaatacaaattcacataatctgaactttgttcacaggttatcctaatagagtaattcttcactttgctctattgaactgtctt

SEQ ID NO: 20841 - DNA, 505 bp, Homo sapiens
  misc_feature (1)...(505): n = A,T,C or G
cttcgcacccccttcnnnaattgactcgcgctgcaggaattccgcacgaggagtaattcgcattctggctgagtgtaagccatttataattgatattttaccaccttccatttaaatttgacaggagcccagatgttgctttctccatttattttttgtttttttttaatcacagtaggtctgatagagaattggagctaaattataatatttttgttggtaaagttgagttatatacttgtacatacaatggaaatgcttttagtagctgattatttagcaatttttgtttttgttatattaggcatgtttggaggctttcctattctagcatttaaatttaaattttattaaaattaaataatttaaatctagcatttaaatttaaataatttaagtctagcatttacttttaaataattataatgacgttttgaaatactaagttaatccagacctttagttgccccatggtgttaataaagattgccatagaagatgtatn

SEQ ID NO: 20842 - DNA, 536 bp, Homo sapiens
  misc_feature (1)...(536): n = A,T,C or G
aggagattgatcgccggctgcangaattcggcacgagaaactgggcgcccaggcctcacctagagggaccccagagcatgcagtatggctcttcttttgctgccctctttgccgactctctcttctccagacacccctggagaggggtataaacacctttgttttatcaacccaaagtgccattgatttaaagacacctctatttgagaaatgttggaaatcgtatgtcttagaattgatcaaatacaccagaatgtgagctgaaaagaaagcaccggacttaaaatttaggaagtcactggtgatcttacttggagaaatccatttcagtagattggtaagtgcagcactagatggctgtgagttggacaaatgggaggtgtggcattgtatgcagcagagatgcatggatggtgtgcagaccagtattgcaaaaaaattgtggtgatgggaagatgtgataaagctcaagatgtggtacgatttaaaggaaggtatttttgtatgaggacaacttgagcctttgtccaggctan

SEQ ID NO: 20843 - DNA, 509 bp, Homo sapiens
  misc_feature (1)...(509): n = A,T,C or G
cgggntannnnnattgttggctgccgatttcggcacgagcgcgatgtgtgattgcagatggaaaacaaagtattttatgcctacgtttctaagatagaagaaatggacttgttgaaaagaagccagtttgtaaaggacacagtaggagaatttaaggtaccaccaccagagagaggttgagagtgcgtttgacttttggttttgtcaaacgcgaggttttccgtttccttccggggcaagttgaacctgtccagcccccgtaggctgtgggtcaaaagtgccggtcaaaatggaagtgaatccccctaaacaggagcacctgctggcgctaaaaggtcctgtttccctctgatttggcaagagagacaatcttgcaataataaattaacattctagctctgaggagttcaactaagaaattttctcatcactaagagtaactggattactgcagaatgactacagaagtaatattacattatcgaccatgtgagagtgatcccacacaa

SEQ ID NO: 20844 - DNA, 469 bp, Homo sapiens
aatagaaaaccccttgatccgcctcgcggaattcggcacgaggaggtggcacccacagtcagtggaacaagccgagtaagccaaaaaccaacatgaagcacatggctggtgctgcagcagctggggcagtggtggggggccttggcggctacatgctgggaagtgccatgagcaggcccatcatacatttcggcagtgactatgaggaccgttactatcgtgaaaacatgcaccgttaccccaaccaagtgtactacaggcccatggatgagtacagcaaccagaacaactttgtgcacgactgcgtcaatatcacaatcaagcagcacacggtcaccacaaccaccaagggggagaacttcaccgagaccgacgttaagatgatggagcgcgtggttgagcagatgtgtatcacccagtacgagagggaatctcaggcctattaccagagaggatcgagcatggtcct

SEQ ID NO: 20845 - DNA, 489 bp, Homo sapiens
  misc_feature (1)...(489): n = A,T,C or G
cttcgcaccgcctgnaggaantttggccccgcgctgcaggaattcggcacgaggtggcgcctaaagtagcgacccggggggagcgcggggcgacgctggctgcagggacccggtgacagcgtgagaggtactaggttttgacaagcttgcatcatgcgtgagtataagctagtcgttcttggctcangaggcgttggaaagtctgctttgactgtacaatttgttcaaggaatttttgtagaaaaatacgatcctacgatagaagattcttatagaaagcaagttgaagtagatgcacaacagtgtatgcttgaaatcttggatactgcaggaacggagcaatttacagcaatgagggatttatacatgaaaaatggacaaggatttgcattagtttattccatcacagcacagtccacatttaacgatttacaagacctgagagaacagattcttcgagttaaagacactgatgatgttccaatgatt

SEQ ID NO: 20846 - DNA, 476 bp, Homo sapiens
  misc_feature (1)...(476): n = A,T,C or G
aaccctggtacctgccnctggngcccgtgcaaanccaaccctgaagaagatgggacagagaccttgatgatattcacacacattcaggaacctgttttgatgtattataggcaggaagtgtttttgctaccgtgaaacctttacctagatcagccatcagcctgtcaactcagttaacaagttaaggaccgaagtgtttcaagtggatctcagtaaaggatctttggagcctgaaaaaaaaaaaaaaaaaaaaaaaaaaaaaaaaaaaaaaaaaaaaaaaaaaaaaaaataaataataaaaaaaaacatcccgggggggggggggggtcaccaatccccctttttagaggggcgttaaaaaaaaaagggggggcttgtttaaaaaagggggggggggaaaagcnnggnnngagcccccctttcttactgagcgcaacatttcttcactgcactgtgctagcaactcatcagggcct

SEQ ID NO: 20847 - DNA, 517 bp, Homo sapiens
  misc_feature (1)...(517): n = A,T,C or G
tgggcgggnnnannnatttcattcgtccgngctgcaggaattcggcacgaggagagagagagagagagagagagagagagagagagagagataggaaacctcatctatatatctacagcgacagcaagatcttaacactttggggggctgaggcagaaagatcacttgagcccagaaattcaagaccagcctgggcaacgtagagagaccccatctctatatatatataaaaataaaagcacattatttaaaagaataaacattgtgaacatcaattcccatcacagcacgccctggatgaaaacatggacctcttggaaggtataactggctttgaagactctgtccgaaagtttatctgccatgttgtgggtatcacttaccagcacattgaccgctggctgctggccgagatgctcggggatctgtcggacagccagctaaaggtgtggatgagcacataccgctggagtgccgacgagtcggggcatatctttatctgtagccaaaaagagaa

SEQ ID NO: 20848 - DNA, 458 bp, Homo sapiens
  misc_feature (1)...(458): n = A,T,C or G
aatttgcnctgcgctgcacgaattcggcacgaggagacagctaactctaggatgaagctgtgactaggctggagttgcttccttgaagatgggactccttgggtatcaagacctatgccacatcacactggggctagggaagtaggtgatgccagccctcaagtctgtcttcagccagggacttgagaagttatattgggcagtggctccaatctgtggaccagtatttcagctttccctgaagatcaggcagggtgccattcattgtctttctctcctagccccctcaggaaagaaggactatatttgtactgtaccctaggggttctggaagggaaaacatggaatcaggattctatagactgataggccctatccacaagggccatgactgggaaaaggtatgggagcagaaggagaattgggattttagggggcagctacgctcaccctanact

SEQ ID NO: 20849 - DNA, 488 bp, Homo sapiens
  misc_feature (1)...(488): n = A,T,C or G
ggggaganacccaganaaaantttgattgatcgcccgtggaacctgccgagcagggctctcatgatgggaaccagtggttagtggcttcaaaggcccagctgacaccctccacagcctaaggggtgtcctaaagtgcctccccctgtattccccttcccagggcagcccctgcccagcacaaaaccccaggaccctggctctgcacgcctggggcagggacttttgagtttaggatctgtattttctaagtccccagttctcctggctctcctttctgaaataaaggattgaaaacggttcctgttcccaaaaaaaaaaaaaaaaaaaaaaaaaaaaaaatcccggggggggggcccgggccccaatcccccctaaggggggggaaataaaaattccggggccggggtttaaaaacgggggggggggggagaaaannnnnnnnnnnnnnnnnnnnnnnnnnnnnnnnnnnnnnnnnnnnnnnnnnnnn

SEQ ID NO: 20850 - DNA, 514 bp, Homo sapiens
  misc_feature (1)...(514): n = A,T,C or G
tggggnnnnnnnnnattccctcggctgcacgaattcggcacgaggagcatggcagtcctgcctggctgctgtatgaagggagatcaaataggaacgcccaccgcctgctctctgggcacgcactgcccagagagggctcctgaagagtcctgctgcaggtgcacttgtggggcacgggatgatgctgggctcctgtgtgctgctgtgcagctgcctctccgtgtgcacagctaactgcactttggaagcatgttgtttagtccatggtgtgcctgaacccaagaagggagctgagcactggaagacctgggttctaggaccttgtctgctgccaactggcttctctctggatctcgacttctattctggaaaaagggaaggttgggtgtgaaatcagggattctccagctatgtatctgacagtactgtcttcccatgacttggagtaaggtagtctataccaaaataaaaaaattgataaagtttttgcaatttactaaaaagtaacatgaat

SEQ ID NO: 20851 - DNA, 467 bp, Homo sapiens
cttgcccgcctgcatgagttcggcacgagtgatagccctactttaacatttcttttgaagcgggtgtctgcttgaagagggaaacacgtcatgaaactgtaatgcatgaacagaactcaggagttgtctggccagcttagtgctgccactggtgacatgccaacttaccagatccgagctcctactgctgctttgccacagggagtggtgatggctgcatcgcccggaagtttgcacagtccccagcaactggcagaagaagcaacacgcacacgagagctgaggctaatgaaaaacagggaagctgcccgggagtgtcgcatgaagaagaaagaatatgtcaaatgtcttgaaaatcgtgtggctgtgcttgaaaaccacaacaagactctcattgaggaactcaaggccctcaaagatctttattgccatacagtagagtaactgtctttgacttggaccttgtt

SEQ ID NO: 20852 - DNA, 479 bp, Homo sapiens
  misc_feature (1)...(479): n = A,T,C or G
ngcgcgattcgacgcgatcgcccggctgcangaattcggcacgagaatggctcccgcaaagaagggtggcgagaagaaaaagggccgttctgccatcaacgaagtggtaacccgagaatacaccatcaacattcacaagcgcatccatggagtgggcttcaagaagcgtgcacctcgggcactcaaagagattcggaaatttgccatgaaggagatgggaactccagatgtgcgcattgacaccaggctcaacaaagctgtctgggccaaaggaataaggaatgtgccataccgaatccgtgtgcggctgtccagaaaacgtaatgaggatgaagattcaccaaataagctatatactttggttacctatgtacctgttaccactttcaaaaatctacagacagtcaatgtggatgagaactaatcgctgatcgtcagatcacataaagttataaaattgccttcaaaaaaaaaaaaaa

SEQ ID NO: 20853 - DNA, 496 bp, Homo sapiens
  misc_feature (1)...(496): n = A,T,C or G
attggaacgcantgangganttcgacccgcgctgcaggaattcggcacgagaaaagcacacgcatgcgcctcagcaaatggcagcccaggagctgtttgtccagtttagcatggctaggtctggaactataatagcagggtcagactgtgggttcctcttctcctgtgcttgagctctggtttgagagctggcgctaccaacctttttcctatatcccgagtggggcacagacggtggatctctgcccagtgtggtgtgtctggcttggcttttcaatattgtgaggtctgaatggatctgacccctgtcagatgaaaatgattcacagctctggcagttcccaagtctggggaggggtataggtttgaaaggctgtttgaaagaggaatgtttaataaaggctttgatttaatcttgaaaaannnnnnnnnnnnnnnnnnnnnnnnnnnnnnnnnnnnnnnnnnnnnnnnnnnnnnncccccaaaaacccccggg

SEQ ID NO: 20854 - DNA, 480 bp, Homo sapiens
cgcccccttcgatcgcctgtggcgactttggatgacctgtgagacaaatacaacagcatggaagatgccaaagtctatgtggctaaagtggactgcacggcccactccgacgtgtgctccgcccagggggtgcgaggataccccaccttaaagcttttcaagccaggccaagaagctgtgaagtaccagggtcctcgggacttccagacactggaaaactggatgctgcagacactgaacgaggagccagtgacaccagagccggaagtggaaccgcccagtgcccccgagctcaagcaagggctgtatgagctctcagcaagcaactttgagctgcacgttgcacaagaaacgccgagtctaatgctaagcacacgtgacccgcacactagctggacagtgcatccttggctaaaagtgtttattgacagactcacctcgcttgattgctctttactttattgcactttggagatactg

SEQ ID NO: 20855 - DNA, 486 bp, Homo sapiens
  misc_feature (1)...(486): n = A,T,C or G
ggatgtccccnaggagcccccaatagatcgcccgtagaattccntcgaggacagagtttcactcctgttgcccaagctggagtgcaatggcacgatctcggctcacggcagcctccacctcccggattcaagcgattctcctgcctcagcctcctgagtagctgggattacaggtgcctgccaccatgcctggctaatttttgtatttttagtagagacggggtttcaccatgttggccgggctggtctcaaactcccgacctcaggtgatccgcccatctcggcctcccaaagtgttgggattgcaggcgtgagccactgtgcccagcccagacttagcttctttgcaaactctatgagggctcgcctctttaagcccagctcagctgtgggctagaatgatcgtttctaatgttcattgcacttatggggtcagaagtaaggaacggtggatgggtgtcaagggcatgccctgctcagtggacc

SEQ ID NO: 20856 - DNA, 475 bp, Homo sapiens
  misc_feature (1)...(475): n = A,T,C or G
cggtgcgtagnananaattgagngcaattgagaaccactgaggaattccgcacgagaaacaactagcaaaaagaatagccataagaaaaccaggccaagattgaaaaatgtggatcggagtagtgctcagcatttggaagttactgttggagatctgacagtcattattacagactttaaggagaaaacaaagtcaccgcctgcatctagtgctgcttctgcagatcaacacagtcaaagcggctctagctctgataacacagagagaggaatgtccaggtcatcttcacccagaggagaagcctcatcattgaatggagaatctcattaaagtttattttctccaatttcttagtcacttctgtcctaccatgcaaatacacagattatgccaagaggtaccacattttcatgacagatacattcatgcacaatccataatttgagttttacataaaatagaaatttgttagaa

SEQ ID NO: 20857 - DNA, 458 bp, Homo sapiens
attgaccttcgctgccgctgcaggaattcggcacgaggagcgctggagcttcatccgggcacttcataagggatccgcagctgctcccgctctccagaaagactgcaagaagcgagtattttccggcattcaacctacaggaatcctccacctgggcaattacctgggagccattgagagctgtgtgaggttacaggatgaatatgactctgtattatacagcattgttgacctccactccattactggcccccaagacccatctgtacttcggcagagcatcctggacatgactgctgatcttcttgcctgtggcatatacccggaaaaaagcatccttttccaacaatctcatgtgtctgaacacacacaattaacttggatcctttcctgcgtggacagactacctcgattacaacatttacatcagtggaaggcatagactaccacgcagaagc

SEQ ID NO: 20858 - DNA, 471 bp, Homo sapiens
  misc_feature (1)...(471): n = A,T,C or G
naactgagagcccactgaaaancctncgagagcacccctcactgcattcattaaggcagatctccggagacagaaagcaaacaaagaaactcttgagaacaaactccaagaggaggaggaggagagcaacaccagcaaagtgcccactgctgtgtcagaggatcatctctgagaggaaggtggtgacaactcatggaacacgaacaccccaccttttccttcagcacagctctcaccgccagcacaaagggcttcgctagagatgtttttggagggaatcagtgggactatttgtggcatggatggcctattcctcctagaacccacgtaagagcttggatgatttatttggagaaaattgcacctatcaccaaatgcaaatttgattcccacctccacccccttttaggttatgggagttggtgttgggacagggtggcagagaatattggagtcaatcctagcttggtc

SEQ ID NO: 20859 - DNA, 491 bp, Homo sapiens
  misc_feature (1)...(491): n = A,T,C or G
ggcagttacgggagggncnnaatgagacccactgagggtcntgcggaannncgcacgagcaacactggacagaaagttaaagccttggattctgtactcttcattcctgtaaaccttgggtaagtttcggaattctctgtgagcttcttaaagtttttgaaagcatgtaaccggataagtgtatttttacaatggaggagttacagtcatcttggtatttgtgggagattggttccaggatccccaagcataccaaaatccaaggatgctcaagtcccttatataaaatggtatagcatttgcatataacctacacacatcctcccatatacttttaatcacctctggattacctataatacctaatataatgtaaatgctatgtaaatagttatactgcattggttttttaatttatattttttgttattttttaaaatatatttttaatccatggttggttaaatctgtagatatagaaggccaactgt

SEQ ID NO: 20860 - DNA, 490 bp, Homo sapiens
  misc_feature (1)...(490): n = A,T,C or G
aggagtncccnaaggggncccccaatcgatcgcctgtggattcgcctcgagtgaagagtggcgggactggcttcacttcctccgcggttcctcggagccgcctcgctcctcttcagggactttgctgagaaaggctctcgggcgtccagaccccaccgcaaaggtgtttggcgatccgccgagaagttgttggccccaggagcatccctcggggccgaatgcgcagtggacgatgccccttctgacccaacagatccaagacgaggatgatcagtacagccttgtggccagccttgacaacgttaggaatctctccactatcttgaaagctattcatttccgagaacatgccacgtgtttcgcaactaaaaatggtatcaaagtaacagtggaaaatgcaaagtgtgtgcaagcaaatgcttttattcaagggcatggtatggtggctcacacctgtatttccagctgctcaggagaccgaggctgaagc

SEQ ID NO: 20861 - DNA, 475 bp, Homo sapiens
  misc_feature (1)...(475): n = A,T,C or G
cgatgcgagnnnnnaaactgatcgccactgagaacttttacgagcataagcggtcccggaagagctactggggacgcccagctacctaattcatgcgctgactcgtgagtcgtataactaatgaatggcgcgggccatacagcgtttcatatggctagaagccatccgcttaataatatgttcaaagataaaagcaggcatgattgtaatagtaactacagtcccagatgttgacagtatgtctgcaatttgagagtccttcaatccaatgacattctgtccattgatttcacagatgttatgttccgtgagaagaccatttctggctgcagagctatctttcactatggatgttatttttccatttttaaagataaaaccaacatgtccagtgctatccttatgcatggtaatcgtccgttcaaagggcctgtcacgaatggtcatggtaatcttctctccaaaagcctgtttg

SEQ ID NO: 20862 - DNA, 481 bp, Homo sapiens
  misc_feature (1)...(481): n = A,T,C or G
tgggccgnnntnnnattgacttgcctggctgcacgaattcggcacgagctcatgcaaaggaggggactttcggaaatccaaacttagagtgccttgtatttagaatccggaaggaaaaggaaatgaaatgtgaagaaactcatgcaccaaactcgaactggtaagaagactgttagaatgccctcggtaacacagaggctgagagatcctgacataaatccttgtttgtcggaatctgatgcttccaccagatgtctggatgaaaataactatgacagggaaaggtgttccacttacttcttgaggtacaaaaactgccggagattctggaattctatcgtgatgcagagaagaaagaacggagtgaagccatttatgcctacggcagcagaaagagatgaaatcttgagagcagtgggaaatatgccctattgaatgtttgcattaaaagtgtttatataaaaaaaaaaaaaaaaaacta

SEQ ID NO: 20863 - DNA, 496 bp, Homo sapiens
  misc_feature (1)...(496): n = A,T,C or G
nttgatcgcctgtggaatttggcacgaggtcctgggcaggaccggttctcagggacagtgcacgcaggtgcgcgtggaattcatggacgacacgagccgatccatcatccgcaatgtaaaaggccccgtgcgcgagggcgacgtgctcacccttttggagtcagagcgagaagcccggaggttgcgctgagcttggctgctcgctgggtcttggatgtcgggttcgaccacttggccgatgggaatggtctgtcacagtctgctcctttttttttgtccgccacacgtaactgagatgctcctttaaataaagcgtttgtgtttcaagtttnnaaaaaaaaaaaaaaaaaaaaaaaaaaccctggggggggggccgggcccccaattccccttataggggggggaataaaaatcccggggccggggttttacaacggggggaggtggggagagnntttnntttttnnnnnnnnntnnttntnntttttttgggggg

SEQ ID NO: 20864 - DNA, 486 bp, Homo sapiens
  misc_feature (1)...(486): n = A,T,C or G
cgcggcccccattgacgttctgtangcattcggcacgagctcaagccagccccctcctccagttcagtcaccctccctcacatccacccagagaggtccagacctgtggccacttccatgccctctccagaccaggagacacctgctgctgacctcgtggaaaacttagattttgacattctgatgcttcggaagtggtggctcctcctccctcacccctccgccacctgtgggcctcctctctgcatctcaagagaacaaccagatctttgggctcctggggtgtgtgccatgcaatttagacgaagtgctttgaaaatatgccattcagtctctgactaggaaaataagtctgacctgataggtctgatgtcatcagctcttcaacatgagacaaaagaggggattttatgttttgagtcattagaatgatataataattttctgaattgacatctggatgttgaaattaggatggtgcaaaag

SEQ ID NO: 20865 - DNA, 451 bp, Homo sapiens
ctttgccttcgctgcacgaattcggcacgagatgcggatgacctcagtgccaatgagcagcttgttggcccccatgcatccggcgtgaactccatcctgcccaaggagcatggcagccagtttttctacctgcccatcataaagcacagtgatgatgaggtttcagccacagcctcttgggattcctcggtgcatgattctgttcacttgaatagggtcacaccacagaatgaaaggatttacctaattgtgaaaaccacagttcaactcagccaccctgctgctatggagttagtattacgaaaacgaattgcagccaatatttacaacaaacagagtttcacgcagagtttgaagaggagaatatccctgaaaaatatattttattcctgtggtgtaacctatgaaatagtatccaatataccaaaggcaactgaggagatagaggacc

SEQ ID NO: 20866 - DNA, 454 bp, Homo sapiens
  misc_feature (1)...(454): n = A,T,C or G
ataagaccttcgccccccggctgcaggaattcggcacgagtaacattcaagcaatgatcatcaaagtagcagctttgggtttagatcctgataagcatcttgggaaaaccctggatcaaatggagccttatctcatagagctttctaagaagtatggagtacatgtttgtggagaaggtggagagtatgaaactttcactttggattgccctctatttaagaagaaaataattgtggattcatcagaagtagtcatacattcagctgatgcatttgcacctgtggcttatctacgctttttagaattgcacttggaggacaagtgtgatgcctaccaacatgttatgatgcagcaagaaggctctcaccagatggtggcatctttatagtggacttttcagcctccagaacttggcttgctctcctgagcagggacaggaattcctgtcctana

SEQ ID NO: 20867 - DNA, 483 bp, Homo sapiens
  misc_feature (1)...(483): n = A,T,C or G
aacaaatttgatggccgtnganantttgaccgcctgcagttgcaccctgcagcctagtcgacacagcgagactctgtctccagaagaaaaaaagaaagagttggatgcacctgaattcaacccctgcctcatccttctcccttgaaggccaaatacaccctgatacttttcaccaaagagtagaaacaacaccattcacttgaccccaaatgtgactttccacaggatgcaagcacagtgttggaatggccaatgacaatgacaatgaaagtgcaggctgagggtgatgaacaggacacactggagagcctgacattggcctagactatgggggtgtcttgatgcttcacaaagagcccaaggagcaccccaaagaggacactggagcacaggcccaaagggtgttcatatgccaggaaggccactaattttggaagtcagtgacattggtgcctgcttgagtcctgatcctacaaagagtga

SEQ ID NO: 20868 - DNA, 470 bp, Homo sapiens
  misc_feature (1)...(470): n = A,T,C or G
cggcgncnnnnnnnaatgacctctctgcaggcttcagagaatcatgtgtttttcatcgtgggaactacgtgaaggacctgagtcgccttgggcgggagctgagcaaagtgatcattgttgacaattcccctgcctcatacatcttccatcctgagaatgcagtgcctgtgcagtcctggttcgatgacatgacggacacggagctgctggacctcatccccttctttgagggcctgagccgggaggacgacgtgtacagcatgctgcacagactctgcaataggtagccctggcctctgcctgcctcccgcctgtgcactctggaacctctggcctcaggggacctgcctgtcctcagctccctgggagctgaaagtgaggatactccgtgctccaggccacagggtgaatgtggccatgcctacctgttttgtttttttaagaacagaaacaactattttaaaagaact

SEQ ID NO: 20869 - DNA, 473 bp, Homo sapiens
  misc_feature (1)...(473): n = A,T,C or G
nttcgatcgcctgtggaattcgtcgcgagccaacattatataattttaatttaatgtaatgtaaatctcatacttggtgatcagcacattcttatatcctgctctagcaatgagtacccatttgttacacttaccaaactctctaaaatcatatactgtgagtaagatttgaagccaggaataaaaggcagtctgaaagaaaacgtcctatacgatgcagttgtttggaaatggctgatttctgatatgaaacccaacttgatacactgtttggttctttgacttgggatctatctgaattgctttcactagtacacaaaaggttaagttaaaactactttaaacttgtatagcctgccatctgaggtgaattattttcaaaaaatactaaatctatgaactgagactagcaattagttggctgctccctaccatgattttacttttaatagcaatacagttatattggtgag

SEQ ID NO: 20870 - DNA, 475 bp, Homo sapiens
  misc_feature (1)...(475): n = A,T,C or G
ntttgaccccgctgcaggaattcggcacgagcatctatatggtgccatgacaatggtgtgaactactagattgtagagaactgtgaccgttgcggagaaaatggccagatgatgagctgcacatgtcttgggaacggtagaggagaattcaagtgtgaccctcatgaggcaacgtgttacgatgatgggaagacataccacgtaggagaacagtggcagaaggaatatctcggtgccatttgctcctgcacatgctttgtacgccatcggcgctggcgctgtgacaactgccgcagacctgggggtgaacccagtcccgaacgcgctactggccagtcctacaaccagaattctcagagataccatcagagaacaaacactaatggtaattgcccaattgagtgcttcatgcctttagatgtacaggctgacagagaagattcccgagagtaaatcatctttccaatccagaggg

SEQ ID NO: 20871 - DNA, 470 bp, Homo sapiens
  misc_feature (1)...(470): n = A,T,C or G
gatggttnnnnnnaaattgattttcatgcgcgaattccgcacgagtctacatcccgtcctttcgctatgaagagagcgacctggagcggggatacacggtgtttaagatagaagtgctaatgaatggaagaaaacattttgttgaaaagagatacagcgaatttcatgctttgcacaaaaagcttaagaaatgtataaaaactccagaaatcccttctaaacatgttaggaactgggtccccaaagtcttggaacagcgacgacaaggcttggaaacatacttacaggctgtcattttagaaaatgaagaacttcccaaactgtttcttgatttcctaaatgtgcgacacttgccctctctaccaaaggcagaaagttgtggatcttttgatgaaacagagtctgaagagtcaagcaaactgtcccaccagcctgtgctgctgttcctcagggatccatatgtcttgcct

SEQ ID NO: 20872 - DNA, 490 bp, Homo sapiens
  misc_feature (1)...(490): n = A,T,C or G
atttgacccgcgctgcaggaattcggcacgagctgcgccctagtgcccctgctgggcagtggcgttcccccccatcctcccgcgcccagcccctgctgctctgggcagacgatgctgaagatgctctcctttaagctgctgctgctggccgtggctctgggcttctttgaaggagatgctaagtttggggaaagaaacgaagggagcggagcaaggaggagaaggtgcctgaatgggaaccccccgaagcgcctgaaaaggagagacaggaggatgatgtcccagctggagctgctgagtgggggagagatgctgtgcggtggcttctaccctcggctgtcctgctgcctgcggagtgacagcccggggctagggcgcctggagaataagatattttctgttaccaacaacacagaatgtgggaagttactggaggaaatcaaatgtgcactntgctctccacattctcaaagcctgttccactcacctg

SEQ ID NO: 20873 - DNA, 452 bp, Homo sapiens
  misc_feature (1)...(452): n = A,T,C or G
cttttgcnccgcgctgcacgaattcggcacgagagacacagataccttccttgtgtgcaggacttctgcaatccagagaagattctaatcagagatcaagtacaaaggtggtacaacatcttggccctgcaactgatttttataagaaacttgcattagattgctcgggacagcaaactgcagtggatttgttccttttaagttcacagtattctgatcttgcttctctagcttgcatgtccaagtattctgcagggtgcatctattattatccatcattccactatactcacaatccttcacaagcagaaaagttacaaaaagacctaaaacggtatctcacaagaaaaattgggtttgaagctgttatgagaataaggtgtactaaaggtctttcaatgcacacttttcacggtaacttctttgtccgttctactgatttggtatccctt

SEQ ID NO: 20874 - DNA, 345 bp, Homo sapiens
  misc_feature (1)...(345): n = A,T,C or G
aattgaccacccctgcggnaannncttgaccccgcgctgcaggaattcggcacgaggcttaagctgtccagctaacggcatgcgggagaaaatctcacaatacccactgtggcgacaaggaacgcttggctggaacttgaagttatttcagtcatgtttgtctttggctccatgtttcaggatgcgtgtgaactcgatgtaattgaaattcccctttttatcaataggtgcttctctgtacagctcatccacttcctcatctgtaaaccgatcccccatggttgtcagcagctctctcaagtaatcttcctgtatggtgccagttgcttcttcatcaaagcggca

SEQ ID NO: 20875 - DNA, 469 bp, Homo sapiens
  misc_feature (1)...(469): n = A,T,C or G
gatgggannnnnaaattgacctccctgcacgaattccgcacgagagacgacgtgcagaaatggcacctcgaaaggggaaggaaaagaaggaagaacaggtcatcagcctcggacctcaggtggctgaaggagagaatgtatttggtgtctgccatatctttgcatccttcaatgacacttttgtccatgtcactgatctttctggcaaggaaaccatctgccgtgtgactggtgggatgaaggtaaaggcagaccgagatgaatcctcaccatatgctgctatgttggctgcccaggatgtggcccagaggtgcaaggagctgggtatcaccgccctacacatcaaactccgggccacaggaggaaataggaccaagacccctggacctggggcccagtcggccctcagagcccttgcccgctcgggtatgaagatcgggcggattgaggatgtcacccccatcccctn

SEQ ID NO: 20876 - DNA, 475 bp, Homo sapiens
  misc_feature (1)...(475): n = A,T,C or G
agagcggggnnnnaaaattgaaattcgatccgcgctgcacgaattcggcacgagcctgagcctctgctgcccacttgtggccctgtcctcctgcaacattatcctatgtatcggagaagtgctgctaactggtctggggaagacgctgctcctgctgaggaaagggacatcccatttaaggagaactatgacgtgctttcacgggaggcatcacaaaagctgctgtggtggctccagccgcgcctggttctcagtggccacacgcacagcgcctgcgaggtgcaccacgggggccgagtccccgagctcagcgtcccatctttcagttggaggaacagaaacaaccccagtttcatcatgggtagcatcacgcccacagactacaccctctccaagtgctacctcccacgtgaggatgtggttttgatcatctactgtggagtggtgggcttccttgtggacctcacactcactc

SEQ ID NO: 20877 - DNA, 488 bp, Homo sapiens
  misc_feature (1)...(488): n = A,T,C or G
aattgacnngccctngttganccgcgctgcaggaattcggcacgagcccacgtcagagactgtgctcactgtggctgcatttggtgttatcagcttcattgtcatcctggtggttgtggtgatcatcctagttggtgtggtcagcctgaggttcaagtgtcggaagagcaaggagtctgaagatccccagaaacctgggagttcagggctgtctgaaagctgctccacagccaatggagagaaagacagcatcacccttatctccatgaagaacatcaacatgaataatggcaaacaaagtctctcagcagagaaggttctttaaaagcaactttgggtccccatgagtccaaggatgatgcagctgccctgtgactacaaggaggaagagatggaattagtagaggcaatgaaccacatgtaaattattttattgtttcatgtctgcttctagatctaaaggacactagcattgccccagatctggg

SEQ ID NO: 20878 - DNA, 506 bp, Homo sapiens
  misc_feature (1)...(506): n = A,T,C or G
tggtagataaccaagaananaagnaaatttgatcgccttacgaaantttcgatagccttcggaattcggcacgagagaaggggaagatggcggnggccagggccggggncttgggagtcttttggctgcaaagggcattccggaacgtgatgccgctgggcgcacggacagcctcccacatgaccaaggacatgttcccggggccctatcctaagaccccagaagaacgggccgccgccgccaagaagtataatatgcgtgtggaagactacgaaccttacccggatgatggcatggggtatggcgactacccgaagctccctgaccgctcacagcatgagagagatccatggtatagctgggaccagccgggcctgatgttgaactggggtgaaccgatgcactggcacctagacatgtacaacaggaaccgtgtggatacatcccccacacctgtttcttggcatgtcatgtgtatgcagctcttcggtttcctggctttcatg

SEQ ID NO: 20879 - DNA, 461 bp, Homo sapiens
  misc_feature (1)...(461): n = A,T,C or G
ctcgacccccgccgtttcccccgcgctgcaggaattcggcacgagcggcacgaggaattcttccctgatgcagtacttattatgttggataatcagaaactggtgcctcagcctcgtgtgcccccggtcatcgtcctggagaaccaaggtctccgctgggtccctaaggataagaacttagtgatgtggagggactgggaagagtcacggcagatggtgggagctctactggaagatcgggcccaccagcaccttgtggactttgactgccaccttgatgacatccggcaggactggaccaaccagcggctcaacactcaaatcacccagtgggttggtcccactaatggaaatggaaatgcctgagccagggccagcggggcccggttccaataaagagacttgggctgnnnnnnnnnnnnnnnnnnnnnnnnnnnnnnnnnnnnnnnaaaaaaacctgg

SEQ ID NO: 20880 - DNA, 482 bp, Homo sapiens
  misc_feature (1)...(482): n = A,T,C or G
aattgaccgccctggttagacggccctagccatgagcagcaaagtctctcgcgacaccctgtacgaggcggtgcgggaagtcctgcacgggaaccagcgcaagcgccgcaagttcctggagacggtggagttgcagatcagcttgaagaactatgatccccagaaggacaagcgcttctcgggcaccgtcaggcttaagtccactccccgccctaagttctctgtgtgtgtcctgggggaccagcagcactgtgacgaggctaaggccgtggatatcccccacatggacatcgaggcgctgaaaaaactcaacaagaataaaaaactggtcaagaagctggccaagaagtatgatgcgtttttggcctcagagtctctgatcaagcagattccacgaatcctcggcccaggtttaaataaggcaggaaagttcccttccctgctcacacacaacgaanacatggtggccaaagtggatgagg

SEQ ID NO: 20881 - DNA, 493 bp, Homo sapiens
  misc_feature (1)...(493): n = A,T,C or G
tggggnnnnnggcggggnnnaattgaccttcatcggctgcangattcggcacgagccttgttgacgctctgcaaaagtttgcagatgacatgtacagtctttatggtgggaatgcagtggtagagttagtcactgtcaagtcatttgacacctccctcattaggaagacaaggactatccttgaggcaaaacaagcgaagaacccagcaagtccctataaccttgcatataagtataattttgaatattccgtggttttcaacatggtactttggataatgatcgccttggccttggctgtgattatcacctcttacaatatttggaacatggatcctggatatgatagcatcatttataggatgacaaaccagaagattcgaatggattgaatgttacctgtgccagaattagaaaagggggttggaaattggctgttttgttaaaatatatcttttagtgtgctttaaagtagatagtatactttacattt

SEQ ID NO: 20882 - DNA, 521 bp, Homo sapiens
cccccccccccccccccccccccccattagccccgccatgtgacccgcgctgcacgaattcggcacgagctttgtttgtgttgggaccaaggcaaaaggagtacctcatgcatgggttatgacttgtggaactgatggggccatcactttttgggagagtttaacaggacacaggtacatccataaacctaccaatcctgatgaacctccagttgctgaacagcccaaaccactgtacccatatcgaacaattggttgtgttttcaaccatcagatgttcctgggaaattgtcaaccctctgatgcagtagaaacctgtgtatttgatttgaacgatgaatccaaatggaaacccatgagtgaggaagcaattaaatctgtgtgtgctcctggagctacaacatcccttcctccctttccacctctgtgtgcatccacaattgacgcgtcagtaacaagtaatgaaattgaaatgcagctgaggctcctggtgtcagaacacaggaaggatcttggcctca

SEQ ID NO: 20883 - DNA, 490 bp, Homo sapiens
ctttgccccgcctgcaggaattcggcacgagcctgaggttttctttacctctgggggctattttatgccggctctctcctgagtgtcacacatctggtcctcaggaaacattctcacatccctggcctgaaaaaaacaatttcagggagatcgcatggcagcagccctctctgggctccccagctaaatggttgtacgaaacacatttcaaagctctctgaagggcttccttgaagttcctttcactggtttcaaagtagaaggtagtaactcctttgtccaagaaggctgaattgagcacttaacaattctccaaagaaatttcttcattggtctctatcctagaccccttctgtatccttgatatggctgaggattctaaaaaatgaccagtcttacatgggagggctgggatataaaaaataaaataataaataatgataaaaactgaaaactgaccacgttcttggatatgttttctttgggttgg

SEQ ID NO: 20884 - DNA, 511 bp, Homo sapiens
  misc_feature (1)...(511): n = A,T,C or G
cccccccccccccccccccccattgccccgcctgcacgaattcggcacgagctggattgagaattatagaaatttattagatgcctggaggttttggcataaacgagctgaatttgatattcacaggagtaagttggatcccagttccaagcctttagcacaagtttttgtgagttgcaatttctgtggcaagtcaatctcctacagctgttcagctgtgcctcatcagggcagaggttttagtcagtatggtgtgagtggctcaccaacgaaatctaaagtcacaagttgtcctggctgtcgaaaaccacttcctcgatgtgcgctttgtctcattaatatgggaacaccagtttctagctgtcctggaggaaccaaatcagatgaaaaagtggacttgagcaaggacaaaaaattagcccaatttaacaactggtttacatgggtcataattgcaggcacggtggacatgctggacatatgctttattggttcanggaccatgcagagt

SEQ ID NO: 20885 - DNA, 488 bp, Homo sapiens
  misc_feature (1)...(488): n = A,T,C or G
agcgtngtnnnaattgacctgcttgaggcattcggcacgagactgcccatcccctaaagccaacagagatttgtagatttaaagggatcacatttgaagacaatagtgtttaagaaagcaagcaagtcccttagcagtcaggtcataacagggcacatttctgaccgaaccctctcaaggcagaggaggagtttggtgggtttcatacaccctgcagattcctgttggctctaaccctcaattacctaatcttatgctttaacacataactgcattggatgtgagagtaacgtaccgtatggtcattgttctatatattaacattgaacactgctgcgattgctcaaggacattttatgttacggctttaaagcaaaggcatgattattagaaactatttaagcttttttctttgaaaaacaagctccttttacagaatataaacaacagtagtgcctgtggtttagcccaccaatcttgatgactaa

SEQ ID NO: 20886 - DNA, 338 bp, Homo sapiens
aatcgacggctgtaagtatacggcatgagcccagctgggcatttcacctgctgtcactgactttgtgcaggccaaggacctggcagggccagacgctgtaccatcacccaggccagggatgggggtgggggtccctgagctcatgtggtgccccctttccttgtctgagtggctgaggctgatacccctgacctatctgcagtcccccagcacacaaggaagaccagatgtagctacaggatgatgaaacatggtttcaaacgagttctttcttgttactttttaaaatttcttttttataaattaatattttattgttggaaaaaaaaaaaaaaaaa

SEQ ID NO: 20887 - DNA, 476 bp, Homo sapiens
  misc_feature (1)...(476): n = A,T,C or G
attcgacncgcctgtctgaattcggcacgagccgaggagaacgcggngagcgaactcttgctgcagagtttcaagcgccgcttcctggcagcgcgcgccctgcgctccttccgctggcagagcttagaagcaaagttaagagactcatcagattctgagctgctgcgggatattttgcagaagacgtgctgtattgcccagaagccatcgtgtcgctggtcggggtcctgcggaggctggctgcctgccgggagcaccagcgggctcctcaattctacatggcccttaccgtctgcaacccagagatgtgccagctgttcaccaccgagctatgctggactgggatcagatgggaagcggaagctcatcatgaccagaaactgtttccctacagagagcacttggagatggcaaagctgaacctcacactgtaggactcacacatgactccaacgggattgtgagaattaagtcac

SEQ ID NO: 20888 - DNA, 490 bp, Homo sapiens
  misc_feature (1)...(490): n = A,T,C or G
agtggngnnnttttgccatcgctcccctgcangaattcggcacgagaganaatgaagaattgcaccaagagttaaataagagtagtgctgttaccagtgaggaatggcgtcagcttcagactcaagcaaaactggttttagaggaaaacaagttgttgctggagcagttggagattcagcaaaggaaagccaaggacagccaccaggagcgcctccaagaagtttctaagctgactaaacaactaatgctcctggaggcaaaaacccacggccaggaaaaggagctggcggagaacagggaacagctggagattttacgtgccaaatgccaagaactcaaaacacactcggatggcaaaatcgcagtggaagttcataaatcaattgtgaatgaattaaaaagccaattacagaaggaagaagagaaagaaagggctgagatggaggagttgatggagaagctgacagtcctgcaagcgcagaagaagag

SEQ ID NO: 20889 - DNA, 488 bp, Homo sapiens
  misc_feature (1)...(488): n = A,T,C or G
agcgtgtnnnaattgacattcgtgcagccacgtgcccacttctgctgggcctttagccctagaacctgcaggtggtgggggcggctaccaagaaggaacagaggtctctggggaggagtctgggtggtccagccctgatgattggccccacctcctgctgccccataaccctctcttcatttcggctttttcatttaccctcatttagagccatttgcagagatttagaaagatttacagtaacgaatggattcctatataaagattatttttatactttttgcagcaaaaggaaattgtaatatttgtacagtgttcaagtgaataaaaaccatgcctaaggctaaaaaacaagaatataagaatataaataaattcttcgggggggggcccggcccccattcccccttatgggggggggttttaaatttcctgggcgggggtttaaaaacggggggaggggggagaaaanggcntggctcatacac

SEQ ID NO: 20890 - DNA, 449 bp, Homo sapiens
cattgacccgcgctgcatggattccgcacgaggacacagtccacatgctgttggagtggctttctgaagcagagcaaacgcttcgctttcggggagcacttcctgatgacacagaggccctgcagtctctcattgacacccataaggaattcatgaagaaagtagaagaaaagcgagtggacgttaactcagcagtagccatgggagaagtcatcctggctgtctgccaccccgattgcatcacaaccatcaaacactggatcaccatcatccgagctcgcttcgaggaggtcctgacatgggctaagcagcaccagcagcgtcttgaaacggccttgtcagaactggtggctaatgctgagctcctggaagaacttctggcatggatccagtgggctgagaccaccctcattcagcgggatcaggagccaatcccgcagaacattgac

SEQ ID NO: 20891 - DNA, 496 bp, Homo sapiens
  misc_feature (1)...(496): n = A,T,C or G
gccatttgggaaaaagaagnannnnnanaannaattgcnccgcctgcangaattcggcacgagccttagggatggtatctgaaacaacaatggtcaccctcttgagattcgttttaagtgtaattccataatgagcagaggtgtacgcgaaattgtgttatgactgatagccttcagctacaaaaagataggactgacctggtttaaagtgttctattttgtaaatcattccatttgagtctttctgatgaacttggctatactgaaatctgttattttagtgaggctccaaaatgagcaaagctaggcctgattagagtagagtgactattaaaaaacataactttctaggagctataaatcaaagttttaaaaagatgtttggatatatttgagtattccgatcatgaaaacagaaattgccctgcctactacaaggacagactgatgggaaattatgcacctggtcaacttagcttttaagcagacgatgctg

SEQ ID NO: 20892 - DNA, 519 bp, Homo sapiens
cgccccccccgccccccccccccatcgccccgcatgtgcgccggctgcaggaattcggcacgagagacagcggaactaagaaaagaagaggcctgtggacagaacaatcatgtctgactccctggtggtgtgcgaggtagacccagagctaacagaaaagctgaggaaattccgcttccgaaaagagacagacaatgcagccatcataatgaaggtggacaaagaccggcagatggtggtgctggaggaagaatttcagaacatttccccagaggagctcaaaatggagttgccggagagacagcccaggttcgtggtttacagctacaagtacgtgcatgacgatggccgagtgtcctaccctttgtgtttcatcttctccagccctgtgggctgcaagccggaacaacagatgatgtatgcagggagtaaaaacaggctggtgcagacagcagagctcacaaaggtgttcgaaatccgcaccactgatgacctcactgaggcctggctccaagaaaa

SEQ ID NO: 20893 - DNA, 506 bp, Homo sapiens
  misc_feature (1)...(506): n = A,T,C or G
gaggggnnnnnnnnnncgnnnnnnnnnnnnccttgcccgtcgtgcaggacttcggcacgaggtaaaggccgagaagcaatggaatgggtaatacataaattaaatgctgagattgaagaactgacagcctcagcaagaggaaccataaggactccaatggcagcagcagcgtttgcagagaagtgatcgtgacagttggtagacaacatcgggtactccaggtctctccaaactgactatatatttatttgttattttaaaaatacaactatattttgggtagttttttttttttttttttttgaaaaagtgggggtagggttttgtaactggttcaaaaaaaaggcggggcctttaattaaaggggattttttgaaaaaaaaaacatacaaaataaaaaaaatttccggggggggggcccggcccccaattccccttttgggggggggtttaaaaattctgggggcgggtttttaaaaggggggaggggggggaagggngnnccc

SEQ ID NO: 20894 - DNA, 491 bp, Homo sapiens
  misc_feature (1)...(491): n = A,T,C or G
aatagaacnccnntggnnnnnnnattgaccccgcgctgcaggaattcggcacgagcacacttcatggagccggtggaagccccgtccctcatgagttgggactggagccgcaaaccgctgctgcagacccaggccttctgctctatggagcaggcaggagccccaccctcttgggcagggctacagccacccaaactgcagctgtggatccgagcctctctgctcctgggggagccgggaacaggcagaatttgcccttccagatgcagctgcagccgcgcaggcaggagccagggacaagtgggagccctgcctcttccaagttggcggggtgggagctcccaggtgcanctnnngctgcccccccaggcacaggacgagggcatctctgcagcctgcaccatcggccatcccaggaaggacagcccccttcaccctccatccctgcaggctcaggggtgtctgcttccactggctggcctctctccact

SEQ ID NO: 20895 - DNA, 434 bp, Homo sapiens
  misc_feature (1)...(434): n = A,T,C or G
ntttccccctctccgccgcactgcaggaattcggcacgagcttacgaggcacagtggagcatctcttaagaccgccagacacacgaacaaacttacagaacatctgggagaatatccaacggaaaatcgcttggctaatacctgacacttttaacagcgaacagcgctctgagtgcgtacgagcagcccgcgaagacattgaatgtcgaatgtgactgactagcagcttcattttgaatgagggtcgctgcctgcccattgatagaggccagattgtcttggaagttccacagctgcaacgatttctggctagtgccacgaggtttacttgactgctgtgtgaaaagctgataagaaaaccatccagaaaaaagctcttcgttttacaaacatgaaaataaaacatgtaattttgaaaaaaaaaaaaaaaaaaa

SEQ ID NO: 20896 - DNA, 514 bp, Homo sapiens
  misc_feature (1)...(514): n = A,T,C or G
gagtnnnncnnnnngnagnngnnnnnnnnnnaattggaccgattgacccgccctgcaggaaatccgcacgagcttaatgcactgataacctcactctcgtcattggtgtctagcagctcactaccaaagcctgacaagttgatgccactgctgactgagggctcctccggctcaacaggcagataagtgcttgtgaaattcttccgagcttgtaacgtattcctgaatgctccttacggactacctacagattcttcttcagctgtcaaaaaagagactgcggtgctcatgaaagatgatgggatgggatgcatcagtccatagctgtacaccccagtcacacagagtaggagtcagcaaacatttgagtgccattcagagaggagacacacacacccaatcctaaacctatgaaatggcggcaacaaaaggagaaaatatatcttttgaaaacacggccatgtacttggaacattccatagagtgacatagagtaactctgcttaagattatt

SEQ ID NO: 20897 - DNA, 472 bp, Homo sapiens
  misc_feature (1)...(472): n = A,T,C or G
ntttgcccctggctgccggactgcaggaacgagacacgagatgacgagggctccacggccctcatgtgtgccagcgagcacgggcacgtggagattgtcaagctgctgctggcccagcccggctgcaacggtcacctagaggacaacgatggcagcactgcgctctcaatcgccctggaagcaggacacaaggacatcgctgttcttctgtatgcccatgtcaactttgcaaaagcccagtctccgggcacccctaggcttggaaggaagacgtctcctggccccacccaccgaggttcatttgattgattgtatgcaaatagccctttatttacatgccactattaagctgctaattgttcctgttggggtgacagatactgaatgtatacgtattgtgcctgagctcaccagcaaacagaagcatcaagcccaggggtaaaggctgaagctttcacagtgcagagactgc

SEQ ID NO: 20898 - DNA, 473 bp, Homo sapiens
  misc_feature (1)...(473): n = A,T,C or G
tgaggggacactgcctgcgactgacgaattcggcacgaggtgctccttccgggtggccccgaggtaatggaacttaatcgatctgagagtttatgtcatgaaaactcattcttcatcaatgaagctttagtacaaatgtcatttaacactttcaacaaactgaatccatcagttatccatcaggatgccacttaccctacaactcaatctcattctgacttggtgaggactagtgaacatcaagtagacctcaaggtggacccttctcagccttcgaatgtcagtcacaaactgtggacagccgctggttccggccatcagatacttcctttccaagaaagcagcaaggattcttgtaaaaatggtaattaacactttaaacatcatctgtatagtttgaacaagaagttgtccctctgaatggttggctcttgtgtagagtgaatcaaagtcctccctagcatgggaataan

SEQ ID NO: 20899 - DNA, 496 bp, Homo sapiens
  misc_feature (1)...(496): n = A,T,C or G
ngagggttttganattcgcatncgcctgcaggaattcggcacgagtcatagggaaatacgtctgagtttttctgatacctatcaggattatgaggagtactggagagcttactacagggcatggcaagaatattatgctgccgcttctcattcatattattggaatgctcagagacatccaagttggatggcagcttatcacatgaataccatttatctacaagaaatgatgcatagtaaccagtgattataggatatacctgagaccatcaggaactgtcaacaaatgatacctttggatatccatcctcctcgacttatagtacagtggtgtatagtggcatttctgataaacttgaaaagacttgagtctttccactgggacacatccatttttcagattgttttgatttaggccaggtatattatcttcatttttaagagtttctttaagaaacttcatcagattgttgaaagataatttttgggacataga

SEQ ID NO: 20900 - DNA, 507 bp, Homo sapiens
  misc_feature (1)...(507): n = A,T,C or G
tgcggncttttcctcgaattctgtggcattcggcacgagggagaccaaggtgggtggatcacttgaggtcaggagcaagactagcctggccaatgtggcaaaaccccatctctactaaaaacaaaaattancaaggtgtcatggcaggtgcctgtaatcccagctacttggggagctgaggcaggagaatcgcttgaacctgggaggcggagattgcagtgagccgagatcgtgccactgcactccagcctgggcgaaagagcgagactcagtctcaaaaaataataataaataaaattaacaattaaagaatgctaatctagagggttcaaggaaaaatactttatggaaggattgttttaaacataaagcctgggcatagtggctcaaacctataatctcggtacgttggctggccaagataggaggatagctggagtccaggagttcaaggccgaactatacaacttagaccccgactccaccccctcaaaaaaaaaaaaaaaa

SEQ ID NO: 20901 - DNA, 514 bp, Homo sapiens
  misc_feature (1)...(514): n = A,T,C or G
nggtggggnnnnnatttcctcgcctgcacgaattcggcacgagctgctgcaggccgagaagcgggcagccgagaaggtgtccgaggcccgcaaaagaaagaaccggaggctgaagcaggccaaagaagaagctcaggctgaaattgaacagtaccgcctgcagagggagaaagaattcaaggccaaggaagctgcggcattgggatcccgtggcagttgcagcactgaagtggagaaggagacccaggagaagatgaccatcctccagacatacttccggcagaacagggatgaagtcttggacaacctcttggcttttgtctgtgacattcggccagaaatccatgaaaactaccgcataaatggatagaagagagaagcacctgtgctgtggagtggcattttagatgccctcacgaatatgaagcttagcacagctctagttacattcttatgatatggcattaaattatttccatatattatataataggtncttccactttttggagaa

SEQ ID NO: 20902 - DNA, 491 bp, Homo sapiens
  misc_feature (1)...(491): n = A,T,C or G
gaggnttttgaacgtctgaggcattcggcacgaggaggaactccgcagctcgtcgacacgtctcgtctcctgtcccaattcagggcttggtgaggtgactcgcggtcgcgggtgactcgccggcaggacactgcctggaacgcctggagcgcctcccactgcagacgtctgtccgcctccagccgctctcctctgacgggtcctgcctcagttggcggaatggcggccacgggagccaatgcagagaaagctgaaagtcacaagtctggagcccggcactgtggtcataacagagcaggcagtggatacctgcttcaaggcagagtttgagcagattgtcctggggaagcgggtcatccggaaaacggaccttaacaagaagctggtgcaggagctgttgctgtgttctgcagagctgagcgagttcaccacagtggtggggaacaccatgtgcaccttggacttctatgaagggcaaggccgtctggatn

SEQ ID NO: 20903 - DNA, 491 bp, Homo sapiens
  misc_feature (1)...(491): n = A,T,C or G
ngcgggattgacgtcgataggctttatcgatgnagaacagggcttctgaggcagcggttggccaactatagcccaaaggccaaatttggacttctttttataaatgcagattgtctatggctgctttcccactactccagcctaaggtaaacagctgcaatagaagccaaatgagaatcgcaaagcccaaaatgtttattaacctgccctttacacaaaatcacacaaaaagtttcctgatctctgttctaagaaaaggagtgtgccttgcatttaaaaggaaatgttggtttctagggaagggaggaggctaaataattgatacggaattttcctcttttgtcttcttttttctcacttaagaatccgatactggaagactgatttagaaaagtttttaacatgacattaaatgtgaaattttaaaaattgaaaagccataaatcatctgttttaaatagttacatgagaaaatgatcactagaataacn

SEQ ID NO: 20904 - DNA, 533 bp, Homo sapiens
  misc_feature (1)...(533): n = A,T,C or G
nggagattcccggctgagaattggcaccaggttgagtggcagattggactgctaagacagatgaggtgagccattaccttcaaggccaaacgaagttctcattctggggtccatgtattccatagaactcaagggattggtgaactttgagaaacatattataacttcactttaacgtttcactgaaaatgggtattttcttccattatgaacacaagcaacaaaccacagtactgttagcagtacttgtgactttgtcatcaacagatctaagtacatattttcaaattacctaaaaattgctgggaatttcttggccgggagcaatggctcacgcctgtaatcccagcactttggtaggccaaggcaggcggatcacgaggtcaggagatcgagaccatcctgagtaacacagtgaaaccctgtctctgctaaaaatacaaaaaattagcttggcgtggtggcgggcgcctgtagtcccangctactcggaggctgangcaggagaaatggcgtgacccangangcngacn

SEQ ID NO: 20905 - DNA, 511 bp, Homo sapiens
  misc_feature (1)...(511): n = A,T,C or G
aggaganttttgacgccttaaatcgaccgccttcggaattcggcacgaggaaataatctgtcctctgtcgccgggaactggcgaggtagttccttcgcggtggagagacctggaatggccaaatatcaaggtgaagttcaaagtttgaaactggatgatgattcagttatagaaggagtaagcgaccaagtacttgtggcagttgtggtcagtttcgctttgattgctaccctggtatatgcacttttcagaaatgtacatcaaaacattcacccagaaaaccaggagctagtaagggtacttcgagaacagcttcaaacagaacaggatgcacctgctgccactcgacagcagttctacactgacatgtactgtcccatctgcctgcaccaagcctccttcccggtggagaccaactgtggacatcttttttgtggtaaccttactcctaacagtatttggtgaagatgatcagtctcaggatgttctgagattgcatcaggatattaat

SEQ ID NO: 20906 - DNA, 484 bp, Homo sapiens
  misc_feature (1)...(484): n = A,T,C or G
attagacaagccatagaaaaaanntttgaccccgcgctgcaggaattcggcacgagaacatttagatgtttagtccaactgaaatttgttttcttttatggcatgattttggaatcttgttttaattatttttacatatttatagctgttcctccaagtatcaatttttcaagtgcaacatctgtcatgcagttactatgtaagggccagattctgacctttctgttctttttatctgaaggaaatttgaacatgccacccccaaatatgccgatttggcatactgattattttgagctaaaggtgcttgactaacagtagatgcagaaatggctattttaactgtcctttcctacctgtagcaagccatacaaacttctttgataaagatgctttcctgataccaagatgagaagatggctctaatcagctgagacagcaccagaggaatctacaaacaagaaactattagtttcttaacata

SEQ ID NO: 20907 - DNA, 484 bp, Homo sapiens
ctggcccgcctgcaggaattctgcacgagctgacattgcccaaggttgaagcaatgaataaaagactgggctccttggtggatgagtttaaggagcttgtttacccaccagattacaatcctgaagggaaagttaccaagagaaaacacgataatgaaggttctggaagcaaaaggcccaaggtggagtattcagaagaggagctgaagacccacatcagcaagggtacgctgggcaagttcactgtgcccatgctgaaagaggcctgccgggcttacgggctgaagagtgggctgaagaagcaggagctgctggaagccctcaccaagcacttccaggactggaccagaggccggcgtccagctgcccttccgcagtgtggccaggctgcctggccttgtcctcagccagttaaaatgtgtttctcctgagctaggaagagtctacccgacataagtcgagggaacttatgtttttgaggctt

SEQ ID NO: 20908 - DNA, 472 bp, Homo sapiens
  misc_feature (1)...(472): n = A,T,C or G
agagtaacatgaatgcactgacgatttccgcacgagaataactgtggcatcgagatatactaccaaacagacatgcaaagcacctcagagaatatgtttctggagctcttctgtcagattatctcggaaccttgcttcaacaccctgcgcaccaaggagcagttgggctatatcgtcttcagcgggccacgtcgagctaatggcatacagggcttgagattcatcatccagtcagaaaagccacctcactacctagaaagcagagtggaagctttcttaattaccatggaaaagtccatagaggacatgacagaagaggccttccaaaaacacattcaggcattagcaattcgtcgactagacaaaccaaagaagctatctgctgagtgtgctaaatactggggagaaatcatctcccagcaatataattttgacagagataacactgaggttgcatatttaaagacacttn

SEQ ID NO: 20909 - DNA, 471 bp, Homo sapiens
  misc_feature (1)...(471): n = A,T,C or G
ntttgccccgtcctgcaggaattcggcacgagccgccatcttccagtaattcgccaaaatgacgaacacaaagggaaagaggagaggcacccgatatatgttctctaggccttttagaaaacatggagttgttcctttggccacatatatgcgaatctataagaaaggtgatattgtagacatcaagggaatgggtactgttcaaaaaggaatgccccacaagtgttaccatggcaaaactggaagagtctacaatgttacccagcatgctgttggcattgttgtaaacaaacaagttaagggcaagattcttgccaagagaattaatgtgcgtattgagcacattaagcactctaagagccgagatagcttcctgaaacgtgtgaaggaaaatgatcagaaaaagaaagaagccaaagagaaaggtacctgggttcaactaaagcgccagcctgctccacccagagaagc

SEQ ID NO: 20910 - DNA, 487 bp, Homo sapiens
  misc_feature (1)...(487): n = A,T,C or G
ccccctagcccgcctgcggaanatagacccgcctgcaggaattcggcacgaggaacaaagctttaaagtgaataaggacagcagtgaagggcaagtcaaggatagatacttcacaagccaactgaatgaagaccatggattcgttagctctgagccgtttaacatttcatattatacttagcaggaatgtatgacaatattactttgattttttgctggtcccgcttaattactgcatccagttgcttccttttttcattttcttcttgtagctttctttgtagctgtatcttttgatatttcatgtgatctacactctgctctagttcattagcacgtttctcattttggattgacagtgatgccacgttcttactatcttggtgcttcttctgtaagacctgaactctcagctttgcagcatccacctttttacgaaactctttctgaattttaccttcattgcaacatcagaaagatctttgtt

SEQ ID NO: 20911 - DNA, 468 bp, Homo sapiens
  misc_feature (1)...(468): n = A,T,C or G
ntttgccccgcgctgcaggaattcggcacgagggaagttctgacttttagggctaccttatttctactaaggacccagagcaggcctgtccatgccattccttcgcacagatgaaactgagctgggactggaaaggacagcccttgacctgggttctgggtataatttgcacttttgagactggtagctaaccatcttatgagtgccaatgtgtcatttagtaaaacttaaatagaaacaaggtccttcaaatgttcctttggccaaaagctgaagggagttactgagaaaatagttaacaattactgtcaggtgtcatcactgttcaaaaggtaagcacatttagaattttgttcttgacagttaactgactaatcttacttccacaaaatatgtgaatttgctgcttctgagaggcaatgtgaaagaaggagtattactcttatgtacaaagttatttatttatag

SEQ ID NO: 20912 - DNA, 222 bp, Homo sapiens
atttgcccgcctgcaggaattcggtacgagagcccccgcacccccaccccctgcccagagcaacagcctaaaggcctgccctgatgctctcctcctaccagagtgaagcccacagagtccctccacctccacaccaggccctctctccagttttatcccctgcctaatgctgcgagaagcacagaataaactttttgtcactctaaaaaaaaaaaaaaaaaa

SEQ ID NO: 20913 - DNA, 464 bp, Homo sapiens
  misc_feature (1)...(464): n = A,T,C or G
tttgcccgcctgcaggaaannttctccaccgcgctgcaggattcggcacgagcttccccagctttttgcctgatgccattttattgacagacaatggactttgaagtcagcctttgcctttgagaaagttcaagaactatggttggtcacgtctatctacaacctaatcctactctttggtagtctctgcagcagccacagccttagcagagctggggttcctgtcttctgcacacgattgactttcttgatgggtaattttttttaagattataccaacagtggatcagctgggttttggccaggaagttgtctttgtggactctgcctgcatggcttagtagtagaaggaaatttttttttgggtttgttttttataattcagtttaatcaataaacatgtatttattgactgttaaaaaaaaaaaaaaaaaactcgggggggggcccgggacccaattccg

SEQ ID NO: 20914 - DNA, 482 bp, Homo sapiens
  misc_feature (1)...(482): n = A,T,C or G
ctagcccgcctgcaggaattctgcacgagcttatttccgtggtccggacagtgcgtggcggcgcgggtgaccacgggagaagtaggcataatggttatgaaagcttctgtagatgatgacgattcaggatgggagctcagtatgccagaaaaaatggagaaaagcaatacaaactgggtggacattacccaagattttgaagaagcttgtcgagaattaaagttgggagaactacttcatgataagctatttggtctttttgaagccatgtctgctattgaaatgatggatcccaagatggatgctggcatgattggaaaccaagttaatcgaaaagttctcaattttgaacaagctatcaaggatggcactattaaaattaaagatctcaccttgcctgaactgatagggattatggatacatgtttttgctgtttgataacgtggttagaaggccattcactggcacagacagtatttan

SEQ ID NO: 20915 - DNA, 326 bp, Homo sapiens
  misc_feature (1)...(326): n = A,T,C or G
acctccnnnnactncttcaccgattacatgagatcaatcacagggaaacttgaagaacagacaccagactgagtactaccttttatgacaagtgctgcagaacacatcaagcacatacttgctaatttcaaaaactaccaattctttattgttgaaaacatgaatccacatcgcatggttgctctattggactaccgtgaggatggtgtgaccccatatatgattttctttaaggatggattacaaatggaaaaatgttaacacacgtgccaattattttggatctatcacctgccatcataactggcttctgcttgtcatacacn

SEQ ID NO: 20916 - DNA, 467 bp, Homo sapiens
  misc_feature (1)...(467): n = A,T,C or G
atcgatacgccctgagannactgatgcgcctgcaggaattncgcacgaggttactataataaaactataatattgatgtcaggaatcaggaaaaaatttgagttggcttaaatcatctcagtccttatggcagttttattttcctgtagttggaactactaaaatttaggaaaatgctaagttcaagtttcgtaatgctttgaagtatttttatgctctgaatgtttaaatgttctcatcagtttcttgccatgttgttaactatacaacctggctaaagatgaatatttttctactggtattttaatttttgacctaaatgtttaagcattcggaatgagaaaactatacagatttgagaaatgatgctaaatttatagttttcagtaacttaaaaagctaacatgagagcatgccaaaatttgctaagtcttacaaagatcaagggctgtccgcaacagggaaga

SEQ ID NO: 20917 - DNA, 492 bp, Homo sapiens
  misc_feature (1)...(492): n = A,T,C or G
ggagtcccnnnagtagntnnnttcctgaccgcgcttctgaattccgctcgagacaatattggacatctctcatcttatacattactatttagctgatcggctctcacatatacttctaaaagaaacttttatgttataagagttactttttggataagatttattaatctcagctacctactattctgacattttatgaaggaggtaattgtttttaatgatggataaacttgtgctggtgttttggatcttatgatgctgagcatgttctgcactggtgctaatgtctaatataattgtatatttacacacatacgtgctacccagagattaatttagtccatatgaactattgacccattgttcattgagacagcaacatacgcactcctaaatcagtgtgtttagacttttcaagtatgtaactcatttccaaacatgtaccatgttttataaacctcttgatttccagcaacatactatagaaaacac

SEQ ID NO: 20918 - DNA, 482 bp, Homo sapiens
  misc_feature (1)...(482): n = A,T,C or G
ggaggccnnnaggagnnnnttctgaccgccttttgattccgtgcaggcggtttgagcactcaccgccgctgggggaccctgtcggaagcaactgccgccgccgcctctttcatctcttctggggcaggggccagggccaggggttcaactagatagagcttcacaatctctggatcaagaaattttattaaaagttaaaactgaaattgaagaagagctaaaatctctggacaaagaaatttctgaagccttcaccagcacaggctttgaccgtcacacttctccagtgttcagccctgccaatccagaaagctcaatggaagactgcttggcccatcttggagaaaaagtgtcccaggaactgaaagagcctctccataaagcattgcaaatgctcctgagccagccagtgacatatcangcatttcgggaatgtacactggagaccacagttcatgccagcggctggaataagattttgg

SEQ ID NO: 20919 - DNA, 482 bp, Homo sapiens
  misc_feature (1)...(482): n = A,T,C or G
cttcgccccgcctgcaggaattctgcacgagctccaagcccggactgaggccaagaacagctcttggggacattggtaacaaagtcagtgaacaactgcaggccaaaatgcctatgaagaaggaagcaaaaccttcagctactggaaaagtcattgataaaaaactaccaaaacctcttgaaaaggtacctatgctggtgccagtgccagtgtctgagccagtgccagagccagaacctgagccagaacctgagcctgttaaagaagaaaaactttcgcctgagcctattttggttgatactgcctctccaagcccaatggaaacatctggatgtgcccctgcagaagaagacctgtgtcaggctttctctgatgtaattcttgcagtaaatgatgtggatgcagaagatggagctgatccaaacctttgtagtgaatatgtgaaagatatttatgcttatctgagacacttgaggaagacn

SEQ ID NO: 20920 - DNA, 502 bp, Homo sapiens
  misc_feature (1)...(502): n = A,T,C or G
cccccccattcgacccgccctgtnnnnannnattagcaccgcgctgcaggtggaggtggaggggaagatggtcagtaggacagaaggtaacattgatgactcgctcattggtggaaatgcctccgctgaaggccccgagggcgaaggtaccgaaagcacagtaatcactggtgtcgatattgtcatgaaccatcacctgcaggaaacaagtttcacaaaagaagcctacaagaagtacatcaaagattacatgaaatcaatcaaagggaaacttgaagaacagagaccagaaagagtaaaaccttttatgacaggggctgcagaacaaatcaagcacatccttgctaatttcaaaaactaccagttctttattggtgaaaacatgaatccagatggcatggttgctctattggactaccgtgaggatggtgtgaccccatatatgattttctttaaggatggtttagaaatggaaaaatgttaacaaatgtggcaattattt

SEQ ID NO: 20921 - DNA, 479 bp, Homo sapiens
  misc_feature (1)...(479): n = A,T,C or G
agcacantttgaccgcctgatgaattcgcatcgagcactgaacgagaaggccccgtgggacttcggctacgtggcgattgactccatcctggagcagatgcgccggaaggccatgaagcatggcttcgagttcaacatcatggtggtcgggcatagcggcttgggtaaatccaccttaatcaacaccctcttcaaatccaaaatcagccggaagtcggtgcagcccacctcagaggagcgcatccccaagaccatcgagatcaagtccatcacgcacgatattgaggagaaaggcgtccggatgaagctgacagtgattgacacaccacggttcggggaccacatcaacaacgagaactgctggcagcccatcatgaagttcatcaatgaccagtacgagaaatacctgcaggaggaggtcaacatcaaccgcaagaagcgcatcccggacacccgcgttcactgctgcctctacttct

SEQ ID NO: 20922 - DNA, 462 bp, Homo sapiens
atttgccctggctcgccgactgcggacgacacactacagacggatgaatggccctcatcatactgaagctttctgactgaactcctctctaccccgaatacaagataccttagtagttaggcaggaatatcattacccctattcagcctgaggaagttacagaagatggatctctgttcctttacaacccttagggttaagggttctcttatgaaagggaggggtgaaatacatcagaggcatctgaacaagagtgattccatcttgaataggggctgggtaaaataaggctgagacctactgggatgcattcctaggagattaggcgatctaagtcacaggatgagataggaggttgacacaaggtcataaagaccttgctgataaaacagctagcagtaaagaagccggccaaaacccactaagaccaagggtggcggcaaagtgacctctggtcatcct

SEQ ID NO: 20923 - DNA, 494 bp, Homo sapiens
  misc_feature (1)...(494): n = A,T,C or G
ccgccccttcgccccgcgctgcaggaattctgcacgagggggcgggacagcggccccctggagggggcagtcccgggagaacctgcggcggccggagcggtaaaaataagtgactaaagaagcagacctgggaatcacctaacatgtcgaggaggagatttgattgccgaagtatttcaggcctactaactacaactcctcaaattccaataaaaatggaaaactttaataatttctatatacttacatctaaagagctagggagaggtaaatttgctgtggttagacaatgtatatcaaaatctactggccaagaatatgctgcaaaatttctaaaaaagagaagaagaggacaggattgtcgggcagaaattttacacgagattgctgtgcttgaattggcaaagtcttgtccccgtgttattaatcttcatgaggtctatgaaaatacaagtgaaatcattntgatattggaatatgctgcaggtggagaa

SEQ ID NO: 20924 - DNA, 473 bp, Homo sapiens
  misc_feature (1)...(473): n = A,T,C or G
nattgacncgtctgtangctgcatgccaacgtgcagcggctgaaggagtaccgctccaaactcatcctcttccccaggaagccctcggcccccaagaagggagacagttctgctgaagaactgaaactggccacccagctgaccggaccggtcatgcccgtccggaacgtctataagaaggagaaagctcgagtcatcactgaggaagagaagaatttcaaagccttcgctagtctccgtatggcccgtgccaacgcccggctcttcggcatacgggcaaaaagagccaaggaagccgcagaacaggatgttgaaaagaaaaaataaagccctcctggggacttggaatcagtcggcagtcatgctgggtctccacgtggtgtgtttcgtgggaacaactgggcctgggatggggcttcactgctgtgacttcctcctgccaggggatttggggctttcttgaaagacagtcc

SEQ ID NO: 20925 - DNA, 487 bp, Homo sapiens
  misc_feature (1)...(487): n = A,T,C or G
cgccccatagcccgcctgcangattcgtcacgagcagtggcctctggtgcgacgtatttacaacagagctcgatgttgaggaggggtggacagcaggtcactaacagccaggaaacacacactggaatccaccgatgggttctgcaaacctgtgccggatcaggaaagtggcaacagcttcagctaccttgtcaggggcatcctcatggactgcatggccacactggggtaggacctgcatctggaacttcccttgcatctggccaatggtcagatctttatccaatctatcaacaccagccaagagcagcaatttaggaatgggacaactaagaaagagattggataagcctcggaaccagccgtcccagtatttttctgtttttgccagttcaattctccaggtgtatgggatggctttcttggtctccatgtcatcttcctttttcctcttgcttatagactcacttcctttctcatcttcttc

SEQ ID NO: 20926 - DNA, 466 bp, Homo sapiens
  misc_feature (1)...(466): n = A,T,C or G
atgtgccatcgctcccggctgcaggaattcggcacgagaagaagcggaaaaaagaaaactctagaagtctggatgtcggtgggcctctgagatatgccgtttacgggttcttcttcacagggccgctgagtcacttcttctacttcttcatggaacattggatccctcctgaggtccccctggcagggctcaggaggcttctcctggaccgcctcgtctttgcaccggccttcctcatgttgttcttcctcatcatgaactttctggaggggaaagacgcctcagccttcgccgccaagatgagggggggcttctggccggcgctgaggatgaactggcgggtgtggacgccactacagttcatcaacatcaactacgtccctctgaagttccgggtgctcttcgccaacctggcagctctgttctggtatgcctacctggcctccttggggaagtgacgaccgcn

SEQ ID NO: 20927 - DNA, 478 bp, Homo sapiens
  misc_feature (1)...(478): n = A,T,C or G
nattgccggctgcataattcggcacgagcgaaggcttctctgttctgcctgttattgctggcacacttgggcaggttaaaccatacagttctgtggagaaagaccagcatcgtattgctctggacctcatatctgaagccaatcactttcctaaagaaacacttgagttttggctgagacatgtggaggatgaatctgctatgttacaaaggccaaaatcagacaagttatggagcataattatattggatgtcattgagccatctgggctcattcagcaggaaataatggaaaaagctgcaatatccaggtgtttactacaatctggaggcaagatctttcctcagtatgtgctgatgtttgggttgcttgtggaatcacagacactcctagaggagaatgctgttcaaggaacagaacgtactcttggattaaatatagcaccttttattaaccagtttcaggtacctatacgtgn

SEQ ID NO: 20928 - DNA, 485 bp, Homo sapiens
  misc_feature (1)...(485): n = A,T,C or G
agggaaaaatttgaccgcctgtttgacccgcctgcaggaattcggcacgagacaccttgtactgccaggctcttggccaatattggctgtttcatcagccattaggcatactgtggatgttccttaggacatagtcagcactgtagtatagtcagcactgtagtactaaaagggatggtccagagcaaaaaataagcaaacagatctcccccggctgcctccacccccacacccactggcattgtcctagcatgccttacataagaggctggcactgtcttcactatatctctgtacagctggctcgggactaggcacaagtagcccctcaatacatactccaggagtgaataagtgtttcttattccacctttagttctatcattcagagaccaggaattccattttggatcactaacttagggttactttctagtatctttcttgtgggctggaatttaaccttcacatttcttatgtatcan

SEQ ID NO: 20929 - DNA, 486 bp, Homo sapiens
  misc_feature (1)...(486): n = A,T,C or G
agagtcccnnaggagttnnccatgatcgcctgtggaattccgctcgagggatgattgagtgtttctttaaaaataaaaaccccacaaaaaaagccagaacaccctacccaacccagcccagtgtaacaggttagccattaacacagaataaagaaggtcccagccacacacgtcattactcggcagagggtgtccagcctggtcggccgacgtcacagtggatggccctgcgtggctgggacacagacagggagcaggcatggcacctgcgccacgcagagcagcaaggctgagcatgaccactggaaataaataaacatggtgccgacagcatctttaaattagtaagacgttagcacaaaacaaaaaagcacaacgactgaaaatgcacttgcttgttgtggtgggttgtgcttgaaaacacctgaagcccacaagtggaaaccgctggggacgtttgtcagtggagtgtggagaaaaagggaa

SEQ ID NO: 20930 - DNA, 468 bp, Homo sapiens
atttgccctcgccgccgcactgcaggttttttcaatttaaataactttattcagaggaatcctttggtccacttctgctgactcaacccctgcccatgccaacaaaggagtactaagaaaggcaggttagcctgaatgtctaaattcaatttgttcaactttataaaagcaggcaaagctactgggggttgccccctcccaccatcattctggtccaccatttgggccacaggcttagggaaatgaaggaaagtcgttttctttgaaggaaatcctggccaaagtcgagaaagtgggcaccattatgaggtcaactaaaccctgatggcagtgtgaagtgcaattcccttctccctccaaaataagaaacatgaatccaggggaaggggctttttcgtgtgctaaggaaaaaccctttcccacatagtcctgcctggcagagccacttcctgagaaagcctcgtgtgt

SEQ ID NO: 20931 - DNA, 487 bp, Homo sapiens
  misc_feature (1)...(487): n = A,T,C or G
cttgcccgcctgcaggaattctgcacgagcgcacagacggngctaggggtttcagagaaagacaggcgacactaacaggtgaagatctcgggagaccatgactaagaaaagaattgctgtgattgggggaggagtgagcgggctctcttccatcaagtgctgcgtagaagaaggcttggaacctgtctgctttgaaaggactgatgacatcggagggctctggaggttccaggaaaatcctgaagaaggaagggccagtatttacaaatcagtgatcatcaatacttctaaagagatgatgtgcttcagtgactatccaatcccagatcattatcccaacttcatgcataatgcccaggtcctggagtatttcaggatgtatgccaaagaatttgaccttctaaagtatattcgatttaagaccactgtgtgcagtgtgaagaagcagcctgattttgccacttcaggccaatgggaagtggcactg

SEQ ID NO: 20932 - DNA, 502 bp, Homo sapiens
  misc_feature (1)...(502): n = A,T,C or G
gtgggttnnnnaaaactggagcggcatgcaggaatcgccacgagggacaccttgttctggctcttgtgccaagggctgaaggaggtaccctcttggcagatgggggcatcacttgcttcctttgggaagctctaaggttgctgcagtcaccttcctcatcttgcaggtgctgaaccaacatcatcagtttctattctaatcaggccccttcccaatctccatttctctgccaagcccatttacccccacctcatgcatcccaaggctctactgggtccctggacctaaccctgctttcatcctggtggccttaactacagtggaggtggaacttcccaggaggggaagggacagaccagccccagccgctgggccaacttccaatcattccagctagaagagcttccccctgacaccctgtgactgagcctgtgtcctgtctgcctgcccagccatgctccatncgctgtgagggcagtgcccggagaggccaaagggttgg

SEQ ID NO: 20933 - DNA, 481 bp, Homo sapiens
  misc_feature (1)...(481): n = A,T,C or G
nattgaccggctgcatgagtacggcacgagtatcaccaccgtgaccttcctgtggaaagtgtcggcgatcaccgtggtcagctgcctcccgctgtatgtcctcaagtacctgaggcgcaagctctctcctcccagctactgcaagctggcctcctaaggggctgtgcacccccagcgggctggccccagcaccttctgcccttcccagcaccttgtgcccttgccagtgaacgcagggtttgccattgctaccaagcaagcaccacaagaaagggagggtacgccaggcgagcccagggcacagatgctgagacagcctctccttctcagtgcagggacgtcacccctgccaggcaagcccagggcacagatgccaggatggcttctccctctcagtgcgaggcttcacccctgccaggcaagcccagggcatagatgctgagacagcctctccctctcagtgcagggacgtcacccctgc

SEQ ID NO: 20934 - DNA, 471 bp, Homo sapiens
gtggggcaattgacaatagatccgcgctgcaggaattcggcacgaggcaaaactggcttcttctggtcactggtgtctgaaaccaaatccagagcagcctgtggcctgtaaagcatatatttctaatgactgcagactggtgggatcataggagccttctgaatgaccacgactgctttctttggagctgatgaaaatgtactcttttaccgtgttacaaatcacttgttttattgtgtttctttggccaagctgggtctagtgtttcttttgctgggaatagactttcaaaagttgtacttctatcaagaaacaaaactgcccttgcagaaatttcaggtcttttgttaagcctgtattggtcttaaggtgcagtatttttttaaattattatttatagaaagaatctatacattcttggggaagtgtgttataagctttaataattacattgagctgcacctcagtggg

SEQ ID NO: 20935 - DNA, 497 bp, Homo sapiens
  misc_feature (1)...(497): n = A,T,C or G
gacgccgggaaattanacctggatgcctgaccgacntancaaanngcacgaggntcangtctccctggccctctttccagcttttatccatcagtcagatgtgactgatgagatgctgagcttcttcctcactctgtttcgaggccttaaagtacagatgggtgtgcctttcactgagcaaatcatacagactttcctcaacatgtttaccagagagcagttagccgagagcatcctccacgagggcagcacaggctgccgggtggtggagaagtttctgaagatcctgcaggtggtggtccaggagccaggccaggtgttcaagcccttcctccccagcatcatcgccctgtgcatggagcaagtgtatcccatcattgccgagcgtccctcccctgatgtgaaggccgagctgtttgagctccttttccggacgctccatcacaactggaggtacttcttcaagtccaccgtgctggccagtgtccagagggggg

SEQ ID NO: 20936 - DNA, 467 bp, Homo sapiens
  misc_feature (1)...(467): n = A,T,C or G
gggatcggagganngancctgggaggcatcgaaggtctggcaagcacngacngaatgncaagatgttcgttaatttctagatgttcgtttcaagaccagctgtttcagatctattaatgtagggaatttttccctaagattgaattcctatatttacttggtaagatccactaatctgttatagggagttgttttctcttgccttatagttgagctatttggtttgacaaagctcagcagaaacttgatgtgaaaaatctacgattttcttctacattcattgatgccccttgtaatgtttgcatacactagaaaatgccttcaatttgtgttttaccagaattttgatactggtcataaattttatactgccaacaaagaacactcaacttctcagatctataatgggatacaatgtgatcctctagcaactcctatatagaaagttttaactgaatatgttacat

SEQ ID NO: 20937 - DNA, 465 bp, Homo sapiens
atttgccctcgctgcacgaattcggcacgagcaaacatttgctagtcagacaagtgacagggaatggattccaaacagcagtgtgtaaagctaaatgatggccacttcatgcctgtattgggatttggcacctatgcacctccagaggttccgagaagtaaagctttggaggtcacaaaattagcaatagaagctgggttccgccatatagattctgctcatttatacaataatgaggagcaggttggactggccatccgaagcaagattgcagatggcagtgtgaagagagaagacatattctacacttcaaagctttggtccacttttcatcgaccagagttggtccgaccagccttggaaaactcactgaaaaaagctcagttggactatgatgacctctatcttattcattctccaatggctctaaagccaggtgaggaactttcaccaacagatgataat

SEQ ID NO: 20938 - DNA, 470 bp, Homo sapiens
  misc_feature (1)...(470): n = A,T,C or G
aggggnttttgacctcgtgaggccatagcgtcctccactcccctcaccagcctcccgcgcctcttcaaggaagtcttcctgcctctaggacctaagagcttatttggttaggggcaaggatgcttgaagccgccaggtttgttggcaggatcctcatatgcagtagtaaaaacgaaggttcacactcatggatccttacaatgcactccgctgggctctgccttaattctcatgggccccctccatcctgccccgaccccgggcagcaagtcctactatcttccagttttacaaacgagcaattgaggctttcagactttgccaagattatattccaaatgaggggattcaaacccaggctgtcagcctccgcagtgcaggctttcttcaccagcatcatcacacatggtgataactcccaaggatcacagcttgtctgttcactatgcatcgtgctgaggggtttccat

SEQ ID NO: 20939 - DNA, 482 bp, Homo sapiens
  misc_feature (1)...(482): n = A,T,C or G
atcgccgcctcggancnatagaccgcgtgcaggaatccgacgagccctaccctcctgctgagctgcccctgctgcttaagtgcatgcattgagctgcctccagcctggtggcccagctattaccacacttggggtttaaatatccaggtgtgcccctccaagtcacaaagagatgtccttgtaatattcccttttaggtgagggttggtaaggggttggtatctcangtctgaatcttcaccatctttctgattccgcaccctgcctacgccaggagaagttgaggggagcatgcttccctgcagctgaccgggtcacacaaaggcatgctggagtacccagcctatcaggtgcccctcttccaaaggcagcgtgccgagccagcaagaggaaggggtgctgtgaggcttgcccacgagcaagtgaggccggagaggagttcatgaacccttctccatacccacaatctgagcacgctacgg

SEQ ID NO: 20940 - DNA, 473 bp, Homo sapiens
  misc_feature (1)...(473): n = A,T,C or G
ntttgacccgccctgcaggatttccgcacgagatttaccacaaatcaaggtgattgcccattgattgttcagtttgctgctaacgatgcaagacttttatctgatgctgctcgtatagtctgtccttatgcgaatggaatagacattaactgtggttgccctcagaggtgggcaatggcagaaggttatggggcttgcttaataaacaagccagagcttgttcaagacatggtgaaacaagtaagaaatcaagtggaaacccctggattttcagtttctattaaaataaggatccatgatgaccttaaaagaactgtagatctttgtcaaaaggctgaagcaacaggagtttcatggattacagtccatggaagaactgctgaagaaagacatcagccagtgcactatgattccattaaaataattaaggaaaatatgtctatacctgtaattgctaatggagacatcagaag

SEQ ID NO: 20941 - DNA, 468 bp, Homo sapiens
  misc_feature (1)...(468): n = A,T,C or G
cgtggttccnaaaactggaggcancgacngctagggaaaancgcacgagncttgaccttatttatgatctgctaaagtggtgatttatccattcaaaatatatatttttttccatttaaaactaatttataaactatgtactcctgggaagatttgaaatcttttagaagtttgttgaaatattttcaccatttcagacagacttctgacttagatactgattttaatgccagtatctgctctaaatatttatgataaaaatgcattatttttttaaagagcttgatgagatttgtgataagtgatagtactcaaaaacctgaatcccacccctcgaccaatcctccacaaacttcagttgttggttaacgtattaactgaacacagacaatacagtctgatttagaagtcatcttttcagccgtgtgataattaacatggtaagccttagcagcaaacattcttcct

SEQ ID NO: 20942 - DNA, 479 bp, Homo sapiens
aattgaccggctgcattagttcggcacgagggaacatgcaggaagaatttgcctgtaggagttctggattttctgagtaagaaaggaaaaagcaaaagatttcaaacttgagaaaggtaggctagtgatgttttgaggggacagtgctgtgaggccgtttgatggtagtatgtggtgagatggcatttatgtggctatgctgattaggataactatgctgggaaaatcttgtgcttgcagcttggtatgctaccggccccagttacaccaagaatgcatcaaataccaccctcctcaatttggggaggttgggaagaagtgatacagaatggtggtcagacatcggaatcattaaaccttttgcatacgcgattctcatacacccccaccaagacttatgtccctgggcctgtttcattttattgggccttcctattctcatcttcctggattgggacagtgatttttctcttttttcc

SEQ ID NO: 20943 - DNA, 466 bp, Homo sapiens
  misc_feature (1)...(466): n = A,T,C or G
cgtggttanaaaaatgtgactgactcgaaccgtcngnanaaaccannnanangcagaggggatgttctagtagtttctgtaaaaatgtcaagccactttcttttctcttttgacatgnacatgatatctcgggttatttggggcttcagtctttcttgctctctctggctctctctggccctcactcttactctcttgcactcttgctctccccctccctcccttactctaacagctgaatacacagtacttgttgatgtaccaaaaaggcattcaaccatttcgctattgatcgtcttttatttcctttttttattttttttcaaaataacactgctgtaatacatactggggcttttatttatatagggtggaatcccagaaatactatgtaggcatatgtttcagaaatattactagattactatccaaaatgaaagcgcccgttccagcgtcctttccagcg

SEQ ID NO: 20944 - DNA, 467 bp, Homo sapiens
  misc_feature (1)...(467): n = A,T,C or G
tggggggnnantttgatttcgatcgcctgcangaattcggcacgagggggaatccagcacacaggacaccatccaggaaagcaaagctgcggcctgagatctccttccaccaactcctggcatggccagaaagttagccagaaacaccagaaagtgccaggcagctaggaagcatggggagagccccctgaagctgcgtgtgtagtgcctgcttccgctgccatcccagaaatggacgagcttcaccctgagaacccagccacaccactgggacacatcctgacagtgacatgcacactcttccctggccccagcctggagaggagcctcctgaagacaccagcctttgctccttctcccagtgggagtggagagaactgactgctggagtggagacagtcaaggctgtccttctgagggagcacagcacagggtctggtgtcccagggaggcaatctgaaattcan

SEQ ID NO: 20945 - DNA, 465 bp, Homo sapiens
  misc_feature (1)...(465): n = A,T,C or G
tggggaaanaaatttgcctcgcctgccgctcttccccggaagccctcggcccccaagaagggagacagttctgctgaagaactgaaactggccacccagctgaccggaccggtcatgcccgtccggaacgtctataagaaggagaaagctcgagtcatcactgaggaagagaagaatttcaaagccttcgctagtctccgtatggcccgtgccaacgcccggctcttcggcatacgggcaaaaagagccaaggaagccgcagaacaggatgttgaaaagaaaaaataaagccctcctggggacttggaatcagtcggcaaaaaaaaaaaaaaaaaactggggggggggcccggcccccaattccccctatagggagcggttttacaattccctgcccgtcgtttaacaacgccgggacgggggagaannnnnnttntnngaccaagcgagtcctccctcccaatn

SEQ ID NO: 20946 - DNA, 494 bp, Homo sapiens
  misc_feature (1)...(494): n = A,T,C or G
gattgcaggggggnnnnnnaatagatcgcctgcagagcgtaggcaagccgaggataaagagtggatgcccgccaccaagttgggccgcttggtcaaggacatgaagatcaagtccctggaggagatctatctcttctccctgcccattaaggaatcagagatcattgatttcttcctgggggcctctctcaaggatgaggctttgaagattatgccagtgcagaagcagacccgtgccggccagcgcaccatgttcaaggcatttgttgctatcggggactacaatggccacgtccgtctgggtgttaagtgctccaaggaggtggccaccggcatccgaggggccatcatcctggccgagctctccatcgtccccgcgcgcagaggctactgggggaacaagatcggcaagccccacactgtcccttgcaaggtgacaggccgctgcggctctgtgctggtacgcctcatccctgcacccanggagcactgca

SEQ ID NO: 20947 - DNA, 470 bp, Homo sapiens
  misc_feature (1)...(470): n = A,T,C or G
natttgccccgcgctgcaggaattcggcacgagacttcatcgacacagctggtgccatgctgcagtatgctgtcagccttctgaagcccactaaggtctcggctcgccagctgcccccaagcgtagccagggtggatgccaaaagccgagttctgtttcctcttgggttgggacatgctgctgagtacgtcaggcctcgggtggcgctcattggggatgcagcccacagagtccatccgcttgcaggacagggtgtcaacatgggctttggggatatctccagcttggcccatcacctcagtacggcagccttcaatgggaaggacttaggttccatgagccacctcacaggttatgaaacagaaagacagcgtcacaacactgctcttctggctgctacagacttactaaaaaggctctattctaccagtgcctccccgcttgtgttgctcangacgtggggcttgcan

SEQ ID NO: 20948 - DNA, 496 bp, Homo sapiens
  misc_feature (1)...(496): n = A,T,C or G
cggangcccccnaatcgaannccccnattccatcggctgcaggaattcggcacgagggcactacatgtaaattaagcccaaagatggggagaaaggaaaaggagagacaaatatagtccatactgagtgtcatcaacaatccagactgaagtcttctattttaatctcaatccccttttctgatttgccacccatgcctcttcaggctggaaacaatctcttggttccctaaagcactttcttctgactgctgtgattcagtgaaccttgccctttgctttctattacttgtgcatttgcctcacctgacaatgttttaaatcgcctttgtatctccttagctgctcaataaatatttgaatgcatcanaaaaaaaaaaaaaaaaaaaaaaaaaaaaaaaaaaaaaaaaaaantcttggggggggggccccccccccccccccccttttagggggggtaataaaaaattggggggggggttttaaaacaagggagg

SEQ ID NO: 20949 - DNA, 465 bp, Homo sapiens
  misc_feature (1)...(465): n = A,T,C or G
gatggtanananaccaggcggcatcganagctacgaaaaancanacgagntntngatagtatcttcttctacccgttgcagacgataaattatttgtgccaattctagaattgctgttaggctgttatcctcccttccttggggctaagaattacaagactcatggcactggcgtaaagttgttgtttatctaatcactgatgaaatattttcacacttgaaaatccccaaatgctttacaatgaatgaagtgttaatttggtgaccaggtggtagccattagccatgttgcaaaattctagacagtaaaacctgtgttttagaaacagaggggaaatttaaataatggagtcctggttagcctttcagggattagggatttgggttttttttttttttctttttttaaaacaaaaaaatctaagtttttataaaagggaagttaaaaaggtttattgggccatt

SEQ ID NO: 20950 - DNA, 485 bp, Homo sapiens
  misc_feature (1)...(485): n = A,T,C or G
ggagtgcnnnnnaatagaccgccttggagaacttgcacgagctaggactgagccagaatgtgattttcctgatgaaaaagactcatactgggaattctagggctgccaaatcattttatgtcctatatacttgacactttctccttgctgctttttcttctgtatttctaggtacaaataccagaattatacttgaaaatacagttggtgcactggagaatctattatttaaaaccactctgttcaaaggggcaccagtttgtagtccctctgtttcgcacagagtactatgacaaggaaacatcagaattactaatctagctagtgtcatttattctggaatttttttctaagctgtgactaactctttttatctctcaatataatttttgagccagctaatttttttcagtattctgctagcccttgggaataggccctcagaggacagcgcttgcaagtacatcttctcgcagaatctctgg

SEQ ID NO: 20951 - DNA, 491 bp, Homo sapiens
  misc_feature (1)...(491): n = A,T,C or G
agcgccgagangtgaacctgagcctgatgacgtgcgaacggccgagggngcatctgtttgccggaggatgtggtggtacagtgggagctattctgacatgtccactggaagttgtaaaaacacgactgcagtcatcttctgtgacgctttatatttctgaagttcagctgaacaccatggctggagccagtgtcaaccgagtagtgtctcccggacctcttcattgcctaaaggtgatcttggaaaaagaagggcctcgttccttgtttagaggactaggccccaatttagtgggggtagccccttccagagcaatatactttgctgcttattcaaactgcaaggaaaagttgaatgatgtatttgatcctgattctacccaagtacatatgatttcagctgcaatggcaggtcacttcctgtagaaatatggactaacttatacctcgttttactggcatcacaagcaccaaccccatttggcttataaa

SEQ ID NO: 20952 - DNA, 473 bp, Homo sapiens
  misc_feature (1)...(473): n = A,T,C or G
ngatgcgtgannaaaactgataggcattgataagctagcggaaannncatacgagataacatggagaagcgctgcattgctttccacatcctgaccgctgtggactatgcacacaaatctggagatcgacttggcgacgttataactgagaatgtgatggacaccagttggaattgggttcttctaactgattttgccagttttaagcccacttatcttccagaagacaacccggcagatttcaattatttctttgacacatcacggaggagaacttgctatattgctcctgaacgttttgttgatggtgggatgtttgccactgagttagaatatatgagagatccttcaactccgcttgtagacttaaatagcaatcagagaacaagaggagagttgaagagagcaatggacatcttttcagcaggttgtgtgatagctgagctttttacagaaggtgtaccattatttga

SEQ ID NO: 20953 - DNA, 538 bp, Homo sapiens
gaggatcgatcgcgtctgcagtttagcctggcttggaataggcgctccccagccatcagtcttgggatggagaggtcgcggccgcggcggaggccgagaggccgagggcgggaagtttgctctcctcccgcacttggcaagcagcgccgctagttctgattgagtcatcgggctccaatgcgtggggatgtttaccgccgtttatccgggatagagactccatcgtgctgacagcatccttttattcaccgcctccgaatttgcaaagaggaggaaggagggacttcttggcttctcccagcatagccccagttatgccatctcagaactatgaccttccccagaagaagcaggagaaaatgaccaagtttcaggaggctgtgacattcaaggatgtggctgtggtcttctccagggaggaactgcgactgctcgatcttacccagaggaagctgtaccgagatgtcatggtggagaacttcaagaacctgggtgcagtgggcatcttcctttcaccagatatgtatccaaatggagg

SEQ ID NO: 20954 - DNA, 482 bp, Homo sapiens
  misc_feature (1)...(482): n = A,T,C or G
ggnnaggcccctgatnccnttcatgaccgcctgcggaattccgcacgagcagctttgtggacaaactccttgaccttatgccccgactcatgacatccaaacctgcagaagtggtcaaaattctacagaccatgctgcgacagagtgcctttctgcatctcccgcttccagagcagatccacaaagcctcagccaccatcatcgagccagcgggcgagtcagacaaccctttgcggtttacctctgggttggtggttgccctggatgttgatgcaaccctggagcatgtgcaggatcctcagaacactgttaaggtccaggtcttatatccagatggccaggctcagatgattcaccccaagcctgcagacttccggaatcctggcccagggcggcaccggctcatcactcaggtttatctctcccacaccgcttggacagaggcatgccaggtggaagtgaggctgctgctggcctacaac

SEQ ID NO: 20955 - DNA, 467 bp, Homo sapiens
  misc_feature (1)...(467): n = A,T,C or G
agggaannaaaatttgcattgctccgcgctgcaggaattcggcacgagcagaagttctcattccccattatgaactgagctataatatggagctttcataaaaatgggatgcattgaggacagaactagtgatgggagtatgcgtagctttgatttggatgattaggtctttaatagtgttgagtggcacaaccttgtaaatgtgaaagtacaactcgtatttatctctgatgtgccgctggctgaactttgggttcatttggggtcaaagccagtttttcttttaaaattgaattcattctgatgcttggcccccatacccccaaccttgtccagtggagcccaacttctaaaggtcaatatatcatcctttggcatcccaactaacaataaagagtaggctataagggaagattgtcaatattttgtggtaagaaaagctacagtcattttttctttgcactttn

SEQ ID NO: 20956 - DNA, 461 bp, Homo sapiens
  misc_feature (1)...(461): n = A,T,C or G
aggaaaaaaantttgcctgcctgacgatttcggacgagcccacattctcctcgcgggaagcgcagcagtgcctccaagggttcttaaagcagagatgaataatacggcagctagtccaatgtctactgcaacttcaagtagtggaaggagtacagggaagtctataagctttgcaacagaattacagagtatgatgtattctttaggtgatgctagaaggcctcttcatgaaacagcagttttggtagaagatgtggtacacactcagttaattaatctgttacagcaagctgctgaagtttctcagctgcggggagcaagggtaatcactcctgaagatcttctgtttttgatgcgcaaagataagaaaaaacttagaagactgctaaaatacatgtttatgcgagactacaaatcaaagattgtcaaaggcatcgatgaggatgatcttctcgaagacn

SEQ ID NO: 20957 - DNA, 472 bp, Homo sapiens
agctggacactgtttgactgacgtgcgcctggaaggagaccaacatggcgcgcacccagatcctctgcagccacctggagggccacagggtcacgtggaccggccgcttcaagtacgtccgcgtgactgacatcgacaacagcgccgagtctgccatcaacatgctcccgttcttcatcggcgactggatgcgctgcctctacggcgaggcctaccctgcctgcagccctggcaacacctccacggccgaggaggagctctgtcgccttaagctgctggccaagcacccctgccacatcaagaagttcgaccgctacaagtttgagattaccgtgggcatgccattcagcagcggcgctgacggctcgcgcagccgcgaggaggacgacgtcaccaaggacatcgtgctgcgggccagcagcgagttcaaaagcgtgctgctcagcctgcgccagggcagcctcattgagtt

SEQ ID NO: 20958 - DNA, 478 bp, Homo sapiens
  misc_feature (1)...(478): n = A,T,C or G
ncgtgcttaaactgtgactgctganggcatcagacgacgcggcggnggaggaggctgtgaggagtgtgtggaacaggacccgggacagaggaaccatggctccgcagaacctgagcaccttttgcctgttgctgctatacctcatcggggcggtgattgccggacgagatttctataagatcttgggggtgcctcgaagtgcctctataaaggatattaaaaaggcctataggaaactagccctgcagcttcatcccgaccggaaccctgatgatccacaagcccaggagaaattccaggatctgggtgctgcttatgaggttctgtcagatagtgagaaacggaaacagtacgatacttatggtgaagaaggattaaaagatggtcatcagagctcccatggagacattntttcacacttctttggggattntggnttcatgtttggaggaacccctcgtcagcaagacagaaatat

SEQ ID NO: 20959 - DNA, 484 bp, Homo sapiens
  misc_feature (1)...(484): n = A,T,C or G
gcgtgctttatttgatggctaattgatcgccntcggaagaaacgacattgacgagtcgtccccaggcactgagtgggaacgggtggcccggctgtgtgactttaaccccaagtctagcaagcaggccaaagatgtctcccgcatgcgctcagtcctcatctccctcaagcaggccccgctggtgcactgaagagccaccctgtggaaacactacatctgcaatatcttaatcctactcagtgaagctcttcacagtcattggattaattatgttgagttcttttggaccaaacctttttgtctttagagttgttcattgtttgtgattgcatgtttccttccttcaactgtgttctccctggcattcaaagaggagggagaggaggaagaggaaggggagggaagcttcccaagagtagcctcaacctgtgcttctgtgcattattctgagaataaatttctgtttcaaactgtaaaaaaaaaa

SEQ ID NO: 20960 - DNA, 476 bp, Homo sapiens
ggcggtttacctgatggcgtttgattcccatcagataggcagagtgacatagataaaaaaaagtaaaagggtaagtaaaaaattgattgtggtatatgttattctaatcagccaaaaaagtttagaagattgatgaaatgatcttttaaatatgtatttctgaataaaatgtaaaaccaagaaagttatttcaggaaggatagtgaccctttccttgaactgttagaagggcatttattaggctaaaacgtcattaacaaaatgcattgcatgttgaaaccagcctcttgaaccataagcacttagcgactttgctctgccctgtactgtgctgcttctgctgtcatcctgtgtgcctacagaagcctggtcttccgtccatgcagaaatgcttatgtcctcctgttggttagatgactcctattgttcaggtgtactctgagaaagaatcacgtttttcttgtttgctaaggaga

SEQ ID NO: 20961 - DNA, 462 bp, Homo sapiens
  misc_feature (1)...(462): n = A,T,C or G
gggacacacntttgcattgatccggctgcaggaattcggcacgagaaagcttggcatagcttgcacttgttttcttttttcttgccttaaaaaataatagtcgactattaggccttcctattggtaataatacactactgtattattgtgaactttcttaattggaaatattcagttcgatccacttgtttatcacaaaccttcacttactgaataatgttttaatttttatagatgtggcgcaattgctgaacaaaccccgattttgttgttgttcctccttaggaattctaggaaacaaggaaaggtactgtgctttacctgcttacaaatcaatgatactgtacgtgccttgctcagaagtattgaatttaacataaaagcctgttgtttcaggaccttatttagaatactatagagattcaagactttgcttgtctctacttagagtcagttgtgtcg

SEQ ID NO: 20962 - DNA, 462 bp, Homo sapiens
  misc_feature (1)...(462): n = A,T,C or G
ggagaaaanntttgccctgcgctgacgaattcggcacgaggtgaactggacctggtgttcaacttctacaaggtttacacggtcgtggacgagatgttcctggctggcgaaatccgagagaccagccagacgaaggtgctgaaacagctgctgatgctacagtccctggagtgagggcaggcgagccccaccccggccccggcccctcctggactcgcctgctcgcttccccttcccaggcccgtggccaacccagcagtccttccctcagctgcctaggaggaagggacccagctgggtctgggccacaagggaggagactgcaccccactgcctctgggccctggctgtgggcagaggccaccgtgtgtgtcccgagtaaccgtgccgttgtcgtgtgatgccataagcgtctgtgcgtggagtccccaataaacctgtggtcctgcctggccttgcaaa

SEQ ID NO: 20963 - DNA, 466 bp, Homo sapiens
  misc_feature (1)...(466): n = A,T,C or G
atggaaaaaaatttgaactgaccgcctgcaggccggctgcccccaacactccaggccctgccccctcccactcttgaagaggaggccgcctcctcggggctccaggctggcttgcccgcgctctttcttccctcgtgacagtggtgtgtggtgtcgtctgtgaatgctaagtccatcaccctttccggcacactgccaaataaacagctatttaagggggaaaaaaaaaaaaaaaaaaaaaaaaaaaaaaaaaaaaaaaaaaaaaaaaaaaaaaaaaaaaaaaaaaattttccgggggggggggcccccccccccccccccctttagggggggaaaaaaaaaacccggggcggggttttaaaacacggggggggggaaaaaaanncnngcnngtntcgtgttatgccataggcgtcttatcggggagtccccaataaacttttttccctgcgcgaacaaaactaag

SEQ ID NO: 20964 - DNA, 487 bp, Homo sapiens
  misc_feature (1)...(487): n = A,T,C or G
aggtaaggccactgatnccnttgactgacncgccctgcggaattccgcacgagatgggaggaggagaaaaagcggtacgatgccttcctgacctcaccggcctccccaagggtgccggcactctgggtggactcacggctgctgggccccacgtcaaaggtcaagtgagacgtaggtcaagtcctacgtcggggcccagacatcctggggtcctggtctgtcagacaggctgccctagagccccacccagtccggggggactgggagcagttccaagaccaccccacccctttttgtaaatcttgttcattgtaaatcaaatacagcgtctttttcactccgaanaaaaaaaaaaaaaaaaaaaaaaaaaaaaaaaaaaaaaaaaaaaaancccggggggggggccccgccccccacccccccttttgggggggtttttaaaattccgggggcggggttttaaaacggggggggggttgagagnnnn

SEQ ID NO: 20965 - DNA, 503 bp, Homo sapiens
  misc_feature (1)...(503): n = A,T,C or G
aatagacaaagcntgttgacnccgcgctgcaggaattcggcacgagcctcttcaccctggtgacctctgttccgtattctgtcactgagagacgccctgggacatctgtggtggcttttgtcgcgctgggacctaccctgactacgggagttgggaggacccgggacaccgcacagccgggaaatggccctgtgttatggaactttctggggctaccctaagatgctggaagctgccaatctcatggagggcctagtggatatcggcccttgggtcactcttcccagaggacagcctgaggtgttggagtggggcctcccaaaggatcaggctggagaacttgggacagtggataagtctggtctgttcctgttatctggacttggcagattaatgcaacattctgtgggactttgcaatagctaaagaacttanatatcctttgtttactaaaggcttcattattatggaaaaaaaaagggggggcccgtacccaattcgcn

SEQ ID NO: 20966 - DNA, 489 bp, Homo sapiens
  misc_feature (1)...(489): n = A,T,C or G
gtgtggctttaccttgaatncctaattgatcgcccgtcggaattnggcacgagatttgagaggccccagtatgctgaaatcctcttggctcaccctgatgctccaatgtcccaggtttatggagcaccacacctactgagattatttgtaagaattggagcaatgttggcctatacgccccttgatgagaaaagccttgcattattgttgggctatttgcatgatttcctaaaatatctggcaaagaattctgcatctctctttactgccagtgattacaaagtggcttctgctgagtaccaccgcaaagccctgtgagcgtctacagacagctcaccatttttgtcctgtatctgtaaacactttttgttcttagtctttttcttgtaaaattgatgttctttaaaatcgttaatgtataacagggcttatgtttcagtttgtttcccgttctgttttaaacagaaaataaaaggagtgtaagcttct

SEQ ID NO: 20967 - DNA, 473 bp, Homo sapiens
attgcattcgctcgcctgcacgaattcggcacgagctgagtgatgtctgtctgctgccacgatggagcagaggagcgccacacatggaggaaagcccctgtaacgttacctaccttaaactccactcatcagatctgagaaaagtatccactggtccccagggtttcagtcatgcttttgggggtcattgggtattagagaagtaagtatcttttctgagagagggggagtcaccccccctactggggattcctctgggctttattcactcccagccctggccctgacctttgggggcctacataatgcccacgtcatggatggcttcagaggagtatttgaatcgaagcccacggtccttgttgatgtttcttctccgagccacacttggaggaaagttgcaagtgggttagagcagggagcacgcatgggtctgctctgctggatcgcttcctagagcaggctctttataa

SEQ ID NO: 20968 - DNA, 464 bp, Homo sapiens
agagaaaaaaaatttgacctgcgctgcacgtttttttttttcaaatttgatatttattacaggcattaacatgtccactccactttacaagatcttcggagaaaagtgctattccaagctccattatgctacttgacaaacagcacactatgtatatgtaaacaaccaaatatttaagccatttttcaggggtttctccctagccacagacataaagatatgtgcttgtctttagtccaacattatttccagagaaaagtaaaacaggctgggcatgggggttcacacttgtaatcccagcactttacaaggttgaggggggaggacttcttgaagccagaagtacaagaccatcctgggcaacactgcaagacgcagtcacagtcacccaggagatgagttttgaagagggagtttaaaaggggcatctgactttctctctctcccaaagtagaagagaactg

SEQ ID NO: 20969 - DNA, 488 bp, Homo sapiens
  misc_feature (1)...(488): n = A,T,C or G
agcatgtcccagcnttgcnccctactgatgcctctactgatanccntcgaggaaaaccacagcctccttataatgcctcctcctcctgccattctctctccacctatccattagccttcctaacgtcctactcctcacactgctctactgctcagaaaccaccaagactgttgatgccttagccttgcactccagggccctacctgcatttcccacatgactttctggaagcctcccaactattcttgcttttcccagacagctcccactcccatgtctctgctcatttagtcccgtcttcctcaccgccccagcaggggaacgctcaagcctggttgaaatgctgcctcttcagtgaagtcatcctctttcagctctggccgcattctgcagacttcctatcttcgtgctgtatgtttttttttttcccccttcactctaatggactgttccagggaagggatgggggcagcagctgcttcggatcc

SEQ ID NO: 20970 - DNA, 460 bp, Homo sapiens
atttgccccgccttgaagcggctgcaagaattcggcacgaggagagagagagagagagagagagagagagagagagagagagagagagagagagagagagagagagagagagagagagagagagagagagagagagagcccccccccccactctgtgtgagacataacactctctctctctctgtggacgatctgtccccctctcttgccttgcctgcgcactggatctatattgctctttctcacgcgcgtgtttttgtgtttcagagagagactctctctctctttttttttgaggctctgtgggctcctatattttctcatatgcacatgtgcgcgccgcgcgcacacacacgcgcgctctttttttttttttcacgcgcgcgcgcagtgctctttttttgtgtgagatctccccctctctttaactctttacacactctctctctgtgtgagagaa

SEQ ID NO: 20971 - DNA, 488 bp, Homo sapiens
  misc_feature (1)...(488): n = A,T,C or G
gtgtgcttnnaattgantncctccttgatcgcccgtaggaattcggcacgagcagatctgaccctggctgtgcccatctgtaactctctggctatcatcttcacactgattgttgggaaggcccttggagaagatattggtggaaaacgagcagttgctggcatggtgctcaccgtgataggaatttcactctgcatcacaagctcagtgagtaagacccaggggcaacagtctaccctttgagtgggccgaacccacttccagctctgctgcctccaggaagcccctgggccatgaagtgctggcagtgagcggatggacctagcacttcccctctctggccttagcttcctcctctcttatggggataacagctacctcatggatcacaataagagaacaagagtgaaagagttttgtaaccttcaagtgctgttcagctgcggggatttagcacaggagactctacgctcaccctcagcaacctn

SEQ ID NO: 20972 - DNA, 492 bp, Homo sapiens
  misc_feature (1)...(492): n = A,T,C or G
tgattttncttgtcgtctccgaanatagagagcatgcggaatcccgccgaggtccctgcgcctggncgcccccatgtggaatgggcgtatcaagtgcatccatcgcctgggttcggcagtggccccaaagggcagtcacaagaagaagaggacaatactccagttcctgaccaactatttctacgatgcggaggctctgagggattacttgctccaaagggagatgtacaaggtgcatgagaaaaatcggtttcgagacaaggagtggatcacgccagataagtatggccatttctctcacgagttctggaatttctgtgaagtgcctgtcgaagctgtggatgccggtgactgtgacatcaactacgagggcctggataacctcctccgcctgaaggagctccagtccttgtcgctgcagcgctgctcccacgtggagaactgtagactcagacgcctctacccactggccgactacgtgcaagagctctc

SEQ ID NO: 20973 - DNA, 473 bp, Homo sapiens
agcgggacatgaactgcatgctactgcacaattcggcacgaggggaagcgcagtgccagcgccacagcccttcaatcattttggttgctatccagcttctccacatcaagtccaacttcagaaaccccaagcctgtagagaaaagttgacctgtgctgactctggtgatggtgactgtctctcactaatttctttgaagtcttcaaggataagcagagttgatccatctgagaaagggatcatgaactagacagaatgaacagccttagaggcacagactcttgaacgggacggtggtggtatgactagtgcagagtgtttagagatcactcagtttttaaagactggcctttatcgtgtctcagtgcagccgaggcagagcctttgaaggatgcgatgttgtcattcttactaatctagtccagccgctgaggtgactttcaacggcagaccgtctcctgagcgccccaggt

SEQ ID NO: 20974 - DNA, 472 bp, Homo sapiens
  misc_feature (1)...(472): n = A,T,C or G
agctgtaatactggattccctgacgatttncggacgagccagagcagaatctgtgggcttgtcgcctgccagtagtataagcaacactttctgttcaccaccattgtcccttgcattacttctttcttacagcatatttttaacataaagctgttagactttatatatttctaataggtcagacattgcctatttttcatacatctggtgctgcctttttgtaaaactaataatgacttggttgagcttgaaagaaaagatgtctgaggcgacatcaaaggggcagaatttttatatttcccatatggctttgggagagcgccgagaagccgccatcccgcacctcagcgctggccagtactctgggggctggcggggtggatccattgagggggtcggagggagcttggaagcagccggtttctttaaactcttaccaaaaccccgcgctctgtctagacggtgatgatta

SEQ ID NO: 20975 - DNA, 495 bp, Homo sapiens
  misc_feature (1)...(495): n = A,T,C or G
agcgccgggngngttanaccttgaatgactgagaacntgcgcgagangcagggggagagtacgtcggcggtgctctcgggctttgtgctcggcgcactcgctttccagcacctcaacacggactcggacacggaaggttttcttcttggggaagtaaaaggtgaagccaagaacagcattactgattcccaaatggatgatgttgaagttgtttatacaattgacattcagaaatatattccatgctatcagctttttagcttttataattcttcaggcgaagtaaatgagcaagcactgaagaaaatattatcaaatgtcaaaaagaatgtggtaggttggtacaaattccgtcgtcattcagatcagatcatgacgtttagagagaggctgcttcacaaaaacttgcaggagcatttttcaaaccaagaccttgtttttctgctattaacaccaagtataataacagaaagctgctctactcatcgactggaa

SEQ ID NO: 20976 - DNA, 467 bp, Homo sapiens
  misc_feature (1)...(467): n = A,T,C or G
nattgacccgcgctgcaggaatttggcacgagctcatcagccttgcctgatttcatctctcccagcttagcctctggctgtaagcttcggtcattgcctccatgcccttgcttggctcaagcaccaccaatcgctttaatgcttcagccaccgcatgaggccctgtccaccacctttcctggccttgctatgggatgcttaccaaaggatggccctcatccaccctcccaagctgtgcgagcatgcaaggccccatggcctcacactgcagacacccctttccagccacaatccaccatcatcctgacgatcccacaactgggacagaggctacatctgccctagggaggtacttcagaatctgtggagcaagaaaggatttggggaagcttggggactgactccagagccccctcctaagaaccatcaccaccactcagccaatctgttctgagccctgattatgc

SEQ ID NO: 20977 - DNA, 381 bp, Homo sapiens
  misc_feature (1)...(381): n = A,T,C or G
agcggancttgcactgctcgcctgcagaattcgcacgagataactcctacacattcccccctgtggagatgccacactaactgctgttagggagttttgggcgacgactccttctggctacttcttgttgcaaaagggcgtcgaatggggaagagcagctagggctcctcctggggtcaatctaagggtcctcagaagaatgatgtgtctatgtgtggttctgtttacagcaccatttggagtttgattgcttctagatgagaagaaacaatttgagttatagtattgtgtatacagggtccaaatatcaatacaagacacataagcaagagagggcttaataaaggggttaaccaattccataaaaaaaaaaaaaaaaaa

SEQ ID NO: 20978 - DNA, 481 bp, Homo sapiens
  misc_feature (1)...(481): n = A,T,C or G
gagggctttaaattgacggctgctggatcgcatgagggcctggctgttggcaggaactccaagtgcccaggcctcttgggcagcttagggccctgcctctgtttcatgatgcatgggtcatttgtcttgggtgtcctatcccatatggagaagaaaggggctctaagttctggctcttctttctttggggttctctgtacctgaggaaaccaggccctgggtgactttgcagatctgctcaccctcggtgagcaacagtgtcagccatgcaagcaggacagaatggtgactgggtgcccttggtgagctgtgtatttcctaggaggtagaaaactgtgggaaactgtggctaataaaaactaagtgtgagcgtcnnnnnnnaaannnnannnnnnnnnnnnnnnnnnnnnnnnnnnnnnnnnnnnnnnntttcggggggggggccccccccccccaccccccttttggggggggttttaaa

SEQ ID NO: 20979 - DNA, 480 bp, Homo sapiens
  misc_feature (1)...(480): n = A,T,C or G
atggcccgcctgcggaattcgtgcgagacttacagtttttacagatgagcgctgtgaagacctgaatgggctaatgtcagttagcgaggatctttcttgtgaacccgctggtggatgtgaaggttggagctctggctgaagcccttcccacacttgctgcactcatagggcttctctccagtatgtactctctggtggatgaggagtttggaactctggctaaatcccttcccacacttgccacagtgatagggcttctctccagtgtggactctgagatggatgcgaagatccgagctctggctgaaacccttcccacactcatagcattggtaaggcttcnnncctgtgtggatgcaccggtgaatgtgaaggttcgagctctgactgaagcccttcccacactcaccacacttgtagggcctctctcctgtgtgtactcgctggtggatggcangtttgagcgctgactgaggctca

SEQ ID NO: 20980 - DNA, 500 bp, Homo sapiens
  misc_feature (1)...(500): n = A,T,C or G
ggtggcngnannnnnnnnatttgcaccgtctgtangaattcggcacgagtgacaaagcttttaatcagcaatcaaaccttgcacgtcatcgtagaattcatactggagagaaaccttacaaatgtgaagaatgtgacaaagttttcagtcggaaatcaacccttgagtcacataagagaattcatactggagagaaaccatacaaatgtaaggtttgtgacacagctttcacatggaattctcagctggcaagacataaaagaattcacactggagagaaaacttacaagtgtaatgagtgtggcaagaccttcagtcacaagtcatcccttgtatgccatcatagacttcatggtggagagaaatcttacaaatgtaaggtctgtgacaaggcttttgcgtggaattcacacctggtaagacatactagaattcatagtggaggaaaaccttacaagtgtaatgaatgtgggaagacctttggtcaaaattcagatctt

SEQ ID NO: 20981 - DNA, 445 bp, Homo sapiens
ggctgggacattgacctgcgctgcacgaattcggcacgagagagtgtccgttgcttcccgtccgtgtcgcggccctgcggttggcggcctcctcgtggagcggagcaaggccaggcggcccctgctcgagtcccgcgtcgccatggccgcggttcccgagttgctgcagcagcaggaggaggaccgcagcaagctgagatctgtatctgtggacctgaatgttgatccctcgcttcagattgacatacctgatgcgctcagtgagagagacaaagtcaaatttacagtgcacacaaagaccacactgcccacgtttcagagcccagagttttctgttacaaggcaacatgaagactttgtgtggctacatgacactcttattgaaacaacagactatgctgggcttattattccacctgctcctacgaagcccgactttgatggt

SEQ ID NO: 20982 - DNA, 458 bp, Homo sapiens
attagcccccctctgccccgcgctgcaggaattcggcacgagccatcatgggtcgcatgcatgctcccgggaagggcctgtcccagtctgctttaccctatcgacgcagcgtccccacttggttgaagttgacatctgacgacgtgaaggagcagatttacaaactggccaagaagggccttactccttcacagatcggtgtaatcctgagagattcacatggcgttgcacaaggacgttttgtgacaggcaataaaattttaggaattcttaagtctaagggacttgctcctgatcttcctgaagatctctaccatttaattaagaaagcagttggtgttcgaaagcatcttgagaggaacagaaaggataaggatgctaaattccgtctgattctaatagagagccggattcaccgtttggctcgatattataagaccaagcgagtcctccctccc

SEQ ID NO: 20983 - DNA, 495 bp, Homo sapiens
  misc_feature (1)...(495): n = A,T,C or G
catcgcccgcctgcangaattcggcaccagctcgctgcagggatgctgggaaaggtcgcaagggatgctgggaaaggtagcatgtgaccttggcggtccttgtccagctgatcattgtttactgtgaaagggagaaaagggacatggcattgtgctgaaactcacaatctctgctctaaatggtgcctggaagaaataagttgaggggcttgtgcgaagggaaaggaacttcagcccagctcacctgtgaccccctccctgactcaccctctgcaggaccccaatgaggatgagccaaacatccgagtgctccttgagcaccgcttttacaaggagaagagcaagagcgtcaagcagacctgtgacaagtgtaacaccatcatctgggggctcattcagacctggtacacctgcacaggtgggccgagacccagacgaggagtgaggaatgagagagaccanagttcctgccttcgctgggctcacattcagatn

SEQ ID NO: 20984 - DNA, 474 bp, Homo sapiens
  misc_feature (1)...(474): n = A,T,C or G
agggtcaataganactgangagcgctgcaggaannccgcacgagatcacttactagtaatgctaaggaatatttgtaaaacacatttcacagttttataaataaaatgaggccgaaaagtttaaatgagtctttggctgctcagtcagtaagtggtagaattgagatttgaacccacggaatcacccagaagatcgagtttgaaaaaatgttatgctgtttgtgctgcatctcaccatggtgctttacatatcatgaccccttcctggcatcttaggtaattttttcataagcattaaaaagtcttaatcctcacaagcagttttgataaaacacgttccatagctggagtatttgaaggtgacctgtgatctgtgacctgtgcgcttgcaggtgatttttaaactgtgtattccagctctgtcttttgatgggcaggatagtgtctctcagaactaaggcttcttgtcagatn

SEQ ID NO: 20985 - DNA, 501 bp, Homo sapiens
  misc_feature (1)...(501): n = A,T,C or G
ngtgggccnnnnnatttgaaaaatcgagcgcttgcggaattcggcacgaggagggtgggtgttataaaagccagtctgtaaagggtaaattccaaatcttgtgccttgttataccaatccttcctgattcccgtttaaaccaactactctatttctgtgctgcctacattttcaatcctcccacgcattagcaaattcctgaaatttcctcatttggtaggccttccataggagtcagctatggacttccataggagttggcagctaaaaccagactgtgagcttctgtctccgttctgatttttgctgcacctcccaggggacagtccccacatgattacaaaagccaggtgccctcatcacccgttacccctgacctgtccacttgttttgaataaaccttcattctccaagcagatccccaaacttccttgtccttgttacacgtctacctcacaacctcacaattcaacaacaggtaaatacctggattcactgatt

SEQ ID NO: 20986 - DNA, 455 bp, Homo sapiens
  misc_feature (1)...(455): n = A,T,C or G
agctttgaccnccntnnnnaannntttgaccccgcgctgcaggaattcggcacgaggtcctcattgccaagcagagcccacccatcgtgaagatcctgaagtttggctggttcccaatcatcctggccatggtcatcagcagtttcggaggactcatcttgagcaaaaccgtttctaaacagcagtacaaaggcatggcgatatttacccccgtcatatgtggtgttggtggcaatctggtggccattcagaccagccgaatctcaacctacctgcacatgtggagtgcacctggcgtcctgcccctccagatgaagaaattctggcccaacccgtgttctactttctgcacgtcagaaatcaattccatgtcagctcgagtcctgctcttgctggtggtcccaggccatctgattttcttctacatcatctacctggtggagggtcagtcagtc

SEQ ID NO: 20987 - DNA, 489 bp, Homo sapiens
  misc_feature (1)...(489): n = A,T,C or G
agtggtnntttgaattcatggcatttangaacgaggaatgagtggctctggggctacaggtgaggacaggagggggagctcccagcctgagagttgtgacgtgcagtctaatgaagactaccctcggaggcccctaaccagggccaggagcagactgtcccatgtactgctggtatctgagtcagaagtagccaaaacaaagccacgtcacgccatgaaacggaagcggacagcatataaatccactagtacaagtgatcctgtgatcgaggatgaccatgtgcaggctcttgtattaaaatccaagaatcttgttggagtcactatgaccaattgtggaatcacagatctagtgctaaaagactgtccaaagatgatgttcatccatgctaccaggtgcagggtactaaaacatttaaaggtagaaaatgcaccaattgtaaaccgatttgactatgcacagtgcaagacactgaacatggatcangt

SEQ ID NO: 20988 - DNA, 471 bp, Homo sapiens
  misc_feature (1)...(471): n = A,T,C or G
ggtgccnaaagacgtctgtggacttcggcacgaggctgaactgctgagtctgacacttaacaggacttcggcattcccctgaatacagactagatcagagattttatttttttaattgaaaagtaacttgggttctctttagaaacccttatttggtgtgcgcatctggctatttcacagagatttcagttttgcaaagaagtcggagttgatttcttccctcagacaagctattggttgttggtgggcaacagaagttgctcagcatagacaggggaaaaaacggttacggatgagactgaaagaaaacctcanaggagaactctgagaattcatctcaggatgaagctgcaagggcaaaggagaagtacttgtgacacaagcaaatgggtccattgatcaacagatgcaagaagattcttctcccaactactgtacctnnctgcacgatgagaatctggctcctttgag

SEQ ID NO: 20989 - DNA, 470 bp, Homo sapiens
  misc_feature (1)...(470): n = A,T,C or G
aattgacctgcttgancaattcggcacgaggttgcttggaggttggcggcgcggggctgaaggctagcaaaccgagcgatcatgtcgcacaaacaaatttactattcggacaaatacgacgacgaggagtttgagtatcggttagtgctggcgcgggagcaatagcgagggtcgtgagctttggccgctgagggcacaaggaattagtaacaggaactgaggcgatagaattggcgcatgcgtacgagacatgtcatgctgcccaaggacatagccaagctggtccctaaaacccatctgatgtctgaatctgaatggaggaatcttggcgttcagcagagtcagggatgggtccattatatgatccatgaaccagaacctcacatcttgctgttccggcgcccactacccaagaaaccaaagaaatgaagctggcaagctacttttcagcctcaagctttacacagctg

SEQ ID NO: 20990 - DNA, 471 bp, Homo sapiens
agggtccactgatcttgtgaggcattccgcacgagaaaccatgttttaagtagctacaggagctatagatttgaatctaatgttgcattagtcttttcagttatcttctacctcctgtattttctactgtaataatgtaatttaaggccttccacaatgaacagttcactttattccctgggttttctataaacagttttaaggatatgatttggttaaaaaataatttgttataaaaattctgtttgcaaattaaactggaaaagtatccagagtctctaaaggcaatgatttgtgagataatatggcatgcccggagccctgctcatcaatgaaaaacccatatgtaataatcgaattcatttaacatgaatcttgagtacgtggaccattgcttgcatgttaactttttgttttgttttgttttgttttgttttgcatttttaactccagatatcctaaagctcaatt

SEQ ID NO: 20991 - DNA, 503 bp, Homo sapiens
  misc_feature (1)...(503): n = A,T,C or G
ngagcgttnnnnnacttgatcgcttgtagggcatcctgagggtgcgactccgccgcgatggtgacccggttcctgggcccacgctaccgggagctggtcaagaactgggtcccgacggcctacacatggggcgctgtgggcgccgtggggctggtgtgggccaccgattggcggctgatcctggactgggtaccttacatcaatggcaagtttaagaaggataattaattacacaaacccttcacagactgctctggtgcctggtggcgctagctcctcccacctcagcacctgctgcatctggagcagcccaagcctcaggatggacaagaggaaacccacagctcagcttcaggcttcttatgtttctgaaaacagcttggatattttaatgcacgttgcattaaacctcactgaaacctggnnaaaaaaaaaaaaaaaaaaaaaaaaaaaaaaaaaaaaaannnnnttcttgggggggggcccgggccccaaattccctt

SEQ ID NO: 20992 - DNA, 488 bp, Homo sapiens
  misc_feature (1)...(488): n = A,T,C or G
atttgaacgccntgttttganncgcgctgcaggaattcggcacgagaaaaactgtccattcccacccctttgctttgccatttgcaagagtctggaattgtcaggtctcagcttcgaaaagtcctggttccactgacaggacacattctttagtgggaattaagacctacaaagtctagtttgtatgtaggtatgaagggaattttttaaataaattgaaaagctgtgaacagcattagaactttgtctatttcttaattttaaaatatgctgatatgccttaaactgtagttgtagatccttgtcattttgctgtttgaaaataaccaatgtgttttctaaaactgtcgtgtaatctactttcattgttaatgcagaattgtcatatatgtaagctgcatgttagacatttgtcttttttaaactaaagtaattgtattgatgtgaagcatatcattttttcaaatatgaaagtgatcacttagcaa

SEQ ID NO: 20993 - DNA, 504 bp, Homo sapiens
  misc_feature (1)...(504): n = A,T,C or G
cttcgacccccctnnnnnaaatttgcccgcgctgcaggaattcggcacgagccgcgatagcccctggcgaaggcgatggcggaggcggcggctttggctcctggctggacggacggttggaggcactgggagtggaccgagccgtttatggagcctacatcttgggtatcctgcaggaggaggaggaagaagagaagctggacgctctgcaggggatcctctctgctttcctggaagaagattccctccttaatatctgcaaggagattgtggaacgatggtcagaaactcagaatgttgtcaccaaagtgaaaaaagaagatgaagtacaggccattgccaccctaattgagaagcaggcacaaatcgtagtaaagccaaggatggtgtcagaagaggagaagcagagaaaagctgccctcctggcccagtatgctgatgtgacagatgaagaggatgaagcagatgagaaggatgattcaggtgctaccacaatgaacattg

SEQ ID NO: 20994 - DNA, 482 bp, Homo sapiens
  misc_feature (1)...(482): n = A,T,C or G
cgtggcttttnaatgancgttatgaccggctgtacgaattcggcacgagggaccgtagtgttgtgacggtcgcccatctgcgcccagtacctcggatcatgcggaacatgttgtcaaagctgcagattgcctgtgacaacgctgtgttcggctgtagtgccgttgtccggcttgacaacctcatgtctcacctcagcgactgtgagcacaacccgaagcggcctgtgacctgtgaacagggctgtgggtgagatttgttcccttctgccccacatggataagggccatctcatttatgcccctgtctctggctgccctcctcactagctgaggaggtctctttggcatgttggcaaggagtattcttagcctccttggcttcctgctctaagatcttactttcttgctgcttttccaactataatcattttgctcttgctttaacaaaagaaggggcacagcaatttagtaaatttgtgtaa

SEQ ID NO: 20995 - DNA, 509 bp, Homo sapiens
cccccccccccccccccttgcccgcctgcggaatatgaccgcggtggattgcagtggctcttgaaattggggctgacctcccatctaatcatgtcattgatcgctggcttggggagcccatcaaagcagccattctccccactagcattttcctgaccaataagaagggatgtcctgttctttctaagatgcaccagaggctcatcttccggctcctcaagttggaggtgcagttcatcatcacaggcaccaaccaccactcagagaaggagttctgctcctacctccaatacctggaatacttaagccagaaccgtcctccacctaatgcctatgaactctttgccaagggctatgaagactatctgcagtccccgcttcagccactgatggacaatctggaatctcagacatatgaagtgtttgaaaaggaccccatcaaatactctcagtaccagcaggccatctataaatgtctgctagaccgagtaccagaagaggagaaggat

SEQ ID NO: 20996 - DNA, 278 bp, Homo sapiens
  misc_feature (1)...(278): n = A,T,C or G
agcgccgatttgatattagcgtcatcgcaannacnacgagagaantgnganagggcctgagagaaagggactacagctttttacaggaaaagntgttttgctttatttcaccatgcacccgccagtgtgaggagcgcctaattgtctccattgagcaggcatggcaatgacacagatataatgcctggaacctggctgggcaacatgggagggaggtagaaagaaaagcgtgagatttctaccttttagtttttatcctattgaggcatatatgaatt

SEQ ID NO: 20997 - DNA, 472 bp, Homo sapiens
  misc_feature (1)...(472): n = A,T,C or G
atttgcccctggctgcacgaattcggcacgagtgtgattcagaatccaaccgaataagccactctcttggctccctgtgtcattccttaatttaatgccccccaagaatgttaatgtcaatcatgtcagtggactagcacatggcagtcgcttggaacccactcacaccaatccagtgaccgtgtgtgggctggcggctcttctcccccaccaacggaacccctgtgtgcaccaaccttccccagagctccggagcgccctctcctcacttccaggttttggagcaagagcttgcaggaagcccgcacccagcttccttctgaccttcagttcactttgtcgcccttggagaaagctgtttttctttaactaaaaataaccaaaatgcttaaaaaaaaaaaaaaaaaaaaaaaaaaaaaaaaaaaaaaaaanttctggggggggggccgggccccaattccccctttggggg

SEQ ID NO: 20998 - DNA, 493 bp, Homo sapiens
  misc_feature (1)...(493): n = A,T,C or G
gtgcgtnngcccaattgaccggcctgattgcccgcctgctgttactggtggccatgaaggagtccctgctgctgtcagaacagaagacctcgctgccctgaggacaagcacttgccaccaccgtcactcagccctgggcgtagccggacaggaggagagcagtgatgcggatgggtacccgggcacaccagccctcagagacctgagctcttctggccacgtggaacctcgaacccgagctcctgcagaagtggccctggagattgagggtccctggacactccctatggagatccggggagctaggatggggaacctgccacagccagaactgaggggctggccccaggcagctcccagggggtagaacggccctgtgcttaagacactcctgctgccccgtctgagggtggcgattaaagttgcttcacatcctcaaannnnnnnnnnnnnnnnnnnnnnnnnnnnnnnnnnnnnntccttgggggggggc

SEQ ID NO: 20999 - DNA, 442 bp, Homo sapiens
gactgaccgcctgcagaattcttgaagccctatggaggcagttcagcgcggcctcgggcctcgtcgagaaggatgctgtcccgaaagaaaaccaaaaacgaagtgtccaagccggccgaggtgcacgggaagtacgtgaagaaggagacgtcgcctctgcttcggaatcttatgccttcattcatccggcatggtccaacaattccaagaccaactgatatctgtcttccagattcaagccctaatgccttttcaacttctggagatgtagtttcaagaaaccagagtttccttagaactccaattcaaagaacacctcatgaaataatgagaagagaaagcaacagattatctgcaccttcttatcttgccagaagtctagcagatgtccctagagagtatggttcttctcagtcatttgtaacggaagttagttttgctg

SEQ ID NO: 21000 - DNA, 518 bp, Homo sapiens
  misc_feature (1)...(518): n = A,T,C or G
gagggtatnnnngggaattgacggctgtggaattcgttgcgagcacagatgaagtccggtttttcaaagggaataagtactgggctgttcagggacagaatgtgctacacggataccccaaggacatctacagctcctttggcttccctagaactgtgaagcatatcgatgctgctctttctgaggaaaacactggaaaaacctacttctttgttgctaacaaatactggaggtatgatgaatataaacgatctatggatccaggttatcccaaaatgatagcacatgactttcctggaattggccacaaagttgatgcagttttcatgaaagatggatttttctatttctttcatggaacaagacaatacaaatttgatcctaaaacgaagagaattttgactctccagaaagctaatagctggttcaactgcaggaaaaattgaacattactaatttgaatggaaaacacatggtgtgagtccaaagaaggtgttttcctgaagaactgtctattt

SEQ ID NO: 21001 - DNA, 489 bp, Homo sapiens
  misc_feature (1)...(489): n = A,T,C or G
agagctgaattgatatcatcatcagtgagcaacncactnaccantttctttgcccgctcattctcatcaacaaagggttgttttgttccaagggctttcttatatgttagacatataaaacccctaagttttagtgccataaattccatgtgaaaactcaggctgttggggagctcatttcttaaagcctagcataaacaaagttacataatagtaaatgatatatataaacagtaaaagcaatattatatttttcatttggaaagaaaaaatactaatttttgaaaataggtagaaactgagggaaaagaatgatcttaactggtattcgagaccttgataatgccaacacttagaatattaccaattttagtagtagtttgctgcctcatctttcttctttttcccctaataggttctgacttattctggagaggagtaggaagtaatatgagcaggaactcttgggaggccagaacaaccaacctg

SEQ ID NO: 21002 - DNA, 480 bp, Homo sapiens
  misc_feature (1)...(480): n = A,T,C or G
aggggggttttnttctgtactgcgtatcaattcggcacgagtgatagtctggtagtcaagacagagattaagtaaaacaggttttactgtttagctgagttcagttaatacaaaatgtacataaaacgttagtcctttgagactgacatgattaatgatcagtgtggtgggaaatgatgtagttattgtacacaagcacttgcaaactctttatccctatttctttaaaacaaaataaggtgaaatacgaagtccttggtctgatataaagcccctattggattcttcggatgcgtaaaagaaattgcctgtttcagccagaagactggtgaaaacacatacatcagactatgttgtgagccaggttgattttttattttattatatgcaggtgagtgttgaaactgttaaaattccaatttggtttcattcagtattaagttaagtctaaatatagcaaaccccatccaagtgctatca

SEQ ID NO: 21003 - DNA, 501 bp, Homo sapiens
  misc_feature (1)...(501): n = A,T,C or G
gagcggcnnaattgcccgtatgaggacttctgcacgagccgaagccgagcgagctccggaggaatttcagtatctgctacggtaacttcatcagcccgccaagatggcgatgcaagcggccaagagggcgaacattcgacttccacctgaagtaaatcggatattgtatataagaaatttgccatacaaaatcacagctgaagaaatgtatgatatatttgggaaatatggacctattcgtcaaatcagagtggggaacacacctgaaactagaggaacagcttatgtggtctatgaggacatctttgatgccaagaatgcatgtgatcacctatcgggattcaatgtttgtaacagataccttgtggttttgtactataatgccaacagggcatttcagaagatggacacaaagaagaaggaggaacagttgaagcttctcaaggagaaatatggcatcaacacagatccaccanaataaatgttttctacattntcatt

SEQ ID NO: 21004 - DNA, 497 bp, Homo sapiens
  misc_feature (1)...(497): n = A,T,C or G
nagggnnntttgaaaatgaccgcctgcggattcggcacgaggtttctcggctgctgggtcggtcccgcccacagctggggcggcctatgtcgagtggcgcccatggcgaagagggctcagctcgcatgtggaagactctcaccttcttcgtcgcgctccccggggtggcagtcagcatgctgaatgtgtacctgaagtcgcaccacggagagcacgagagacccgagttcatcgcctacccccatctccgcatcaggaccaagttctgaaacaggtgtccgttgtgtaaagcctggaggtttgggaaatccaattagagtggcaaagtctgaaggtggttcgcgtaagcgaacccagcagctacatgggaggctgaagcaggagaatcccttgaacctangaggcggagtttgcagggagctgagatcgtgccactgcactccggcctggngcacagagcgagactctggtcnntcaaacaaaccaaacagcaacac

SEQ ID NO: 21005 - DNA, 530 bp, Homo sapiens
  misc_feature (1)...(530): n = A,T,C or G
gcgcgcctcgactgctgaggcattcggcacgagattntttgttatgatgtctgtgtggaaagcggctgtgcagacattcaattgttattattatgtcctacaagcattaattaattaacacactttagtaagtatgttcgcctgtaatattgaacgtaggtgcgataaataataggatgaggcaggaatcaaagacagatactgcgacatagggtgctccggctccagcgtctcgcaatgctatcgcgtgcataccccccagacgaaaataanaaaaaaaaaaaaaaaaaaaaaaaaaaaaaaaaaaaaccttggggggggggccgggcccccattcccccttatggggggggttttaaaatttcgggggcggggttttaaaacgggggggggggggggaaaaaannnnnnnnnnnnnnnnnnnntnntnttntntnnntttntntntnttgnnntttttttntnntntnttnttttttttttttttttttntnttttnnnntntntttttnnttttnttttggtttttg

SEQ ID NO: 21006 - DNA, 458 bp, Homo sapiens
  misc_feature (1)...(458): n = A,T,C or G
agattgatncgcgctgcaggannnnaattgaccccgcgctgcaggaattcggcacgagctcagccacaccccagatggagccacgcagaccatcgcctgggtgggcaaaggcatcgtctatgacactggaggcctcagcatcaaagggaagactaccatgccggggatgaagcgagactgcgggggtgctgcggccgtcctgggggccttcagagccgcaatcaagcagggtttcaaagacaacctccacgctgtgttctgcttggctgagaactcggtggggcccaatgcgacaaggccagatgacatccacctgctgtactcagggaagacggtggaaatcaacaacacggatgccgagggcaggctggtgctggcagatggcgtgtcctatgcttgcaaggacctgggggccgacatcatcctggacatggccaccctgaccggggctcatggcc

SEQ ID NO: 21007 - DNA, 477 bp, Homo sapiens
  misc_feature (1)...(477): n = A,T,C or G
cttgcccgcctgcaggaattcggcacgaggggaaccgtcgtggggaaggatggtgtgcgaaaaatgtgaaaagaaacttggtactgttatcactccagatacatggaaagatggtgctaggaataccacagaaagtggtggaagaaagctgaatgaaaataaagctttgacttcaaaaaaagcaagatttgatccatatggaaagaataagttctccacttgtagaatttgtaaaagttctgtgcaccaaccaggttctcattactgccagggctgtgcctacaaaaaaggcatctgtgcgatgtgtggaaaaaaggttttggataccaaaaactacaagcaaacatctgtctagatgtattgatggaatttctggctttctaaatgattttactttcttgccttgaatnttcaggcatagatgtcaacttaacagataacatggttttaagaaattaaatgttaacccagaaaaaa

SEQ ID NO: 21008 - DNA, 483 bp, Homo sapiens
  misc_feature (1)...(483): n = A,T,C or G
cctagaccgccctgaggaattttgcccgcctgcangaattcggcacgaggggaaataaatgactggatggtcgctgctttttaagtttcaaattgacattccagacaagcggtgcctgagcccgtgcctgtcttcagatcttcacagcacagttcctgggaaggtggagccaccagcctctccctgacaagcaaagtggatcagcaaaggctgcagtcaccagcatcttttccaaccttaatgaactgtatcctcaaaagaacactatcagactggctctgccgacttccagttctggaacaagaatggtaaactcatttttccctgctctgctcctctaaatacaactaagtaccttggaaactattcagcagacaatgataaagggctctgaaagctagaagaaaaggtgtacttgcaagaaacctcangacttgagtaacagcaacatgctcaccaaagctctgtatctactggaaaaan

SEQ ID NO: 21009 - DNA, 477 bp, Homo sapiens
  misc_feature (1)...(477): n = A,T,C or G
cctagatccgccntagcaggaattcggcaccgcggtgcaggagtaagngaccactgggctttggatgatcatcatgcccttcacttaactaggaagggtgtgaggaatctaaattatctgaagacattggatgtctccattgatccttctgaagagcctttatttcctgctgatgaatcgcatggaataggcggagctaaccttaagaggagctttgatgtccgagaggtcattgctagaatcgtggatggaagcagattcactgagttcaaagccttttatggagacacattagttacaggatttgctcgaatatttgggtacccagtaggtatcgttggaaacaacggagttctcttttctgaatctgcaaaaaagggtactcactttgtccagttatgctgccaaagaaatattcctctgctgttcttcaaacattactggatttatggntgtagagagtatgatgctgaagga

SEQ ID NO: 21010 - DNA, 452 bp, Homo sapiens
  misc_feature (1)...(452): n = A,T,C or G
agttgaccgccctnagaannacccgacccccgctgcaggaattcggcacgagggaaatgccaaactgcagcagcgccagctcataacagtcacaatgtcaagtgacagtcgagtggttgatgacgaactggcaaccaggtttcttaaaagttttaaagcaaacctagagaatcctatccgacttgcctagtcctcaaagataagaagttggtgttcagcttagttgattcagtagttgttaccaagaaacatatgttataggaaaacaacttggtatttaagtatgaagtggatgaaatgtttatttatttaaggtgaaagcatttgacccagggtgtcttcatcttcaatttgggtttaatgttatagaaataaatgatgataaactctaactaataaaggaaagagaatatttggttactcagatccatttttaacctctggtgctgtan

SEQ ID NO: 21011 - DNA, 494 bp, Homo sapiens
  misc_feature (1)...(494): n = A,T,C or G
cgcccccttcgancggctgcaggattgcggcaccagcaactcagtcatggtgctgctggcctccaggcttactggcccctcctgactggcatcaggggcttcctcaggtggtggagagagtttactttcaacaactagtttattcaagaaaagaacttactgattcctctgttcctaaagcaagagtggcaggtgatcagggctggtgtaacatccgggtcctttagtgcagctaactgcatttgtcactgatgaccaaggaggaaatcactaagacatttgagaagcagtggtatgaacgttcttggacaagccacagatctgagccttaaccctgtagtttgcacacaagaacgagctccacctccccttcttcaggaggaatctgtgcggatagattggctggacttttcaatggttctgggttgcaggtgggcactgtatggctgggtatggagcggacagcccccatgagtcagagcctcagcccggcg

SEQ ID NO: 21012 - DNA, 460 bp, Homo sapiens
  misc_feature (1)...(460): n = A,T,C or G
nttgcccggctgcagaattcggcacgagcccaccgcccaccacactctggggctgcctgtgggcaaacatatctacctctccacccgaattgatggcagcctggtcatcaggccatacactcctgtcaccagtgatgaggatcaaggctatgtggatcttgtcatcaaggtctacctgaagggtgtgcaccccaaatttcctgagggagggaagatgtctcagtacctggatagcctgaaggttggggaggggggaggtttcgggggccaagcgggttgctcacttacactggaaaagggcattttaacattcagcccaacaagaaatctccaccagaaccccgagtggcgaagaaactgggaatgattgccggcgggacaggaatcaccccaatgctacagctgatccgggccatcctgaaagtccctgaagatccaacccagtgctttctgctttttg

SEQ ID NO: 21013 - DNA, 512 bp, Homo sapiens
  misc_feature (1)...(512): n = A,T,C or G
aagagttcnngnnnnnncgccccaatgctcggctgcggaattcggcaccagaccctggcggctccgccggtccaagcgctgctcctgctcgtccctgatggataaagagtgtgtctacttctgccacctggacatcatttgggtcaacactcccgagcacgttgttccgtatggacttggaagccctaggtccaagagagccttggagaatttacttcccacaaaggcaacagaccgtgagaatagatgccaatgtgctagccaaaaagacaagaagtgctggaatttttgccaagcaggaaaagaactcatggctgaagacattatggagaaagactggaataatcataagaaaggaaaagactgttccaagcttgggaaaaagtgtatttatcagcagttagtgagaggaagaaaaatcagaagaagttcagaggaacacctaagacaaaccaggtcggagaccatgagaaacagcgtcaaatcatcttttcatgatcccaagctgaaag

SEQ ID NO: 21014 - DNA, 444 bp, Homo sapiens
aattgacccgctctgcaggaattcggcacgagggaacatcaggtacttcctcatctacgtcttgaccttgacggcctcggctgccaccgtcgccattgtgagcaccacttttctggtccacttggtggtgatgtcagatttataccaggagacttacatcgatgaccttggacacctccatgttatggacacggtctttcttattcagtacctgttcctgacttttccacggattgtcttcatgctgggctttgtcgtggttctgagcttcctcctgggtggctacctgttgtttgtcctgtatctggcggccaccaaccagactactaacgagtggtacagaggtgactgggcctggtgccagcgttgtccccttgtggcctggcctccgtcagcagagccccaagtccaccggaacattcactcccatgggcttcggagcaa

SEQ ID NO: 21015 - DNA, 340 bp, Homo sapiens
  misc_feature (1)...(340): n = A,T,C or G
cacgnnttntnncctnnctaancangacaaattcctgtcccttgtgccgctattatctgcccactgatgacgacacttatgatgagcacatacgagataaggctctaaaacagcagcagcaacaccgactggagaacctccatggagccatgtacacctcaggaggttggggctgagtgctggccctctgcgtcttccttattaaccttgaatcctcattaaaggtttctttacccacaacaaaaaaaaaaaaaaaaaatctctgggggggcccccccccccaattccccctttttgggagcgttttacaattttttgccccccgttttacacaccccgg

SEQ ID NO: 21016 - DNA, 513 bp, Homo sapiens
  misc_feature (1)...(513): n = A,T,C or G
tgggnnncnnaggcgtttgaccgcctgcaganatcgaccgcgctgccgaatgtcgtactaagcccctgcctatggcagtatccatccgcgggaatgcggactctattgtcgcctgcctggtcctgatggtcctctacttgataaagaaaagactcgtcgcgtgtgcagctgtattctatggtttcgcggtgcatatgaagatatatccagagacttacatccttcccataaccctccacctgcttccagatcgcgacaatgacaaaagcctccgtcaattccggtacactttccaggcttgtttgtaagagctcctgaaaaggctgtgtaatcggactgcgctgatgtttgtagcagttgctggactcacgttttttgccctgagctttggtttttactatgagtacggctgggaattgttggaacacacctacttttatcacctgactaggcgggatatccgtcacaactttgctccgtacttctacatgctgcatatgactgcagagagca

SEQ ID NO: 21017 - DNA, 482 bp, Homo sapiens
  misc_feature (1)...(482): n = A,T,C or G
naatggaacgccttaggatcatgccggaaaaagaagtgccattggttttcccaaaaacatatggagagtccatgttgtacttagatgggcagcggcatttcaactccatgagtggcccagcgaccttgagaaaggactaccttgtggagccctaagaacaccacatttgttgaaaactagcactctacccacagtgacgtggtatctgatgaagacctgatcgagtgtattgattttagtattgcttcgtgtcctccacacaggaggaggatgtattcagcctttaggatgatcagaaaagcagaaagagagagtggccggatggggctgaggggagaaagaattattaaacaataaatactttcaagacaaaaaaaaaaaaaaaaaaaacctggggggggggccgcgcccccatatcgccctatagggagtggatttacatttaccggcccggcgtttaacaacgtggggatgtgaaaaan

SEQ ID NO: 21018 - DNA, 537 bp, Homo sapiens
  misc_feature (1)...(537): n = A,T,C or G
aggcgattgacggccgtgaattcgccggctgcacgaattcggcacgaggaanacaggctcacgtttacagttgctgtattccggaaaacagctccagttaatgggactgccagcaggctagacatccttcgccggaatgtgcagcgcttagttctgtgcccgggaggggcttctctctcttttgggattggagtgtggcattgccgccagaaagcctgcagaattccgggttgtgcagccaagcaggaacggtgtacctttctagacccatcctcttgcaatcttggaccctaagaaaagatgtggagtgggctgctacctcctggcctaaatgaaagtgacgctgagtcaaactcggaagatgaagctacgttggagaactctggacttaacttacaggaagataaagaggatgagagcatcagaaaaacagaaatcatagatttctcaacagatgaaccanaaactgaaacagagtcanatgtaaatgcctatgaagagtgccttctggattcccatagatatgtggaatanatt

SEQ ID NO: 21019 - DNA, 511 bp, Homo sapiens
  misc_feature (1)...(511): n = A,T,C or G
cgcgaatnnnaggtttgacggngtggaatggtggagcacatggngatcaggcgcttcgtggaggttggccgggtggcctatgtctcctttggacctcatgccggaaaattggtcgcgattgtagatgttattgatcagaacagggctttggtcgatggaccttgcactcaagtgaggagacaggccatgcctttcaagtgcatgcagctcactgatttcatcctcaagtttccgcacagtgcccaccagaagtatgtccgacaagcctggcagaaggcagacatcaatacaaaatgggcagccacacgatgggccaagaagattgaagccagagaaaggaaagccaagatgacagattttgatcgttttaaagttatgaaggcaaagaaaatgaggaacagaataatcaagaatgaagttaagaagcttcaaaaggcagctctcctgaaagcttctcccaaaaaagcacctggtactaagggtactgctgctgctgctgctgctgctgctg

SEQ ID NO: 21020 - DNA, 366 bp, Homo sapiens
  misc_feature (1)...(366): n = A,T,C or G
nttgacccattgaccagcgctgcaggtttggagctgcttcagtccatctcccagaggcatttggtctgtatctttgctcaactgctaatttctcttggctgtagggtgtgtggttaaggtacaaccacccctaaagctcagttttgaagtgagtgtatttatagcttctctgctggtgctgccttctagagggatgatagatcatttgaacccaatgacaatttttaaccagaaaatttaattgtacctgaatcaacctttcagcctaggacgaagtctaggcccaagtcagagtattaatgatcatgagaattgtgtgctgaaccagtaaacgagtttaccttttaaaaaaaaaaaaaaaaaaaa

SEQ ID NO: 21021 - DNA, 471 bp, Homo sapiens
  misc_feature (1)...(471): n = A,T,C or G
aatagatcagccnctagagatgcgctccgagattgattctcagaattactgcaactgtgatgctggccggaatgaatggactagtgacacaatagtcctttcccaaaaggagcacctgccagtcactcagattgtgatgacagacgcaggccgaccacattccgaagcagcttatacactggggccactgctctgccgcggagatcagtcattctggaattcagcttccttcaacactgagacttcataccttcatttccctgctttccacggagaactcactgctgacgtgtgcttcttttttaagaccacagtttcctccggggtgtttatggagaacctggggatcacagatttcatcaggattgagctgcgtggtaagctcgccactctggacaagtcacagggtacccattatttagcaataaaagctttaactcaaaaaaaaaaaaaaaaaaaaacccggggggg

SEQ ID NO: 21022 - DNA, 457 bp, Homo sapiens
  misc_feature (1)...(457): n = A,T,C or G
ctgggaccccatttcccccgcgctgcaggaattcggcacgagtacaggaccagctggaccacagaggggaccaccccctgacgcccggcagccactatgcctaggcccatgtggtctgggcccttccagtgctttggccttacgcccttccccttgaccttgtcctgccccagcctcacggacagcctgcgcagggggctgggcttcagcaaggggcagagcgtggagggaagaggatttttataagagaaatttctgcactttgaaactgtcctctaagagaataagcatttcctgttcttccagctccaggtccacctcctgttgggaggcggtggggggccaaagtggggccacacactcgctgtgtcccctctcctcccctgtgccagtgccacctgggtgcctcctcctgtcctgtcgtctcaacctcccttccgtncagcattgagtgtgg

SEQ ID NO: 21023 - DNA, 454 bp, Homo sapiens
  misc_feature (1)...(454): n = A,T,C or G
attttgcccgtctgcangaattcggcacgagcctcagtcagccaagtggaggcggacttgaaaatgctcacgactgctgtggacagtttggttgcatactcggtcaaaatagaaaccaacgagaacaatctggaatcagccaagggtttactagatgacctgaggaatgatctggataggttgtttgtgaaagtggagaagattcacgaaaaggtctaaatgaattgcgtgtgcagggcgcggatttaaagtccaatttctcatgaccaaaaaatgtgtggttttttcccatgtgtcccctaccccccaatttcttgtcccctcttaaagagcagttgtcaccacctgaacaccaaggcattgtattttcatgcccagctaacttatttacaataattaagttctctgcttctgcatttggttggattcctgaagcgcagcccctgtgaataac

SEQ ID NO: 21024 - DNA, 454 bp, Homo sapiens
  misc_feature (1)...(454): n = A,T,C or G
agggggganaattgacncccttgntttgtacccggctgcagaattcgcacgagcctcagtgagctctctgaggagcaggcctttcacgtcagctacctggatattgaggagctgagcctgagtggactctgccagtgcctggtggaactgtccacccagccggccactgtgtgtcatggctctgcaaccaccagggaggcagcccgtggtgaggctgcccgccgtgccctgcagtacctcaagatcatggcaggcagcaagtgaagccccagctggactcatggatgtgcaccctttgctccctgctctttctgcctctgggctcatgtatctgcgcagctctggtaccctctgtgggtgccatctctacctctgacacagactgcctgccttgaagctgagaaggcacagggcaaggagccaaggaccacagagcctcagccagcccaggatc

SEQ ID NO: 21025 - DNA, 500 bp, Homo sapiens
  misc_feature (1)...(500): n = A,T,C or G
agggcncngcncncnaatcgccttggctgcacgaattcggcacgaggacctgtgcaaaattatacccacaccagcactagtggtaattattctaaattattgccaaaaagttttttttaatctgtctttcaagtttacagaaaagaaagcagtaaatgcattgatgtcattttattatgtacatatatcatgtgcattcaagctgtgtgacaagatatatcaatataaaaacaaggtatatactttattattttttgaaaacaaggatattgtgatcaattttaccctgtaaaacatatttctgtatttataggtcttaaacatgatgaattttttctattacaagcttatttaaaactgctttctcaagtcgttattgatacagcaagtgaacctgctgcagacagaagcagaggaaagccaagaacagcctttactggtgaagaaaagaatgaatgattctttgtaggcgccatcagccacttttagaagccatcaac

SEQ ID NO: 21026 - DNA, 493 bp, Homo sapiens
  misc_feature (1)...(493): n = A,T,C or G
cggggagttnnanannttttgatnngccccttgtatacgcctgcaggaattcggcacgagacagcctgtgggccgcttctttgggaatagctgggctgagacctacaggaatcgcttctggaaggagcaccacttcgaggccattgcgttggtggagaaggccctgcaggccgcatatggcgccagcgcccccagtgtgacctcggctgccctccggtggatgtaccaccactcacagctgcagggtgcccacggggacgcggtcatcctgggcatgtccagcctggagcagctggagcagaacttggcagcaacagaggaatggcccctggagccggctgtcgtggatgcctttaatcaagcctggcatttggttgctcacgaatgtcccaactacttccgctaggcccatcatggctcaagctgcccaaggcttttctgtcacctcttttgttctctcacactgaccagtcttggccttaagctgacttan

SEQ ID NO: 21027 - DNA, 501 bp, Homo sapiens
  misc_feature (1)...(501): n = A,T,C or G
aggccnnnnnnngncccnnaattgcccgcctgcaggatttcggcacgagccagcaagctgagaacctgagaattcctgcacggaagacaagagagtagcctctccagtttcagcaaccgctaggtttctattttttttcctggtttttactgttttggtaatatatatattgaaacaagaaatattaataccacatggggagaaccccaaccaaagaaatctgaaatatatagtaaatgcttttttttccgtttttgttcattttggatgctggtgctaaacctccaagtgtcatgatttaaaaaaaaaaaaaatttatgcccttcttatttatttctaggatgaggggaggataacatttttgctttcttatgtgactctctttgaaaatgtgcagtaagaaattcctcaaaaataaaatttttacccttcggaggaagagaaacatactcttaaaaaaaacctgggggggggcccgggaccccattctccctttaaggg

SEQ ID NO: 21028 - DNA, 506 bp, Homo sapiens
  misc_feature (1)...(506): n = A,T,C or G
atgtggcttttnaattgacgtccgtggcactcgcacgagctgagtttctgttctccctgggaagcctgtgccagcacctttgagccttggcccacactgaggcttaggcctctctgcctgggatgggctcccaccctcccctgaggatggcctggattcacgccctcttgtttccttttgggctcaaagcccttcctacctctggtgatggtttccacaggaacaacagcatctttcaccaagatgggtggcaccaaccttgctgggacttggatcccaggggcttatctcttcaagtgtggagagggcagggtccacgcctctgctgtagcttatgaaattaactaattgaaaattcaaaaaaaaaaaaaaaaaacctcggggggggggccgggccccaattcgccttatagggagccggataacaattcattggccgcggtttaacaacgtcgggacgtgggggacnnnnnnnnngnnnnggnnnnnnanntntnnnnnnnnng

SEQ ID NO: 21029 - DNA, 507 bp, Homo sapiens
  misc_feature (1)...(507): n = A,T,C or G
gaggcnnnncnaggcccnnaattgaccggcctgaggattgcagcgcgtgcaggaattcggcacgagattaagcaggagggagacacaacacggaaatattgctgacactgctgaagccagttgcttcttcagctgaccgggctcacttgctcaaaacacttccagtctggagagctgtgtctatttgtttcaacccaactgacctgccagccggttctgctagagcagacaggcctggccctggttcccagggtggcgtccactcggctgtggcaggaggagctgcctcttctcttgacagtctgaagctcgcatccagacagtcgctcagtctgttcactgcattcaccttagtgcaacttagatctctcctgcaaaagtaaatgttgacaggcaaatttcatacccatgtcagattgaatgtatttaaatgtatgtatttaaggagaaccatgctcttgttctgttcctggttcggtccagacactggtttcttgcttntgtttn

SEQ ID NO: 21030 - DNA, 473 bp, Homo sapiens
  misc_feature (1)...(473): n = A,T,C or G
nttgccctctctgcgggctgcaggttcaggtgcccccattgcctcaagctggccctggtcccaggtggcagcggttgaggaggggtacagggctctcaagcctgaggttttcttctctgggcttaattttctcttggggtacgtgcctgacagtgtttaaggtgtccgttgaactggagttgcagacttttaaatagatgaccccttcagatcatctgtgcctacctcctgcccatcaggcgtctacactgtcactcagacacctgtggcatgtggaggagactgccctgtcctgagcctggaaaatgtgaaactgtctcctgcaacctgctgggcatgtgggcactgctgtgttcaattgcaagaacaatttttatgaaatggattaaagcttgttttttatnannnanaannnannnnnnnnnnnnaaannnnnnnnnccctggggggggggccggcccccattcccccct

SEQ ID NO: 21031 - DNA, 457 bp, Homo sapiens
cttgaccccctttgcccccgcgctgcaggaattcggcacgaggtttctcctaagaagaagcgaggtggttgaattttggaagcacttcttgaatcggattaacccatgctcttattgaattttttcatctgctctgtttagtttgatattaaagcaaaattaagaggtcttagtttttcctatagaacttttaatatgtcaaaagctatattgtctaaatttcagtacttaagcaaatactgagtagtgttttaaattcagaaatagagcttctattatgaacacatgagaatgatttttttctcttaatcattattaaggaaatattttaatttcatggtcatataatggtgataagtaatacctgattgtttccttttctgttctagtaactcagaggagatacgtgttttatttgtgatagcaaattcctaaatgaacattaggcaagtggatt

SEQ ID NO: 21032 - DNA, 456 bp, Homo sapiens
  misc_feature (1)...(456): n = A,T,C or G
aattagcccggctgcangaattcggcacgagcagcaggactcggtctagcaaggccatcttgttgccggacctttctgaaccaaacaatgagcctttattttctccagcgtcagaagttccaaggaaagcaaaagctaaaaaaatagaggttcctgcacagctgaaagaattagtttcggatttatcttctcagtttgtcatctcacctcctgctttaaggagcagacaaaaaaacacatccaataagaacaagcttgaagatgaactgaaagatgatgcacaatcagtagaaactctgggaaagccaaaagcgaaacgaatcaggacgtcaaaaacaaaacaagcaaaaacacagaaaaagaaagtgcttggtcacctcctcccatagaaattcggctgatttcccccttggctagcccagctgacggagtcaagagcaaaccaagaaaaactac

SEQ ID NO: 21033 - DNA, 475 bp, Homo sapiens
ctttgcccttgcatcgcctgcaggaattcagcacgaggttattttctctttgaatactgtctgtttctgttttgcaaataccttacaatgtttagggtaaagccataaaaactggtctgtatagataagacactattaataaatgtatgatggtaatttccgcagaagcgggaaggagggaaacacagtaccaacaccctacctagctgcgaggaagccgggagataacatatccagtgtttttgtcttccataatacgaggcaggcttctatggcagagaattcccaaattctaagaaaggggttaagatgctgagaagccaaaagatgagcaataattttgctaagttgtcagcagccccaaccgtacatataaggaaactgaggctgaggttaagtgacttccctaggttcacagaacttatcagtggccaagctgggactgtggataacgctgccaccaccacccaggagt

SEQ ID NO: 21034 - DNA, 487 bp, Homo sapiens
  misc_feature (1)...(487): n = A,T,C or G
atggccccgcctgcagaattcgtgcgagccgcaagctgcgactcttcgacaccccgcacacgcccaagagtttgctctccaaagctcggggaattgattccagctctgttaaactccggggtagttctctcttcatggatacagaaaaatcaggaaaaagggaatttgatgtgcgacagactcctcaagtgaatattaatccttttactccggattctttgttgcttcattcctcacgacagtgtcgtcgtagaaagagaacgtattggaatgattcctgtggtgaagacatggaagccagggattatgagcttgaagatgaaacaagacctgctaagagaattgccgnnactgaaagcaatatgaagtcccggtatacaacagaatttcatgagctagagaaaatcggctctggagaatttggttctgtatttaagtgtgtgaagaggcctgatggatgcatttatgccattaagcgaacaaaaaa

SEQ ID NO: 21035 - DNA, 488 bp, Homo sapiens
tgaagagaaaaattagaacgcctgtttgcaccggctgcaggaattcggcacgaggctgaatgccttccacgtgatggaggaaaaggccaactctgtcctggtcttgctgtggcaccccatcgccccacagctcgtaccttctcaccagattcccctgaatccaaactcgtggtgcaaacctctaccttttttacaaaaagatcttattgttaatttattggttctggcacttgggcaaaccctgtagttaatactcctcccacactagacactgggtttcaggaggagggagactgccctgctttggtcccagagaggccctctgcagataggcgtggcccctcttcagaggacactaccctatggcactttctctttgaggtggagagacccataaagccttgaccacatcactccatatggggaggagaaggatccctgtcaccttctcctctcttcacggagcccttttgcagccctatgcctca

SEQ ID NO: 21036 - DNA, 516 bp, Homo sapiens
  misc_feature (1)...(516): n = A,T,C or G
gggggcnggggnnnncnccttttgacccgcgctgcaggaattcggcacgagctggagctggaaaaggagcatctggctcaactcgaatcatcaccagattgcggaatccagatagcaaacttagtcagctgaagagccagcaggtggcagccgctgcacatgaagcacataaattatttaaggagggcaaagaggtactggtagttaactctcaaggagaaatttcacggttgagcaccaaaaaggaagtgatcatgaaaggaaatatcaacaattattttaaattgggtcaagaagggaagtatcgcgtctaccacaatcaatactccaccaattcatttgctttgaataagcaccagcacagagaagaccatgataagagaaggcatcttgcacataagttctgtctgactccagcangagagttcaaatggaacgggtctgtccatgggtccaaagntcttaccatatctactctgagactgactatcaccccattagaanacaacaatccgt

SEQ ID NO: 21037 - DNA, 420 bp, Homo sapiens
  misc_feature (1)...(420): n = A,T,C or G
gggggggggggnnnnntttgcccgcttgcngagtctggagaattcgcacgagcccaggccatgccagggcaaggacgggccactggcccccgccggccggtagagtcaaccagaggcaaagccagattgagggttcccaggctgacaaatgtctgctgcctctgccacaggagagagaaggggaaagagggcaaaagaaacaaagacatcacgcgttgcaagtggctggacttttaaaaacctacctttgcctccagggttttctaggttactgtcaccccacttcctaaaaagtgtctcccccctcatcctatttaagacctgatgcagtctccccactggttctcccagggaaagaaaaggggaaatgttttgttgaaaataaaagggatgacaagaaagaaaaaaaaaaaaaaaaaa

SEQ ID NO: 21038 - DNA, 480 bp, Homo sapiens
  misc_feature (1)...(480): n = A,T,C or G
agcgtaacatgaattgcctcgcgctgcagcgaattcggcacgagctttcccttccagcctggaagtgttgcagaggtgtgcatcaccttcgaccaggccaacctgaccgtcaagctgccagatggatacgaattcaagttccccaaccgcctcaacctggaggccatcaactacatggcagctgacggtgacttcaagatcaaatgtgtggcctttgactgaaatcagccagcccatggcccccaataaaggcagctgcctctgctccctctgaaaaaaaaaaaaaaaaaaaaaaaaaaaaaaaaaaaaaaaaataaaaaaaaactaaaaaaataanccctctggggggggggccccccccccaattcccccttgtggggggattacaaaaactgcgggggggaaattaaaaaaaagggggaagggaaaaaaaaaaggcctaaaatcttaattccccattctcctaccttatagattccg

SEQ ID NO: 21039 - DNA, 469 bp, Homo sapiens
  misc_feature (1)...(469): n = A,T,C or G
nttggccctctgcgccgcgctgcaggaattcggcacgagctgaaacaggcgcctgcgagagtctgtaggagggaaaccgccatggacgatcagggttgccctcggtgtaagaccaccaaatatcggaacccctccttgaagctgatggtgaatgtgtgcggacacactctgtggatgattcaagagagagacaaacagaagccacgatgtcttctatgaacatcattcagacaccatcgtttctgctgcattctgtttgttcagagtcctaaatacagctcacattcagaggaaggggaattgggcttccccttttgatgaaagaagtataaagaatttgtggccatatgtaaaaccacaccaaccacatatgtatatttatcactggaataccttgaatccaagagggctcccagtgatttttgtctcctactttntatgtccttgcttagtttctccctgattgtat

SEQ ID NO: 21040 - DNA, 495 bp, Homo sapiens
  misc_feature (1)...(495): n = A,T,C or G
ntttgccccgggttgcacggagctgcagcaagctcaataatgcacccctggagaagtgaccacgctggaacccacccacccgctgtgctgaccatgggccctgagcgtcctgccccgaattcacgaggctgaggcatccgggagctggcgtaatgcctggccgcagtgtgtgtgtatcccataccccactctggaaggaaccatccagtaaaggtctttcagaaccactaaggtcccagccctcactaggatgtcaggagccaggtctaggcccagctttcacactgtggcagcccagtgaagcagactgggccatgaactctcctagccctggggccagcctgttccacaggcacccctgcaggaggcgctgccaggagagccttccatctcggggctctttgagggtccctccttctgggtgtcttcaggctgagcagagaggctcctgtaccctctctcttcggaatctgaagagccagaattaggccgtga

SEQ ID NO: 21041 - DNA, 477 bp, Homo sapiens
  misc_feature (1)...(477): n = A,T,C or G
attagatcgccctnnngattttgcaccggctgcangaattcggcacgagggaagattgaactcatcaagatgttcgacaagcagcaggcgaacaccatcttctggagcccccaaggacagttcgtggtgttggcgggcctgaggagtatgaacggtgccttatcgtttgtggacacttcggactgcacggtcatgaacatcgcagagcactacatggcttccgacgtcgaatgggatcctactgggcgctacgtcgtcacctctgtgtcctggtggagccataaggtgcaggcctgtggggcatagttttgactgtggatagaagcagggagtgctggctagctgctgactctggtgctgtcctgggacctcagggaaggggcaccaagcctctgtgttgaacagaagccttggctggtgttagtggcaggaggaggaggattctgggttgtagaagaggtggcgccgagtgcaggn

SEQ ID NO: 21042 - DNA, 407 bp, Homo sapiens
gaattcggcacgaggatggatggagctatctaaatactgtagaaagatgggaccctgagggacgacagtggaattacgtagccagtatgtcaactcctagaagcacagttggtgttgttgcattaaacaacaaattatatgctattggtggacgtgatggaagttcctgcctcaaatcaatggaatactttgacccacacactaacaagtggagtttgtgtgctccaatgtccaaaagacgtggaggtgtgggagttgccacatacaatggattcttatatgttgtaggggggcatgatgcccctgcttccaaccattgctccaggctttctgactgtgtggaacggtatgatccaaaaggtgattcatggtcaactgtggcacctctgagtgttcctcgagggggg

SEQ ID NO: 21043 - DNA, 467 bp, Homo sapiens
  misc_feature (1)...(467): n = A,T,C or G
ntttgatcggcttaggatttggccgacatacagggaacggttggctatgcgtctgaagggtttggggtgtcagaccctatgaccccactatcccacacccccaccctccctggacatgttcgctgaggagttggcggaggaggaactggagaccccaacccctacccagagaggagaagcagagtcgcggggagatggtctggtggatgtgatgtgggaatataagtgggagaacacgggggatgccgagctgtatgggcccttcaccagcgcccagatgcagacctgggtgagtgaaggctacttcccggacggtgtttattgccggaagctggacccccctggtggtcagttctacaactccaaacgcattgactttgacctctacacctgagcctgctgggggcccagtttggtgggcccttctttcctggactttgtggaggaggcaccaagtgtctcatgca

SEQ ID NO: 21044 - DNA, 498 bp, Homo sapiens
  misc_feature (1)...(498): n = A,T,C or G
atgggaaaccctnnnnnantttgacccgcgctgcaggaattcggcacgagccgcactgaggccagggacgagtgttcagtgggccacagtgaaccaaccaaaccaaccccgaatcatcgctctcgccatgtgcgtttctcttgttttttttgccagcccaatggtagtttctgaacctattgacattgttcaaaatggatcatgtgccatattttgttagttgacatctgagttttcagtaaaatgattatggaattaatcagcaaatgtagaagaatatattcaaagttaaaattcagtggcagcacagattatttttatcagagctgtaaagaaaacaactgtccttttctccccaccacccctcctgccccactttggcccagaaaccaaatgtgaacttcctgtctcccacctcagcactagtccatgccaggacaccagctgacaatttcttggttntactgtcaataattgtaccatgtgatcaattactgt

SEQ ID NO: 21045 - DNA, 475 bp, Homo sapiens
  misc_feature (1)...(475): n = A,T,C or G
nattgaccccgctgcatgaattcgccacgagggctaacgctactaccaacccgtcgcagctgctgcccttagagcttgtggacaaatgtataggatcaagaattcacatcgtgatgaagagtgataaggaaattgttggtactcttctaggatttgatgactttgtcaatatggtactggaagatgtcactgagtttgaaatcacaccagaaggaagaaggattactaaattagatcagattttgctaaatggaaataatataacaatgctggttcctggaggagaaggacctgaagtgtgaatgagtttccttgacttacactagattttgttttggcttataatgacaagaaaaatgaatttttttttccactttctaatgttaaatcccataaaactaaagtttcccgtaaaaggaaggtgtttgaagatgtgacccaattttngtaagtaatcatggattatctcgaaaaa

SEQ ID NO: 21046 - DNA, 474 bp, Homo sapiens
  misc_feature (1)...(474): n = A,T,C or G
aatagatncccctcngatttcgaccgcctgtacgaattcggcacgagctgacttcaagtggattaataccttgtatctttatgttgctaccttaatcatcatgggcctagtcttgtgtgcaattccatttgccaaaagctatgtcacattggcgttgctttctgggatcctagggtttcttactggtaattggtccatctttccatatgtgaccacgaagactgtgggaattgaaaaattagcccatgcctatgggatattaatgttctttgctggacttggaaatagcctaggaccacccatcgttggttggttttatgactggacccagacctatgatattgcattttattttagtggcttctgcgtcctgctgggaggttttattctgctgctggcagccttgccctcttgggatacatgcaacaagcaactccccaagccagctccaacaactttcttgtacaaagttgc

SEQ ID NO: 21047 - DNA, 445 bp, Homo sapiens
atttgctttggctgccgaattcggcacgagagatgtggctgtgattggagttccggatatgacatggggccagcgggtcactgctgtggtgaccctccgagaaggacactcactgtcccacagggagctcaaagagtgggccagaaatgtcctggccccgtacgcggtgccctcggagctggtgctggtggaggagatcccgcggaaccagatgggcaagattgacaagaaggcgctcatcaggcacttccacccctcatgacccggcagactgggactgcgggtctggtggggagcagcagacgtccccttcacaccgagaaccacgggggcccgtccaagacctggcctcccttaaacctgaaccccccaaatcaggtcacgtagaatcaagaactgtttgggatgaaatcaccatgtggggtccccagcctcgggccagttg

SEQ ID NO: 21048 - DNA, 476 bp, Homo sapiens
agatggacaaaagaactgctctgcacgaattcggcacgagcattgttctgaacatcctgtattgtaaaccatggctggggtgctaaagtgcctgtgaatcccgatgtggaaaaagctggaggtgaaagctcagcataccatgtatttactttaaaaacagaaaaaaagacatgtatggatatgtctattttttttttattggcacattgtatttttgtgttgacttgtttttagaaatgatgtgtccacacacgtacccgtgtctcttctgcatttctgtgtcatggttctgtttcttaatcacgtgcggcggtgtctaagtggtgttaccagtgtacgcgcagtgaccttggatgacagtggctctttctcacagcctcccctgagctgtgagaaacagctttctctgtacatatgcaactcctaataaaaggcatatttcttcctgttcaaaaaaaaaaaaaaaaaaaaaaaaa

SEQ ID NO: 21049 - DNA, 484 bp, Homo sapiens
  misc_feature (1)...(484): n = A,T,C or G
agagttncaggggttnnnnaaatgagngccatagagngcatggacgangctctcctagctcattcctaagacaacaggctttatctgggggataaagaattgaacatcattagctattccctgctggtttcagtcctggaataccagacagctgtcatgcggagggactttagcatggctgataaggtccttcctaccattccaaaagaacagaggaccagagttgcacactttttggaaaagcagggcttcaagcagcaagctcttacagtatccacagatcctgagcatcgttttgagcttgctcttcagcttggagagttaaaaattgcataccagttagcagtggaagcagagtcagaacagaagtggaaacaacttgctgaacttgccattagtaaatgtcagtttggcctagcccaggagtgcctgcatcatgcacaggattatgggggcctgctgcttttggccactgcctctggaa

SEQ ID NO: 21050 - DNA, 477 bp, Homo sapiens
  misc_feature (1)...(477): n = A,T,C or G
ntttgaaccgcgctgcaagaattctgcacgaggcaaggtgcccaggggcttctctcctaatttgcctcacgtaacagttgagaccccagagggcagcaaaactgggttcgaattggagagccgtccaggcacagacaaattcattcatctgcccagtgcccgctaactgcggttccaggcgccggcgacgcaattccagaggatgcttctggctggcacacctggcttcccctccatgctcagaactgcttcctactctacatccaggctcctgagcagcccccagcttaagcttcagcagctccagggtaaatccatctccgcccagagctgactccggatctgccccagtgacaataacaagataaatgccttccattctcttcgtacttacaggatgtaatccacatatttacacagtgtttcatttgcggtaaaaaaaaaaaaaaaaaaaaaaaaacctggggggggggccgg

SEQ ID NO: 21051 - DNA, 499 bp, Homo sapiens
  misc_feature (1)...(499): n = A,T,C or G
ggagtttncaggnnggggnnnnaccttgagngctcctagatngccttgcgaaannncncaagagggacggacgtcgctctgctactggtcccgctaagccggactataccgagccctgaaaccactgatcatccggaatggaaataccgccggactgtgacccacactccagggcggccttggtggcacagaactacatcaactaccagcaggggaccccgcacagggtgtttgaggtgcagaaggtcaaacaagccagcatggaggatattccaggaagaggacataagtatcgccttaaatttgctgttgaagaaattatacaaaaacaagttaaggtgaactgcacagctgaagtactttacccttcaacgggacaagaaactgcaccagaagtcaacttcacatttgaaggagaaactggaaagaatccagatgaagaagacaacacattttatcaaagacttaagtccatgaaggaaccgctagaagcacaaaa

SEQ ID NO: 21052 - DNA, 467 bp, Homo sapiens
  misc_feature (1)...(467): n = A,T,C or G
ntttgccccgcgctgcaggaattcggcacgagggtaaccagctccttctgctgccagagcgacggctgcaacagtgcctttttgtctgttcccttgaccaatcttactgagaatggcctgatgtgccccgcctgcactgcgagcttcagggacaaatgcatggggcccatgacccactgtactggaaaggaaaaccactgtgtctccttatctggacacgtgcaggctggtattttcaaacccagatttgctatgcggggctgtgctacagagagtatgtgctttaccaagcctggtgctgaagtacccacaggcaccaatgtcctcttcctccatcatatagagtgcactcactccccctgaaaagctatctgaacagaggaagataatgtagtgggaagtgcccatttgtcctcagcctgtaactccccgtgtgcctatanagaagttaatagagcanaaaaaaa

SEQ ID NO: 21053 - DNA, 471 bp, Homo sapiens
  misc_feature (1)...(471): n = A,T,C or G
agagggacatgactgcctgcacgattcggcacgaggaaaccctgggagagtctgggagtttacttccaaataaattgaataagttgatacagaggtttcctaacaaaccttacctcagctgaaaatggacaagtattttcaatgactgaaatatagcttctgacaactatgcagaggcattttagagacattggcattgccatgccctctttggagggtagaagaggcaaaacacttttttcaccctttggaatcatagtatgggtagaagttatgatttatcttgaaataaaatcctctgaacagagaagataaagacacaaaaagcctcgtgggggggcccggaccccaattccccctattatgagggggataaaatatagtggccgagattttacaacgtcaagaccggaaaaacanccgctcacacagcgaggcctcaagacagtgtttgacgaagcgatccgagcn

SEQ ID NO: 21054 - DNA, 482 bp, Homo sapiens
  misc_feature (1)...(482): n = A,T,C or G
aatagacccgcactagaaaaannttttgacccgcgctgcaggaattcggcacgaggatgcagctgtggtgtatcctaagccagaacagttgaaccatgcctttcacacatgtggtgtattttccacattggctttcttcatgataaatgctgtatccaatgctcaggtgagaggtgatagctatgaaagcggctgtttaggaagaacaggtgctcgagtttggcttttcattggtttcatgttgatgtttgggtcacttattgcttccatgtggattctttttggtgcatatgttacccaaaatactgatgtttatccgggactagctgtgttttttcaaaatgcacttatattttttagcactctgatctacaaatttggaagaaccgaagagctatggacctgagatcacttcttaagtcacattttccttttgttatattctggttgtagataggttttttatctctcagtacacattg

SEQ ID NO: 21055 - DNA, 471 bp, Homo sapiens
  misc_feature (1)...(471): n = A,T,C or G
gcggtgggttttnactgatgactgagaacttgccgagctgcgcgagcccgagccgcgttgggcacagtgaaagccaccgttgcccggggatgggtccctgacacttggggaagtaggagccctgtgtgatcgtgcgtctgagtctgggctgagaccagtcctggccagggcagttaccaggacggtctccggaggccgggattcgcggagggtccagcagcaggaagaaaccccaggaggaagaaacctcagacagatcgccggcgaggcagcgcgggatcccagcctcaggcgtgcgcggacggtgtgcggcgcacacaaccaagcttaggagccgactgttaagatgccccagtgacacggacaagtttctcctctgcaacccaatgagagctgctgaccacgagagcatcgcgggaccgccaaaggattctggaaaatgtggtcccgggtggccagtgtgcgctgacc

SEQ ID NO: 21056 - DNA, 470 bp, Homo sapiens
  misc_feature (1)...(470): n = A,T,C or G
ntttgaccctctccgccgcgctgcaggaattcggcacgaggggaaatgtagtttcccaaactgccttatcacttgggtggacatatgtctccttttatgccttttggtcttgagtaattaacagcatcctcttccacgctcagaagtgttctggttggggccaggcatggtggctcacgcctgtagtcccaacacttagggaggccgaggcgggcggatcacctgagatcaggagttcaagaccagcctggccaacatggcgaattcccgttctctactaaaaatacaaaaaatgtgtggggtgtggtggcaggagcctgtaatcctagctactcaggaggctgaggcaggagaatcgcttgagcccaggaggcggagattgcagtgagccgagatcgtgtcactgcactccagcctgggtgacaagagtgagactccgtctccaaaaaaaaaaaaaaaaaactcggggg

SEQ ID NO: 21057 - DNA, 352 bp, Homo sapiens
  misc_feature (1)...(352): n = A,T,C or G
ggaacaagacgcgtgtcctactcatctgctcccacggatgaccctggtcttcaatggttagcagaagggagaaaagaaagcaggaaaatgtgctattgagattccagtggtgacttcactgatatttagtgaatatttgatttagccaacatgccttcttttatgtgattttgtattaaagtaaaatgatttttatactttcaaaaaaaaaaaaaaaaaaaaaccttgggggggggccgggaccccaattccccttaaggggaggggtttaacaattaatgggcgcgggtttaacaacgccggaagggggggaaacaaaanncctnncccgggagcgtaccctgttgggttt

SEQ ID NO: 21058 - DNA, 450 bp, Homo sapiens
attggacctctcccccgcgctgcaggtaaaggtttgccactttaagaagggaactgagatctgcaactacagctactccaacacgattctggctgtgaagctcaacaggcagaggctgatagtatgcctggaggagtccctgtacatccacaacattcgggacatgaaggtgctgcatacgatcagggagacgcctccaaaccctgcaggcctgtgtgcgctgtcaatcaacaacgacaactgctactaggcgtacccagggagcgcgagcatcggagaggtgcaggtcttcgataccattaatttgagagctgcaaacatgattccggctcacgacagtcctttagcggcactggcctttgacgcaagtggaactaaacttgccacggcttcggagaaggggaccgtgattagggtattttccattccagaaggacaaaaactctttga

SEQ ID NO: 21059 - DNA, 470 bp, Homo sapiens
atagcccgcctgcagattctggcgagcccggcacgagggtgttttcgacgttggctgtggggaaacagcaagcggcgtggacgaccgttgctgagctggtgtggaacgtctgtgatcagattcattgggcttttgccagctctttttagattgtcctcttgagacctgtttacagaggaatggccagagaccacaggcactgcctcctgagaccatccacctgatgcgaagaaagctagaaaagcccaaccctgagaaaaatgcttgggaacacaacagcctcacaattgcgagtccagcatgtgcttcagaggccagcctggaagtgactgatttattgctcactgctttggaaaatccagtaaaatatgctgaggacaatatggaacaaaaggacacagacagaattatttgttcaactaacattcttcataaaactgatcagacactccgaaggattagatctcaga

SEQ ID NO: 21060 - DNA, 470 bp, Homo sapiens
  misc_feature (1)...(470): n = A,T,C or G
ntttcgcccttcgctccgcgctgcaggagagcggcacgagcttcctcggctgccagctctccggcgagccggagtcctagtgccgtaccgtcagtccccggccgcgcggagccgggatgcactgttcctgctgtgggtcctcatcatggagaccaaacgggtggagattcccggcagcgtcctggacgatctctgcagccgatttattttgcatattcccagcgaggaaagagacaatgcaatccgagtgtgttttcagattgaacttgcccattggttttacttggatttctacatgcagaacacaccaggattacctcagtgtgggataagagactttgctaaagctgtcttcagtcattgtccgtttttgctgcctcaccgtgaagatgtggaaaaagttttggatgaatggaaggaatataaaatgggagtacccacatatggtgcagttattcttgatgagacac

SEQ ID NO: 21061 - DNA, 480 bp, Homo sapiens
  misc_feature (1)...(480): n = A,T,C or G
ctttgaccgnnnntcccnnatagatccgtcttcacgaattcgccacgaggactcctgcagagactgagggttacgttgcaatcctcagaaccaggacctcggcgtggcctatcgagttatggcgaccaaagccgtgtgcgtgctgaagggcgacggcccactgcagggcatcatcaatttcgagcagaaggaaagtaatggaccagtgaaggtgtggggaagcattaaaggactgactgaaggcctgcatggattccatgttcatgagtttggagataatacagcaggctgtaccagtgcaggtcctcactttaatcctctatccagaaaacacggtgggccaaaggatgaagagaggcatgttggagacttgggcaatgtgactgctgacaaagatggtgtggccgatgtgtctattgaagattctgtgatctcactctcaggagaccattgcatcattggccgcacactggtggtcca

SEQ ID NO: 21062 - DNA, 484 bp, Homo sapiens
  misc_feature (1)...(484): n = A,T,C or G
gagcgtgggnttttnaattgatcgcatgtgagaactctgcacgagcagctgaagagctgttttgtgaagcatcccaggcttgcccaggagagacatttgccactatgtcaccttatctgggcttgccctggggcactgagacagttgtttggcagccccagcccagccaggggctcatccttctcagctcttgtccctgggaggcctctgcttgtcacttcccagagattgcagaggtgtgtcctgcctaccatctgcctgtccagcttggtgggggtccgggtcaccatttcctccagtcctgggccccatccttgagggccttcccagccagccagcaggagaggcaagaactgggggaacacaggaacctatgggaggaggggagcgctgggcatcctcaggctggcggccaaggcctgcccctggaggcactagaggagggcatctgtctgtgggagcccacaggctgcagggaggagga

SEQ ID NO: 21063 - DNA, 482 bp, Homo sapiens
  misc_feature (1)...(482): n = A,T,C or G
nttggacccgcgctgcaagaanntttgacccccgctgcaggaattcggcacgaggtctcctgcagcgtctggggtttacgttgcagtcctcggaaccaggaccttggcgtggcctatcgagttatggcgacgaaggccgtgtgcgtgctgaagggcgacagcccagtgcagggcatcatcaatttcgagcagaaggaaagtaatggaccagtgaaggtgtggggaagcattaaaggactgactgaaggcctgcatggattccatgttcatgagtttggagataatacagcaggctgtaccagtgcaggtcctcactttaatcctctatccagaaaacacggtgggccaaaggatgaagagaggcatgttggagacttgggcaatgtgactgctgacaaagatggtgtggccgatgtgtctattgaagattctgtgatctcactctcaggagaccattgcatcattggccgcacactggtggt

SEQ ID NO: 21064 - DNA, 488 bp, Homo sapiens
  misc_feature (1)...(488): n = A,T,C or G
gcgcgcggccnntnaaattgannaattgatcggcctgtccgaattcggcacgagtaaagcatcacacagtggcactagcattataccaagagtatgagaaatacagtgctttatggctctaacattactgccttcagtatcaaggctgcctggagaaaggatggcagcctcagggcttccttatgtcctccaccacaagagctccttgatgaaggtcatctttttcccctatcctgttcttcccctccccgctcctaatggtacgtgggtacccaggctggttcttgggctaggtagtggggaccaagttcattacctccctatcagttctagcatagtaaactacggtaccagtgttagtgggaagagctgggttttcctagtatacccactgcatcctactcctacctggtcaacccgctgcttccaggtatgggacctgctaagtgtggaattacctgataagggagagggaaatacaaggaggg

SEQ ID NO: 21065 - DNA, 468 bp, Homo sapiens
  misc_feature (1)...(468): n = A,T,C or G
ntttgccccgtcctgcaggaattcggcacgaggacctcgtgatccgcccgccttggcctcccaaggtgctgggattacaagcgtgagccaccgcacccggcctgaaaatattttctaaaaagataaaaaatatacataacgatgaaaaataatacaaatttaaaaaccaatacagtataacaactatttacatagtgcttacattgtattaggtgttataagcaatctagagatgatttagcaagtatacaggaggatgtgcctaggttatatgcaaatactgtgccattttatatcaggaacttgagcatctgcagatattggtatcggagggcggtcctggaaccaagcatccacggatactgaggggtgacatttcatgaagtgtagatcattgtattcagagattgtaaatgaaaaaaatatagaaactatntagttttggtagattttttttctgacaatgtg

SEQ ID NO: 21066 - DNA, 469 bp, Homo sapiens
  misc_feature (1)...(469): n = A,T,C or G
cattgcccgcctgcattcctccgcgctgcaggaattcggcacgagggaagattgagctgggggcaacagccaagctcacctgggcaggtctctgccacctccttgctctgtgagctgtcagtctaggttattctctttttttgtggctatttttaattgctttggatttgttaaatgttttctgtcttctgttaagtgtgttttctctggagatagaatgtaaaccatattaaaaggaaaaagtttcagacaagcaaaaaaaaaaaaaaaaaaaaccctcggggggggccccggcccccattcccccttatagggagccgaataacaatccctggcccgccttttaacaccgccggaacggggaaaagcnnnccnnnnnnnttnatgggggngccnncccgcctctcattgagttggccgcacccacttcccccctgtgttccttagccagttcccctccaccccctcn

SEQ ID NO: 21067 - DNA, 475 bp, Homo sapiens
agtgcccattgcattgcccggctgcggaattcggcacgagccaggacagatgccccctgcccagcctctttctgagaatccaccgaatcacatcttgttcctcaccaacctgccagaggagaccaacgagctcatgctgtccatgcttttcaatcagatccctggcttcaaggaggtccgtctggtacccgggcggcatgacatcgccttcgtggagtttgacaatgaggtacaggcaggggcagctcgcgatgccctgcagggctttaagatcacgcagaacaacgccatgaagatctcctttgccaagaagtagcaccttttccccccatgcctgccccttcccccgttctggggccacccctttcccccttggctcagccccctgaaggtaagtccccccttgggggccttcttggagccgtgtgtgagtgagtggtcgccacacagcattgtacccagagtctgtccccaa

SEQ ID NO: 21068 - DNA, 475 bp, Homo sapiens
  misc_feature (1)...(475): n = A,T,C or G
ngagtgactcgacgctgttgaattcggcacgagaatgtctctctctaataatggtggcgagaagaaaaagggccgttctgccatcaacgaagtggtaacccgagagtacaccatcaacattcacaagcgcatccatggagtgggcttcaagaagcgtgcacctcgggcactcaaagagattcggaaatttgccatgaaggagatgggaactccagatgtgcgcattgacaccaggctcaacaaagctgtctgggccaaaggaataaggaatgtgccataccgaatccgtgtgcggctgtccagaaaacgtaatgaggatgaagattcaccaaataagctatatactttggttacctatgtacctgttaccactttcaaaaatctacagacagtcaatgtggatgagaactaatcgctgatcgtcagatcaaataaagttataaaattgccttcaaaaaaaaaaaaaaaagacctg

SEQ ID NO: 21069 - DNA, 491 bp, Homo sapiens
  misc_feature (1)...(491): n = A,T,C or G
nctagacagccttgaggaatttggtncgcggtacggcagtgccataacgactgctttaactgtaagaagtgctccctctcactggtggggcgtggcttcctcacagagagggacgacatcctgtgccccgactgtgggaaagacatctgaattcaacacagagaagttgctgcttgtgatctcacacacagatttttatgttttctttctcacccaggcaatcttgccttctggtttcttccagccacattgagactttcttctagtgcttttcagtgatactcacgtttgcttaaaccctttagtgctttgtgatagttcagtcccagggaaagagaaaactcgccctaggccctatgtgggaagatggtttgaaatttttgtaatcgagtaaggcacacccaaatgtaaaaatccttttgaatgatgcctttataaatctttctctcactgtctatttaagcgcaattaacatatgtcacgaacttgan

SEQ ID NO: 21070 - DNA, 508 bp, Homo sapiens
  misc_feature (1)...(508): n = A,T,C or G
ggggnacggcncaatagacgcctgtatggaacggcactaggaacatcaccttgcccatgtctcacgcgggaacaggaaatatagtggtcattatgattagctatccaaaaggaagagaaattttggagctggtgcataaaggaattccagtaacgatgaccatatgggttggcacccggcatgtacaggagttcatcagcggtcagtctgtggtgtttgtggccattgccttcatcaccatgatgattatctcgttagcctggctaatattttactatatacagcgcttcctatatactggctctcagattggaagtcagagccatataaaagaaactaagaaagttattggccagcttctacttcatactgttaagcatggagaaaagggaattgatgttgatgctgaaaattgtgcagtgtgtattgaaaatttcacagtaaaggatattattagaattctgccatgcaagcatatttttcaaaaatatgcattgacccatggctt

SEQ ID NO: 21071 - DNA, 477 bp, Homo sapiens
  misc_feature (1)...(477): n = A,T,C or G
agcggcccattgcattgactcgcgctgcaggaatacagcacgagctacgccgagggacagagacgctcatgctgtgttctcaggatgaccgagtgggagacagcaggaccaccggtggcagagaccccagacatcaagctctttgggaaggggagcaccgatcatgagcagatcagtgacattaacctgcaggattacattgcagcgaaggagaagtatgccaagtacctgcctcacagtgcagggcggtatgccgccaaacgcttccgcaaagctcagtgtcccattgtggagcgcctcactaactccatgatgatgcacggtcgcaacaacggcaagaagctcatgactgtgcgcatcgtcaagcatgccttcgagatcatacacctgctcacaggcgagaaccctctgcatgtcctggtgaacgccatcatcaacagtggtccccgggaggactacacacgcattgngcgcgcc

SEQ ID NO: 21072 - DNA, 434 bp, Homo sapiens
  misc_feature (1)...(434): n = A,T,C or G
gtgggggaccacccaattgagccccctnattgaccgcctgcggaattcggcacgagctctgccataaacttctagcgtgtgccaatggtcacctgccacactcgcaccaggttgtccgtgtagccagcaaacagagtctggccatcatcagaccacgccagggaggtgcactggggtggttctgccttgctgctggtactgataactacttgcttcagttcatctacaatgatctttccctctaaatcccagatcttgatgctggggcctgtggcagcacacagccagtagcgggtagggctgaagcacagggcgttgatgatgtccccaccatctagcgtgtaaaggtgtttgccttcgttgagatcccataacatggcctggccatccttgcctccagaagcacagagggatccatctggagagacacggca

SEQ ID NO: 21073 - DNA, 474 bp, Homo sapiens
  misc_feature (1)...(474): n = A,T,C or G
ntttgacccgcctgcangaattctgcacgagcggaagtggtgcttctcagagccaggaaagctggatcgtgtgggtcggggcggtgggccggcgcgggaatgcctgggtgaggcctgctccagctctggcctccctgggcccgagcccttggagttccagcatccggcgctggctaagtttgaagatcacgaggtcggatggctgcccgagacgcaaccccaaggctccatgaacctggactccgggtccttgaagctcggtgatgccttcaggcccgccagtcggagtcggagcgcttcaggcgaagtcttgggttcctggggaggatcaggagggaccatacccattgtccaggtatggaagtcaggagatgcaggctggtgaggggagcatctgggaaacaaaacttgagccacatttcagtcgactgttcacccttccaggctgttccccaaggagcagaaacccccagn

SEQ ID NO: 21074 - DNA, 472 bp, Homo sapiens
  misc_feature (1)...(472): n = A,T,C or G
cttgacccccctncaaatttgacccccgctgcaggaattcggcacgaggatgggtccccttctggctgcatgaatggaaatgagtgactggaaatcccataggccacaagaatgactttcacaagggcaggaacattgtggaaagactgcatcattctgatgaggcaaaatcctccagctattcctgtctgggccagttttgtaggtccatctgtgcatgggcagcactagtcaaaaagccaaggaaaaaacagagcagacctgaaggctaatcttatttttgccactaacttattgaatgaccctaagcaagttccttctcctcttatggccttgtgccaagcctatgaaattggaggtggctttcctgctctaaagcattttgatgtctcattctgtgtttggtaacccctataaactggggcagaggaaaagaatgatggttcaaggccatactttccttgaaccttgn

SEQ ID NO: 21075 - DNA, 485 bp, Homo sapiens
  misc_feature (1)...(485): n = A,T,C or G
tggcaggcgacccaattgaccgccttcatagtcacgcattagngaaatcatcacttccttctggttttatgtatttgtagactatgcagcttttcattaaactgcaagtatatacaagacagatctgaaattaggcctgagtgttccgatccaccactgtactagtaaataaaaatccacctaccttttatgtggaaaattatgtgctattgagtaacttttagctcttttttaaaaaatgggtgaaatttaagtgtcttttttatgagaatgacacatgaagagatctgagagcaatctcatgtagtcttccatgaacctgcaattgtttggtatgcgtcagcattttccaatttccaggttggatctagagctgctgttgatcactcaggcatactaatggattcatttagatgggtccaagctgcagtccatgagcaataacagactaccccagatactgcagtttacgcagtgcttagtaa

SEQ ID NO: 21076 - DNA, 483 bp, Homo sapiens
  misc_feature (1)...(483): n = A,T,C or G
catgaccccctcggattttaccgcgttcngcaacctggnacaatggaatggtggaatgatatttggcttaaggagggttttgcaaaatacatggaacttatcgctgttaatgctacatatccacagctgctatttgatgactattttttgaatgtgtgttttgaagtaattacaaaagattcattgaattcatcccgccctatctccaaaccagcggaaaccccgactcaaatacaggaaatgtttgatgaagtttcctataacaagggagcttgtattttgaatatgctcaaggattttctgggtgaggagaaattccagaaaggaataattcagtacttatagaagttcagctatagaaatgctaacaatgatgacttgtggagcagtctgtcaaatagttgtttagaaagagattctacatctggtggagtttgtcattcggatcccaagatgacaagtaacatgctcgcctttctgtgg

SEQ ID NO: 21077 - DNA, 493 bp, Homo sapiens
  misc_feature (1)...(493): n = A,T,C or G
cttagcaccccctgcaggaattcggcaccagccatgatgcattagaagtaactaatgtttgaaattttaaagtacttttggttatttttctgtcatcaaacaaaaacaggtatcagtgcattattaaatgaatatttaaattagacattaccagtaatttcatgtctactttttaaaatcagcaatgaaacaataatttgaaatttctaaattcatagggtagaatcacctgtaaaagcttgtttgatttcttaaagttattaaacttgtacatataccaaaaagaagctgtcttggatttaaatctgtaaaatcagtagaaattttactacaattgcttgttaaaatattttataagtgatgttcctttttcaccaagagtataaacctttttagtgtgactgttaaaacttccttttaaatcaaaatgccaaatttattaaggtggtggagccactgcagtgttatcttaaaataagaatattntcgtgag

SEQ ID NO: 21078 - DNA, 239 bp, Homo sapiens
ggaaacattgatcgcctgtggaatatggcacgagcgagagagagagagagagagagagagcaggagtatgtcaccttcctgggggccttggctttgatctacaatgaagccctcaagggctgaaaataaatagggaagatggagacaccctctgggggtcctctctgagtcaaatccagtggtgggtaattgtacaataaattttttttggtcaaatttaaaaaaaaaaaaaaaaaaaa

SEQ ID NO: 21079 - DNA, 502 bp, Homo sapiens
  misc_feature (1)...(502): n = A,T,C or G
ngtgcgttnnnnnnaaattgatcgctcgtaggaactttgcacgagggagtaagcaattcagagtatctgtgatggacttgaccttggcagtgaatttagtgacagcagagaacaaccacaatgagggaacaaataagcagcagctgtcaatctaaacagcacaagtgccacttctttgtttaatatctggactaaatacgcccccaggctgccagcagactattacaacgaaaagcttctgaaggttggagatagcctttgtcaaatgaaagaatacaaactggcccttttacaatgctatggaagatatcttcagcagttcaataccaattttgatgagaataaagtggatgtaactcaattcaaagctacctttttcccaaaaggctttaaagataaaactgctggacttacatttcatgctttgagtggcaaaaatatgtgcaactaccagctggtctgcgacagtgatgaaaacctgaagaataaagaatctgtggtc

SEQ ID NO: 21080 - DNA, 499 bp, Homo sapiens
  misc_feature (1)...(499): n = A,T,C or G
cccgccccccnnnnngnaatgagcgcctcggaannncattgacccgcctgcaggaattcggcacgagcatttctacctcccccctgggcaggaatcgggcgcctgattgctgagtgtcatctcaaccccatcatcctgcccctgtggcatgtcggaatgaatgacgtccttcctaacagtccgccctacttcccccgctttggacagaaaatcactgtgctgatcgggaagcccttcagtgccctgcctgtactcgagcggctccgggcggagaacaagtcggctgtggagatgcggaaagccctgacggacttcattcaagaggaattccagcatctgaagactcaggcagagcagctccacaaccacctccagcctgggagataggccttgcttgctgccttctggattcttggcccgcacagagctggggctgagggatggactgatgcttttagctcagacgtggcttttagacagatttgttcatagaccctct

SEQ ID NO: 21081 - DNA, 479 bp, Homo sapiens
  misc_feature (1)...(479): n = A,T,C or G
nnnaattgatcgcctgcagaattcgctcgagaaaccttctagagctgatttgatggacaatggagagagctttccctgtgattataaaaaaggaagctagctgctctacggtcatctttgcttaagagtatactttaacctggcttttaaagcagtaataactgccccaccaaaggtcttaaaagccatttttggagcctattgcactgtgatctcctactgcaaatattttcatatgggaggatgggtttctcttcatgtaagtccttggaattgattctaaggtgatggtcttagcactttaatacctgtcacattttttgatctccccttatgccatcttaaatgtaagctgaaactggactactgcgtctctaggtgtaagccaaaagacgaaccaaattttactacttttgagataggcccaaggtgcagaattatataattctaacgcttaacatatgtgaaagggacgctgc

SEQ ID NO: 21082 - DNA, 483 bp, Homo sapiens
  misc_feature (1)...(483): n = A,T,C or G
attcgacccccccttcccnnatagacccgtcgtgcaggaattcgccacgaggaggaagtgtgccgacagcgtggacttgctggccggactacggcgcccactagaacctgcaccatgagctgaccgtggctgtgaaccctggcgaccactgctggtacgagagcagcattggcgaccagcgcttcacggcttatgcatctggatgtgacattgtaatactgggaagcgattttgaaagattacagataatcccaggagctaaacatggaaatattcaagtgggatgtgtagactgttcaatgcaacaaggcaagattgcagcgtcttatggaaatgttatctccatttttgaaccagttaacctaccaaaacaaaagaaaaatttggaattatatagtcagtggcagaaaaggggccaattttttctggaatcaatagcacacaatataacctgggatcccacaggcagtcgtcttttaactg

SEQ ID NO: 21083 - DNA, 502 bp, Homo sapiens
  misc_feature (1)...(502): n = A,T,C or G
ngtggggtnnnnnnaattgcccgatcgcagaactttgcacgagggaacgtgatgccgctgggcgcacggacagcctcccacatgaccaaggacatgttcccggggccctatcctaggaccccagaagagcgggccgccgccgccaagaagtataatatgcgtgtggaagactactaaccttacccggatgatggcatggggtatggcgactacccgaagctctctgaccgctcacagcatgagagagatccatggtatagctgggaccagccgggcctgaggttgaactggggtgaaccgatgcactggcacctagacatgtacaacaggaaccgcgtggatacatcccccacacctgtttcttggcatgtcatgtgtatgcagctcttcggtttcctggctttcatgatattcatgtgctgggtgggggacgtgtaccctgtctaccagcctgtgggaccaaagcaggatccttacaataatctgtacctggaacgaggcg

SEQ ID NO: 21084 - DNA, 493 bp, Homo sapiens
  misc_feature (1)...(493): n = A,T,C or G
agcggcgggaangtttaaccttgatgnattgaccgaccgtgcganacggcacgagcagaatcagaaagcctgtttatgtggccacccctttgattaaaaatgaggcaggcattataaaagatacaaaagagacgacaagtggatggtgtgacctgaatcggagtcaggcgcttatgtggactcatcacacctgtttacttggttgatttaatttcccaatttcataccgatttttggtgacattaaatttgaatgacttggccaggcacggtggctcatgcctgtaatcacagcactttggaagtccgaggtgggtggatcacctgaggtcaagagttcgagaccagcctggccaacatggcgaaaccctgtctctgctaaaatgcaagattagccatgtgtggtggtgggcgcctataatccagctactcaaaagctgangangagaatcgcttgaccccggaagcnngaagtgagtgagccaggttgtgta

SEQ ID NO: 21085 - DNA, 479 bp, Homo sapiens
  misc_feature (1)...(479): n = A,T,C or G
gcggccgtttgatgaccaactgaggccctgccgaannggcacgaggagatcagtgctgactgcctgagaagaggccttccacaagctgcctttctggtgtccccatgttcttccttccttccttccagaggccgngagagggagggcccgtgtcagcctgctctgccggtttcccgactgctgaacctgtctgtgggaagctgggtttgactatgtgatgctgaggctctgagaggagggctacccttttccccaccctcggcccccattcctatgagtagaagcctgcccagctgcggtggtggggtttgaggaggctaggacttatagcanggaanaacaaggaagcagaatgaaaaacagaaacacttagaaatctgggattggtacttctccttatgtaaagattgtggctgacgaccagcttctttagaggaagcaagtctaggagaagggctcatacctggtccgtgagggcc

SEQ ID NO: 21086 - DNA, 497 bp, Homo sapiens
  misc_feature (1)...(497): n = A,T,C or G
cttcgcacccccntnnnnnannatagacncgcgctgcaggaattcggcacgagatttctctacataaatctagatactcattaagtagccttttgtcaaaagtatctcatacttataaacagtatgagataggaggattaaaatattattttaaagaaaccactgtttccccctaaaatgtcataagagcactgaagaacttgaaatatttttttcagagtttctcacacactttaaaagtctaacttttttgtgtgtaagcatttagcttgccagcatatttctttttggctccttaaattgcggttgtgtttgcagtattgtcacttttgctctcactgttatgttgaataataattagcatataattgtctacagaagcaagagcaatctggaaggaacaaaaatgttttctgtgattaacagtgaagaccttgtaaatgcagatgtgtgataaagcatttagtcagtcccccaaacagtcatgccaactgtga

SEQ ID NO: 21087 - DNA, 492 bp, Homo sapiens
  misc_feature (1)...(492): n = A,T,C or G
cggccatggatcggcgctccgnannnnnnaattgacccgctctgcaggaattccgcacgaggtcacgggagcccagggtacccgcctccttttcgtaacactgttccccccggtcagcccatctagccctgtcctccattcctcacgccatctccatccccatcttgagtcctggaacggccctgggtgcctgcccctcactgtgcaactctgggagcagcccggcaggttggggcgtcttccagaacctctcccttctggagccactctgcactgcgggctaaacatgtttccagtgtgattccttccagtgagccaaacccggtggctgcttcatgagcctgactgcctctcgcctgctctcagcaggaagggacccctggagcaggctggcccggggtggtgaagtagctggagcccgatcacagtcccgcggtttgtcagggggcccaccttctagatgaccccttaataaagtgatggccccacaga

SEQ ID NO: 21088 - DNA, 480 bp, Homo sapiens
  misc_feature (1)...(480): n = A,T,C or G
cgccccctttgagcgcctgcggaaaaggacacgccttctcagtaccagacaaggtgacatcctccacccttagaaaatgactgacattgttttgttactgctcctacccaccaaggggataaagaacgcgagttctgagtgttggatgagtcagtcgcgtggaatgacgtggagcgtggcgctctgtaacttcctgccgtctgccaccccgccacgtgtatttaaccctcgcactttctccactgtggagatggctggggcggcgccccacagtgtgtattcctgtcctctatgttagagggcatcagaagcacatttactgggctatctatatctctatataaaagagctttataaaaacccacaataggagcacgacgcatgattggtgtttgaggcgtttgccagctgggacaaactgcgtttggagctgtggttaagctgactaaggaggcggnggctctttcttaacattaccac

SEQ ID NO: 21089 - DNA, 504 bp, Homo sapiens
  misc_feature (1)...(504): n = A,T,C or G
agcggcgtngganngtgaaacctcgaagaattgacgancgtgcgaaancggcacgagccaacccttctggccctcgcaccactgtgactctgccatcttcctcagacggaggctgggcgtggggggggctgtcctggctctgctgtcccccaagagggtgcttcgagggtgaggacttctctggagaggcctggagacctagctccatgttcctcctcctctctccccacttgaaccatgaagtttccaataatttttttttctttttttccttcttttttctgtttgtttttagataaaaattttgagaaaaaaaatgaaaaaattctaataaaagaagaaaaatggcnnaaaaaaaaaaaaaaaaaaaaaaaaaaaaaaaaaaaaaaaaaaaantccccggggggggggcccggcccccattcccccctttgggggggggattaaaaatcccggggcggggttttaaaacgggggggggggggaaaaaaggggnnnnnnttg

SEQ ID NO: 21090 - DNA, 476 bp, Homo sapiens
  misc_feature (1)...(476): n = A,T,C or G
atttgccncgcctgcttgaattccgcacgagtattaatcagaggtggcttagttacattgaaatcgcttttttgatgctgtttttttactgacataactcatgtttgaggagaataatgcctgtatactcacagcttatattgtccttcagctatattataaatcaaaaggtctgggcaatgtatacttttgattaatatatacttttgttatagaacaaaaaacaatggagtgtgtaatagaagaaatgtgccacacttttcaagttttatataacatatgaaattcagttaaaagaatgtgtgtttgataatgacttttaactggtaaaaatattacttgcacgaagtacttgatgtatggttatcctgaaatttcggagtatttgggtgttctttgtctaaaaatagtctgttttgtcagtccttcagaatattatttattctgaagattgtccctcttgcacttggcaagtt

SEQ ID NO: 21091 - DNA, 474 bp, Homo sapiens
  misc_feature (1)...(474): n = A,T,C or G
attgaccgcattgaccagcgctgcaggaattcggcacgaggtttttacaccgttaaaaccctgagtggattgcttggtttaatgcatataaacagtactttatctacttaaagcaaagttttgctttcttgaatgactttttctgtgagatgaatttttgataagaactagggaaaacatgtcttttaggtgtcttgctgatgactatccataggaggaatggctatcccaaaaaaagttccgcaaaaaagtagatgagtttcttttttttttaagcactaaagaacaaaatgcatttttcattaatacaggcttctgatgaaccaggaatcctgttttcgtaaagttccaatgttgatgagagtaaattcttaagcatttgtcctagaggtgaaagcagctgaatgtttctgaaccatcaagaggcaaacaaacaggagtttgtttcttgaacctgcttatgcacacagcttn

SEQ ID NO: 21092 - DNA, 327 bp, Homo sapiens
  misc_feature (1)...(327): n = A,T,C or G
attagaacagcatgaaagantttgaccccgcgctgcaggaattcggcacgaggagccattgaggaccctatcctggcctacacagctgaaggagagatcaacaatgtgcagtgggcatcaactcagcccgactggatcgccatctgctacaacaactgcctggagatactcagagtgtagtgttggtggcgctgtgcccacgaggcaggggcttttgtatttcctgcctctgccccacccccaaacctcctgtataagaagtaccgtattttctgcccatcatactttgtaataaaacttgaacatgtaaaaaaaaaaaaaaaaaaa

SEQ ID NO: 21093 - DNA, 495 bp, Homo sapiens
  misc_feature (1)...(495): n = A,T,C or G
ggcgccnnngnnnttaaaccttgatgactggagaacctgcacgaggaacgagggacaatttgctacaagttggagataagagacatggcatactgtgaaaccagtgctgacggaagaaggtgactttcttggaaggtcaagacacttgcttgacagcgatgtccaggagggctagggagagttctgctggaagtgaaggcagcacctgagggtggctgagggaactggtcagggctgggaacgcctccagccctttgaggaatgattcgctgattaagagatgtttggccttgaaaattgcaagaatgaaatctcttggtgggaatgtgtagccaaaagccagcaccctgagtggctccaaggtttggggaccctctcaaggcacaaatcccagttccttttcaattttgaaaatcgttgtgggcgattctggaattgagaagtgtgctgagagccatggatttaacatgacaagaatttccgccccttcgtcac

SEQ ID NO: 21094 - DNA, 539 bp, Homo sapiens
  misc_feature (1)...(539): n = A,T,C or G
nggagatcgacnnccgtngattgancggctgcangaattcggcacgagcaagagtttgcattttcttgatgattcatctccatgagtgcacaatccctgaactcactgtcttttctccacacttgtcctaagccaaggtagatttgtacgtagacagactggtgagcaagcattatattttatttttacccttgcatgacattttcattttaatcaataacattatttggcctgagcttgtgggtctgttcagactgtctcctctcatggtttgaaactgcatctgaatgcctgccttcaatcctggccaagttggagtagactggtatgagaaaactatgattagttcacatttactggtgcatccttgatcctctcacagatagaggtcttaaaggttggatcatgtaacattgcttagtagaagaatcttcttctaaggatgatgggctttctacagcctgcttaccactaacagtaaggaatctttcataaacacacctcnagtttgttccagtgggcttanagggaggacctga

SEQ ID NO: 21095 - DNA, 496 bp, Homo sapiens
aggggcaaatcgacggctgtagtatgagcgctctggtgaccttcgcgaaggtgtcgctgccaagaaacgtgtcctgcgcgctacgccgtctgtttctagggcaacgccggcgtctcttagcaaccgcgcgcggcctaggtgggtccccccggcacccccagacctgccatggcgaccgcgagtcctagcgtctttctactcatggtcaacgggcaggtggagagcgcccagtttccagagtatgatgacctctactgcaagtactgctttgtgtacggccaggactgggcccccacagcgggtctggaggaggggatctcacagatcacatccaagagccaagatgtgcggcaagcactggtgtggaacttccccattgatgtcacctttaaaagcaccaacccctacggctggccacagatcgtgctcagcgtgtatggaccaaatgtgttcgggaacgatgggttcgaggctatggggccgtcacgtgcccttc

SEQ ID NO: 21096 - DNA, 497 bp, Homo sapiens
  misc_feature (1)...(497): n = A,T,C or G
catcgcncnccnntnnnnnannatagacccgcgctgcaggaattcggcacgagccgcccatgaaaatgcctccaaactgagatgctttcagctgagaacagatttgactcacagacattaccaaagaggagcttgtgaatccaggaaaagctccagggggctcgctgatctgagcagagagctttcagtgacccattttcctgtctagactctgccttaagctagtggcaactgctggggccccaggtacttgggacatggaaactcgttggatggctgggcagatgtaagcctgtccatgcagtcagccgatcctctgctcaggttcagctggactctgccatctgtgggcccagcatcactctgtaagttccttgaaaggaagaacaaccttagagtatttctgatacaaaatgagggcctctgctcttgatttaattataaaatgtctacgtctttctccagtttctgagccctatgcacattggcttgtgggg

SEQ ID NO: 21097 - DNA, 481 bp, Homo sapiens
aatttgatcggcctgtggaattcggcacgagggagaccagaccttgtggatcaccaggcaggattagcggccggaattgagagaacagagccccacagagctcgtcggggaccgtcccccagtcacaagagtgtctcaaggaagcagtcttctcccatatcccccaaagataactaccagagggtcaggtctctgagcccttctcagtgtagaaaagacaagtgtcaaagcttccccactcaccctgagtttgccttctatgacaatacgtcggttggcctcactgaggctgagcagaggatgcgtggcctcccaggatattttgggtcaaatgaagaggatgaaaccacaagtacacttagcgtggagaagctggtgatctagactgagaatcagcctgagctttacacagctggggtctgctactcgcgttttgtagacttttgtgtaactatttgtaccgctagacagaatgtgagga

SEQ ID NO: 21098 - DNA, 482 bp, Homo sapiens
  misc_feature (1)...(482): n = A,T,C or G
cttcgacgcttgtatncgcctgcgcggatcctgggccttacagaaacatctgcatatgtccccaggagacctggtactgggactctgggaatataacagaggtggtgatgagtggagtgcgctgcacagggactgagctgtccctggatcagtgtgcccatcatggcacccacatcacctgcaagaggacagggacccgcttcactgctggagtcatctgttctgagactgcatcagatctgttgctgcactcagcactggtgcaggagaccgcctacatcgaagaccggcccctgcatatgttgtactgtgctgcggaagagaactgcctggccagctcagcccgctcagccaactggccctatggtcaccggcgtctgctccgattctcctcccagatccacaacctgggacgagctgacttcaggcccaaggctgggcgccactcctgggtgtggcacgagtgccatgggcattaccan

SEQ ID NO: 21099 - DNA, 469 bp, Homo sapiens
aggtggcaatgaccgtcctgagaattcggcacgaggcggcttcgtgggcagcgagagtcacagacaagacagcaagcaggatggagcactaccggaaagctggctctgtagagctcccagcgccttccccaatgccccagctacctcctgatacccttgagatgcgggtccgagatggcagcaaaattcgcaacctgctggggttggctctgggtcggttggagggcggcagtgctcggcatgtagtggtctcagagttctggcagggctgcaggaaaggctgtcagctgcgctgagattgtcaagcggcgggtcccaggcctgcaccagctcaccaagctacgtttccttcagactgaggacagctgggtcccagcctcacctgacacagggctagaccccctcacagtgcgccgccatgtgcctgcagtgtgggtgctgctcatccgggaccccctggaccccaatg

SEQ ID NO: 21100 - DNA, 469 bp, Homo sapiens
  misc_feature (1)...(469): n = A,T,C or G
nattgccccggctgcaggaattcggcacgaggaagcaggaagaacatggatctgggatttggaagacctggcttctagctgctgctaaccaactctgtgactctgggaaagggggactcagttcttacttctgtaacatgaggacactggactatttgaattcagaacttagaaaattggaagggaccttaaagccctctaagaaagagttcgggaatgttctccattgctgtcagttttcctccaaaaataacctggcttggaagttattggtccagtgggaatttgattccccatagaaactggagaaaaggtaatgcaagtagagaggaacagctgtatttctgcttgagtaataaacccactaacagattctggtacgaattgtggagacataaagagaatgagtgtatgtactctaagtgtaccagtttcttcactctctcctggcagaagaggcaacactttt

SEQ ID NO: 21101 - DNA, 292 bp, Homo sapiens
attgcccgcctgcaagaattcggcacgagcaatcccgttgtgatgctccgtctcgtagatgaacctgagggaagaaaaatggctcgacaacccctgatgtccctccagcattctgtacagtccccccacctccctgctcccaccccacctcagtagcagaaggttttgctcctaagcctgggctcctggcctcacctgtagaagatgtggttgatctgcctacggatataagcccggagccccaaaaacttgccatagatgcgatgcaaaatggtcttgaggaagtcccgct

SEQ ID NO: 21102 - DNA, 381 bp, Homo sapiens
  misc_feature (1)...(381): n = A,T,C or G
ctcgaccgccctcnnnnnantgctcccgctgcaggaattcggcacgagaggcagctcactcctgctcttaggagatccaatcagatctgccctgtacagccatgtaggctgtgcgctgcataactccagggacatgagtcacacagacacaatgtgagtgtgctcccccgtcatgcaacatctggacacaactaacagagcatggtgaatacatgctgaattgcattcagtatggctgtgaactaggcctggggacaagaatgaattttacatggaaagaatttcctgtagcaggaacagaggggataacaacagcaataaataataataagaagaagctaccacttcttgagcatgtaccacaaaaaaaaaaaaaaaaaa

SEQ ID NO: 21103 - DNA, 433 bp, Homo sapiens
  misc_feature (1)...(433): n = A,T,C or G
cggcnngnaattgaccgctttgaggaactctgcacgagctccctcacaacaactgttgttcaggctacaccaaagagtcctccgttaaaacccattcaaccaaagcccacaattatgggagagcccatcaccgtgaacccagctctggtgtcactcaaagacaaaaagaaaaaggagaagcgaaagctaaaggacaaagaagggaaagagacgggaagcccaaaaatggatgccaagctggggaaactagaggactccaagggggccagcaaagatttacctgggcattttttaaaggatcatctcaacaagaatgaagggctggcaaatggactgtcggagtctcaggagagccgcatggccagtatcaaagctgaggccgataaggtttacactttcacagacaacgctcccagcccttccatagggagcg

SEQ ID NO: 21104 - DNA, 496 bp, Homo sapiens
  misc_feature (1)...(496): n = A,T,C or G
gcggcgggggngttaaaaattgacggattgtagaacctgcgcgagagactagngatacaaactttaagacaacaggataacatgatacccattgcctgtgtctactgataaaattatcccaaaggtaggttggtgtgatagtatccgagtaagaccttaatgacacagccaaatcttaagtactgtgtgaccactcttgttgttatcacatagtcatacttggctgtaatatgtgatggctaacctgtagcttataaatttacttattattcttttactcatttactcagtcatttctttacaagaaaatgattgaatctgttttatgtgacagcacaatggacattaagaatttccatcaataatttatgaataagattccagaacaaattttctaataacacaatcagattgggtttattcttttattttacgaataaaaaatgtatttttcagtaaaaaaaaaaaaaaaaaaaaactggagggggggcccggg

SEQ ID NO: 21105 - DNA, 481 bp, Homo sapiens
  misc_feature (1)...(481): n = A,T,C or G
atttgaccgccctgttggatncgcgctgcagaattcggcacgagtcgatggaagccctgcccatactgagccgtaacccaagcaggagcacagaccgagactgggagaccgcgtcggcggcatcttccctggcctcagtggccgagtacacaggtcccaagctctttaaggagcccagtagtaaatcaaacaagccgattattcacaatgccatatcccattgctgcctggctggaaaagtgaacgaaccccacaagaattccatattggaggagctggagaagtgtgatgccaatcactacatcatactgtttcgtgatgctggctgccagttcagggcgctttactgctactatcctgatactgaggaaatctacaaactcactggcacggggccaaagaacatcaccaagaaaatgatcgacaaactgtataaatacagctcagaccgaaaacagtttaacttgatcccagccaaaan

SEQ ID NO: 21106 - DNA, 496 bp, Homo sapiens
  misc_feature (1)...(496): n = A,T,C or G
tggagaaacggggnnnnnnnnacctgagcgcctgcggaattcggcacgacgccccagcccatggagttgctatggttaagcagcctgagccgtacagttgaaaaggggcggtggggcccatctccaaatagcacagccagttcagccgtctgtcctcaacccaggagagctgggaaagccagtggactcctgcacctggttcttgtcactcctggcgtttgtgtacagatcaccacttctctttttggttcattgttgaggagtcgttttccggacggctccatcacagcattgagctatcaagctgctgttttccacagttggtggtcacagccagggaagttgctgtcttgatttgttacattgtcagtaatccccaaggaaccaatggatgtcagtaggagtttctgttaaatgtctccttgatggggactcagtactgtgtaaaaaaaaaaaaaaaaaaaaaaaaaacttgggggggggcccggtccccaat

SEQ ID NO: 21107 - DNA, 497 bp, Homo sapiens
  misc_feature (1)...(497): n = A,T,C or G
agtgcccnaattgccgcttgaggacttcggcacgagatgaagcaagaaacagtgcagggtgcccagtgcacacactagagagaaattgtgaacattaaggacaaggagaattggtgtctttctaaaacatacttatttaaaaacacatacccacttactaatgtggaattacacagtttgtaacaagaaaacagtctctcccattctctagtactgctcccctacccagcagtcacttccagttcattcagctatttttaaaatgtgcttatatgactcttgcttgatatatcaatcttagacattacctgttgactccctgttgtcatacatgaggctttagctctcttttgtcagcaaccctcccccatccctagttattaggttaaaaaatactcagattactatttctattactatgtgaaagttaactgcggagccaagagttggactataattaaattaccttccttgaaaaaaaaaaaaaaaaaaactca

SEQ ID NO: 21108 - DNA, 496 bp, Homo sapiens
  misc_feature (1)...(496): n = A,T,C or G
ngtggtcnnnnaattgaggactgaggcctttttgccttgagaacatgcccagtttcctttctgtcctggagacaggtggcctctctggctatggatgtgtgggtacttggtggggacggaggagctagggactaactgttgctcttggtgggcttggcagggactaggctgaagatgtgtcttctccccgccacctactgtatgacaccacattcttcctaacagctggggttgtgaggaatatgaaaagagcctattcgatagctagaagggaatatgaaaggtagaagtgacttcaaggtcacgaggttcccctcccacctctgtcacaggcttcttgactacgtagttggagctatttcttcccccagcaaagccagagagctttgtccccggcctcctggacacataggccattatcctgtattcctttggcttggcatcttttagctcaggaaggtagaagagatctgtgcccatgggtctccttgcttca

SEQ ID NO: 21109 - DNA, 472 bp, Homo sapiens
attgcccactcgcccgcctgcaggaattcggcacgagggaagacctgcaggccctggggagtgccatcagtatggtcacccatcacggcagcaccaccctcaccatccccagacctgatgccgacctggtcacatctggcacacatacagtcaccatggacagcgccgatggcacccagacacagaccgtgacaatcattacctatggggctgtggtggctgaggactcaagtgtagcatctattattcatcaacaggtggcactgttggccacagacaacggaacgcacattgcagagcagatggaggaacagcataccttataggaggccatcaatgtggccactgcggccatgcatcaaggggctgtgaccctggagacaacagagtcggagagtggctgctgagtccaagaaggctgtgttccacaccatgctggaggaagtgccatctgcatggacactcttggcca

SEQ ID NO: 21110 - DNA, 483 bp, Homo sapiens
  misc_feature (1)...(483): n = A,T,C or G
tgagggggnaattgannccattgaccagcgctgcaggaattcggcacgagcgaagatagatggaaatgttctaaatataacacacttaggatctggcaatatatatatttaatgtactattctgaccaaatggagcttaatcacatagcttgagaatgatttaatgttacgaaatctgttaattgcattatctcaataatagatcggtgaataactttattattctctcaacaaatcctgtatttgatttacaaaatgtatgggaggtttcagggagagcagatggaaacctgtgcgctcacctgttaagaacgagagtggcaacagcagcggggaggagtgctcggctcctgctcctgtatcgatggcagagcccacaggcttggctgacagacgtgggatgatggaaagagaagcctttcactcttttcactacattgtactgcgatttcatgcacaagtcccagcaggttccatgacaat

SEQ ID NO: 21111 - DNA, 540 bp, Homo sapiens
  misc_feature (1)...(540): n = A,T,C or G
aggacgttcgacggctgttgatttcggcacgagggcctaccaatgcttanaaccacacccagggagcccacagaggcactcagtgggtggtggggtgatggatacacatctatcatgcacagggcggaggtgggcaccactgagttgcactcagcaaacacattgggtatcttgtgcccaaggcctgtatttgtggagctgatgttctagtgagagacagtaaatgtgacaaaagtaaaatatatcagatggtgagaaaacagaaaaatgagatcagaagtggagatgttggggccaggcacagtggcccaggcctgtaatcccatcactttgggaggtgcaggcaggcagatggcttgagcccaggaattcaagaccagtccgagcaacatagcaaaagcccttatctgcaaaaaattcaaaaattagccaggtgtggtggtgcgtgcccaggttcccaggtactcggaggctgagaggtgggaggatgccttgagcttgagaggttgaagctgcagtgagctgtgatcgcaccactgn

SEQ ID NO: 21112 - DNA, 489 bp, Homo sapiens
  misc_feature (1)...(489): n = A,T,C or G
cattgaccgcgctgcggaatattgcacgacgtgactcgtacctgcggttctgggcaggactcttctttctttcattgccttttattcagtcactgcctgtgcttggggtaaaacaaaagtgatctctgagcagaatgccgctgacagtagaattggatgaggatgtcagacctggttaagcagtagtgtggaggggctgcttcaactttgcccctggcagatggcaaggatgggacccagaggaaagggaggtgtgtgcagttaaggcgagggtcccccccagtacaaacgaatgaaaactccagctgcgggataatgaatgagaaggcctccaaattactttttcactgatgaaacacaaatggaagtggcatataattaaaggggaaagaaatatggaagcccactgtatattgataggatattttgagtaactctattcatactcaaaatgtgtcctaaactgtagagaactttcttaagcatctn

SEQ ID NO: 21113 - DNA, 538 bp, Homo sapiens
  misc_feature (1)...(538): n = A,T,C or G
aggagatcgannccccttnattcgacggctgcatgaattcggcacgagggacaatggagaanagttttcagaaaactgctatgtagatttctgaatgtgttgtattttgctgaggaattcggtaacaactgaaagggaaaagtgcttcagccatcttttgaaaacaagttaaaattctggaacttgtatctgtaatacatcctaactcttgtaaaagaaaataatttatcatagctggtgtcctttcattgaaagttgtaatactgtctctaaggagggaggaaaagattattatataattttataactggcaacatttgagttagtattgactttgtctaaaagaggcttgacttcaactgggataaaaatgtcagtgaattttgttaaagtagtaaaaatgcagttgacttagtaggaacatanaattatttcctaataagataatattgcactcctaccaaataaacacgagtttagtaatatcttgaggagaggtggggggaggtaaaacgtgtttggcaaaaaattggaaaag

SEQ ID NO: 21114 - DNA, 463 bp, Homo sapiens
  misc_feature (1)...(463): n = A,T,C or G
nttagaannttctganccgcgctgcaggaattcggcacgaggacggggtgggaaggatggatccccaaagcctgggttcttggcctcagtgattccagtggacaggcgtccaggagctccaaacctgtagaggacccaggagggcttcggcagattccacctataattctgtcttgctggtgtggatagaaaccaggcaggacagtagatccctatggttggatctcagctggaagttctgtttggagcccatttctgtgagaccctgtatttcaaatttgcagctgaaaggtgcttgtacctctgatttcaccccagagttggagttctgctcaaggaacgtgtgtaatgtgtacatctgtgtccatgtgtgaccatgtgtctgtgaggcagggaacatgtattctctgcatgcatgtatgtangtgcctgggggagtgtgtgtggtccttggctcttggcc

SEQ ID NO: 21115 - DNA, 506 bp, Homo sapiens
  misc_feature (1)...(506): n = A,T,C or G
ggggnnnaatgggncccnnnnnncaattgatntttcctccgcctgcacgaattcggcacgagtggagacgacgtgcagaaatggcacctcgaaaggggaaggaaaagaaggaagaacaggtcatcagcctcggacctcangtggctgaaggagagaatgtatttggtgtctgccatatctttgcatccttcaatgacacttttgtccatgtcactgatctttctggcaaagaaaccatctgccgtgtgactggtgggatgaaggtaaaggcagaccgagatgaatcctcaccatatgctgctatgttggctgcccaggatgtggcccagaggtgcaaggagctgggtatcaccgccctacacatcaaactccgggccacaggaggaaataggaccaagacccctggacctggggcccagtcggccctcagagcccttgcccgctcgggtatgaagatcgggcggattggagatgtcacccccatcccctctgacagcactcgcagg

SEQ ID NO: 21116 - DNA, 480 bp, Homo sapiens
  misc_feature (1)...(480): n = A,T,C or G
aattgacncgtctgaggacttcggcacgagccgccgcgggaggcgtccgtgacaagatgaagctcatcatcctggagcactattctcaggcgagcgagtgggcggctaaatacatcaggaaccgcatcatccagtttaacccagggccagagaagtacttcaccctggggctccccactgggagtaccccacttggctgctacaagaagctgattgaatactataagaatggggacctgtcctttaaatatgtgaagaccttcaacatggatgagtacgtgggccttcctcgagaccacccggagagttaccactccttcatgtggaacaacttcttcaagcacattgacatccacccagaaaacacccacattctggatgggaatgcagtcgacctacaggcagaatgtgatgcctttgaagagaagatcaaggctgcaggtgggatcgagctatttgttggaggcatcggccctgatg

SEQ ID NO: 21117 - DNA, 482 bp, Homo sapiens
  misc_feature (1)...(482): n = A,T,C or G
ctagcccgcctgaggaantttgaccgcctgcggttgttaactttttcatctgatcttgtggatgtaaaggactcgggggactatcctctgacagctccaggtctatcctggaagaagttccagggcagcttctgtgagtttgtggggacattggtctgtcggtgccagtacatcctcctccatgatgacttccctatggacaacctcatctccctgctcactggcttctcagactcacaagtctgcgccttctgtcacactagcaccctggctgctatgaaactgatgacctccctggtaagagttgccctccaactgagtctgcacgaagatatcaatcagcgtcagtatgaggctgaaagaaacaaggggccagggcagagggcacctgagcggctggagagcctgttggagaaacacaaagagctgcattaatactacattgtcaaagacaaagacgaacatgagacatgcgatatgag

SEQ ID NO: 21118 - DNA, 461 bp, Homo sapiens
  misc_feature (1)...(461): n = A,T,C or G
nattgacccgctctgangacttcggcacgagaatagctgagtttacaaagatgcattaaatagaaatagaacgcaaaggaaatcccagccattaccatgaacaaaatggtaagttacttctactagaactttactgactttaagctagagagaaagagaaagagagaggtaaaacaaaaatcaaaaaggaaaaggctcagatcatgttcggcatgatcaagaggagggtcagaagagctgtttttgtgggccgcaccgtgctctgtggatcttgtaactctgggattattatgcaccgtggcaagactccacccctgaagatggtctgccgatttgaagaatcattttcttgcttatttttaaactcttaaagacagggaaaaagactgaaggagcctaaatgctgtggtttcctcaaaccattattgttgtaaatcctatgggtcctgaagtaactcact

SEQ ID NO: 21119 - DNA, 507 bp, Homo sapiens
  misc_feature (1)...(507): n = A,T,C or G
aggggnnnaagcngnntnnnnnnnnaatagcaacgtctgtangaattcggcacgaggtttaaacaccttttatttgaagaaatattgcttctagactttcctgaagccagaattgttctataaaagtatcatggaatattatacatgattaaaaaacagagtatgcttcctaataacttgaaatctttttacaaagcacattattcatgatcataaatatgtttgttctgtcatcccaccgatgatacacacatcaggcaagcagctaatttgaacatatgtacagagtctatgataaagatttaaagttaccaaaaagattcagctataacatattaaattttctttaaaagagtttaccataaacacttaaagaaaacataatttatctaagcacttgaattatctaaaaataagaagaaaacctctcttagggtaagcaaaaacacatcatcttggggagctgaataaaagggtactgatgactcagtgaggtaatcctttaaa

SEQ ID NO: 21120 - DNA, 475 bp, Homo sapiens
  misc_feature (1)...(475): n = A,T,C or G
atagaaaaccatagatagccatgcggaanncgccacgagctcaaaggagccctagtgccatgatttaaatatttttattaccattttgaaatggagaagccattctgcatatgcctttgaattcctgcccctctttaccacgtcttcctccccctcaaaggaaaaacatttcatccaagtaagttaacggcattttctgtaggattttcttatgcactgcacactctggacctcacctgcagatacagttccccccttgccaggagcatctgcatgtggtacttctcttttccctcagttgatatttcttatatgatattctagatactatagaactcaatttgtcagattcagtataacctcagattttgttacctgtcttttaaaaatgcagattttgtcaaatcacataaagatcaatggatgttgggtataaaaagacaaacagctcccattaaatttagtggccttcatg

SEQ ID NO: 21121 - DNA, 582 bp, Homo sapiens
  misc_feature (1)...(582): n = A,T,C or G
ggccacctccgcgtcttgtactatactcccgccctcatatcgttttcaccttcgtacctttctctcatcctacgaggatccgctagcncctcaaggggngngnnnnnnnaatagagnagctttcgataaccaccagcgaggccnacanagcagaagagaggggncaggaactgtgagaagcacaccaagannnacattcatatgctaggttcttggttttgacaacgtcccgctggttcgccgtccgtctggatgccatctgtgccatgtttgtcatcatcgttgcctttgggtccctgattctggcaaaaactctggatgccgggcaggctggtttggcactgtcctatgccctcacgctcatggggatgtttcagtggtgtgttcgacaaagtgctgaagttgagaatatgatgatctcagtagaaagggtcattgaatacacagaccttgaaaaagaagcaccttgggaatatcagaaacgcccaccaccagcctggccccatgaaggagtgataatctttgacaatgtgaacttcatgtacagtccaggtgggcctctggtactgaagcatctgacan

SEQ ID NO: 21122 - DNA, 504 bp, Homo sapiens
  misc_feature (1)...(504): n = A,T,C or G
cgcagttcgacgccctcngaaattgaccnccgctgcagaaatcgacgccaaaggaatgttgccatgacctagaagaatcccttaggatgaagctgagtcttaccaaggtagttaatggctgtcgcctaggaaaaataaagaacctgggcaaaacaggggaccacaccatggatattccaggctgccttctgtataccaagactggctccgccccacacctcacccatcacacgctgcataatatccacggggttcctgccatggctcagcttacgctgtcatccctagcagaacatcatgaagtcttgacagaatataaagaaggagttggaaagtttataggcatgccagaatcactcttgtactgctccctgcacgatccagtcagcccctgcccggctggttatgtaacaaacaagtctgtgtctgtgtggagtgttgcacgacgagtggaaatgactgtttccaagttcatggcaattcaaaaggcccttcagccagact

SEQ ID NO: 21123 - DNA, 477 bp, Homo sapiens
  misc_feature (1)...(477): n = A,T,C or G
agcgcgcttttncctcgacgcctgcagaaccctcacgagtgatgaccgagccaacctaatgtggaaacgttacctggagcgagaggacagcaagattgtggacctgtttgtgggccagttgaaaagttgtctcaagtgccaggcctgtgggtatcgctccacgaccttcgaggttttttgtgacctgtccctgcccatccccaagaaaggatttgctgggggcaaggtgtctctgcgggattgtttcaaccttttcactaaggaagaagagctagagtcggagaatgccccagtgtgtgaccgatgtcggcagaaaactcgaagtaccaaaaagttgacagtacaaagattccctcgaatcctcgtgctccatctgaatcgattttctgcctcccgaggctccatcataaaaaagtcagtangtgtagactttccactgcagcgactgagcctaggggactctgccagtgacanaan

SEQ ID NO: 21124 - DNA, 483 bp, Homo sapiens
  misc_feature (1)...(483): n = A,T,C or G
cgganaggnattgaccccattgaccacgctgcaggaattcggcacgagtgaacatctgggccctgattctgggcatcctcatgaccattctgctcatcgtcatcccagtgctgatcttccaggcctatggagagatcaggaggcatcactgaggccaggagctctgcccatgacctgtatcccacgtactccaacttccattcctcgccctgcccccggagccgagtcctgtatcagccctttatcctcacacgcttttctacaatggcattcaataaagtgcacgtgtttctggtgaaaaaaaaaaaaaaaaaaaaaaaaaaaaaaaaccctcgggccaaattcggcccgggggggggcaaaaggggcctcggggccttgaccaaatatccccccccagggaacccagtggttttcccccatttaaccggggggttttgggccattggaatttttttaccccccggggttttttttaaaaag

SEQ ID NO: 21125 - DNA, 485 bp, Homo sapiens
  misc_feature (1)...(485): n = A,T,C or G
cggggcacgnnaattgannccatttgcnccgcgctgcaggaattcggcacgaggggaggggcctaggcctcagccagagaagctataaattcctctttgctttgctttctgctcagcttctcctgtgtgattgacagctttgctgctgaaggctcattttaatttattaattgctttgagcacaactttaagaggacgtaatggggtcctggccatcccacaagtggtggtaaccctggtggttgctgttttcctcccttctgctactggcaaaaggatctttgtggccaaggagctgctatagcctggggtggggtcatgccctcctctcccattgtccctctgccccatcctccagcagggaaaatgcagcanggatgccctggaggtggctgagcccctgtctagagagggaggcaagccctgttgacacaggtctttcctaaggctgcaaggtttaagctggtggcccaggaccatcatcn

SEQ ID NO: 21126 - DNA, 493 bp, Homo sapiens
  misc_feature (1)...(493): n = A,T,C or G
aggggngnnnaagggggnngnnnnnnnnttttgannnttctgacnccgcgctgcaggaattcggcacgagagcaaacatcactgccgttggtctctcatgacttaactggcttccctctgctgctgccttggcttcctcctaatgctcgtgctctcctgtccttctgaagttgctccttggccaaatctccagctcccttcttgttttcctcatcctcctaccctgtactcccaccaaaccatggtcctttaaggcacgctcctgtcctcctcattgcccagcagtagggaggggcaggggtaaggggacctgaggataaagggtggggaaacagggtcccctgaggcctgtgggggctgcaggggaggaggatgtaccttgtgtctctttcaagtgccttaatccgagccagcagggccttctgcttgcctgctgccatactgtatgtaggaaagtgttctgtggctgctttgtgtcaagaaaagagcagtc

SEQ ID NO: 21127 - DNA, 478 bp, Homo sapiens
attgaccgccttcggaattgctaggaggcaatcccatctctactaaaaatacaaaaaatcagctgggcgtggtggcgctcacctgtagtctcagctactcatgaggctgaggcaggagaattgcttgaacccacaaggcggagattgcagtgagccaagattgcgccattgcactccagcctgggcactagagcaagactcggtctccaaaaaataaaaataaaaaataacaaaagggtacagagggtacctagaaatgcttttaccttattgttcagagaacgttgttctgtggtgttggaaaaataagctcaggagtactcagctgctttcctctgctgtctctaccagctctgagcaggcagcatggccagccaccttgattatatgacctccaagcttcacagactttcaaggtagatgatattgttgaaatctttgattcagtaagctcacctaacctgcccaaagcaagggg

SEQ ID NO: 21128 - DNA, 486 bp, Homo sapiens
  misc_feature (1)...(486): n = A,T,C or G
attgcacgccttgngaannttttgaccgcctgcaggaattcggcacgagcatcacttctcgcctgtcagtgattccatgtttcgtaacgggggattctctgcctttttgtatcaaagaacaagcaaatggacccccgcccgctgcaggcgcccatagccatcgggtctctaaagctgagtggctagcagcgtttgtttgtttgtttgtttttttttttctgaaggggggacagtcacttcctcctccctccccacccctgtcgcatccacgtgcgacctggaggactggtcaaaaccgttactgtgaatgagtgaagatcctggaggaccctgggccccaggccagctcccatcgttgggggacggtgaacggccatgtgttaatgttacgatgtttttaaaagacaaaaaaaaaaaaaaacctggggggggggccgggccccaatttccccttatggggagcggaataaaaatcacgtgggcggn

SEQ ID NO: 21129 - DNA, 336 bp, Homo sapiens
  misc_feature (1)...(336): n = A,T,C or G
natagaaaaccatagacagccatgcacgaattcgccacgagagaggttgcctagttggtatagaatgttaagtttcaagaaagtttacctttgctttaagtcataagttccttatttgattgctgtatatggatacatggctgttcgtgacattctttatgtgcaaatttgtgatttcaaaaatgtcctgccagtttaagggtacattgtagagccgaactttgagttactgtgcaagatttttttttcatgctgtcatttgtaatatgttttgtgagaatccttgggattaaagttttggttacaaattgttctttaaaaaaaaaaaaaaaaaaa

SEQ ID NO: 21130 - DNA, 476 bp, Homo sapiens
  misc_feature (1)...(476): n = A,T,C or G
nttagcncgtctgaggaattcgcacgagctcaggatacccgcctcaaccgccgctccgcgctggctcgcgtgggcaaggtggggcctatgattgggcagtacgtggactctcagtggagcctggcgagcttcactgtgcctgctgagtcagcttgcatctgcgccttcggtcgcaatacttccaagaacgtcaactctgtcattgccatctgcgtagatgggaccttccacaaatatgtcttcactcctgatggaaactgcaacagagaggctttcgacgtgtaccttgacatctgtgatgatgatgacttttaaggaccctgggggctgtgctagggacctgcagtggcagaactgcagagctgagccttggcagtggggcgtgcttggaagccaccagccagcaagcattaatggggctggtgcccactttccactcagcagagctatgtctaaataaagagctcacttccccc

SEQ ID NO: 21131 - DNA, 394 bp, Homo sapiens
cttctgcacctggctgcacgaattcggcacgagattcggcccgacgagctccgctttcgctacagcatggtggcctactggagacaggctggactcagctacatccgatactcccagatctgtgcaaaagcagtgagagatgcactgaagacagaattcaaagcaaatgctgagaagacttctggcagcaacgtaaaaattgtgaaagtaaagaaggaataatctaccctgactaaagcttgaaatgctacatttccaaggtgaagatgtgtgggcacatgttatggcagattgaaaaggatctcattccatgggaaaaaaaaaaatcctgtcttgttcataaattgacaatgccaataaattgaaatatggttcactgttactcttgaaaaaa

SEQ ID NO: 21132 - DNA, 460 bp, Homo sapiens
  misc_feature (1)...(460): n = A,T,C or G
nattganccgctctgangacttcggcacgagggcagatgggggcatcacttgcttcctttgggaagctctaaggttgctgcagtcaccttcctcatcttgcaggtgctgaaccaacatcatcagtttctattctaatcaggccccttcccaatctccatttctctgccaagcccatttacccccacctcatgcatcccaaggctctactgggtccctggacctaaccctgctttcatcctggtggccttaactacagtggaggtggaacttcccaggaggggaagggacagaccagccccagccgctgggccaacttccaatcattccagctagaagagcttccccctgacaccctgtgactgagcctgtgtcctgtctgcctgcccagccatgctccatcggctgtgagggcagtgcccggagaggccagagggttggagctgcagggacccgtttgga

SEQ ID NO: 21133 - DNA, 484 bp, Homo sapiens
  misc_feature (1)...(484): n = A,T,C or G
aggggnnnaaggggncnnnnnntttgaannttctgcccgcgctgcaggaattcggcacgagccacagatgaaggctttgtgatacctgatgaagggggcccacaggaggagcaagaagagtattaacagcctggaccagcagagcaacatcggaattcttcactccaaatcatgtgcttaactgtaaaatactcccttttgttatccttagaggactcactggtttcttttcataagcaaaaagtacctcttcttaaagtgcactttgcagacgtttcactccttttccaataagtttgagttaggagcttttaccttgtagcagagcagtattaacatctagttggttcacctggaaaacagagaggctgaccgtggggctcaccatgcggatgcgggtcacactgaatgctggagagatgttatgtaatatgctgaggtggcgacctcagtggagaaatgtaaagactgaattgaattttaa

SEQ ID NO: 21134 - DNA, 472 bp, Homo sapiens
  misc_feature (1)...(472): n = A,T,C or G
natagaacgccctgagaaccgtcccgagctccgaggcgttcagctgcttcaagatgaagctgaacatctccttcccagccactggctgccagaaactcattgaagtggacgatgaacgcaaacttcgtactttctatgagaagcgtatggccacagaagttgctgctgacgctctgggtgaagaatggaagggttatgtggtccgaatcagtggtgggaacgacaaacaaggtttccccatgaagcagggtgtcttgacccatggccgtgtccgcctgctactgagtaaggggcattcctgttacagaccaaggagaactggagaaagaaagagaaaatcagaaacctactcaacacagcactctaggcagccactatcaatcaattgaagttgacactctgcattaaatctatttgccattaaaaaaaaaaaaaaaaaaaaaacttcagggggggcccgggccccaattcc

SEQ ID NO: 21135 - DNA, 499 bp, Homo sapiens
  misc_feature (1)...(499): n = A,T,C or G
agaggccnnnnnnntttggacngttcgcccgcctgcaggaattcggcacgagccgttgcttttccgagttgctcttcttccaggctccgttggtggtcggcatggcccgtggaaatcaacgagaacttgcccgccagaaaaacatgaagaaaacccaggaaattagcaagggaaagaggaaagaggatagcttgactgcctctcagagaaagcagagggactctgagatcatgcaagaaaagcagaaggcagctaatgagaagaagtctatgcagacaagagaaaagtgatgactggctatttggaaaacctgggtgctactgccaactgggtgtatcataagctctaagatcaagattttgtagagtggacagtcattacatatgttataacttatcctttaaaaactatttttaactttatcctttcagctttacttagtgcgatgttttagaagcagtcttcaaagaataaaacactaaccatgaaaaaaaaaaaa

SEQ ID NO: 21136 - DNA, 488 bp, Homo sapiens
  misc_feature (1)...(488): n = A,T,C or G
nattgacnccccntcnnnaannctttgancacctctgaagaattccgcacgaggggaaagtgaaccgacttgcccttcccatacccctcacggtggttccctaccagccaggcttactacttttagaagaaagcaaagcgccagggagtgagattgcatccctgggcttaaaagtgacggagagaagacttgtttagtattttgccatcagcacagggaaaaccacgagagagtctgcctccaggactctgagccttctgcctcgtatgttcagaaggtggataggtcttcccactccagcatggcttgaactcttaggggtctgcagtgctccatctccattggtggnnnnnctagtgaactatacctggtacattttctgtgtgcaatcagtaccttgaaggcagaacattctgaatatagttggaataagaacacattatataaacaaaaaatcttcggggggggccccgacccccaatatcccc

SEQ ID NO: 21137 - DNA, 500 bp, Homo sapiens
ggaaggaacccgatcggctgtggtagaggcacgatcagagtttgtctttcctctgtcccatctgcatctcgagtcgcagagaccccccataggtagtatctcatccatggaagtgaatgtggacacactggagcaagtagaacttattgaccttggggacccggatgcagcagatgtgttcttgccttgcgaagatcctccaccaaccccccagtcgtctggggtggacaaccatttggaggagctgagcctgccggtgcctacatcagacaggaccacatctaggacctcctcctcctcctcctccgactcctccaccaacctgcatagcccaaatccaagtgatgatggagcagatacgcccttggcacagtcggatgaagaggaggaaaggggtgatggaggggcagagcctggagcctgcagctagcagtgggcccctgcctacagactgaccacgctggctattctccacatgagaccacaggcccagccagagc

SEQ ID NO: 21138 - DNA, 495 bp, Homo sapiens
  misc_feature (1)...(495): n = A,T,C or G
aggatggaggaggccnnnnnnnccttgancgattgcaccgcctgcacgaattcctcacgagcgcaggcctggataacatttgctacatttacaatctgaaagctcgtgaagcgaacgtgcgcgtgagtcgtgaactgccaagacacacatggtacctggcctgctgactattcctggatgacaatcaaattgtcaccacctctggagacaccacgagtgccctgtgggacatcgagaccggccagcagacgaccacgtttaccggacacactggagatgtcatgagcctttctcttgctcctgacaccagactgttcgtctctggtgcttgtgatgctacatccaaactctgggatgtgcgagaaggcatgtgccggcagaccttcactggccacgagtctgacatcaatgccatttgcttctttccaaatggcaatgcatttgccactggctcaaacgacgccacctgcaggctggttgaccttctgctgacca

SEQ ID NO: 21139 - DNA, 437 bp, Homo sapiens
  misc_feature (1)...(437): n = A,T,C or G
gggtggtgcccagaataaanaaaaccttgatcgccttcggaattcgcccgagcccgaatgacccccagatttgactccaacaacgtggtcctcattgaggacaacgggaaccctgtggggacacgaattaagacacccatccccaccagcctgcgcaagcgggaaggcgagtattccaaggtgctggccattgctcagaactttgtgtgagttgagcccaggcctctggttgcaggactcgtgaatggagcagttctgagaaccacccttttgctaagggagcttgggagccacatggctgctcccttcacactgggtaacagtgtagtatcctgtgagagaataaatgtattcatttatgtgtttttccagagctttctgggatgtgggaaaataaattacactgaagcagttaaaaaaaaaaaaaaaaaactcga

SEQ ID NO: 21140 - DNA, 474 bp, Homo sapiens
  misc_feature (1)...(474): n = A,T,C or G
natagaaacccatgatagccatgcaggagctaacacgcactatatgtgactgtgactttcaaggacatttgtttgccatttgctgatttttttgggaagttaatttctaacttctttcactgataaatgaagaaaagtattgcacctttgaaatgcaccaaatgaattgagtttgtaattaaaaaaatttttttccctttcagtcattgacttatatgcttagcatagatttgcagctcagtagtatatggtgttcctagaatgcagctgaagacctgttatgtagaggaaatacgaggggtggtgctagaagacagacatctgtggaatgattcacatcctctcaagttaggaggatggaggcctgcttcattaaaaagctgtgggtagggtgggggtggggagaacacttaacaacatggggaccagtcaggggaatccccttatttctgttgtgcatatgaggaaccctat

SEQ ID NO: 21141 - DNA, 491 bp, Homo sapiens
  misc_feature (1)...(491): n = A,T,C or G
ntttcacccgcctgcaggaattcggcacgagccttgctgagccttactctcttcagactttctgaatgtacaatgccgttggttgggatttggggactggaagggaccaaggacactgaccccaagctgtcctgcctagcgtccagcgtcttctaggagggtggggtctgcctgtcctggtgtggttggtttggccctgtttgctgtgactacccccccccctccccgaaccgagggacggctgcctttgtctctgcctcagatgccacctgccccgcccatgctccccatcagcagcatccagactttcaggaagggcagggccagccagtccagaaccgcatccctcagcagggactgataagccatctctcggagggccccctaatacccagtggagtctggttcacaccctggggggtgtgcactgtgatgggacacgtaggagtccaccctttaaaccagcaccctgtccctcgaggctgccgagg

SEQ ID NO: 21142 - DNA, 466 bp, Homo sapiens
attagcacggcttagtgattcggcacgagctcaaccgcaagactgttgccgttttagtgtggagataagtttgccattacattagcatgtattttctatctatattttttattgggcattttccctaggttggagagtcagcactcgttttgaatgtgtttaaaatgcattaaaatggaagatttctgcaggcagttgaatggcactccagatggggaattgctgtaaccctcttactgtaacatgtcatctcctgcgtcgtgatggggagagggtaatgttacttcacaaaggacatgtcagatccttcttcatggacttttttagttactgttttttctctcaaacttgttttcgaatctcctgggagtgagggagaaacagggagctgaatcctcccccaagctgttccaggccagaggactctgcagtaccttctcctacatctagtaacaaagaatggtga

SEQ ID NO: 21143 - DNA, 481 bp, Homo sapiens
  misc_feature (1)...(481): n = A,T,C or G
ctttcgccccgctgcaggaattcggtacgagcacgggcaccggctgcccacagggaacacattcctttgctggggttcagcgcctctcctggggctggaagtgccaaagcctggggcaaagctgtgtttcagccacactgaacccaattacacacagcgggagaacgcagtaaacagctttcccacgaaaaaaaaaaaaaaaaaaaaaaaaaaaaaaaaaaaaaaaaaaaaaaaaaaaaaaaaaaaaaaaaaaaaaaaaaaaaaaannttggggggggggggcccccccccaaatttttttaaaaagggggttaaaaaaaaaagggggggggggttaaaaaaagggggggggggggaaaaccnnnngntnnntnnnnncnngnnnnntcncttntnnccttgctttttnnncgctctttttttggggtggtttgcntgtgcccctgcgggctgttggttgcccttttggctcagttgtccg

SEQ ID NO: 21144 - DNA, 480 bp, Homo sapiens
  misc_feature (1)...(480): n = A,T,C or G
gaattgccccgcctgcagaattcgtacgagcggcggccgaggctcgggcctccaggaccactggctgcccatgagagacgaaggatggcatccaagggggccggcgtgtctttctcccgcaagagctgtaggctgacctcagatgctgagaaatccagggtcacaggcattgtgcaggagaagctgctgaatgactacctgaaccgcatctttcctcttctgaccatgcacccccagcagccaccggcagttactcgggaggctgaggcaggagaatcgcttgaaccggagaggcggacgttgcagtgagccgaggtcaaaccagtgcactccagcctgggcaacagagcgagactccatctgannaaaaaaaaaaaaaaaaaaaaaaaaaaaaaaattttggggggggggccgggccccaatttccccttaagggggggggaataaaaatccaggggcgggggtttaaaaaggggggga

SEQ ID NO: 21145 - DNA, 505 bp, Homo sapiens
  misc_feature (1)...(505): n = A,T,C or G
ggggngaaattgatcgcctgtggaaatcgacaggcgatcggacggaataccacatggcagtgccggcacaacttctacaacgtggacatgggctacttgaagaggctatgtggtaccttcctgggtgggcccaagccaccccagagagttatgtttaccgaggacctgaagctgcctgcaagcttcgatgcacgggaacaatggccacaagtgtcccaccatcaaagagatcagagaccagggctcctgtggctcctgctgggccttctgtgctgtggaagccatctctgaccggatctgcatccacaccaatgcgcacgtcagcgtggaggtgtcggcggaggacctgctcacatgctgtggcagcatgtgtggggacggctgtaatggtggctatcctgctgaagcttggaacttctggacaagaaaaggcctggtttctggtggcctctatgaatcccatgtanggtgcagagatggtgttgggagccctttggagaacgcn

SEQ ID NO: 21146 - DNA, 481 bp, Homo sapiens
  misc_feature (1)...(481): n = A,T,C or G
gggagttgcacggatttannnacaactggacgcccctcgaaanacctacgagcanccagcaagnctagggaacagataagatgacatgctcagcaaaataacaacgaaaccagagagtgtctgaacttcaaagcacaattcctgagcacattttgcagagcacctttgttcacgttatctcttctaactggtctggattacagacagaatcaataccagaggaaatgaaacagattgttgaggaacagggaaataaactgcactgggcagctcttctgatactcatggtgataatacccacaattggtggaaatacccttgctattctggctgtttcactggagaagaagctgcagtatgctactaattactttctaatgtccttggcggtggctgatttgctggttggattgtttgtgatgccaattgccctcttgacaataatgtttgaggctatgtggcccctcccacttgttctatg

SEQ ID NO: 21147 - DNA, 493 bp, Homo sapiens
  misc_feature (1)...(493): n = A,T,C or G
aattgccccgcctgcaggaattcggcacgagaacctttaaggaatttggggctggaacggagctatgttgcatctgttgttatacaggtagattataagttctacatgcaccagccaaaacttaggacaggatgtccccaaattaagatactacagattaccaaatcagaaataaccagctggatttaggccagctcacatttatttggaaattaccctccctgattaacaggcttctgagttgtacgtggaggactaatgagacttgtacaagacaccacggggcttggggtccaggtcccagttggatatcggaacagacacagataagtgtgtttcctcattaaggtggtgagagtgtgccttttggcattcagaaaagggtttagccaccctaagagttggaaataaagattcccaactggaaatgttgcagaatccctacaagtgtctcaataaaagccattntaaaaaaaaaaaaaaaaaaactcgg

SEQ ID NO: 21148 - DNA, 474 bp, Homo sapiens
attagaacgcctttcgaccgcctgcaggaattcggcacgagcatgtatctagtgatccctgaaaagttccagcatattttgcgagtactcaacaccaacatcgatgggcggcggaaaatagcctttgccatcactgccattaagggtgtgggccgaaaatatgctcatgtggcgttgaggaaagcagacattgacctcaccaagagggcgggagaactcactgaggatgaggtggaacgtgtgatcaccattatgcaaaatccacgccaggacaagatcccacactggttcttgaacagacagaaggatgtaaaggatggaaaatacagccaggtcctagccaatggtctggacaacaatgctccgtgaagacctggagcgactgaagaagattcgggcccatagagggctgcgtgacttctggggccttcgtgtccgaggccagcacaccaagaccactggccggcgtgtgcg

SEQ ID NO: 21149 - DNA, 468 bp, Homo sapiens
attagaacggcttaggtgctcatagctggaataaactttaaattactgttccttttttgattttcttatccggctgctcccctatcagacctcatcttttttaattttattttttgcttacctccctccattcattcacatgctcatctgagaagacttaagttcttccagctttggacaataactgcttttagaaactgtcaagtagttacaagagaacagttgcccaagactcagaatttttaaaaaaaaaaaatggagcatgtgtattatgtggccaatgtcttcactctaacttggctatgagactaaaaccattcctcactgctctaacatgctgaagaaatcatctgagggggagggagatggatgctcagttgtcacatcaaaggatacagcattattctagcagcatccattcttgtttaagccttccactgtcaaagatttgaggttacatgatatgcc

SEQ ID NO: 21150 - DNA, 500 bp, Homo sapiens
  misc_feature (1)...(500): n = A,T,C or G
cggggatttaactgacttcacggcgtcgacacggccgagcagaacctggcaaatctatagataacaaggcactttatgatactttttctgcttttggaaacatactgtcctgcaaggtggtgtgtgatgagaacggctctaagggttatgcctttgtccacttcgagacccaagaggctgccgacaaggccatcgagaagatgaatggcatgctcctcaatgaccgcaaagtatttgtgggcagattcaagtctcgcaaagagcgggaagctgagcttggagccaaagccaaggaattcaccaatgtttatatcaaaaactttggggaagaggtggatgatgagagtctgaaagagctattcagtcagtttggtaagaccctaagtgtcaaggtgatgagagatcccaatgggaaatccaaaggctttggctttgtgagttacgaanaacacgaggatgccaataaggctgtggaagagatgaatggaaaagaaataagn

SEQ ID NO: 21151 - DNA, 465 bp, Homo sapiens
atgtgccccgcgctgcaggaattcggcacgagcctcagctcccttctgcccctctctacctcttccactcatggaagcccctctactgcttatgaagattaagggtagtattttctaaggaagtggaaagaattaaactagaaatccacaacctcggaagaagtgtttcgagtttaacatgcgctgtttctgcttatgtggttccttctctagagctgctttcccatggctttcaaaacatcaggttattgtggggcttcaggtgtaaggtcctggaagttcagcaaagtttcgtggacaagacatgggcacagagagtagaagcagaaataaatggttctatgttttcaacttccagggttggggcaggccagagcaaggcggtctcatcgaggtgggtgctacctgtgtgtgtgtagatgagtgtgctgaaggtggggagggcagcacacagcagctcatggg

SEQ ID NO: 21152 - DNA, 494 bp, Homo sapiens
  misc_feature (1)...(494): n = A,T,C or G
natatccctacgcgctgcagngaatncngtcgcgccccgcgctgcaggaattcggcacgagctgaaagcaccttagaactgtactataagaaaacatttcccctatgtataattatatgaatgtgatgtttattgcttattaatttataattcagtcattctctatataggacttcttaaaatttagaagggaaatctagctacttcaaattgtctgttaaatttattatgcccaaatcaacctctgaaaaaaggtttttccaggaagatttacatttaggtttaatatttttttagttaggtagagttttaaaaaatacttgagcctgtccgtgataaagctataaaattcaataactttttagaatgttaaatgaagacactgtttcctaacatcagtgagatacatctttgaatttaaacattcatatttactgagtacctactaggtaccaagtactcttttaggcactggaaatacagtgatggacaaa

SEQ ID NO: 21153 - DNA, 466 bp, Homo sapiens
  misc_feature (1)...(466): n = A,T,C or G
ntttgacccggctgcagaattcgcacgagccagacgaggacgaggacgaccttctccccccagagcagaaggccgagcgggagaaggagcgccgggtggccaataacgcccgggagcggctgcgggtccgtgacatcaacgaggcctttaaggagctggggcgcatgtgccaactgcacctcaacagcgagaagccccagaccaaactgctcatcctgcaccaggctgtctcggtcatcctgaacttggagcagcaagtgcgagagcggaacctgaatcccaaagcagcctgtttgaaacggcgagaagaggaaaaggtgtcaggtgtggttggagacccccagatggtgctttcagctccccacccaggcctgagcgaagcccacaaccccgccgggcacatgtgaaaggtatgcctccgtgggacgagccacccgctttcagccctgtgctctggccccagaac

SEQ ID NO: 21154 - DNA, 471 bp, Homo sapiens
  misc_feature (1)...(471): n = A,T,C or G
attagccccgcgctgcatgtaccccgcgctgcaggaattctgcacgagctccactgagctgctgcctgcccgccacatacccagctgacatgggcaccgcaggagccatgcagctgtgctgggtgatcctgggcttactcctgttccgaggccacaactcccagcccacaatgacccagacctctagctctcagggaggccttggcggtctaagtctgaccacagagccagtttcttccaacccaggatacatcccttcctcagaggctaacaggccaagccatctgtccagcactggtaccccaggcgcaggtgtccccagcagtggaagagacggaggcacaagcagagacacatttcaaactgttccccccaattcaaccaccatgagcctgagcatgagggaagatgcgaccatcctgcccagccccacgtcagagactgtgctcactgtggctgcatttggtgttn

SEQ ID NO: 21155 - DNA, 468 bp, Homo sapiens
attggcccatctcccccgcgctgcaggaattcggcacgagcacgactgcagtgcactgcgggccttggagtgtccagtggggacactggtgtgggaaggggcagcacctggggagtccctgcctctcctccctgggacaatagtgtgcatgccacccggggtcctacaggcaggtgctgggaaaggcctggccagcaggtagcctgtgtgtttgacaaacagcagctggcagcgctgtctcctgcccacattcctgccacccgacatcaaagctggcgtgtgacctttccagccatgcgatattccccttggaagatgcttacccaggctataaatttgttctcacaaagcaacatcaataaatcaaaactgtctctcccaaaaaaaaaaaaaaaaaaattcggggggggcccgggcccccaattgcccttatggggaggggatttacaattcaggggcgggggttta

SEQ ID NO: 21156 - DNA, 503 bp, Homo sapiens
  misc_feature (1)...(503): n = A,T,C or G
tggggtgnnnnnntttcgctcggctgcacgaattcggcacgagtggacatgttgaaaattaggtctgaattcaagagaaagtacggcaagtccctgtactattatatccagcaagacactaagggcgactaccagaaagcgctgctgtacctgtgtggtggagatgactgaagcccgacacggcctgagcgtccagaaatggtgctcaccatgcttccagctaacaggtctagaaaaccagcttgcgaataacagtccccgtggccatccctgtgagggtgacgttagcattacccccaacctcattttagttgcctaagcattgcctggccttcctgtctagtctctcctgtaagccaaagaaatgaacattccaaggagttggaagtgaagtctatgatgtgaaacactttgcctcctgtgtactgtgtcatanacagatgaataactgaatttgactttanaaaaaaaaaaaaaaaaccgcagacctgcactttttttta

SEQ ID NO: 21157 - DNA, 477 bp, Homo sapiens
cgcccccgcccccatttgccccgcgctgcttgaattcggcacgaggtgttctcgacttcgtcgctgaagctaaaccagccccagaaatatttgaaaatgaagtcatggccctgctgagagactttgctaaaaacaaaaacaaagagcagagactgcgtgccccagatcttgagtacctctttgaaaagccacgttgagctgtgctccacggcctggcatgggggttcagtctgtggatggtaactacttatgatggacgttagccttgcttccggcttcttagatgcccagctgccctaccccagaccactggtcctgcctcaagtgatggacataaccctctcctaggacatacatgtaaatgcacaatgtgactcattctcatacttttttgttcagctctgagcctcaaaagtgatttgtcagcagcgctggcatgcaggctttgcctggctgctatctctagaggcaagtctg

SEQ ID NO: 21158 - DNA, 499 bp, Homo sapiens
  misc_feature (1)...(499): n = A,T,C or G
cctggccccgcttttgcnccgcgctgcaggaattcggcacgagcccatctatgaccaggatccctcgcgctgccgtggacttttggagaatgagttgaaactgatggaagaatttgtcaagcaatataagagcgaggccctcggcgtgggagaagtggccctcccggggcagggtggcttgcccaaggaggaggggaagcagcaggaaaagccagagggggcagagaccactgctgctaccaccaacggcagtctcagtgacccgtccaaagaagtggaatacgtctgcgagctctgcaagggagcggcccctcctgacagccccgtggtctactcggacagggcaggctacaacaagcagtggcaccccacctgctttgtgtgtgccaagtgctccgagccgctggtggacctcatctacttctggaaggatggtgcacccttgggcggccgccattactgcgagagtctgcggccccgggtgctcggctgcgatgaa

SEQ ID NO: 21159 - DNA, 512 bp, Homo sapiens
  misc_feature (1)...(512): n = A,T,C or G
tgtgantagnnnnnnaatttgattcgcctgtacgaattcggcacgagccgcggcctccatgaagacctacaaggggtgcccgagcggctgctggggacggcggggaccgaagaaaagaagaaattgatcagggattttgatgaaaagcaacaggaagcaaatgaaacgctggcagagatggaggaggagctacgttatgcacccctgtctttccgaaaccccatgatgtctaagcttcgaaactaccggaaggaccttgctaaactccatcgggaggtgagaagcacacctttgacagccacacctggaggccgaggagacatgaaatatggcatatatgctgtagagaatgagcatatgaatcggctacagtctcaaagggcaatgcttctgcagggcactgaaagcctgaaccgggccacccaaagtattgaacgttctcatcggattgccacagagactgaccagattggctcagaaatcatagaagagctggnggaacaacgagaccn

SEQ ID NO: 21160 - DNA, 484 bp, Homo sapiens
  misc_feature (1)...(484): n = A,T,C or G
gtggganaaaaaactgacgccttcggaattccgtttggattcttcatgagttcttccggggaccactcccagtaaaaagaggaccaccaccaagaagtgggggtcctcctcctaagagatctgcaccttcaggaccagttcgcagtagcagtggaatgggaggaagagctcctgtatcacgtggaagagatagttatggaggtccacctcgaagggaaccgctgccctctcgtagagatgtttatttgtccccaagagatgatgggtattctactaaagacagctattcaagcagagattacccaagttctcgtgatactagagattatgcaccaccaccacgagattatacttaccgtgattatggtcattccagttcacgtgatgactatccatcaagaggatatagcgatagagatggatatggtcgtgatcgtgactattcagatcatccaagtggaggttcctacagagattcatatga

SEQ ID NO: 21161 - DNA, 468 bp, Homo sapiens
  misc_feature (1)...(468): n = A,T,C or G
atggcccccncnnatgtgctccgcgctgcaggaattcggcacgagtcggaacgagactgcacggattgttttaagaaaatggcagacaaaccagacatgggggaaatcgccagcttcgataaggccaagctgaagaaaacggagacgcaggagaagaacaccctgccgaccaaagagaccattgagcaggagaagcggagtgaaatttcctaagatcctggaggatttcctacccccgtcctcttcgagaccccagtcgtgatgtggaggaagagccacctgcaagatggacacgagccacaagctgcactgtgaacctgggcactccgcgccgatgccaccggcctgtgggtctctgaagggacccccccccaatcggactgccaaattctccggtttgccccgggatattatagaaaattatttgtatgaataatgaaaataaaacacacctcgtggcaaaaaaaa

SEQ ID NO: 21162 - DNA, 542 bp, Homo sapiens
  misc_feature (1)...(542): n = A,T,C or G
aggagatttcgacggctgtggaattcggcacgagctcagatccagcagcggttcgacgagctgtgcagccgcctcaacatggacgaggcggcgcgggccgaggcctgggacagctaccgcagcatgagcgaaagctacacgctggagggaaatgatcttcattggttagcatgtgccttatatgtggcttgcagaaaatctgttccaactgtaagcaaagggacagtggaaggaaactatgtatctttaactagaatcctgaaatgttcagagcagagcttaatcgaattttttaataagatgaagaagtgggaagacatggcaaatctacccccacatttcagagaacgtactgagagattagaaagaaacttcactgtttctgctgtaatttttaagaaatatgaacccatttttcaggacatctttaaataccctcaagaggagcaacctcgtcagcagcgaggaaggaaacagcggcgacagccctgtactgtgtctgaaattttccattttttgtgggtgctttttatatatgcaan

SEQ ID NO: 21163 - DNA, 471 bp, Homo sapiens
  misc_feature (1)...(471): n = A,T,C or G
attgacccgcgctgcangaattttgccccgcgctgcaggaaagaaagggcacatgtctatcggaacatagattttgcatactgcatggtatggtcaggctttgtgtccacacccaaatctcatcttgaaattataatccccataatttccataatccccacatgtcaatggagagaccaggtggaggtaactgaatcatgggggtggttttccccgtgctgttctcatgcaatctgatggttttataagtgtttggtagttcctcttgcattcattctcccacccgccaccttgtgaagaaagtccttgcttccccgccttccaccatgattgtaagcttcctgaggcctccccagccatggggaaccatgagtcaatttaacctctttcctttacaaaatacccagtctggggcaggtctttatagcagtgtgaaaatggactactacactgcatatataggaaagtatg

SEQ ID NO: 21164 - DNA, 474 bp, Homo sapiens
  misc_feature (1)...(474): n = A,T,C or G
ntttgaaccatttgccccgcgctgcaggattcggcacgaggagttgggaagaaattaatagcttgaggccaggagttcaagatcatcctgggcagcaaagtcatacactcttgagggaagagagagaccttctcatattgttttatattgttttatactcagtacctgttttaagaaaaaaacaaggaagtgaaatcaaagacaggcagcctggcaccaggcctgaaaccagccctgggcctgcctggcctaaagctagtagttaaaaatcaacttacgacttagaacctgatgttatccgtagattccaagcattgtataaaaaaattgtgaaactccctgttgtgttctgtaccagtgcatgaaacccctgtcacatatcccctagattgctcaatcaatcacgaccctttcatgtgaaatctttagtgttgtgagcccttaaaagggacagaaattgtgcacttgaggagg

SEQ ID NO: 21165 - DNA, 477 bp, Homo sapiens
  misc_feature (1)...(477): n = A,T,C or G
tgtgggntannnnnnaaactggacattgctgcagcaattcggcacgagaaaccatacattcggggttcctcttccccaccgaagaaagcaaatcatatcatgcaacatttgccagttgagatttaattctgatagccaggctgcggcccactacaaaggcacgaaacatgccaagaagctcaaagcactggaagccatgaaaaataagcagaaatctgtaactgccaaggacagcgcaaagactaccttcacctccatcactaccaataccatcaataccagctctgacaaaacagacggtactgcagggacaccagcaatatcaacgacgacaactgtggaaatccgcaaaagcagtgttatgacaactgagatcacctctaaagtggaaaaaagcccaacgacagccactggcaatagctcatgtccttctactgagaccgaggaagagaaggcaaaacggcttctttactgttn

SEQ ID NO: 21166 - DNA, 493 bp, Homo sapiens
  misc_feature (1)...(493): n = A,T,C or G
gcgggnattgatttcgatgtcctgtcggaattcggcacgagaagacactgacttgngggaaacatcatctgtggctcacgctcttgtgccagcaccccatgagccgccaccttccttcccgatacaaaagatgcagatagatgaaagagaagagttcggcccgcggctgcctcccgtcttctgccccaatgctcgtcagacacttgaggttcctcaaaaagagaaacataaaaagaacaaagacaagcacaaggccaagaaagagcacaggcggaagaaagagaagaaaaagaaacacaggaagcacaaacacaaaggcaaaaaaaaaaaaaaaacctcgggggggggccgggcccccatttccccttatagggaggcgaataacaattcacgggccgccgtttaacaccgtcgggacgggggagaannnnnnnnnnntnnnnnnnnnnnnnnnnnntnnnnntntttnntgctctntnttttnttntctccg

SEQ ID NO: 21167 - DNA, 497 bp, Homo sapiens
  misc_feature (1)...(497): n = A,T,C or G
nttggattcgcaccggctgcaggaattcggcacgagctcaaccagaatgcctggaacaacctggagaaatatagccgcagcttgacccgcagctaccaaaacgtctatgtctgcacagggccactcttcctgcccaggacagaggctgatgggaaatcctacgtaaagtaccaggtcatcggcaagaaccacgtggcagtgcccacacacttcttcaaggtgctgatcctggaggcagcaggtgggcaaattgagctccgcacctacgtgatgcccaacgcacctgtggatgaggccatcccactggagcgcttcctggtgcccatcgagagcattgagcgggcttcggggctgctctttgtgccaaacatcctggcgcgggcaggcagcctcaaggccatcacggcgggcagtaagtgagggtggagcccagtgagactgtgggtgtgtgcaggccggggagtattaaaagtggtgattnttggagacaagaaaaa

SEQ ID NO: 21168 - DNA, 257 bp, Homo sapiens
  misc_feature (1)...(257): n = A,T,C or G
aagaagataaaaannttttgaacgcctgcangtattcggcacgagcggnggcagacacctctggcctgaagtcacagcagagttcaccccagagcgcctgggcgcatcttgtggcatgcccatgggctgccgagtcctgccctctcgccacatttcccccaagttacattcccaggaggacctttttaatgttctcaatcgtggctctcagacacaaataaatttttttgtaaactctgaaaaaaaaaaaaaaaaaa

SEQ ID NO: 21169 - DNA, 471 bp, Homo sapiens
cattgaccgccatagcagactgtcagagaagagaggacctacttccagcaaccccagaaagagacatcgggaagattctgatgtggaaatggtggaagatgattcccgaaaggaaatgactgcagcttgtaccccccggagaaggatcattaacctcactagtgttttgagtctccaggaagaaattaatgagcagggacatgaggttctccgggagatgttgcataaccactccttcgtgggctgtgtgaatcctcagtgggccttggcacagcatcaaaccaagttataccttctcaacaccaccaagcttagtgaagaactgttctaccagatactcatttatgattttgccaattttggtgttctcaggttatcggaagggaacctgattggattaccccttctgattgacaactatgtgcccccttttggagggactgcctatcttcattcttcgactagccactg

SEQ ID NO: 21170 - DNA, 465 bp, Homo sapiens
  misc_feature (1)...(465): n = A,T,C or G
naatgccatggctgcacgaattcggcacgagtcagctgggcccagactgttgcccactccatattccaaaagtaggggagggccagcaccagcatcggagcacagcaccatcctcacccccatccacaagcagaccaaggcggactgttcctggcttcctaaaggcttcctaaagacaatgagatgtgtcgctggttgtggaagcggagctcggtcagcgtgttgttctggaggagggcccggaagatggccaggatgcctttgcctgtgatgtggttggagtccaggttgaggctggtgatggtcttgttggccttgagcatgatggcaatggcaaaggccacgtggtcatcggctcgcgtgttggccaaggcgaacagcttaaccacagtgttgaactccagagcctcagtaaaccggaccaagatctcaaaaaaaaaaaaaaaaaaaaagaagaagaggggc

SEQ ID NO: 21171 - DNA, 464 bp, Homo sapiens
atatgccccgcgctgcatgaattcggcacgaggtagctgggaccgccgttcagtcgccaatatgcagctctttgtccgcgcccaggagctacacaccttcgaggtgaccggccaggaaacggtcgcccagatcaaggctcatgtagcctcactggagggcattgccccggaagatcaagtcgtgctcctggcaggcgcgcccctggaggatgaggccactctgggccagtgcggggtggaggccctgactaccctggaagtagcaggccgcatgcttggaggtaaagtccatggttccctggcccgtgctggaaaagtgagaggtcagactcctaaggtggccaaacaggagaagaagaagaagaagacaggtcgggctaagcggcggatgcagtacaaccggcgctttgtcaacgttgtgcccacctttggcaagaagaagggccccaatgccaactcttaag

SEQ ID NO: 21172 - DNA, 465 bp, Homo sapiens
  misc_feature (1)...(465): n = A,T,C or G
atttgccctcgctgcacgaattcggcacgagggttttcctatcaatgcacattcctttgtcctcttcaacaaaaggacgaaaagcaaaaaaccacaacccacagctttctagttgctgacttaacccaattttcctgtacccccagcatgtctttctttctacctttgactcagatatttatcagcagatgataaaatgcaggcaaacccagaaagctaaagtctttggaaaaaaatagctgttcttacacatctttcctcatttgcatgggcctttcccttaggggcactgggcaagtccatgtattcttgggtatgcagtgagcacagctcaaagggggttctaacacatttttataagattgcgtttcctaaatgaatctcttccatttaaggatttaggcataattaaaaatctgtagcggttttgtgaaagcanatttaagtttaacttttgggaaagta

SEQ ID NO: 21173 - DNA, 482 bp, Homo sapiens
  misc_feature (1)...(482): n = A,T,C or G
cgggatggggnnggncngnnaattgatnnntcattgatacgcgctgcaagaattcggcacgagatttagtagagctagtaggccctggtcgtcactctgggcagggatgccgtcagccttgagggtcgccacccacctgtgtgttgccctctgtcctggcggggaaacatacaccccttgtctcaccaccaaccttgcttgtgtagtcagcagggctggccctgccccaaggactcactgcatgtacccggacccctaggcctggcctttgcagcatagttgggagcttctggattccatctgcacctgtgagccccatgctggctgtgcactgcgcgggcctgagactgctggatacaatgttgggcaacaactcagccagcctgatggcagcctcagaggcttactctaacccatcccagaataaatggagacttcatgtgaaaaaaaaaaaaaaaaaaaaaaaaaaaacttcggggggg

SEQ ID NO: 21174 - DNA, 468 bp, Homo sapiens
  misc_feature (1)...(468): n = A,T,C or G
ntggannnnnnttctggtctcctgcacgatttcggcacgaggagctgtggccatgcctgcattaaaacaaatgcgactggccaggaatgcagtgtagaattgaaacatcagggctgagtgattcattcctctttacccagtttttgttttgttttgtttatctgtcttccctcttggggaagcctccacccagttctcccatccaggccagtgggttctgaaccccctccttccctccttcagccatcccacttgccctgcttgggccttttcagcagtgtgtgtcacatcatcatcagatggaaccagaagcagccaggagtgctttttggcacttccagctcagccagtaccgtagaggatccagggttactatccatggtgaaaagaactttctctagaattggtattaatgagggtaagtaacttaatttccaccaacaacttatccagacatttaaaaaggca

SEQ ID NO: 21175 - DNA, 479 bp, Homo sapiens
  misc_feature (1)...(479): n = A,T,C or G
catcgccccccaattgcccggcatgcagaatnccccacgaggtatttagaaagttcatattggataaaggacttatatccagaataaaaaggactacaacacagtatcagcaaactccaattttaaatggacaaaaaatctgaataaacatttcactaagatacatgaatggctgaagagcacataaaagatgctttgacattattcgccatcaggaaaatcaaagttaaaaccacaaaggaatatcatttcaaacgctaggatgggcataatttttaaaaaacagacaacaatgactggcaagactgtagagaaatgggaagccccacacattactagtcagaatgtaaaataatgcggtcactttggaaaacaatttggcagtttcctagaaaagttaaatgaaaatttaccgtatgagctagcaactcccctcaggcatctgcctaagaaaaatgaaaacatgtccacacaaagag

SEQ ID NO: 21176 - DNA, 511 bp, Homo sapiens
  misc_feature (1)...(511): n = A,T,C or G
agggtgnnncnnaggagcccnnnnaattgannncactgaccgcctgcggaattcggcacgaggacaccctgagggagtgccgcacacggngtctgagactggcagtgatctccaactttgaccgacggctagagggcatcctggagggccttggcctgcgtgaacacttcgactttgtgctgacctccgaggctgctggctggcccaagccggacccccgcattttccaggaggccttgcggcttgctcatatggaaccagtagtggcagcccatgttggggataattacctctgcgattaccaggggcctcgggctgtgggcatgcacagcttcctggtggttggcccacaggcactggaccccgtggtcagggattctgtacctaaagaacacatcctcccctctctggcccatctcctgcctgcccttgactgcctagagggctcaactccagggctttgaggccagtgagggaagtggctgggccctaagccatggagaaaacctaa

SEQ ID NO: 21177 - DNA, 459 bp, Homo sapiens
atttaccccgctctgccccgcgctgcaggaattcggcacgaggagatgactttctgcagcgtttatcactgttgggtggagtcacgtcccttccctccaccgaagtcatcaaccagatagggaagggaaagatgaggcccataaaacgagttcaaactctaggtcttgtacacgtatgtaagtaaatgtcaataacccaagcctttgtcatagcagtcacttggttgacttatgatctgggtctgttgaattttgtgcttgggaatggagctggagggagtggggcctgtgtacagcagctacctctcccaggtcctctcacttgcctgccccgcgtcctggttgcatggccgcacctgtgtgtgtgcagaggtctgtgtcccatcctctgcacctcctttccgggggcctggggagccccacgtgttgccaagatcttggtgcaataaaatactccgg

SEQ ID NO: 21178 - DNA, 494 bp, Homo sapiens
  misc_feature (1)...(494): n = A,T,C or G
aggcgggatnnnnnnttttactgcaccgcgctgcaggaattcggcacgagatttggccgactccctaccgctccaagcccaggcctcagccatggcatgccccctggatcaggccattggcctactcgagggcatcttccacaagtactccggcagggaaggtgacaagcacaccctgagcaagaaggagctgaaggagctgatccagaaggagctcaccattggctcgaagctgcaggatgctgaaattgcaaggctgatggaagacttggaccggaacaaggaccaggaggtgaacttccaggagtatgtcaccttcctgggggccttggctttgatctacaatgaagccctcaagggctgaaaataaatacggaagatggagacaccctctggggtgctctctgagtaaaaccagtgggggtgagtgacgataaattttttttggcgaatttaaaaagaaaaaaaaaatttgagggggggcccggcccgat

SEQ ID NO: 21179 - DNA, 455 bp, Homo sapiens
atttgccccggttgcacgacttcggcacgaggtgctttggggttctcaggccaggatacatgctggcgctgaagtgcacgcagccttgacgtcacctgggatctcggggtagccaggctgctccaagacagtggatatcgaggcagtcgtgaggcccctactccacctgggagcacgggaaggacgtggttgcctggcctgggctgcgcccagcagcttccccccaattctgccctcccagctgtcgacccagatgggatgttcggatcggaaccacattctcctgtgtttgcgcgcaacctggtgcccgctgaccctgagtgaaggccgccctgcggagactcaaacaactcaaggaacaaaatgggggggggggggcgggggcccccattacttttttggggaggctgtttctatacaggtgcgcggggtttacaccccccaagaagaacaca

SEQ ID NO: 21180 - DNA, 474 bp, Homo sapiens
  misc_feature (1)...(474): n = A,T,C or G
nttgaccgcctgcggaattctggacgagcatgggttcctgtgtgcttagtcatcgggtccgacacaggctggactgatctggggagccgcgaagggcctgccttcacaaagggacgtaacgcaagtactgcgggcagtgtttgaatatggccctgaacaatgtgtccctgtcctccggtgatcagaggagcagggtggcctaccgctcttcccatggcgacctcagaccgcgggcgtcagcgttggcgatggtctccggagacggcttcctcgtttccaggcctgaagcgattcatctaggacctcggcaggcggtgcgaccaagcgttcgggccgagagccgtcgagtggatggtggcggccggagcccaagggaaccagatggccggggccggagccgccaagccagattctcaccttacccaatccctgccgttgaacccgatctcctaagaagtgtgctgcaacagcgtn

SEQ ID NO: 21181 - DNA, 470 bp, Homo sapiens
  misc_feature (1)...(470): n = A,T,C or G
tggaagttctcngnngttgnnnaaaactgagcacgcttggatgcccncgctgcagaattcggcacgagagacagtgatagcagtactagcagtgaggaagaagagagctgggaacccctccgtggtaagaagcgaagccgtgggcctaagtcagatgatgacgggtttgagatagtgcctattgaggacccagcgaaacatcggatactggaccccgaaggccttgctctaggtgctgttattgcctcttccaaaaaggccaagagagacctcatagataactccttcaaccggtacacatttaatgaggatgagggggagcttccggagtggtttgtgcaagaggaaaagcagcaccggatacgacagttgcctgttggtaagaaggaggtggagcattaccggaaacgctggcgggaaatcaatgcacgtcccatcaagaaagtggctgaggctaaggctagaaagaa

SEQ ID NO: 21182 - DNA, 487 bp, Homo sapiens
  misc_feature (1)...(487): n = A,T,C or G
agggttcccggggtggnnnatttgaccgccatagagaccctccgagccaccaaattttagtttgtggttggccagaaagagcaaagtaagagaacagtgaacattcggactcgagataatcgtcgccttggggagtgggacttgcctgaggctgtgcagcgactggtggagctacagaacacgagggtcccaaatgccgaagaaattttctgagcctttgtacatagatgaggcaaaaacctgcgagtgccatcagcctccctcacatgggagaccccaacccagctgacaatgtggagcccccagaacttcagaactgtgtggaggcacatgtctgctctcctgaaaagagacttggtttggggaccccacaaaaggagggaagctgtagctgtttggatgtgaggagaatgaaactacaaaaaaaaataaattgggccaggcgcagtggctcatgcctgtaatcccagcactctgggaggctgag

SEQ ID NO: 21183 - DNA, 489 bp, Homo sapiens
  misc_feature (1)...(489): n = A,T,C or G
catagaaccgcctgcaggaattcggcacgagctatgataaagttctgggtaacacgtgccatcagtgtcgacaaaagaccatcgacaccaagacagtgtgtcggaaccagggttgctgtggtgtgcgaggacagttctgtggaccatgcctgcggaaccgctatggggaggatgtcagatcggcattgctggacccggattgggtgtgtcccccctgtcgtgggatctgcaattgcagctactgtcggaagcgtgacggccgctgtgccacaggaatcctcattcatctggccaagttttatggttatgacaatgttaaggaatatctggagagcttacaaaaggagctggtagaagacaattaagaggaaaacaaacagaaccagccacctcaccatagagtactcnncacagacatgcataccattggtgcctnagatttttttacaagtgtgttttatacagaaattctttggagaaattactatn

SEQ ID NO: 21184 - DNA, 484 bp, Homo sapiens
  misc_feature (1)...(484): n = A,T,C or G
attagaccacaattaaaaannttttgatccgcgctgcaggaattcggcacgaggcgggtgctggggaatggcgccttacaggctgcccacctgcctcctcagggtggaaggcggggcttgggtgtgagcgtgctgaatcagaactttcctggaaagtcgccacttggtgtggtcagaggatcactgaataagaagtgccttttgcctcccgccatgattctgaggcctccccagccatgtggaactgtgactcccagccactctcttttacagagcccacaaagcgtggacggccacccagccttcccagtttacatgatcatggggagagcctgtcaaaagcaactgcacagagcctgtgcttaagatggcaggatcgcaagacagagcaactggagcaagtcctcattaagaagagccgcccgatgcatttggactgcgatgtgttacgcccatgagatttcagggttaatttgttacctgg

SEQ ID NO: 21185 - DNA, 476 bp, Homo sapiens
  misc_feature (1)...(476): n = A,T,C or G
gaattgatcgccttcnngaannncccatgacggtcgtncggaanncgcacgagctcgttcgcggtccaggtcccggtctcggtccaggagtcctcccccagtgtccaagaggtaatccaaatccaggtcgcgatcgaagagtccccccaagtctcctgaagaggaaggagcggtgtcctcttaagaaaatgatgtatcggcaagcagtgtaaacggaggacttggggaaaaaggaccacatagtccatcgaagaagagtccttggaacaagcaactggctattgaaaaggttattttgtaacatttgtctaactttttacttgtttaagctttgcctcagttggcaaacttcattttatgtgccattttgttgctgttattcaaatttcttgtaatttagtgaggtgaacgacttcagatttcattattggatttggatatttgaaggtaaaatttctttttgttatatagtgctg

SEQ ID NO: 21186 - DNA, 465 bp, Homo sapiens
  misc_feature (1)...(465): n = A,T,C or G
nttggaccngcgntnanagaaanatttgaccccgcgctgcaggaattcggcacgagcggccccagcgccccttctgtgctgtctgtggcttcccatccccctacacctgtgtcagctgcggtgcccggtactgcactgtgcgctgtctggggacccaccaggagaccaggtgtctgaagtggactgtgtgagcctgggcattcccagagaggaagggccgctgtgcactgcccggccttcagaaagacagaatttcatcacccaatgcagggggagctcttcctggaccaagggaggagccgctcattcacccaacaaaactgtgtcttatctgccaggaaagaccagcctcactcctgggaactgtctggcaggtaggctgggccccccagtgctgttagaataaaaagcctcgtgccggaaaaaaaaaaaaaaaaaaaactcgggggggggcccggtacccat

SEQ ID NO: 21187 - DNA, 408 bp, Homo sapiens
aataacgcacgaggaaaggacacggctggctgttcttctcagcgccgaagtcgcgccatgctcgtcctcataagcgccctgactcgggcgctggactcacggacgctggcgcctcagatgtgctcatcttttgctacgggacccagaccatacgatggaatattctatgaatttcgttcttattaccttaagccctcaaagatgaatgagttcctggaaaattttgagaaaaacgctcatcttcagacagctcactctgaattggttggatactggagtgtagaatttggaggcagaatgaatacagcgcttcatatttggaagtatgagaattttgctcatcgaactgaagttcagaaagccttggccaaagataaggaatggcaagaacaattcctcattccatat

SEQ ID NO: 21188 - DNA, 471 bp, Homo sapiens
  misc_feature (1)...(471): n = A,T,C or G
ngagtgatcgacgctgttgaattcggcacgagggggactgttctcaccttaactcagccagaaagatgccctagttgtgatcaaaggtaactcgaggtggagggtagccctggggcccctcgacatcaccgtcattgatggagcctgaaccgtgtgctcctcggcagatgctgttgttgttacttccctccaagaggctggaaaagggctcagagctgctgagcaggaaccggagggtgacccatttcaggaggtgccggtaccagcctgactaggtacaggcaagcttgtgtgggcccaacaggcccttggtagagctggtgccagatgtgggctcagatcctgggcatgatgggccgagccacctcggatcccactgattggccagccgagcgagaaccaggctgctgcatggcactgaccgccgcttccagcttcctctgagccgcanggcctgctacgcgggcaagc

SEQ ID NO: 21189 - DNA, 472 bp, Homo sapiens
  misc_feature (1)...(472): n = A,T,C or G
nattgcccgccataggaatccctccgagccgacgcattgatatcattaaatggatggagcgctaccttagggataagaccgtgatgataatcgtagcaatcagccccaaatacaaacaggacgtggaaggcgctgagtcgcagctggacgaggatgagcatggcttacatactaagtacattcatcgaatgatgcagattgagttcataaaacaaggaagcatgaatttcagattcatccctgtgctcttcccaaatgctaagaaggagcatgtgcccacctggcttcagaacactcatgtctacagctggcccaagaataaaaaaaacatcctgctgcggctgctgagagaggaagagtatgtggctcctccacggnggcctctgcccacccttcaggtggntcccttgggacaccgttcatccccagatcactgaggccaggccatgtttggggccttgttctgacagca

SEQ ID NO: 21190 - DNA, 467 bp, Homo sapiens
tgcacgaggtggctcgcacccaccataccaaccatgcactcccagtctacgtcattacacgagccacctacaggcacacgctgacggcgctgagtgagatggacctcatctctaccattggcgagagtgcggccctgggcgcaactggtgtcatcctctggggtgacgcgaggtacaccacaagcacggagacctgccaggacctcaaagattacctgacacggctgctggtcccctacgtggtcaatgtgtcctgggccacccaatattgcagccgggcccagtgccatggccatgggcgctgtgtgcgccgcaaccccagagccagtaccttcctgcatctcagcaccaacaggttccgcctagtgactggccatgcacctggtgaaccccagctgcgacctgtgggggagctcagttgggccgacattgaccacctgcagacacacttccgcttgcagagctac

SEQ ID NO: 21191 - DNA, 483 bp, Homo sapiens
  misc_feature (1)...(483): n = A,T,C or G
tggtgggnnnnnntgcccgcctgctgaattcggcacgaggacacgctgaacagaattcacctcacgtccagtatgagatgggagtatgaacaaacagtcatgcagagtgatgagtgcaaacatggactataaagcggccatagagaatgaactgtgtttgtgtttagagaagacacactccccacccctgaacaggcttcttaaaagtactagaaaggcacagaaatgaataaaagtcgctggcagagtagaagacgacatgggagaagaagccaccagcagaacccttggttcagactccgtgattctgaagacaggtctgactcccgggcagcacagcccgctcacgattccggccacggtgatgacgagtctccgtcaacctcgtctggcacagctgggacctcctctgtgccagagctacctgggttttactttgaccctgaaaagaaacgctacttccgcttgctccctggacataac

SEQ ID NO: 21192 - DNA, 511 bp, Homo sapiens
  misc_feature (1)...(511): n = A,T,C or G
ggaggggggnnnnnnnttcgcacggctgtggaatncgaanaagcttagcccgcctgcgtggagacccctgcccctcacccaaactttggaggtggcagggtgaacagcaggccaagttcaggtcccaagacaggccaaggccagtgcggtttcccttccactgcctcagtttacctgtattcagaagacagtctaggaagagttgagcagagttccctctaaaagagtagggagctgataacagtcccaagccctcctctttctctatgccaaaatcatttccgttatcctgagatgggggtgagtggatggatggtgtactgaggggcctctgccctgcccagagcccccaccatcgtagtgggggcaggggacttcctgcccacaaccccctccaaccctcacctggcgtgcccgggtcaccagcagcagcagcggcgttccatcgctcccaagatctgggtgaaggggagaacctgccatcttatccctacccccccggggccctcaa

SEQ ID NO: 21193 - DNA, 482 bp, Homo sapiens
  misc_feature (1)...(482): n = A,T,C or G
ggacggggnnccgaattgaatcctaacttgaggcctcggaaaaggcacgagcggagctgcccagtcgccgcgggaccggggccgctggggtctggacgggggtcgccatgatccgctttatcctcatccagaaccgggcaggcaagacgcgcctggccaagtggtacatgcagtttgatgatgatgagaaacagaagctgatcgaggaggtgcatgccgtggtcaccgtccgagacgccaaacacaccaactttgtggagttccggaactttaagatcatttaccgccgctatgctggcctctacttctgcatctgtgtggatgtcaatgacaacaacctggcttacctggaggccattcacaacttcgtggaggtcttaaacgaatatttccacaatgtctgtgaactggacctggtgttcaacttctacaaggtttacacggtcgtggacgagatgttcctggctggcgaaatccgagag

SEQ ID NO: 21194 - DNA, 488 bp, Homo sapiens
  misc_feature (1)...(488): n = A,T,C or G
cggaggtncnanttcgcccgcctgcttacaccggctgcaggaattcggcacgaggtcgcgcggaggcggaggcttgggtgcgttcaagattcaacttcacccgtaacccaccgccatggccgaggaaggcattgctgctggaggtgtaatggacgttaatactgctttacaagaggttctgaagactgccctcatccacgatggcctagcacgtggaattcgcgaagctgccaaagccttagacaagcgccaagcccatctttgtgtgcttgcatccaactgtgatgagcctatgtatgtcaagttggtggaggccctttgtgctgaacaccaaatcaacctaattaaggttgatgacaacaagaaactaggagaatgggtaggcctttgtaaaattgacagagaggggaaaccccgtaaagtggttggttgcagttgtgtagtanttaaggactatggcaaggagtctcaggccaaggatgtcattg

SEQ ID NO: 21195 - DNA, 449 bp, Homo sapiens
  misc_feature (1)...(449): n = A,T,C or G
natgatnatcgtgagcaattcggnacgaggagcattgcagcagccactggctttgtcaaaaaggaccagttgggcaagaatgaagaaggagccccacaggaaggaattctggaagatatgcctgtggatcctgacaatgaggcttatgaaatgccttctgaggaagggtatcaagactacgaacctgaagcctaagaaatatctttgctcccagtttcttgagatctgctgacagatgttccatcctgtacaagtgctcagttccaatgtgcccagtcatgacatttctcaaagtttttacagtgtatctcgaagtcttccatcagcagtgattgaagtatctgtacctgcccccactcagcatttcggtgcttccctttcactgaagtgaatacatggtagcagggtctttgtgtgctgtggattttgtggcttcaatctacgatgtt

SEQ ID NO: 21196 - DNA, 512 bp, Homo sapiens
  misc_feature (1)...(512): n = A,T,C or G
gggagttgcccaagaagggccncaattgatnngcccccctgcncagcactgcggaannncgcacgagaagccgggggccgccttcgacccctacaccctggtccggcagccgcacaccatcctgcgcgtcgtgtcttggctgttctccatagtggtgttcggctccatcgtgaacgagggctacctcaacagcgcctccgagggggaggagttctgcatctacaaccgcaaccccaacgcctgcagctatggcgtggccgtgggcgtgctcgccttcctcacctgcctgctgtacctggccctggacgtgtacttcccgcagatcagcagcgtcaaggaccgcaagaaagccgtcctgtccgacatcggtgtctcggccttctgggctttcctctggttcgtgggattctgctacctggccaaccagtggcaggtctccaagcccaaggacaacccactgaacgaagggacggacgcagcccgggccgccatcgccttctcctttttctccn

SEQ ID NO: 21197 - DNA, 486 bp, Homo sapiens
cgccgcccattgacatccttaggacttcggcacgagagccagccagagtaagctggacctgcaacctgcctgagccccgtggcctctcagctctgcggccaccccgttccctccccagcttcctgcccaaagagccccacattcaagccaacttgagggaagggggcgtctcgtcagctggtccctgctagggagctattgatgtgcaatattagaaaggagacatgaaaaaaggagaaaaggaaagacagaagcgtatatatatattatttaaacaaacaaaaagaaggtgcgttactatttttttttcacccgggaaagaggtgagaggatgggaaggagcagccaggcgtgggaagcggcgagatcctcgggctgggggtgcccacgtttgctacctcccactgtgaaatcgctggtgctcgcaattgtctctcacagtgtatgtgatttttttaaggaaaaaaaaaaacatccctatttaaa

SEQ ID NO: 21198 - DNA, 482 bp, Homo sapiens
  misc_feature (1)...(482): n = A,T,C or G
catctgaccggccctcangttcgcaccgccctgcaggaattcggcacgaggggaaatcaaggctgctggaaggaagtagtgtataagctgaaaaatgaggagtgaataggaattagccaagtgaaaagcagaggcaaatgggtttcaggaaaaggaaaaacatatgtaccagtaacatttcaagaagaaatgggaaggattagatgatttctgttattcttattaggttgatctcttccatggaagagacacacagaatgtaattaatttatagaatataaaaatgatttttttttttaggaatggggaggtgaggagaaaacccgcttcaagttctgttccaatattaatatggttttgctttctctacaaacctaagtaaaacaatggtggtaccaagggttggttgggaggcactagttttcccagtgtacatactcacaactaacataaaagctaaatacgtataatcaacatgcttn

SEQ ID NO: 21199 - DNA, 497 bp, Homo sapiens
  misc_feature (1)...(497): n = A,T,C or G
aggagtccccnnaggggnnnnaatgatcgcctgctgatcgcattagctttggcaggccaaggtgggcggatcacctgaggtcaggagcccaagaccagcctgaccaacatggagaaaccccgtctctactaaaaatgcaaaaaaacaattaggcaggcatggtggcaaatgcctgtattcccagctactctggaggctgaggcaggagaacgcttgaacctgggagatggaggttgtgatgagccgggatcatgccattgcactcattccagcctgggcaacaagagtgaaactctgtctcanaaaaaaaaaaaaaaaaggagagagagaaaaanntgggttccctacttcacaggattaaaaaaaatttttcagggggataaaaaacctaaattttttttttttttaaaaaaattttttatttttgcccccaaggttgaagggggtggccaaaaaaataattaatgtggcctttacctttccaagcccttaaaaac

SEQ ID NO: 21200 - DNA, 491 bp, Homo sapiens
  misc_feature (1)...(491): n = A,T,C or G
ggcggccgngnaanttaaaccttgatggcctgagaacctgccgagcccatggctaccctatggttaggtactatttttatttctatttgacagacgtggaaatgaaagacacaaagaagtgcctagcccagggtctcgggggcagtaagcagtgggactgaggtaccatcccagagattgcaattgtaaccattgtgaaataccacctctccctcccagcagggaatcagtggccccttcactgaggtcagtttactctcttattaggcagagactcccatctgtcctctcctaccttcactctccttagtcagaaatgggtcaccctgaccaattctcaatggcaccttagccactaccaccaaccccaggggagtagctcagtgcaactcgtgtctgtctcctgtctcctgtctgtctccccttccagtcccctgggatagcttcaaggggaactggggcaatgctcacagtgccaactggcacaaaag

SEQ ID NO: 21201 - DNA, 474 bp, Homo sapiens
  misc_feature (1)...(474): n = A,T,C or G
tggcgctnnnnnnnaaattgaccacgctgcagcaattcggcacgagcagatgttgagcataccggagccaccagtgagttttatgacaagttcacaattcgctatcatattagcaccatttttaaaagcctttggcaaaacatagctcaccatggcacctttatggaggagttcaactccgggaagcagtttgttcgctatataaacatgttgataaacgacacgacgtttttgctcgatgaaagtctggagtctctgaagcgaatccatgaagtgcaggaagagatgaagaacaaagaacagtgggaccagttgccccgggatcagcagcaggctcgtcagtctcagcttgctcaggatgagcgtgtgtcccgctcttacctcgccctggccaccgaaaccgtggacatgttccacatcctcacgaagcaggtccagaagcccttcctcagaccggagcttggaccccgattg

SEQ ID NO: 21202 - DNA, 461 bp, Homo sapiens
aggaaaaatttgactgcctgcccgtttcgaatgaggactatatgcatttggattacctggaaagttggtggtggcaggcaccataataattcagaatattggagctatgtcatcttatcttttaattattaaaacagagcttcctgctgctattgcagaatttttgactggagactatagtagatattggtatcttgatggacaaacactactaataatcatatgtgttggcattgtgttccctcttgcacttcttcccaaaataggctttcttggctacacaagtagtttatcatttttctttatgatggtctttgctcttgtgggaataattaaaaaatggtccatcccttgtcctctgacattaaattatgtagagaaaggcttccagatttcaaatgttacagatgattgtaagccaaagctctttcatttctccaaagagagtgcttatgccttac

SEQ ID NO: 21203 - DNA, 513 bp, Homo sapiens
  misc_feature (1)...(513): n = A,T,C or G
tgggtgtgcccnnaggttnnnnnnnnatttgancggccttaggaattcgtcacgagatcacagggaanaaccgaccgagctcangaagcctaatccaggtggtaaccacagaaggaaggacggaactcaccccagcatatttttaagcctcatctcagtgcctatgaggggcctgccagaaaagtcactaacctgtctcagtgtggccttgtccagccttgtgttttctgtaacccctgtttgtggtacgagataatgagtcctatttttctctcacataatatgcatttgctctcctaggacagtgtaatacatttatgtgaagtaaagacatgcgagactggtggcctgcaaatagcatccgttgatctgtgttaactgcatagggagggctctgcatagcacctgctatagcggtgtcatgttggatcgcttttgtgactgttcatctgtccttgacagtggctgtcatcttgactactttgttgattngntggtatttgggacatttta

SEQ ID NO: 21204 - DNA, 487 bp, Homo sapiens
  misc_feature (1)...(487): n = A,T,C or G
aatagacccgcgctgcaggaatttggcacgaccagaactgtgtaacttttgattggtcacccatcaccatgtgcctcactctccccatctgaatcaatgacagttaacataattagccctgcacagttctgagagtcttatttgataagagggtttcaaaatttacaatcgtaaagtgctgtgtaaatatgtgattacttatacacacaagcacacagaaaaatcacatcattagggaaatatttgtggaaaatagtaccatcatttttcatttagggtctactcagaaagtaagattcttgaaaaattattaaatagtcgtatgtttataacatgaattgttttttcttaatcatgtaaattaaatgattttgaaaaatcagagtactcagaaatgagaaccagttaaatgtaaaagatgttagtttcagtgttctggttggattccaagtgagattattacattntgcttactggaattccctag

SEQ ID NO: 21205 - DNA, 439 bp, Homo sapiens
gtttgcccgcctgggattcctgcagcttctctgctcttcgcctctgcaagctgcctcgagttgctaagtccaagttctttgaggacagtgaggatgagtcagatgaggcggaggaagaagaggaagacagtgaggaatgcagcgaggaagaggatggctacagcagtgaggaggcagagaatgaggaagatgaggatgacaccgaggaggctgaagaggacgatgaagaagaataagaagagatgatggtgccagggatggaaggcaaagaggaggtgtgtggggaaggggagcaatgagtcttgaaaagccacaaggcaggtgtgaatcccctaattttgattttgagacaggggatccccctgatactttatgatggaagtaatagtcatggggatttattctgcaaggggaatgagatggtaagcctttggggttg

SEQ ID NO: 21206 - DNA, 474 bp, Homo sapiens
cttgaccgccctgagaatttgaccccgctgcaggctcctacgaacctcctacctgttggccagccttccttaaactaccctggacaccgctgagcctataggttgccatcagttacgctgaagccatggatcaacttctttcttgtgtctcccagcacacgtgtgcacgcaaggcagcctttccctttggctagataaatgtggtgaaattgccactagaaagggccagtagcaatgtgttcttaattcctagcatctgctatcaaactgtgccttattaaaaccaaattgtggctattgatttttgctagggtccccgaggtaagtggggaaggaacctccctcctcctttctcccgccattctttttctgaggtctcctgtctcccactccttccctttcctaggattttatggggaggtttgatgagcatttgcctttctccccagagagcttgaccaagttacatattct

SEQ ID NO: 21207 - DNA, 506 bp, Homo sapiens
  misc_feature (1)...(506): n = A,T,C or G
ggatgtctcnnaggttgncccaatcgtacactctatcgagtnccgtacgagcngacatctatatttacacagatcacatgaaaggagtcaactctgggaagtctccgggctttgggttgtcactggttgctgagaccaccagtggcaccttcctcagtgctgaactggcctccaacccccagggccagggagcagcagtacttccagaggaccttggcaggaactgtgcccggctgctgctggaggaaatctacaggggtggatgcgtagactcgaccaaccaaagcctggcgctactactcatgacccttggacagcaggatgtttccaaagtcctgctaggccctctctctccctacacgatagaatttttgcggcatttgaagagctttttccagattatgtttaaaattgaaaccaagccatgtggtgaagaactcaagggtggggataaagtgctgatgacctgtgttggcattggtttctccaaccttagcaagaccctc

SEQ ID NO: 21208 - DNA, 510 bp, Homo sapiens
  misc_feature (1)...(510): n = A,T,C or G
ggagttcccnaagtaggccngtacgaaagcttaccgatctctcctgcggagaatctgagcagctgtcctctgaagccctggaggctgcccgaatttgtgccaataagtacatggtaaaaagttgtggcaaagatggcttccatatccgggtgcggctgcaccccttccacgtcatccgcatcaacaagatgttgtcctgtgctggggctgacaggctccaaacaagcatgcgaggtgcctttggaaagccccagggcactgtggccagggttcacattggccaagttatcatgtccatccgcaccaagctgcagaacaaggagcatgtgattgaggccctgcgcatggccaagttcaagtttcctggccgccagaagatccacatctcagagaagtggggcttcaccaagttcaatgctgatgaatttgaagacatggtggctgaaaagcggctcatcccatatggctgtggggtcaagtacatccccagtcgtggccctctggacaagt

SEQ ID NO: 21209 - DNA, 501 bp, Homo sapiens
ggcgttcacccccaattgcaccgcatgcaggaattcggcacgagcttgttctacatgaattcttgggaattactcacgttccataggaagagtgcatccccaggtgatggtttttggttatggtatgatcctttcacaccgaggatttcattgtttaaaacgtgtttctttaaaagaagccttgataacgagagtgggggaaggaggcagcagactttgaagactgtggcctttggtgttctggagtagggggagggaaggagaaacatgttttccacatcatcgcaagtgtgtgccctttgccccttttcaggatccttagagttgcctccctccctccaccccgacagttttgcaataatgtgccttatcagttgtgagtttacaggtgaagcaatttcccaaataaatggatgtaagtgttcaaaaaaaaaaaaaaaaaattggggggggggccgggaccccaattccccttatagggagcggataacaatccttggc

SEQ ID NO: 21210 - DNA, 485 bp, Homo sapiens
ggggcaggcatcgaccgccgaaatcgcccgcctgcaggaattcggcacgaggcgaagggagccgccgccatgtctgcgcatctgcaatggatggtcgtgcggaactgctccagtttcctgagcaagaggaataagcagacctacagcactgagcccaataacttgaaggcccgcaattccttccgctacaacggactgattcaccgcaagactgtgggcgtggagccggcagccgacggcaaaggtgtcgtggtggtcattaagcggagatccggccagcggaagcctgccacctcctatgtgcggaccaccatcaacaagaatgctcgcgccacgctcagcagcatcagacacatgatccgcaagagacaagtaccgccccgacctgcgcatggcagccatccgcagggccagcgccatcctgcgcagccagaagcctgtgatggtgaagaggaagcggacccgccccaccaagagctactgag

SEQ ID NO: 21211 - DNA, 503 bp, Homo sapiens
  misc_feature (1)...(503): n = A,T,C or G
ngattgagngccctnngnntttgcccgcctgcaggaattcggacgaggtcttctggaacttagtgaattcttttgtctttttcctccagaagtatttgatacaagatttgtaaataagagctctacttagtttgtttaccatgaacatgttgcagcaaaccttatgcatctaattcctacaaggttaaagaaaggcttttagacttgccaggttaagcaacagccaagttctcagtaattgtttgccttgatttatcttttagacttcattttgccagctctaaaactcccagtcttccttgattttagtccttaatcttttatgttctgagcaggaagggtaaaagacaggaacctgcttcactgtattaactagtccatgggctgagaccggggcatctcttttcttcatactgcaatgttgctagatacatgatcagacaccagagggttgggcattcttgcaataccttaacagtgctgaaatctgcagcatggtactt

SEQ ID NO: 21212 - DNA, 482 bp, Homo sapiens
  misc_feature (1)...(482): n = A,T,C or G
ggaacacncaatagcaccgcctgatttgctccgcgctgcaggaattcagcacgagggaatacagtggcatgatctcagctcactgcaacctctgccccccaggttcaagcaattctcatgcatcagcctcccaagaagctgggactgactacaggcatgcaccaccacacccagctaatttttgtgtctaacaggatttcgccatgttgaccaggatggtttcaaactcctgacctcaagtgatccacctgcctcggcctcccagagtgctgggattataggcgtgagccaccgcacctgacctaaatcattttttatttttttaagaatatcgtgacttgaccaaaggcttgagtcttctttgctccctcctgctaggtgtggaagcagatatcccctccatggctgggcaccaaggaaaggccatgcaaggacacagggagaagggcagctgtctgtaagccagaaagagccttcactag

SEQ ID NO: 21213 - DNA, 474 bp, Homo sapiens
cttcgcatttgcatcgcatgcagcgaattcagcacgagaaacaattcagtggtcttatttttgggtgatttttcaaaaaatgtagaattcattttgtagtaaagtagtttattttttttaatttcgagtgatgtaatttaaaacctaacttgcgtttcaaaacagcaacaaaactgtattgcattttttttgctgtaattaactgtataatgtaaacctaattattctatcatggtttaaatttttttgcatatttgctttatcttatgctgctgatttttttaactgaatttagtaagattttgcttatcaaagcaactattatgtggtgacttgcctatatcatgaattatttaagatttttatagttttttttaattagaatttatttcagatgttgtgctcatgatactatccttcagggctatgcgcttatcaatgacataaccccacaggagtgagggaaaataactt

SEQ ID NO: 21214 - DNA, 501 bp, Homo sapiens
  misc_feature (1)...(501): n = A,T,C or G
gtggataacaaaaatcgcccgcctgcaggaattcggcacgaggaacgagtatcggtggctgaagaacgagcaggagcttgaatttcagatttcttatgaggaattttccagaaaagatatcttcactgtgaaataactaaataaatgcccactcagtacagtcactgtctcccttttggaacttgatggcaccttaagcccaggtttgcctccactctagaaactcatcagagtgatgcccttctcaaatgggggaggtcccaaagcggatatcctggcagtgtgaaaggccggctaaagttttgttctcaaagaattccagatatgatttttttccagacaaaaatacctgctacatgcttccttctgtatgaatacatgagacctaccttcattcatgtttcctctatgaagctttccctgcactccaaacacagagctgagacttccacctaatgtagaaagctagcacgagccggcgctgacagatggaagacttgn

SEQ ID NO: 21215 - DNA, 500 bp, Homo sapiens
  misc_feature (1)...(500): n = A,T,C or G
cagtgccncaatttggcgattgagtgatntccggagagccnnaangagngccagcgaccccaactcctccatcttcctcaccgacacggccaagcagatcaaaaccaatgtcaataagcatgcgttttctggagggagagacaccatctaggagcacaggcagtttgggggcaactgtgatgcggacgtgtctttcatgtacctgaccttcttcctcgaggacgacgacaagctcgagcagatcaggaaggattacaccagcggagccatgctcaccggtgagctcaagaaggcactcatagaggttctgcagcccttgatcgcagagcaccaggcccggcgcaaggaggtcacggatgagatagtgaaagagttcatgactccccggaagctgtccttcgactttcagtagcactcgttntacatatgcttataaaagaagcgatgtatcagtaatgtatcaataatcccagcccagtcaaagcaccgncacctgtagg

SEQ ID NO: 21216 - DNA, 502 bp, Homo sapiens
  misc_feature (1)...(502): n = A,T,C or G
agcgacccgaggnnggtgnaaccttgatnaattgacncggctgtacgaattcggcacgagatgatctagagctgcaggcctggtgcagagagatgactgagactggactgcagagggcccaagaccaggggttcctcatctccttagagtcccgggctcagctctgccactttgtcaccatgtgcatcttcacatgcacaggtcagcatgcttctaaccacctgggccagctggactggtactcctggatccctaatggcccatgcaccatgcagaagcccccgcccatctctaaggatgtgacagagaaggatatagtggacttactgcccaatctccaccaggcacgtatgcaaaagaccttcacaaagttccttggcagacgccagcctgtcatgcatgaggagaaatatttctctggtcctgagccccaagctgtgctgagacaattccaggaggaactggcttccatggacaaggagattgaggtccggaatgcagt

SEQ ID NO: 21217 - DNA, 494 bp, Homo sapiens
  misc_feature (1)...(494): n = A,T,C or G
agcggccgnnnanattttnaaattgacggttcgctagtgcagtacaatgtaaacttctgactccatgggtctgtgaatcagctgcctctaaagggaaatatcccaggagtgatgaaaacttgaagatcgaggattggatataagctcagaggtgaaggagggaaattcctcgggtcaactttagcggactgatccacggggtctgccaagagacaggagctggagggttaaacccaagcactcgggagtcagatgtatgaatctgaatctgagcctctcggcttgctgtgtaatctcagagtgaatcatctgtgaacacttcctgtgaacgtgtgactatgattatggaacactctgttgcatcaagatggccagagattgtctcagagtccacgcagtgggaggagggggatttgtttcctggctgggtggtcgtagggcatcaagggatgagcagctttggttgtctgggatttcagcagcttgaggggagc

SEQ ID NO: 21218 - DNA, 500 bp, Homo sapiens
  misc_feature (1)...(500): n = A,T,C or G
ngcgcccgggganngtganaccttgannaattgaccggctgtacgaattcggcacgagaacatttgtgacttatactggctatgtcagtatgattgccttagaaagaccagatctcagggaaaaggtcattaaaggagcagagattcttgaagtgttgcacaggcttccagcagttcggcagtatctgttttcactctatgaatgccgatactctgttttcttccaatcattagcggctggggaacaggaaatgaaaaaggactggctttttgcccctcattatcgatactatgtgagagaaatgagaattcatgcatacagtcagctgctggaatcatataggccattaacccttggctatatggcagaagcgtttggggtcggtgtggaattcattgatcaggaactgtccaggtttattgctgccgggagactacactgcaaaatagataaagtgaatgaaatagtagaaaccatcatgacctgatagcaagaactg

SEQ ID NO: 21219 - DNA, 496 bp, Homo sapiens
  misc_feature (1)...(496): n = A,T,C or G
cgggtccnnnnnaattgancgtctgtangaattcggcacgagcccaaacggctgggggcccataccccatgaagaagcccccaccttccctccacctgcttgtgttgggccccagggaactaaagggtgtgggtcagggaggggtctagaggctattcctaggcctcaggcctcccaaatatgcccctccccagtagctacggttccctgcctaggagctggggagggagagatctaatcccttcaaggaagtgataacactggagtggtaacaagaggagcaggaagcaaggccagccctggttctccatccccatgtgtttcaggtggaacaggaggaactggtccaggccaggcctcatcctcctggacccagcaggggcagaaggaggaagggactggtccaggcatgggtccctttccctgctccatgggcacctctgctgtattgatatcactaataaagtctgtctgcactgcaaaaaaaaaaaaaaaa

SEQ ID NO: 21220 - DNA, 452 bp, Homo sapiens
  misc_feature (1)...(452): n = A,T,C or G
aattgacccgccctgagagaanncttgaccngcgctgcaggagcccatcctcctcgcctctttgcctgctgcaacaagattggacgttttgtgatcgaagaggctactggtgagctcatgcaagaagacctggcaacggatgacgtcatgcttctggacacctgggaccaggtctttgtctgggttggaaaggattctcaagaagaagaaaagacagaagccttgacttctgctaagcggtacatcgagacggacccagccaatcgggatcggcggacgcccatcaccgtggtgaagcaaggctttgagcctccctcctttgtgggctggttccttggctgggatgatgattactggtctgtggaccccttggacagggccatggctgagctggctgcctgaggaggggcagggcccacccatgtcaccggtcagtgccttttggaactgtc

SEQ ID NO: 21221 - DNA, 453 bp, Homo sapiens
  misc_feature (1)...(453): n = A,T,C or G
atttgcnccgcctgcaggaattcgttacgaggcgacaccaagctctggctctagaagagctctctcctggagtggggagtctggaggggactgggtgggtgcaggtaaagccagattctctctggaagggaattttctatgaatggatgatttccaggctcagggtgggctgtgtgttagttctgagcaaatccctcaccaagacccttccctcccaagccctcaaagaaatgaggcaaagcccttccctgcaagaccccttgtggatgtttttgcatctacctgatttttagccccacccagggagactttataccccatgatcctgccccaccgttgctgttgtctgccagctgggtctagcatcacagggaaggggnggatttatactcatgggaagactactgatcctacccganaccaaccctgttactgtactggctgtaatatcat

SEQ ID NO: 21222 - DNA, 475 bp, Homo sapiens
  misc_feature (1)...(475): n = A,T,C or G
natttgacctgcgctgcacgaattcggcacgaggagcacactccacatgtgatttctgaccaaacttaatatgcctgctcagttgtgtaggaaacttttcttcttccacatctttgacagctgccttgcctcgaaacaaatctatggtcataccaggaggaagcaatccctgatgctgctgccacttcagtgcctgtcccagcaatgccatgagacgagatggaggcaccacactgacttcgccagctaaggcctgggcaattgctgctcttctcttttctttgctacttccatctgggtatgcctcacgaggatcaaagtaagacctggccaaaaggttctccagatgaatatatcgctctggctgtgtttgttttaacatgatcatgggatcagtctgtctcanaagtgacctggcagcacccaattcacggagctctatcaattccagaacaacctgttcatagaggtcaan

SEQ ID NO: 21223 - DNA, 487 bp, Homo sapiens
  misc_feature (1)...(487): n = A,T,C or G
natttgacccgcgctgcaggcgactaggcctgtctgctgtggcaggaccagtgtggccagcagggctcctgcttggtgtaccagaattcggccatgagccgctacatactcatcatggggctcctgtacaaggtgctgggcgtcctcttctttgccatagcctgcttcttatacaagcccctgtcggagtcttcagatggcctggaaacttgtctgcccagccagtcctcagcccctgacagtgccacagatagccagctccagagcagcgtctgaccaccgcccgcgcccacccggccacggcgggcactcagcatttcctgatgacagaacagtgccgttgggtgatgcaatcacacgggaacttctatttgacctgcaaccttctacttaacctgtggtttaaagtcggctgtgacctcctgtccccagagctgtacggccctgcagtgggtgggaggaacttgcataaatatatatttatggn

SEQ ID NO: 21224 - DNA, 490 bp, Homo sapiens
  misc_feature (1)...(490): n = A,T,C or G
catcgccccgccctggggnnnatagaccccgctgcggcgacaggcctgtctgctgtggcaggaccagtgtggccagcagggctcctgcttggtgtaccagaattcggccatgagccgctacatactcatcatggggctcctgtacaaggtgctgggcgtcctcttctttgccatagcctgcttcttatacaagcccctgtcggagtcttcagatggcctggaaacttgtctgcccagccagtcctcagcccctgacagtgccacagatagccagctccagagcagcgtctgaccaccgcccgcgcccacccggccacggcgggcactcagcatttcctgatgacagaacagtgccgttgggtgatgcaatcacacgggaacttctatttgacctgcaaccttctacttaacctgtggtttaaagtcggctgtgacctcctgtccccagagctgtacggccctgcagtgggtgggaggaacttgcataaan

SEQ ID NO: 21225 - DNA, 493 bp, Homo sapiens
  misc_feature (1)...(493): n = A,T,C or G
ggggccnnnnaattgantttgatcggctgtcggaattcggcacgagcggactcttccaggttcactgaggggccctggtctccccgcagtcgtcccaggctgccggctcccctcgacagctctctgggcacccggtcccctctgccccaccctcagccgctctttgctccagacctgcccctccctctagaggctgcctgggcctgttcacgtgttttccatcccacataaatacagtattcccactcttatcttacaactcccccaccgcccactctccacctcactagctccccaatccctgaccctttgaggcccccagtgatctcgactcccccctggccacagacccccagggcattgtgttcactgtactctgtgggcaaggatgggtccagaagaccccacttcaggcactaagaggggctggacctggcggcaggaagccaaagagactgggcctaggccaggagttcccaaatgtgaggggcga

SEQ ID NO: 21226 - DNA, 501 bp, Homo sapiens
  misc_feature (1)...(501): n = A,T,C or G
nggtgggtnnnnnnnaccttgaccgctctgtangacttcggcacgaggtttctgactttgcctcaactaaaacaaattattaccgacaaagatgacttagtaaaaagtattgaggaactagcaagaaaaaatctccttttggagcccagcttggaagccaaaagacaaactgttttagataagtatgaattacttacacagatgaagtccactttcgaaaagaagatgcaaaggcagcatgaacttagtgagagctgtagtgcaagtgcccttcaggcaagattgaaagtagctgcacatgaagctgaggaagaatctgataatattgcagaagacttcttggagggaaagatggaaatagatgattttctcagtagcttcatggaaaagagaacaatttgccactgtagaagagccaaggaagagaaacttcagcaggcgatagcaatgcacagccaatttcatgctccactatagattttcctggaaacatgaactgcc

SEQ ID NO: 21227 - DNA, 489 bp, Homo sapiens
  misc_feature (1)...(489): n = A,T,C or G
ggggggagcncnncaccaaattgcancgcctgcatttgctccgcgctgcaggaattcggcacgagctggtctggccttttctgagaggcaggtcttccgtcctcagagcctttctggaacaaggagaatgcctgtgcaggtggacacacaggcctggcctgtcgctctcacttgtcttccagcggggagcttcacgttgccgagtggaagaaccatgacctccacttgcttccaaggtgctagggaagtttcagggtacgctggttcccctctccagctggaggccgagtttctggggactgcagatatttctactctgtgatcgattcaatgcccgatgcttctgtttcattcccgaccctttctactatgcattttccttttatcaggtgtgtaaagttaaatactgtgtatttatcactaaaaagtacatgagcttaagagacnnaaaaggagactatattagcaccatatagaaggggtatgtgg

SEQ ID NO: 21228 - DNA, 466 bp, Homo sapiens
atagcccgcctgcatgaattcggcacgagctcagtgctgctgtggagctaggtgcttcccccttcccctgagactggtggactgaactccagtcaagttgagttcaagtgaaagattcttccagggttttattttttcccctcctaacaaagtctcatagtgttaacactggttctgcaatatctctgaggtgcaaagaatgcacttttccctatggggcccagagtttgccttttctgccaggcagtcaccatgcttccctaccccagcctgtttcttttggcttggtttggaccacagtcctctgctacccagggttttagagcccctgctctaggaaacagtttaagaaatcattggccccttcccagcacattgaatgggtaagcagacaggccatgatttagttggccagcactaactccacctctgttctccttgaacagcttcccctccagcccactgg

SEQ ID NO: 21229 - DNA, 468 bp, Homo sapiens
gagcgggaaaaaaaaaacctgacttctcttcgctgcaggaattcggcacgaggagagagagagagagagagagagagagagagagctcgtgccgaattcggcacgagtatgcctcataaccagttcatcaagatgatgatcatcttttccatcgccttcatcactgtccttatcttcaaggtctacatgttcaagtgcgtgtggcggcgctacagattgatcaagtgcatgaactcggtggaggagaagaaaaactccaagatgctccagaaggtggtcctgccgtcctacgaggaagccctgtctttgccatcgaagaccccagaggggggcccagcaccacccccatactcagaggtgtgaccctcgccaggccccagccccagtgctgggaggggtgaagctgcctcataatctgcttttttgctttggtggcccctgtggcctgggtgggccctcccgcccctc

SEQ ID NO: 21230 - DNA, 475 bp, Homo sapiens
  misc_feature (1)...(475): n = A,T,C or G
ntttgccactcgactcgcatgcaggaattccgcacgagcaagtacagtgcctggtatgtagtacgactcagtaaaaaagtggatttttaaaaataactcccacagtgaatagtcaaaaatcctgctagcaaactgttatatattgctaagtttgctcttttaacagctggaatttattaagatgcattattttgattttattcactgcctaaaacactttgggtggtattgatggagttggtggattttactccaagtgattaaatgaaatttgacgtatcttttcatccaaagttttgtacatcatgttttctaacggaaaaaaacgttaatatgggttttttgtattactaaaaatagctttgagattaaggaaaaacaaataactcttgtacagttaaaaaaaaaaaaaaaaaactggaggggcagacaaattcaataactttatgggagaggtcctttgggccagaaaaat

SEQ ID NO: 21231 - DNA, 493 bp, Homo sapiens
  misc_feature (1)...(493): n = A,T,C or G
cgcctgaggaattnngnannaggaaaaanaattgacccgcctgcaggaattcggcacgagagcgccagcccagctccctgggcagatgtgccctgtgtcctgggtctgacattgcctcaggagggggaagctcatccctccctccaagcccccgatgcggagctagggctggagctctgcccaggtgccctggggccagcaaggcagtcccaggcctgccgtctccagcacggccccaaggtggacactagcccctgctgctgcaggcgccatgctgcttcagcagtgacgattgagccatttgtgagagagaatccggaagcgttaggtattacagcagactgacctaagacctatgtaaaaggaaagctgttccaacacacggactatttttgtactagaatttgctaacttgtaatattgaatttcctttggccgataatcaggatttccctataagtcacttggacattggtcacttgtaggaaattta

SEQ ID NO: 21232 - DNA, 496 bp, Homo sapiens
cgcccatcgccgcgtgcggaaatttgaccccgctgcaggaattcggcacgaggtccccgagaccccgggctgccttcttggggctgctccgcctcctgaccagccctcgtcagccactcgaagtccctgaggagacgtggagaggaggagggacacggcatggggtacagacagtgtttgtgtgttcctgttgtggctaactttaagaagcggtgtttctcagaattgataagaccatggcacaaaactgtgacgattggctttggagtaaccctgtgtgcggttcctattgcacagaaatcagagcctcattcccttagtagtgaagcattgatgaggagagcagtgtctttggtaacagatagcacctctacctttctctctcagaccacatatgcgttgattgaagctattactgaatatactaaggctgtttataccttaacttctctttaccgacaatatacaagtttacttgggaaaatgaattcagagg

SEQ ID NO: 21233 - DNA, 494 bp, Homo sapiens
ccgcctgcccattgccgcctgcagaattcgatcgagggctatgctagcactagtgctgagctttgactaaaatagatgatctttgacgtggaaagtatgaataaagccatggcggagtatgagaacgaccttcttaagatgcccttggggaagctgagcaaaaggcagatccaggccgcatactccatcctcagtgatgtccagcaggcggtgtcttagggcagcagcgactctcagatcctggatctctcaaatcgcttttacaccctgatcccccacgactttgggatgaagaagcctccgctcctgaacaatgcatacagagtgcaggccaaggtggaaatgcttgacaacctgctggacatcgaggtggcctacagtctgctcaggggagggtctgatgatagcagcaaggatcccatcgatgtcaactatgagaagctgataactgacattaacgtggtagacagagattctgaagaagccgagatcct

SEQ ID NO: 21234 - DNA, 492 bp, Homo sapiens
  misc_feature (1)...(492): n = A,T,C or G
ngcggggncttgacctccgtgtangaattcggcacgaggaacactttgtaaatggtcaggataaaaaccaaatctgggtgccagatcccagcactactttttattactggagaaatgggggggatagaaaattctactttgaattatttagttttttttaaagagtgggttgtgtttgtgcttctcccacctttcagcatttatagaacatgctgccccacatacaaagtcaagaccacttacttttatgtgacactagtagtttggggttaatgttttgtgtaagaacagctgcatatgagtaaagttaccccaaccacagtgaggaggaagatgttcacatactggaactgtcctgccaaataaattttgcccctattgtgctctgttttaatttggagtgggcaaagtaacctcttgcttgggcaactatttgtttcaaataaaaacatttagacaaaaaaaaaaaaaaaaacctggggggggggccgg

SEQ ID NO: 21235 - DNA, 457 bp, Homo sapiens
  misc_feature (1)...(457): n = A,T,C or G
acttgctccgcctgcangaattcggtacgagggcacttctcctagttgcagtcaggcttcatacgctattgtcctgcccgttagagcagccagcgggtacagaatggattttggaagagggagtcaccactggacctccaaggaagccacgtgcagacatctacaaccttcgatctcctgacgagtttattgttggccaaaaccaggctttgattgaaccaggatgaatgcgggtgttggaagtagaatatatatatacatataaaattggttgggagccacgtgtaccagtgtgtgttgatcttggcttgattcagtctgccttgtaacagaaactggcgatggaatatgagaggagccctctggaaagaaaaggacagaccctgtgctttcatgaaagtgaagatctggctgaacccagtccacaaggttactgtatacatagcctgagtttaan

SEQ ID NO: 21236 - DNA, 484 bp, Homo sapiens
gcgcctgccaattcccgcctgcggaattcgatggagggcaatctacactagtactcttttatgagaaaatagttactattttgataaagggcaaggataatcaaatagttcattttcagagaaaaatattttaaattgctaatgtacatgattgttttggttataatttatttatagaatgtatcttttctatattacattcttaatattcaccagatattatattgaccattctctttaacttcttaatgtggcatatttctactctcctttcccacaaacagcttcatctgtctccaaggttaacattctgaagctggagagtccttggagaaactctgctcagcttttttgtgacatttagaaaaatgcatttggtattctccaaaccagaatgatacattgtctcacaatctgttagacagctgatgggttttttgagcaacgtcttaataattcagttgtttctgttttaattatacca

SEQ ID NO: 21237 - DNA, 492 bp, Homo sapiens
  misc_feature (1)...(492): n = A,T,C or G
ngcggggattgacctgcctgaggtctagtgagccttgactgttaggtaagagacaggaagcagacaagccaagaggttgctgcagctgcccccaggaggaaacgggcagcagggagtgtggcccagcccccactgtacccctccaggggcccgagcccttgccagcccaatgacaccttgaagtcaccacttttcctttcttgcccgctaataaaacctatttaaacaggaaattcataccaaatgcaaatgggttttgttttccttggcattttgttgttccgatcacagatttccctgccagggtgtctgtggttatcagctgcaggctcagcttggggcggccgcttcacacaagccactctgtaccacgtgccctaccttagtgacgggagtaaggagcttccttcccctccatgtcattccttcctgttcccttcattccccaacagcaaataaaactgttgaatgctcaaaaaaaaaaaaaaaaaa

SEQ ID NO: 21238 - DNA, 519 bp, Homo sapiens
  misc_feature (1)...(519): n = A,T,C or G
agggggnnanttttgancgccctgaggctagccncgcctgcacgaattcggcacgagcttggtctcccaagtgttgggattacagacatgagccactgcgccgagcctgagcctcagtttctgatacttgcaactgggagcatgttttgagagctagagaaagtattgttgtcttgtgtaacatgaaaaaagctgtgcggatactagctaagatcaatgaaaggttatcaaactcaatctgatggtgaaagaagatacagagatcaagcccgtccgcatttttaacgtggggacactgaggcccaggaaacttggggcttcttcaagtagtagctaggcctgtgctgtcccatatggtagccgctagccactagccgcatgtggctattgagcagtcgaaatgtgcgaaaattcaaattaaaatatgttgtatatgtaaattgcacaatggattataagactcagtttaaaaaaaagaaaaaattcataacaacttttgaaatattgattacatgttga

SEQ ID NO: 21239 - DNA, 493 bp, Homo sapiens
  misc_feature (1)...(493): n = A,T,C or G
aatggggattgaccttgatcgtcatgcggaanncgccacgagcggaggcggaggcttgggtgcgttcaagattcaacttcacccgtaacccaccgccatggccgttgaaggcattgctgctggaggtgtaatggacgttaatactgctttacaagaggttctgaagactgccctcatccacgatggcctagcacgtggaattcgcgaagctgccaaagccttagacaagcgccaagcccatctttgtgtgcttgcatccaactgtgatgagcctatgtatgtcaagttggtggaggccctttgtgctgaacaccaaatcaacctaattaaggttgatgacaacaagaaactaggagaatgggtaggcctttgtaaaattgacagagaggggaaaccccgtaaagtggttggttgcagttgtgtagtagttaaggactatggcaaggagtctcaggccaaggatgtcattgaagagtatttcaaatgcaagaan

SEQ ID NO: 21240 - DNA, 487 bp, Homo sapiens
  misc_feature (1)...(487): n = A,T,C or G
aataagaccgccnataagtaaannttttgccccgcgctgcaggaattcggcacgagaagaagggcggcgagaagaataagggccgttctgccatcaacgaagtggtaacccgagaatacaccatcaacattcacaagcgcatccatggagtgggcttcaagaagcgtgcacctcgggcactcaaagagattcggaaatttgccatgaaggagatgggaactccagatgtgcgcattgacaccaggctcaacaaagctgtctgggccaaaggaataaggaatgtgccataccgaatccgtgtgcggctgtccagaaaacgtaatgaggatgaagattcaccaaataagctatatactttggttacctatgtacctgttaccactttcaaaaatctacagacagtcaatgtggatgagaactaatcgctgatcgtcagatcatataaagttataaaattgcaaaaaaaaaaaaaaaaaactcggggggg

SEQ ID NO: 21241 - DNA, 503 bp, Homo sapiens
  misc_feature (1)...(503): n = A,T,C or G
cgcgcgtgcgccccaattgacgccctgcanngaanncgattgcagcgccatgcaggaattcggcacgagatcccacccaccttgcagtggcctttccttgtcatcagagtagagaatgcacaggtgttggtgagggcgtgtggctgagcactacatgtcaagtccagagtcagtttctatcccaattctccctgcagcctgaagaacggatccttgtctccaatgtcagcacaaaggaggctttttctgtgctttgacattctagcagttcagggatgagagggagggagaatcctggatgctggatggagtatttctctgaggcccacacaaagctggacacccccaggctctactccatcccattggagtctcttctttttttgatagcgggagggaggaagtacgactaatgttggagcctgaaactatggaaatgctgctaaaatttttatattgacaaacattctcttggtactacattgaccgtcttcattaagcan

SEQ ID NO: 21242 - DNA, 371 bp, Homo sapiens
  misc_feature (1)...(371): n = A,T,C or G
attgacccgccntggnganatttgcnccgcgctgcaggaattcggcacgagggaaagagacctttaaatattttgctataaaaaaatttgtgataagtttctatcaaaatggggagattgcagaaaaggcttcccttggctcccaaggaggtgtagcaggtgtgagcaatattagtgccatgtgcctttcacacagggtttgcatttatcagtctgttttccgatgatgtgtacatgaaagagtacaccatgtgaagagaagagagaatgattgaaaatgttttagtatagaactcttcttgcagtgggttgctattttctagattttactttttagggaacaaaataaaatcctttgttaaaaaaaaaaa

SEQ ID NO: 21243 - DNA, 393 bp, Homo sapiens
  misc_feature (1)...(393): n = A,T,C or G
gcggggtgntttgacncgcttgacgagctctgcacgagctcagttcaagtttaatacaaactacagaagattaatgggttgctctactaatacatcatacaaaccagtagcctgcccacaacgccaactcaggccattcctaccaaaggaagaaaggctggtctctccaccccctgtatgaaaggcctgccttgtaagacaccacaattcggctgaatctgaagtcttgtgttttactaatggaaaaaaaaaatactgaagaggttttgttctcatggatgaccaccgcagcctggcataacagctgtggctttgaagatgggggcagggtgcccaattttagcatttcctgaagacatcttcctatcagcagtcccaacacaagtcgcagaa

SEQ ID NO: 21244 - DNA, 468 bp, Homo sapiens
aatagaaacccccttgatccgccttgcggaattccgcacgagccgaaatgggcaagttcatgaaacctgggaaggtggtgcttgtcctggctggacgctactccggacgcaaagctgtcatcgtgaagaacattgatgatggcacctcagatcgcccctacagccatgctctggtggctggaattgaccgctacccccgcaaagtgacagctgccatgggcaagaagaagatcgccaagagatcaaagataaaatcttttgtgaaagtgtataactacaatcacctaatgcccacaaggtactctgtggatatccccttggacaaaactgtcgtcaataaggatgtcttcagagatcctgctcttaaacgcaaggcccgacgggaggccaaggtcaagtttgaagagagatacaagacaggcgagaacaagtggttcttccagaaactgcggttttagatgctttgtt

SEQ ID NO: 21245 - DNA, 499 bp, Homo sapiens
  misc_feature (1)...(499): n = A,T,C or G
ggttggcagaggngccngnnnaattgatngattgcaacgcctgcangaattcggcacgagctcagagtcactcctgccccctctccctgacttggtgctcacatgcacctcactagggtttgtgaccagggtctggatgagcttgaatttgaatgaattgagtttgtatttctagaaccctgggtttttacatgtttggtctttttttgttttggtttgtcaccctcgataaaggaagtatattcatccatgtgctggttctggcccctctgttctacccattctacttttgattacttaggtctatgagagtaagatggggggaaggggacatcttccagggatattgaagatgaacccaagagacaagggtttagggtgtcagctcttagctgagacctggcttgggctaacctcagactggatgagactgttcttgtcccttgtccagtgatgatgggaacactgtcaaagctgaacagacctgaatctgaggcag

SEQ ID NO: 21246 - DNA, 487 bp, Homo sapiens
  misc_feature (1)...(487): n = A,T,C or G
gggatgtccnaggannaatacgacgcctgtactgtcgccctagcggaaacctggagtggaaggagcccccctccatgcgcctgaaggcccgacccagcagccctggcttttccgtgcttacctgcagcgccttctccttctaccctccggagctgcaacttcggttcctgcggaatgggctggccgctggcaccggccagggtgacttcggccccaacagtgacggatccttccacgcctcgtcgtcactaacagtcaaaagtggcgatgagcaccactactgctgcattgtgcagcacgcggggctggcgcagcccctcagggtggagctggaatctccagccaagtcctccgtgctcgtggtgggaatcgtcatcggtgtcttgctactcacggcagcggctgtaggaggagctctgttgtggagaaggatgaggagtgggctgccagccccttggatctcccttcgtggagacgacaccggggt

SEQ ID NO: 21247 - DNA, 469 bp, Homo sapiens
agggggcatgactgcctgaggaattcggcacgagctctagccgaagtcttcagcaagaggattcgctgctggtgttaattttattttattgaggctgttcagtttggcttctctgtatctattgactgccctttttgagcaaaatgaagatgtttttataaagcttggatgccaatgagagttattttatggtaaccacagtgcaaggcaactgtcagcgcaatgggggagaagaggttagtggatcgggggtccctggctcaaggtctctgggctgtccctagtgggcacgagtggctcggctgccttcctggggtcccgtgcaccagccctgcagctagcaagtcttgtgtttaggctcgtctgacctatttccttcagttatactttcaatgaccttttgtgcatctgttaaggcaaaacagagaaactcacaacctaataaatagcgctcttcccttcaaaaaaa

SEQ ID NO: 21248 - DNA, 470 bp, Homo sapiens
  misc_feature (1)...(470): n = A,T,C or G
attagaccngctccttgcaccgccctgcaggaattcggcacgagggggatggaggcttgtctatccctcacagtaccaaacgattccctggttatgattctgaaagcaaggaatttaatgcagaagtacatcggaagcacatcatgggccagaatgttgcagattacatgcgctacttaatggaagaagatgaagatgcttacaagaaacagttctctcaatacataaagaacagcgtaactccagacatgatggaggagatgtataagaaagctcatgctgctatacgagagaatccagtctatgaaaagaagcccaagaaagaagttaaaaagaagaggtggaaccgtcccaaaatgtcccttgctcagaagaaggatcgggtagctcaaaagaaggcaagcttcctcagagctcangagcgggctgctgagagctaaacccagcaattttctatgattttttcagat

SEQ ID NO: 21249 - DNA, 460 bp, Homo sapiens
aatagaccgcctttggaattcgtccgagctccactctgcggagattcacgcctggaaaacgctcttctgagaggatctgtggaggtcaacccaggagagagaagacaggactgaagcactgaaagggtcctgccgttaagggcgcaagattgtatagaatatataatagcagtagcagctctgtttacggagcattaaccttacgtggagttatttcctgcatttcctcctttcgtctttacaaggtagccgtttggcgtcgtgagagattgggtctctccacattgccccggctgctctccaacccctgagttcaagtgattcacctcccttggcctcccaaagtactgggattacaggcgtgagccaccgtgcctggctgagaagatggatttaagacatattttggagcggaaagtgaccagaagaggtgtgcagtttccaggcctggcccatacag

SEQ ID NO: 21250 - DNA, 507 bp, Homo sapiens
gcccccccccccccccccccccatcgacccgccatgtgaccccgctgcacgctaggaagtcagtcgtagtcctcgcaggtctcggcgggagctggaagtgcgcagtccacgacagaacaaatattcggtgcttttacctacctacaacgagcgcgagaacctgccgctcatcgtgtggctgctggtgaaaagcttctccgagagtggaatcaactatgaaattataatcatagatgatggaagcccagatggaacaagggatgttgctgaacagttggagaagatctatgggtcagacagaattcttctaagaccacgagagaaaaagttgggactaggaactgcatatattcatggaatgaaacatgccacaggaaactacatcattattatggatgctgatctctcacaccatccaaaatttattcctgaatttattacgaagcaaaaggagggtaattttgatattgtctctggaactcgctacaaaggaaatggaggtgatat

SEQ ID NO: 21251 - DNA, 483 bp, Homo sapiens
  misc_feature (1)...(483): n = A,T,C or G
cattgacccgccttgaggaattcggcacgagaggctctcaccctcctctcctgcagctccagctttgtgctctgcctctgaggagaccatggcccagcatctgagtaccctgctgctcctgctggccaccctagctgtggccctggcctggagccccaaggaggaggataggataatcccgggtggcatctataacgcagacctcaatgatgagtgggtacagcgtgcccttcacttcgccatcagcgagtataacaaggccaccaaagatgactactacagacgtccgctgcgggtactaagagccaggcaacagaccgttgggggggtgaattacttcttcgacgtagaggtgggccgaaccatatgtaccaagtcccagcccaacttggacacctgtgccttccatgaacagccagaactgcagaagaaacagntgtgctctttcgagatctacgaagntccctgggagaacagagngtn

SEQ ID NO: 21252 - DNA, 467 bp, Homo sapiens
catcgacccccatcgaccgcatgcacgaattcggcacgagagaacacagaacttatttctgtcagttatttaatacattgaaaatttagtgaaatgttcaaagagaatagatgtttcccaaaacaacaatctttatgttaaaaatagtcattaaaagatctgttgtaatatatggtggatatttttctttaatttcaaacattacctctgaaatgtgtatcttttcttttttatcttaccattaattttaaatctagtggattggttttcaacatcgtgcctgccgatatgcctacagaatcatctgtaagtgtcaaaatgaacccacgttgttagccataattttgattatgcctttatttctcctttcttgaaaaaaaaaaggtgttattttgacaattaggcataacattgttttgtagattatcttttaatgaactattttaaatgttaaattaggtgccact

SEQ ID NO: 21253 - DNA, 464 bp, Homo sapiens
  misc_feature (1)...(464): n = A,T,C or G
nattgancgccatcaggaatcgcacgagctttatcttgctctaccttctctggaatacctacatctctgatgtttttttaacattacatattcacaagctttaccaattcatggaaaggaatcctctaagattttggtggatctcttgaagcactaagaacctcaagcaaaaatgtatgcaatctttgtactttaaaattaaagcatttcaaccaggagcagtggctcatgcctgtagtcccagcgctttgggaggccaaggcaggatgattgcttgagccttggagtttgagactagtctggccaacatagccagaccccgtttctttaaaagaaaaaaaaaaacaattagctgcatgtggtggcacacatgtagtatcagctttgggaggcccagatgggaagattgcttgatctcaggaggttgaggctgcaatgagctatgatcatgccactgcactccn

SEQ ID NO: 21254 - DNA, 497 bp, Homo sapiens
  misc_feature (1)...(497): n = A,T,C or G
agagccagggtccagccaactgaaaangcagnnaggctnngcanannctnccgagcaaagcccagggatctggtcctacccatccccgcagcgtgcactaaggggcccggccagacatgtctgcatttcggtggctagacaagctcctcctccctgcatctgaccagcagcgcctttcccaactctagctgggggtgggccaggctgatgggacagaattggatacatacaccagcattcctttagaacgcccccccccacccctgggggctctcatgttttcaactgccaaaaggctctagtgccttctaaaggaagggtcccttctagggatattgcatttggattggggtccctctaaaatttaatgcatgatagacacatatgagggggaatagtctagatggctcctctcagtactttggacgcccctatgtagtccgagctgacagctgctcctatagggaggggcctaggcctaagccagagaagctatt

SEQ ID NO: 21255 - DNA, 476 bp, Homo sapiens
  misc_feature (1)...(476): n = A,T,C or G
cggagggaatgatttctctgacgatgacganancaggncaagcagaagcgagatgacgaagggaacgtcatcgtttggaaagcgtcgcaataagacgcacacgttgtgccgccgctgtggctctaaggcctaccaccttcagaagtcgacctgtggcaaatgtggctaccctgccaagcgcaagagaaagtataactggagtgccaaggctaaaagacgaaataccaccggaactggtcgaatgaggcacctaaaaattgtataccgcagattcaggcatggattccgtgaaggaacaacacctaaacccaagagggcagctgttgcagcatccagttcatcttaagaatgtcaacgattagtcatgcaataaatgttctggttttatnnnnnnnnnnnnnnnnnnnnnnnnntccctcggggggggcccgggcccccaatcccccttatgggagggcggataaaaatccccggcc

SEQ ID NO: 21256 - DNA, 475 bp, Homo sapiens
  misc_feature (1)...(475): n = A,T,C or G
gggggccnncncncaattganaatcgatccgcgctgcaggaattcggcacgagcccgcctggccatcagtatttattgcctccgtccgtgccgtccctgggccactggcctggcgcctgttcccccaggctctcagtgccaccacccccggcaggccttccctgacccagccaggaacaaacaagggaccaagtgcacacattgctgagagccgtctcctgtgcctcccccgccccatccccggtcttcgtgttgtgtctgccaggctcaggcagaggcgcctgtccctgcttcttttctgaccgggaaataaatgcccctgaaggagctnaaaaaaaaaaaaaaaaaaaaaaaaaaaatttttggggggggggccgggccccaattccccttaaaggggggggaaaaaaaaatacggggggcgggtttaaaaagggggggggggggggaggggnnnnnnnnntnnnnnnnnnnn

SEQ ID NO: 21257 - DNA, 539 bp, Homo sapiens
  misc_feature (1)...(539): n = A,T,C or G
gagagttgacggctgggattcggcacgagtatgatgatgggctgtgtgatagagagggcattcaaagatgaatatatggtcaatttggtcagagctccagaagttcctgtaatttctggtgccttctgttatgacgtagttttggatagcaaacttgatgagtggatgccaacaaaagagaacttacgttccttcacaaaggatgctcatgctttaatttataaagatcttccatttgaaactctggaagttgaagcaaaagtggcattggaaatatttcaacacagcaagtacaaagtagatttcatagaagagaaggcatctcagaaccctgagagaatagtcaagctacacagaataggtgacttcattgatgtgagtgagggccctcttattccaagaacaagtatttgtttccagtatgaagtgtcagcagttcacaatcttcaacccacccagccaagtctcatacgaagattccagggtgtgtctttacctgttcacttaagagcacattntacaatatgggataagctatn

SEQ ID NO: 21258 - DNA, 466 bp, Homo sapiens
attagaaagcctattgaaccgcctgcggaattcggcacgagcttatagcactggaggaggaaaacaaattcttgtccccctcaaaatgagagtggctctttctgatttgcaagggcactatggtcagggcaaaggcatggcccaggtgtttaagtacagggtgacgtgtgcctatgcaatggggtggtaaggcaggcacgaagagtccaaaaaatctaggtggcctctcagctctgccacctctagctgcatgaccttgggcaagctatgtaaccccaattgcctgctccattaaagactgtgaaggtagaatgtttgtaaagctcttaacagtatgtaagccttcaataaatttcagttttccccttaaaaaaaaaaaaaaaaaaaaaaaaaactggggggggggccgggtccccatttccccttatagggagcggttttaaaattcattggccggcgttttaaa

SEQ ID NO: 21259 - DNA, 497 bp, Homo sapiens
  misc_feature (1)...(497): n = A,T,C or G
cgccccttcgaccgcctgcgganattgacccgcgctgcaggaattcggcacgagatgaaatcctggaggccagtgatgggatcatggtggctcgtggtgatctaggcattgagattcctgcagagaaggtcttccttgctcagaagatgatgattggacggtgcaaccgagctgggaagcctgtcatctgtgctactcagatgctggagagcatgatcaagaagccccgccccactcgggctgaaggcagtgatgtggccaatgcagtcctggatggagccgactgcatcatgctgtctggagaaacagccaaaggggactatcctctggaggctgtgcgcatgcagcacctgattgcccgtgaggcagaggctgccatctaccacttgcaattatttgaggaactccgccgcctggcgcccattaccagcgaccccacagaagccaccgccgtgggtgccgtggaggcctccttcaagtgctgcagtgnggccatn

SEQ ID NO: 21260 - DNA, 544 bp, Homo sapiens
  misc_feature (1)...(544): n = A,T,C or G
gagagctcgacggctcgacggctgcacgaattcggcacgagccaacatggtgttcaggcgcttcgtggaggttggccgggtggcctatgtctcctttggacctcatgccggaaaattggtcgcgattgtagatgttattgatcagaacagggctttggtcgatggaccttgcactcaagtgaggagacaggccatgcctttcaagtgcatgcagctcactgatttcatcctcaagtttccgcacagtgcccaccagaagtatgtccgacaagcctggcagaaggcagacatcaatacaaaatgggcagccacacgatgggccaagaagattgaagccagagaaaggaaagccaagatgacagattttgatcgttttaaagttatgaaggcaaagaaaatgaggaacagaataatcaagaatgaagttaagaagcttcaaaaggcagctctcctgaaagcttctcccaaaaaagcacctggtactaagggtactgctgctgctgctgctgctgctgctgctgctaaagttccagcaaaaaagatn

SEQ ID NO: 21261 - DNA, 492 bp, Homo sapiens
gcggaatcgccctgcctgtcggaattcggcacgaggaagagtgagggttccaacttttctgcttatctgggaggcgttgggcgcggacagtcgagatgtcagagaaaaagcagccggtagacttacgtctgttagaggaagacgacgagtttgaagagttccctgccgaagactgggctggcttacatgaagatgaagatgcacatgtctgggaggataattgggatgatgacaatgtataggatgacttctctaatcagttacgagctgaactagagaaacatggttataagagggagacttcatagcatccagaagaagtgttgaagtaacctaaacttgacctgcttaatacattctacggcagagaacccaggatgggacactaaaaaaatgtgtttatttcattatctgcttggatttatttgtgcttctgtaacacaaagaatatatgttttgatatccatacatgagctctccctgccacatccc

SEQ ID NO: 21262 - DNA, 471 bp, Homo sapiens
cccccgcccccccccccattgaccgcctgcttaaatcgcacgagtgaagacactgaggaacaacaagcccaacatggtcgacctcctggatcagtacaagttctgctacgaggtggccctggaatacttgaattctggctgatggtgtaaacagctctgcaaacaatccctttcataccacaaagccaagacgttccatggtatttgtgcaaaagagatgaagacttctcaatatgcttattttgctttgcataattggctctttttaagagcccaagaaagtgtttctaaaattgcttgcactgcccaatcccagtaatgctgctgcctgacagaaacacacacacagccacagttgccaaatcccgtactccttgccaccggcttcctagagcagcgtagacagctggtaaactgaagagcacaactatattcttatgaaggaatttgtacctttggggtattattttg

SEQ ID NO: 21263 - DNA, 546 bp, Homo sapiens
  misc_feature (1)...(546): n = A,T,C or G
agcgggatcgacnnccttcgaccggctgcaggaattcggcacgaggttactgttgctctccgatgtcccagtgggaatgtcctgaggagaaggtttttgaagtcctacagctcacaggtcttatttgactggatgacgagaattgggtaccacatatctctatacagcctttctacttcctttcccagacggcctctggcagtggagggaggccagtcgctggaggacataggaataactgtggacactgtactcatcctggaggagaaggagcagaccaactaggaaagaagggagagctccctgtttgcatgaagtcagttatgctatgaccttctggcacaataaaggcttcactttcaaatcacaccataccttgattgagctcatggcagtaaactttgaacattgatatccatgggaataggattagaaaaggattgctttctatatataataatctgtggactgtgccattttacagtgtaccaaatgagaatgaggttgaaatgtatgcagtaaggtactcagtaattaattggtatn

SEQ ID NO: 21264 - DNA, 488 bp, Homo sapiens
  misc_feature (1)...(488): n = A,T,C or G
nttggcaccgcgctgcaagaattcggcactagagcccgctgcttgactccggtgagacagaacaccgggaatgccaccggacctgcactccgccgcctgcacacatcctcctggcgagctgacagcagcagggcctcactcactcgtgtgcaccgccaggcttatgcacgactctaccccgtgctgctggtgaagcaggatggctccaccatccacatccgctacagggagccacggcgcatgctggcgatgcccatagatctggacaccctgtctcctgaggagcgccgggccatgctgcggaagcgtgaggctcagctccagtcgaggaaggagtacgagcaggagctcagtgatgacttgcatgtggagcgctaccgacagttctggaccatgaccaagaagtgaccgtggctccagccaccccgggacattgctaagatgggagggctgntcttaaatcanctcgtcttgaaaaaaaaaaaaag

SEQ ID NO: 21265 - DNA, 477 bp, Homo sapiens
  misc_feature (1)...(477): n = A,T,C or G
nggaggggcnnnaggcnaggccccattgacccgcgctgcatggacccccgctgcaggcttttatgcttttggccaggtctgcagaggtttggcagcctctaagccctctgcttctgcttccggagtgagagcctcaagtgctcctgttttcacagcccatcttgtgtttccatgctgcgtttgtggggcgttttctctttccatcctcaattctggcgctgattcttttcaggatacattctaaccttggaaagaagatgccaataaaaccagtgtaggggaagggcagccaatgagaggcagcaatggatgttaaatttacaattgtggtttgtctttttggctgtggttctttagataagcatgtgatttctgttcttcatgactaagaattgaatttagactttacagagttactggtttgtaaatctttgagttgtttaaattttaatgttagagttttactgtttgatcacc

SEQ ID NO: 21266 - DNA, 469 bp, Homo sapiens
agggggttttaacgaactgtagtacaattggccgagggaaccctggtccataggaactgagtgaaagcaaggccaagtatgtccacccatggggacaaacgtcccagcacaaaggggtctcaagcctgcaaggcccaagtggacgctcggacaagggcaggaaggtatttgctgattctccttctccatgtgacgtgtctctcaacccacaccagctaggggagcctcccgcagcttcagttcccctttgacgcccacacagtgttatgcaagcaccgagcccagagtcccgctgggccgtggtgtcctaattgtcttggtgacaaagagcaattttattttaaagcaactgaatcctttccccctgttttgtgtgccagtattttactgtcttcttaattgttttaagcaatgtttactttggatttctggatgttatataaaagccacgaaaaccctggccatgctg

SEQ ID NO: 21267 - DNA, 497 bp, Homo sapiens
  misc_feature (1)...(497): n = A,T,C or G
attcgcccggcctgcangaannttttccccacggctgcaggaattcggcacgagaccaccaccagcagcagcagcaccaccggctttgccttgaatttaaaaccactggcgccagccgggatccccagcaatacagcagctgccgtgaccgctccacctggccctggcgcagctgcaggggcggctgccagctccgccatgacctacgcgcagctggagagcctgatcaacaaatggagcctggagctagaggaccaggagcggcacttcctccagcaggccacccaggtcaacgcctgggaccgcacgctgatcgagaatggagaaaagatcaccagcctgcaccgcgaggtggagaaggtgaagctggaccagaagaggctggaccaggagctcgacttcatcctgtcccagcagaaggagctggaagacctgctgagcccactggaggagttggtcaaggagcagagcgggaccatctacctgcagcacgcggn

SEQ ID NO: 21268 - DNA, 490 bp, Homo sapiens
  misc_feature (1)...(490): n = A,T,C or G
gcggaattccctgctgcangaattcggcacgaggagagagagagagagagagagagagagagagagagagagagagagagagagagagagagagattggttgtgcacccactaaaaacaggactttattcagaggcatagtgaaatacccggggtgaccatcaagtaaaattaacgcacaagatctttgtgggaggctttcttgtcaaacacgtgagcgtgggatttcccacgcaccacggtgtgcacactcatctctgtgtgttaagaactgctgtctctttgacacacgagttaaaagaacactcttttttctggagtgtgcgtgcagcttcacggcctttattttgtcactaagatattttgtggaagaacagcaaatatttcggggtgaaaacagatctttccgagcgctactgaaattccacagagaaacactctgcgagggtgggtttcttactctagacacattctagcgtgtatacacagaa

SEQ ID NO: 21269 - DNA, 489 bp, Homo sapiens
gcggaattgactgcgtgagcaattcggcacgagcagaacctgggccctttcctgggattgtggacatgttcggaactggaggtggcctgctggagtatcggtgctagtctgctggctgggaacggatatgctgtgatggccctggcttattatagctatgaagacctccccaagaccatggagacgctccatctggagtactttgaagaagccatgaactacttgctcagtcatcccgaggtaaaaggtccaggagttgggctgcttggaatttccaaagggggtgagctctgcctttccatggcctctttcctgaagggcatcacggctgctgtcgtcatcaacggctctgtggccaatgttggcggaaccttacgctacaagggcgagaccctgccccctgtgggcgtcaacagaaatcgcatcaaggtgaccaaagatggctatgcagacattgtggatgtcctgaacagccctttggaaggacct

SEQ ID NO: 21270 - DNA, 543 bp, Homo sapiens
  misc_feature (1)...(543): n = A,T,C or G
nggagactcgncgncttcgccggctgcacgaattcggcacgaggagctgcgccgctgcaggtagtgctgagttgctccagtgccactgggttagggtctccacaaccgagctggtctcagcaagtggtgtccatacatggggctcgaacctgggttgaagggtcgccagagcgacggttggagaacgtggaactaagctggaggacacctgagtactcttaagcaatccccgtggaccaaatcaactgccaatttggatatcatcgaggcacctgaaaccttatcatgagcctgatgctgaggaatagattctgggaggatcccgaggatcccctggttgcagccatgttgagactgacgctgagggggaccccaactgtcacgagcaacacccatcgaacgcagccacctacctggggacagatcaagaagctgtcacagatggcagaagaaaacctaaggaaagtgggacaaccagtcacaatgagtaatttaatgatagctatgatagtggtgatcaccattgccatgagtattccttcc

SEQ ID NO: 21271 - DNA, 538 bp, Homo sapiens
  misc_feature (1)...(538): n = A,T,C or G
gagagctcgncggcttngaattcgcacgagctccaagctggaggagctgaaggagcaggagacagaggaagagatacccgatgacgcacaatttgaaatggacatctaatccagtgcagatgacctggcatgtggagttacagagggatccctcatgccactgctgccaccacctcttcctggggcatccaaaggccagctggcctcatctaatctggaagggagtgacttgttagttccaggcctcctttagttctgaggcagctagaccagggataggagtgggcaacttgccaagcccttaactctacttcctcttcagtctgtggtactcctcctaaccctaaaccctctatgctcaggggctggaactggggaatggagtaagtcaccttctgactgcttagtaaacattcnnagaanaaaaaaaaaaaaaaaaaaaaaaaaaaaaaaaaaaaaaaannnnanaannnnnnnnnnggggnnnnnnnnggcggggggggggcccggcccccaaccccccctttgggggggcaac

SEQ ID NO: 21272 - DNA, 343 bp, Homo sapiens
gggggagtggtttcgacggctgcatgaattcggcacgagcagaattcgatctgcctgtccctttttcccctggggtttgacacacaggctcctctcagcatgaggtggagcagtgaccaggtggagcagtgaccaggacgcctctggcccagtgctgcccagcctccccgcccgctcccaggcgccccatgtcctcacaggccaggacgccatggcaggatggagaggacttggtggatttttgtttcttgcctgacctcagtttcatgaaagaaagtggaagctacagaattattttctaaaataaaggctgaattgtctgaaaaaaaaaaaaaaaaaaaaa

SEQ ID NO: 21273 - DNA, 545 bp, Homo sapiens
  misc_feature (1)...(545): n = A,T,C or G
agagagattcgcnnccttcgaccggctgcangaattcggcacgagtgtagtcccaaagtgttgggattacaggcgtgagccacctcaccaggccccgttgcaatcttactccacttcgttttcacagcagtcccgggacatgcccattattaggcctatttgatagatgatactgaggctgagtcgggggtcacaagccaaagccacaccgctagaagggctcaggacccagcccagctcccgtcctcttggtggcatcaagcttgtgtgatatgaggtcttatgtctgctcatgacagccttaaaagcaataaacagatacaacttccagcaacttcccactcagctgcaaggctgcgggggggtcctgcctcgagccataaggtgagcagctagccagtgccgggccagtgtggagaaggctgaattgcctgtgaagctggggttgcaggcaggaatattcatggagcccctgaccatgtactcacactgctcttcctcagttcagggttcttggatttgctcaagtccacccaaatatccct

SEQ ID NO: 21274 - DNA, 513 bp, Homo sapiens
  misc_feature (1)...(513): n = A,T,C or G
agcggnnttnnnaattganattcgatggctgtacgaactcggcacgagggaatttcgtggccattcctcctttgttaacgaagcaacatttacacaagatggacattacattattagtgcatcctctgatggcactgtaaagatctggaatatgaagaccacagaatgttcaaatacctttaaatccctgggcagcaccgcagggacagatattaccgtcaacagtgtgattctacttcctaaaaaccctgagcactttgtggtgtgcaacagatcaaacacggtggtcatcatgaacatgcaggggcagattgtcagaagcttcagttctggtaaaagagaaggtggggactttgtttgctgtgccctctctccccgtggtgaatggatctactgtgtaggggaggactttgtgctctactgtttcagtacagtcactggcaaactggagagaactttgacagtgcacgagaaggatgtgattggtattgcacatcaccctcatcagaacct

SEQ ID NO: 21275 - DNA, 521 bp, Homo sapiens
  misc_feature (1)...(521): n = A,T,C or G
tgagcnggggnnnnncaaattgacncgcgntgcagatttgactccgcgctgcaggaattcggcacgagctagacgagtggtgggcgcagcagttcctggcgagaatcaccagctgttcctagtggctgctgggagggggcgctgctacacggccgacctgtcgccaggagagaagcatggcgccctgcccacccactgcgcctggctgggtgccggccacacctgaagtgccagcatttggacttttgcacctttttttcccttggcccggctgtcccaaccaagctgccatggccaagggccgaacccgtctgacctcagccctgctcactgtgcccagggaccagcgaccagcccctggggctggcagggaggagctccaggctaataaagtggagaaactgtcacaaaaaaaaaaaaaaaaaaaaaaactggggggggggcccgggcccacattccccttatagggggcggataacaattaatgggccgcgtttaaaaccgcggggatggaaaaacac

SEQ ID NO: 21276 - DNA, 493 bp, Homo sapiens
  misc_feature (1)...(493): n = A,T,C or G
aggggtcnnnnnntttagatnnatagcaagacctgtangaattcggcacgaggaggaaggtgtgtgtccaccgagccgactccctggaccctgagaagctattgcaatgcccctatgacaaaaaccatcaaatcagggcttgcaggtttccttatcatcttatcaagtgcagaaagaatcatcctgatgttgcaagcaaattggctacttgtcccttcaatgctcgccaccaggttcctcgagctgaaattagtcatcatatctcaagctgtgatgacagaagttgtattgagcaagatgttgtcaaccaaaccaggagccttagacaagagactctggctgagagcacttggcagtgccctccttgcgatgaagactgggataaagatttgtgggagcagaccaccaccccatttgtctggggcacaactcactactctgacaacaacagccctgcgagcaacatagttacagaacataagaataacctggc

SEQ ID NO: 21277 - DNA, 506 bp, Homo sapiens
  misc_feature (1)...(506): n = A,T,C or G
ggggnatggcnnnnntttaggcccgccatttgcnccgcgctgcaggaattcggcacgagccaagccctagcctgtgtcaaaacacagggctccttacgggagggtgctggaccccaccccgaggccctggttctgtggtctgaggtggactcaggtttacacctggagctgcccgggtgacacgtctggtctgggactgcacttggacaagccacttccctgcgtctgcagcacctctggcctcgtgtgctgtggagcaaggaaaacgcagccagcacagtgttcggtgtggttaagtttaaaaaccactaacttggttcagtcagtggaaaacaggtacgttaggaacctgggtgtgtgaactgtgaatctgcagatcaggtgttctaatgaaaaaatgtttttaatttttaaagtcttgagaaacaaagttctgataatttaatgtccaaactgagatgtatccaagccgggcccagtggcttatgcccgtaatcgcagtacct

SEQ ID NO: 21278 - DNA, 537 bp, Homo sapiens
  misc_feature (1)...(537): n = A,T,C or G
aggagctcgcggcttagaattcgcacgaggctcctaagaattctctaacctgccttctgcccttaggctccggtagattgcaaacgacctgctttctttctgatcccgggctgcgttcggacccctgtcgtatagaaaatcccaagtaaggtacctgccgtcggcagatctgagctttcttcttggacacctaatacccacagtcctccagacccctgtcggatagtaaatcccaagtaaggtaccttctgctggaagatctgagctttcttcttggacacctaaaacccacagtcctccagtgaaggatccagtgagattttccaggttaacggtcataatcgcctactggtccaacgttcagaagtaacacaggcacctggacaatacacagtagatgtggaaggacacggttgtacatttatccaggccacccttaagtacaatgttctcctacctaagaaggcatctggattttctctttccttggaaatagtaaagaactactcttcgactgcttttgacctcacagtgacn

SEQ ID NO: 21279 - DNA, 493 bp, Homo sapiens
  misc_feature (1)...(493): n = A,T,C or G
gcggaattganctccatcgcctgtangaattcggcacgaggtgcccgacatcagacgctgccagctgacccccaatgacaggttcattttgttggcctgtgatgggctcttcaaggtctttaccccagaagaagccgtgaacttcatcttgtcctgtctcgaggatgaaaagatccagacccgggaagggaagtccgcagccgacgcccgctacgaagcagcctgcaacaggctggccaacaaggcggtgcagcggggctcggccgacaacgtcactgtgatggtggtgcggatagggcactgaggggtggcgcgcggccaggagcacgcatggtattgacttaaaaggttcattttgtgtgtgtgcacattgtgtgttttgtgtactcctgtgggactcccatggttgtaaataaaggtttctctttttttttcctaaaaaaaaananaannaaaaaaaaaaaaaaaaaaaaacctctggggggggggccgc

SEQ ID NO: 21280 - DNA, 510 bp, Homo sapiens
  misc_feature (1)...(510): n = A,T,C or G
agggngcnnnnattcgctggctgccgaattcggcacgagggaaagatgagcctcctgtcttccgcaacaaccctcacatatgcactgagtaaaggatgaatgtatggacacatctgggagtattttaaagaatgtatcttgccttgtgttgacccaaaccaaaaacatttttgaggggcacatgtggggtcaaaaagatagccaatttccattacatgggtttacaatttccattcttttgtgccacgagtgttagaatttaaatgaatacttttacaaagtctactttttgttcaaggatatgctgacccatatagtttactcttaaaattgtgtcaaggtatttctcactatactctaaaacaactagacttgaaaagaaaccatttgagatttgaatctaatggttaacgctattcagattttcccaaagatcttacctcatgaaagtagttctgggtcagaatgatctactcagttaaaaaacaacaacaacaaaaaactaagcgg

SEQ ID NO: 21281 - DNA, 479 bp, Homo sapiens
agcgcctttttaattgacggctcgtagaacctgcacgagggaaggcggaggaccgctagcggctggtggccacgactctggacattaatgtgaaggccccagccctgatgacaaaggcagtggtgccagaaatggagaaacgaggaggcggctcagtggcgatcgcgtcttccatagcagccttcagtccatctcctggcttcagaccttacaatgtcagtgaaacagccttgctgggcctgaccaagaccctggccatagagctggccccaaggaacattagggtgaactgcctagcacctggacttatcaagactagcttcagcacgatgctctggatggacaaggaaaaagaggaaagcatgagagaaaccctgcggataataaggttaggcgagccacaggattgtgctggcatcgtgtctttcctgtgctctgaagatgccagctacatcactgtggaaacagtggcggtgggt

SEQ ID NO: 21282 - DNA, 484 bp, Homo sapiens
  misc_feature (1)...(484): n = A,T,C or G
aggggggntttganattcgaccggctgtcacgaattcggcacgagggagtgtggtacttctcctagttgcagtcaggcttcatacgctattgtcctgcccgttagagcagccagcgggtacagaatggattttggaagagggagtcaccactggacctccaaggaagccacgtgcagacatctacaaccttcgatctcctgacgagtttattgttggccaaaaccaggctttgattgaaccaggatgaatgcgggtgttggaagtagaatatatatatacatataaaattggttgggagccacgtgtaccagtgtgtgttgatcttggcttgattcagtctgccttgtaacagaaactggcgatggaatatgagaggagccctctggaaagaaaaggacagaccctgtgctttcatgaaagtgaagatctggctgaaccagttccacaagggtactgtatacatagcctgagtttaaaaggctg

SEQ ID NO: 21283 - DNA, 507 bp, Homo sapiens
  misc_feature (1)...(507): n = A,T,C or G
ggggggnnnnatcctcgctgagattcgcacgagcgcagctctgtataaggtctctgatgccactggacagatgaacctgaccaaggtggctgactccagcccatttgcccttgaactgctgatatctgatgactgctttgtgctggacaacgggctctgtggcaagatctatatctggaaggggcgaaaagcgaatgagaaggagcggcaggcagccctgcaggtggccgagggcttcatctcgcgcatgcagtacgccccgaacactcaggtggagattctgcctcagggccatgagagtcccatcttcaagcaatttttcaaggactggaaatgagggtgggcgtcttcctgccccatgctcccctgccccccaccacctgcctgcttgcttctctggctgcctggtcagtgcagaggtgccccctgcagatgttcaataaaggagacaagtgctttcccaaaaaannnnnnnnnnnnnnnnnnnnnnnnaaaaaaaaaccccga

SEQ ID NO: 21284 - DNA, 477 bp, Homo sapiens
  misc_feature (1)...(477): n = A,T,C or G
gggttggggngcgcggaaatgagnccaactgatcgcgctgcaggaattcggcacgagcctggcaggccagctggactccaactgccagcctatggccaccaattggatccaggagaaagtgtggctctctcaggaggtggacaaactgagagtgatgttcctggagatgaaaaatgagaaggaaaaactcatgatcaagttccagagccatagaaatatcctagaggagaaccttcggcgctctgacaaggagttagaaaaactagatgacattgttcagcatatttataagaccctgctctctattccagaggtggtgaggggatgcaaagaactacagggattgctggaatttctgagctaagaaactgaaagccagaatctgcttcacctctttttacctgcaatacccccttaccccaataccaagaccaactggcatagagccaactgagataaatgctatttaaataaagt

SEQ ID NO: 21285 - DNA, 454 bp, Homo sapiens
attagacctcgcccccgcgctgcaggaattcggcacgagtttaccttccagcagagcaaaagcaaaaagtttaagtgaggcttttgaaaacctaggcaaaagatctctggaagcaggtaggtgcctgcccaagagcgattcatcttcatcacttccaaagaccaaccccacacacagcgcaactcgcccgcaggagacatctgaccttcacgttcagggaaatagttctggaatatttagaaagccagtgtcacccagcaaaactctttcagtcccagataaagaagtgccaggccacggaaggaatcgttacgatgaaattaaagaagaatttgacaagcttcatcaaaagtattgcctcaaatctcctgggcagatgacagtgcctttatgtattggagtgtctacagataaagcaaggaatgaagttcgatatcaaacagaaggcttctta

SEQ ID NO: 21286 - DNA, 506 bp, Homo sapiens
  misc_feature (1)...(506): n = A,T,C or G
nggggcggccattgacggctgatgagaacggactagggaaggtatccagccttttccttatgctagttccttcccttatttgccagatggggaccctgtggggaggtgacccagtgtgaggccgaagctctttcccagagccccacaggccagtggagggtcgtgtttgtgctctgggcatcaccgtcttgggtctcggtcccctgcgactgcagctgctacatccctccctgctctgagataaatgttcttcccatgaagcagacggttcacttttgggatggcgctgtctccaggtttggctgtctcagtccagatgatgtttggttagtttccattcccagaaccacaagcctttgagttctgaaagtttgtgacagaatcaagaggctaatttgggagatgtgagattcccagcccacctggtattgccctcgagttagtggtaaattttgctatggaaaataactcttgtcaagaccaagctccggcgcattgcctccctt

SEQ ID NO: 21287 - DNA, 513 bp, Homo sapiens
  misc_feature (1)...(513): n = A,T,C or G
aggggnnnnnnnnnaagggagggcnccnagggagngccnnccttganngcctctangatcgcctgcaggaattcggcacgagaggacatgtactgagacaaaaaggaaacataagagctttttcactctaaaaatcttggcaataatgtcaacaccagaaagcctcctctggagaatcttacagagtgattgtagtttaacacaggaacacacagggctgtgtagcatgataccaggcccaggagatcagtaattacaaattaagggttaaatcagagattattcaacagagagggagaaaggaggagacagagggaggacctgttgtgttccagccattctggtattcctttatgtatctaatttcattcaaacctcacaacagtcttgtgaggcccttatataattactcccattttgcagatgaagtaactgaggcttagaaaggttaatagcaccggggaacaatttctctgggtgagaattgggactctgttgctggtcttctcagtt

SEQ ID NO: 21288 - DNA, 481 bp, Homo sapiens
ggcggggacttgacgtctgtagacttctgcacgaggtgagtgtctctatggtgatacgagggtgagaaaggtcctggtccgcgccagagcccaacgcgcctcgtcttcatgcctcggaaaattgaggaaatcaaggacttcctgctcacagcccgacgaaaggatgccaaatctgtcaagatcaagaaacataaggacaacgtgaagtttaaagttcgatgcagcagatacctttacaccctggtcatcactgacaaagagaaggcagagaaactgaagcagtccctgccccccggtttggcagtgaaggaactgaaatgaaccagacacactgattggaactgtattatattaaaatactaaaaatcctaccaaaaaattagaaaaaaaaaaacctgaggggggggcccggtcccaatttccccctatatggagccgttttaaaattctcgggccggcttttaaaaactttgggaagggg

SEQ ID NO: 21289 - DNA, 304 bp, Homo sapiens
  misc_feature (1)...(304): n = A,T,C or G
ctggtaancttcgcaccggctgcaggaattcggcacgagcaagaaggacctgtgtaactttaacgaacagcttgaaaatggtgggacatccttatcagagaaaacagttcttctgctggtgactccatttctggcagcagcctggagccttcatccctaagtcaacaccaggagagcttctcccaaactccccgttcctgcgtagtccgctttctcttgctgccacattctaaaggcttgatattttccaaatggatcctgttgggaaagaataaaattagcttgagcaaaaaaaaaaaaaaaa

SEQ ID NO: 21290 - DNA, 533 bp, Homo sapiens
  misc_feature (1)...(533): n = A,T,C or G
ggagaattgannctttgacggctgcagcagaacgctccagatctccagggtaccttcaggcagccagtgtgacactgctttaaactgcatttttctaatgggctaaacccagatggtttcctaggaaatcacaggcttctgagcacagctgcattaaaacaaaggaagttctccttttgaacttgtcacgaattccatcttgtaaaggatattaaatgttgctttaacctgaaccttgagcaaattagttggtttgtgtgatcatacagttatgtgggtggcttctagtttgcaacttcaagggacaagtattaatagttcagtgtatggcgttggtttgtgttgagcgtttgcacggtttggataatcttaaattttgacggacactgtggagactttctgttactaaatccttttgttttgaagctggtgctatttgtatttctcttggcctttatattttttggctggttatttacgcctttattggaaatgtgaataaagaaagaattacttgtgtacttgccaaaaan

SEQ ID NO: 21291 - DNA, 452 bp, Homo sapiens
aattgacctcgcccccgcgctgcaggaattcggcacgagggctttctgagttgggatggttgcataataaaatcagaagatacacggaccagaggagcctggaccgctcattcggactcgtcgggcagagcttttgtgctgccttgcaccaggaactcagagaatactatcgattgctctctgttttacattctcagctacaactagaggatgaccagggtgtgaatttgggacttgagagtagtttaacacttcggcgcctcctggtttggacctatgatcccaaaatacgactgaagacccttgcggccctagtggaccactgccaaggtcccacgcgcgtctttcccacgcacgtctttcccacgcgcgactttcccacgcgcgactttcccacgcgcgactttcccatgcacgtctttcccacgcgcgtgtttaccacgcgcgtctgg

SEQ ID NO: 21292 - DNA, 488 bp, Homo sapiens
  misc_feature (1)...(488): n = A,T,C or G
cgccccccccattgancgcctgcggtattccgcacgaggacagtacgagccatagtgaccaccaagaccccatctcattagctgtggaaatggcagcagtcaaccacactatcttggcattggcccgacaaggagccaacgaaatcaagacagaggccctggatgatgactgatcagggaggttaaacatgacaagttaacttagtttagacgtagcaccttagcagactttcctcggtccttaacatgtgttcttacagtataacttgcagtttcttgtatgtcaggtagctgttagggtcttgttctgtgaagatggcatggtgccctcagcctttgcatatactctctcagtattaactcccagtaaataataaccaaccaaccaaccaaacttccctctcccagcccccgaggctagaaaatcttgctgctccgtcttagcattccaagaaagtgcttccaggtatttagatagccctcagttn

SEQ ID NO: 21293 - DNA, 350 bp, Homo sapiens
  misc_feature (1)...(350): n = A,T,C or G
aatttgcnctgcgctgcaatcctagatccagcaactggtcagctggttggcgtgaatccggcgctgctggtactggcgacggctgcgggttccaacaccctcacccacattaacgatgcatctttctggttgttcaaaggttactttgacctgtcagtaaaagacacgttgaaaacctggggtctgctggagctggtcaactccgtggttgggctgattattgtgctgattattagcatggtagcgtaaaaggacaccagagcctgccaatggcaggctcagactgatgacaaagtctaaaaatgtgcccggacagtcccctcgcccctccggggagagggttagggtga

SEQ ID NO: 21294 - DNA, 450 bp, Homo sapiens
aatggctttgtctcccgctgcaggaattcggcacgaggatttttgtcatggtagaaacagcccaaaggacccccctcgtttggcctcccacgcagcttagtcttgcttttttagggatgtttctcattttttaatttctccagtcccatctggttatattgccaaaacatgtttgtgactctcaaacgttagtttactcccagcatcacttggggagcttgctaagctacgaattccgaggtcccactggagagtctgatttaatgaccctggagtggcggacggataacctgcctgctggggtgattttaacgcagctgatgcgaagaccccatttagggaatcattgggttggcgtttgcaatgcgttcctcccagctataggacaaagaggtgtcaactcaactgtgtcttcttagaagagcccattaattataggtgagtcattag

SEQ ID NO: 21295 - DNA, 512 bp, Homo sapiens
  misc_feature (1)...(512): n = A,T,C or G
gcgggggttnnnaaactggatatgagtggctgtacgaattcggcacgagctcacttcatccggcgactagcaccgcgtccggcagcgccagccctacactcgcccgcgccatggcctctgtctccgagctcgcctgcatctactcggccctcattctgcacgacgatcaggtgacagtcacggaggataagatcaatgccctcattaaagcagccggagtaaatgttgagcctttttggcctggcttgtttgcaaaggccctggccaacgtcaacattgggagcctcatctgcaatgtaggggccggtggacctgctccagcagctggtgctgcaccagcaggaggtcctgccccctccactgctgctgctccagctgaggagaagaaagtggaagcaaagaaagaagaatccgaggagtctgatgatgacatgggctttggtctttttgactaaacctcatttataacatgttcaatataaagctgaactttacaaaaaaaatatgaaaaa

SEQ ID NO: 21296 - DNA, 308 bp, Homo sapiens
aggggggattgacgtctgcagtcgagacagtttcttagctttttaattgttgtttctttctagtggtctttgtaagagtgtagaagcattccttctttgataatgttaaatttgtaagtttcaggtgacatgtgaaaccttttttaagatttttctcaaagttttgaaaagctattagccaggatcatggtgtaataagacataacgtttttcctttaaaaaaatttaagtgcgtgtgtagagttaagaagctgttgtacatttatgatttaataaaataattctaaaggaaaaaaaaaaaaaaaaaa

SEQ ID NO: 21297 - DNA, 463 bp, Homo sapiens
  misc_feature (1)...(463): n = A,T,C or G
nattgaacgcctgggctgacaaatgaggactctttctagaacttttgaacactaaaaggatgaaaaaaattagcaaaccgaagtttcttcaatgacccctcgagaactttgggaccagtttcctataggggactcagtttcagagaactgagacagaagctcttctgtcgttatattcttctttcctttttttggatttattaaatattttctgtggtgtgaagtgacttattaaatccacagacattgagtgacttcttacaacatccacataagaatttgttgtaatgagttcatgtccacccagatgttgtgttggcagtgaacaagggcacggtttttatacatacgtacatatatatatataaacacacacatagatatatatgaataaacaaaaatgaaatcctgctaagatcacgctgtgtagctgacaggggcttgctgtcgttttgagcatgtc

SEQ ID NO: 21298 - DNA, 451 bp, Homo sapiens
  misc_feature (1)...(451): n = A,T,C or G
atttgcnctgcgctgcacgaattcggcacgagccattgcgctgtgtaacacagattctcctctgcgctatgtggacattgccatcccatgcgacaacaagggagctcactcaatgggtttgatgtggtggatgctggctcgggaagttctgcgcatgcgtggcaccatttcccgtgaacacccatgggaggtcatgcctgatctgtacttctacagagatcctgaagagattgaacaagaagagcaggctgctgctgagaaggcattgaccaaggaggaatttcagggtgaatggactgctcccgctcctgagatcactgctactcaacctgaggttgcagactggtctgaaggtgtacaggtgccctctgtgcctattcagcaattacctactgaagactggagcgctcagcctgccacggaagactggtctgcagctcccactgatcag

SEQ ID NO: 21299 - DNA, 471 bp, Homo sapiens
cggccccattgccttcgcccgcctgcacgaattcggcacgagtcaggacccacctccagttcttctgaaagtgtgacagtgtccagccggttctgcagcactaggggagggggcagatggtggttgcatgggcttcctgggtctccactctccgtctggcctaaaggtgatgtatttggtgtttggccctgcagtccccactcttgaggcttaaggcgcatgtggcacaccactctttccagcagtagtcgctttactgttacctgtttaggcctagaagttttccctcatctgtaaatgtgatttaaaatctaagccatgaatatgctttatttattaaaagagttatgcggattaaaaacattattaatgtcagataaaaaaaaaagaaaaaaaagatgaaaaaaaataataaaataaattgggggggggggggcggccccccatttcccttaggggggggccgtccca

SEQ ID NO: 21300 - DNA, 487 bp, Homo sapiens
  misc_feature (1)...(487): n = A,T,C or G
tggggnnnnccggggnnnccttgcttgctgcggcattcggcacgagcgacaccgtaactatccgcactagaaagttcatgaccaaccgactacttcagaggaaacaaatggtcattgatgtccttcaccccgggaaggcgacagtgcctaagacagaaattcgggaaaaactagccaaaatgtacaagaccacaccggatgtcatctttgtatttggattcagaactcattttggtggtggcaagacaactggctttggcatgatttatgattccctggattatgcaaagaaaaatgaacccaaacatagacttgcaagacatggcctgtatgagaagaaaaagacctcaagaaagcaacgaaaggaacgcaagaacagaatgaagaaagtcagggggactgcaaaggccaatgttggtgctggcaaaaagtgagctggagattggatcacagccgaaggagtaaaggtgctgcaatgatgttagct

SEQ ID NO: 21301 - DNA, 407 bp, Homo sapiens
  misc_feature (1)...(407): n = A,T,C or G
gagcccgtgccctctgctccttggcctgcctgcccaccagccacgcgtgtcagccctccagttctccttcaattgacgccagcctctccacaggcccactgctgtgccattctggaagctccagctgctgctgggctgcctggcactgcccgcttgccggtcagggcctgccgagctgcctgccccttccagctgggcagagtcccctgcaaggaggcagggcccagcttccacatccggagccctggtcagcatagccgcccacggtctgttctcagattcctaatcattccagaagtattaaacgtcattgctgcaaaccccnnanaaaaaaaaaaaaaaaaaaaaaaaaaaaaaaaaaaaaannnnnnnnnnngggggggggggggcccggcccccattttctt

SEQ ID NO: 21302 - DNA, 503 bp, Homo sapiens
  misc_feature (1)...(503): n = A,T,C or G
nttgganncccnnnnnnatttcctccgcgctgcaggaattcggcacgagggcaaagctgcccagtgggaagctgcaggtccacctgcgtgggctgcacaacctctgtgcctattgtacccacattctcagtctctacttcccctgggatggagctgaggtaccaccgcaacgccagacaccagcaggcccagagactgaggaggagccataccggcgccggaaccagatcctatctgtgctggcaggactggcagccatggtgggctacgccttgctcagcggcattgtctccatccagcgggcaacgcctgctcgggccccaggcacccggaccctgggcatggctgaggaggatgaagaggaatgatttgtcctcacgctcccaagactgggttttctactctcatgcattccagaggcccccgtgcctcctcgttgttggacagccggacacggngtgctgccacccagaataaagccactcacactgaanaaaaaaaaa

SEQ ID NO: 21303 - DNA, 494 bp, Homo sapiens
  misc_feature (1)...(494): n = A,T,C or G
cgggcncccaattgaccccctcnatagacccgcctgcacgaattccgcacgaggtacaaggccctaggagcccaagatctgacggaagctgagggctggcacttcttctgctttcaaggagaggcaacgagaaagttggcaggaaagtgacgccatccctaggaggatctctgtcttgagtttctccttccccatcagctgaagcactcttcagagactacgtccacagacactgatgctgaggcctccctggaggaaggagggttaggggtgcctatcctcaagtattggaagagcagaattgagggagagacctttcttccttgttgagggtgaaaaataaataagaattacatgtcctgaaaaanaaaaaaaaaaaaaaaaaaaaaaaaaaaaaaaaaaaaaaaaaaaancccggggggggggggcggcccccccctccccctttaggggggggtttaaaaaattccgggggcggttttaaaacaaggggg

SEQ ID NO: 21304 - DNA, 500 bp, Homo sapiens
  misc_feature (1)...(500): n = A,T,C or G
cggagaaaaaaaatataaaaagggggaaaaggaantttgatcgcttttgangaaccttgaacgaggggcttttaattttcagaccatacatttttaatataaaaacattttgataatatacaaacagcaatcacaacagcatccacatggcagcaaggggaccagggcacagagagggggagcgggctggggagggacagttttcagggtcccagttgcttccctggcttgaaatcaccctggtcctatcagaggacaggttaaggctgccagaggcagagggtccctgaccctggcccggagacagactgcccatgcaggccctctgataccatcttccaaccatggcagcctccaggaaaagccagatccatttaggagataacaggaaggtggctgtgattgacaggaaaggcaacatggttcctcagcatcctgctgatcacacctctgggaggggctgctggattgaagaggacctaagaatcttcctgggagca

SEQ ID NO: 21305 - DNA, 248 bp, Homo sapiens
  misc_feature (1)...(248): n = A,T,C or G
nattgacccatgctgcancttgtacatgtatcttgagaggtaggagcagagccactatctccattgaagctgaaatggtagacctgtaattgtgggaaaactataaactctcttgttacagccccgccaccccttgctgtgtgtatatatataatactttgtccttcatatgtgaaagatccagtgttggaattctttggtgtaaataaacgtttggttttatttaaaaaaaaaaaaaaaaaaaactc

SEQ ID NO: 21306 - DNA, 524 bp, Homo sapiens
  misc_feature (1)...(524): n = A,T,C or G
agggtgnnnnnnnnngngnaattgaccgccttnngnntttgcaccgcctgcaggaattcggcacgagggaccgtagtgttgtgacggtcgcccatctgcgcccagtacctcggatcatgcggaacatgttgtcaaagctgcagattgcctgtgacaacgctgtgttcggctgtagtgccgttgtccggcttgacaacctcatgtctcacctcagcgactgtgagcacaacccgaagcggcctgtgacctgtgaacagggctgtgggtgagatttgttcccttctgccccacatggataagggccatctcatttatgcccctgtctctggctgccctcctcactagctgaggaggtctctttggcatgttggcaaggagtattcttagcctccttggcttcctgctctaagatcttactttcttgctgcttttccaactataatcattttgctcttgctttaacaaaagaaggggcacagcaatttagtaaatttgtgtaataacattaaaggttgattgactct

SEQ ID NO: 21307 - DNA, 480 bp, Homo sapiens
ggtgggtatagacgtcttcggaattcggcacgagctgcattttagctatggaagtgacctgctgtgacactgtgctctcttctgtgggcttaatggttcctttgctatgaagtggcaaattacatgtagagtgtctccttccttttcagagaacagttaatcaaggcaaatcagcaagcccccaaagtgctgtaatttaacatcatgattaccaccttcgaagctatatattttgcatactttaaaatcacctaacttggactgcttgaattacattggcttttagaaccgaaattgtaactatgtattgtatttcatgggaggtatattttatgagctttttggctttcttttttcccacagcaactgccaatgaaggatgaatcccctttttaaaaagttgttgttgttgttgtttatttgattttgagttaggagggataataaagaagtccatttaaaaattatttttagaagcta

SEQ ID NO: 21308 - DNA, 487 bp, Homo sapiens
cccccccccattgatcgcctgcggtagtccgccctagagcaaatggagccgatctcttagatgctgcgcgcaggctgagcgctatggctataacgccactgacatcttccaaactgcggacctctgacaacgaaagaacatggactgtgtgcagcggacgctgatgaatctgggtgggctggcagtagcccgagatgatgggctcttctctggggatcccaactggttccctaagaaatccaaggagaatcctcggaacttctcggataaccagctgcaagagggcaagaacgtgatcgggttacagatgggcaccaaccgcggggcgtctcaggcaggcatgactggctacgggatgccacgccagatcctctgatcccaccccaggccttgcccctgccctcccacgaatggttaatatatatgtagatatatattttagcagtgacattcccagagagccccagagctctcaagctcctttctg

SEQ ID NO: 21309 - DNA, 466 bp, Homo sapiens
  misc_feature (1)...(466): n = A,T,C or G
cggggggagnnnnaaaactgagaggcttgagaacnctgacgagcacntacgaggtatggtgactggcttaggtatgatcttgtgagttaagacaatgaagccagagggaatttcaagacttatgggaatgctgggtagaagctgttttaattcccctgttgaatgtgaaaaaggtagtagtattccgggtctttatgatgaccaccttgggccttgggatcatgaccaggaatcacgtgaagctgacaccactgaagggagagttgagaggcagaaagagatcaagtccttggtgaaattgtttaagtacaggatcaagccttgcttgagattggccttacctctggactttttttgttatatgagctaataaattctgtttattgtttagcagaagaagatcaaggatgatcttcgggggggggccggaggcccaattgcccttaaagggggccgtattaaagtt

SEQ ID NO: 21310 - DNA, 457 bp, Homo sapiens
  misc_feature (1)...(457): n = A,T,C or G
natttgannccttgagcngcgctgcaggaattcggcacgaggtgaagggccgcttcatgggggacccatcatacgaatatgaacacactgagctgcagaaggtgaatgaaggtgaaaaagtctttgaagaagaaatagtggtccagatcaaggaagagacccgcttggtgtctgtcattgaccagattgacaaggctgtggccatcatcccccgaggcgccctcttcaagaccccttttggacccacccatgtcaatcggacctttgaaggactgtccttgtctgaggccaagaagctcagctcctacttccatttcagggagcctgttgagctaaagaataagaccttgcttgagaaggctgacctggacccctccctggatttcatggactccttggagcatgacattcccaaagggtcctggagcatccagatggagaggggcaatgccctggn

SEQ ID NO: 21311 - DNA, 508 bp, Homo sapiens
  misc_feature (1)...(508): n = A,T,C or G
nattgatcgcccgtnggaaattgcaccgcctgcaggaattcggcacgagccccgagcgccgctccggctgcaccgcgctcgctccgagtttcaggctcgtgctaagctagcgccgtcgtcgtctcccttcagtcgccatcatgattatctaccgggacctcatcagccacgatgagatgttctccgacatctacaagatccgggagatcgcggacgggttgtgcctggaggtggaggggaagatggtcagtaggacagaaggtaacattgatgactcgctcattggtggaaatgcctccgctgaaggccccgagggcgaaggtaccgaaagcacagtaatcactggtgtcgatattgtcatgaaccatcacctgcaggaaacaagtttcacaaaagaagcctacaagaagtacatcaaagattacatgaaatcaatcaaagggaaacttgaagaacagagaccagaaagagtaaaaccttttatgacaggggctgcagaacaaatcan

SEQ ID NO: 21312 - DNA, 495 bp, Homo sapiens
  misc_feature (1)...(495): n = A,T,C or G
ncttgccggctgcggaattcggcacgagctggattgtgctttggttaatacatctttccctaaagaagataaacacaaaatccattccaggtagctcggcaccaactaagaaaaaaagcacaaagttctcagagctctcgaggaaagtggttgtccccgtaccaccatgcactgtaaatatccctcccctctctccctggtcccctcccccatccccaccactgatatcatggggagtaataggaccagagcggtatctctggcaccacactagggactatcaggtaataaaagctttgactccctgaaaaaaaaaaaaaaaaaaaactcgggggggggcccggaccccaattccccctatagggaggggaataacaatccacgggccgccgtttaacaacgtggggacggggggagaaaaannnnnnntntnnnnnnnntntnnnnnttntttttntttttttttnnttttttttttggttttnnnnnntttng

SEQ ID NO: 21313 - DNA, 479 bp, Homo sapiens
  misc_feature (1)...(479): n = A,T,C or G
ccccccccattgacgcctgcagtattcgccgagctgaaaatatataacccagccatgcttcataacattgatcaggagatgctgaagtgcattgagctggatgagcggctgaaagccatggaccaggagatcacagtgaaccctcagtttgtacaaaagagtatgggctcacaagaagatgattcaggaaacaaaccatccagttattcttgaaactaacatccatcctgagctaaacaagagaaactaccatcttggccagtgacaagtgttcggagggcagcagagaggaccaagcctgtgtcacctggagactaagaaattaagttttgttttgacatcttcagtcctgtgtgctttcagaaaaccattttctctgcaaagaaaggaaacagatttgcaaactttaaagtctgtcgtggatttatttatcctcagattattgttactgcattaaatctacctttntgtttaaaaaa

SEQ ID NO: 21314 - DNA, 501 bp, Homo sapiens
  misc_feature (1)...(501): n = A,T,C or G
tgcgggtttaactgtactcgtctggctctcgaacgaggcctacacgagccctggagaaattcagcacttctcagaattctatgctgggcagatgaaggaacccattcaacttgaaattactgaaaaaagacatgggactttggtgtgggatactgaggtgaagccagcggatctccagcttgtagctgcatcagcccctcctcctttctcaggtgcagcctttgtgaaggagaaccaccggcaactccaagccaggatgggggacctgaaaggggtgctcgatgatctccaggacaatgaggttcttactgagaatgagaaggagctggtggagcaggaaaagacacggcagagcaagaatgaggccttgctgagcatggtggagaagaaaggggacctggccctggacgtgctcttcagaagcattagtgaaagggacccttacctcgtgcctatcttagacagcagaatttgaaaatgagtcnagtaggtagtctggaa

SEQ ID NO: 21315 - DNA, 480 bp, Homo sapiens
  misc_feature (1)...(480): n = A,T,C or G
cgcggggcttttaatcgacggcttgtagaaccnttcacgaggagaanaaagcgaaataggttatattttaaaaacaatagaaaggcaataagttgcgataagctcttactattgaccaaggttatacaggaaagagactgaagtgtacccttgaataagttttctgtagtcagagttctaaactctaatttgtaacttggactttctaattgcaaatggcaataactattaagttatcagcaataataaatttagcattaaatttgagtacaatgttttgtttttgcactccccatagtgcgtatgtattaagacagtggatagtgtttaggtcctgttaattttctttggaattcaatgtggttgtgaatcaaacttaaggaaggaacgtttaaatagcaatgagatacagaattatgggcctttggaacaagcccgacttcccctaaattctncttagtttggtaataccagtattca

SEQ ID NO: 21316 - DNA, 477 bp, Homo sapiens
  misc_feature (1)...(477): n = A,T,C or G
agcgggatttaactgangccctgagaactctgcacgagaaaaggcctaagttaaagaaagcaagtaaacgcatgacctgccataagcggtataaaatccaaaaaaaggttcgagaacatcatcgaaaattaagaaaggaggctaaaaagcggggtcacaagaagcctaggaaagacccaggagttccaaacagtgctccctttaaggaggctcttcttagggaagctgagctaaggaaacagaggcttgaagaactaaaacagcagcagaaacttgacaggcagaaggaactagaaaagaaaagaaaacttgaaactaatcctgatattaagccatcaaatgtggaacctatggaaaaggagtttgggctttgcaaaactgagaacaaagccaagtcgggcaaacagaattcaaagaagctgtactgccaagaacttataaaggtgattgaagcctccgatgttgtcctagaggtgt

SEQ ID NO: 21317 - DNA, 491 bp, Homo sapiens
  misc_feature (1)...(491): n = A,T,C or G
cgggaccccatttgacccccctcnatagacccgcctgcaggaattccgcacgagtcaagccaagctgcagaagcaccgggacctggccaaggccgttctgcggagaaaaggcatgctgggggcctcgccgaaccgcccagactcttcagggaaaaggtcagtgaagtttaacaagggctatactgctcttagccagagtccagatgaaaacctggtgtccctcgactctgacagtgatggggagctgggatccagatactcctccgggtattcatctgcagagcaggtgaaccaggatgtgagccggcagctgcttcaggatgggtatcacctggatgagattccagatgacgaggacttggacctcatcccccctaagcccatggcctcttcaacatgctcctgctgctggtgctgtcttggggactcttcttcctgtaccctccagtagacattaccctccaaggtgggccctgctcaccatgaggcct

SEQ ID NO: 21318 - DNA, 481 bp, Homo sapiens
  misc_feature (1)...(481): n = A,T,C or G
agcggcnnnaattgacctgatcgcatgcggaanngccacgagcagaggggaactggattcaaaaatttgggattcatgtagcacagacagagctagactgtaatggtcacaaactagctgtgtcaaggcccgtgatagccagaaagcggcagtttgagtccatatcaattgtgtgaccagggctagtcactttttacttctcagtgccatctataaaatggggataatagcactacctaccaagtgctgtgaggctcaaatgagccaaaggttataaacttgccttaaaactatagtcctatacaaaaattatctgggcgtggtggtgcatgcctgttatcccagctactatggaggctgaggcaagagagttgcttgaacccaggaggcggagattgcagcgagctgagattgcaccactgcactccagcctggggacagagcaagactcttgtctataaaaaacaaataaaacatatat

SEQ ID NO: 21319 - DNA, 426 bp, Homo sapiens
  misc_feature (1)...(426): n = A,T,C or G
gcggtnnncccgatctccttcggcaattcggcacgagtacactctctgctctggtagatgggaagagcattaatgctggaggccacaaggttgggctcgccctggagttggaggcttaatccagctgaaagaaacctttgggaatggatatcagaagatttggccttaatatatttccattgtgaccagcagcaggcttttttcccccaagaagatgatcaaaacaaaggatgatctcaacaagagctgtattttaagtatttagacagttctttgttagctggtttctagttggttatctagttaccaatgctgcagtcctgcagtcacctatacattatttaaatgtatttaactgttaaatgcgctacccaccaataatgaaatagacctttatgaaaactgtgcaaaaaaaaaaaaaaaaaa

SEQ ID NO: 21320 - DNA, 486 bp, Homo sapiens
  misc_feature (1)...(486): n = A,T,C or G
atggcncgcctgattagctcgcatgaggagatctgaacatgagtgactctgcactggcccgtgctgcagatccagaccatgatcacacatggtacctgacagaatatgtggccacacgttggtacagggctccagaaattatgttgaattccaagggctacaccaagtccattgatatttggtctgtaggctgcattctggcagaaatgctttctaacaggcccatctttccagggaagcattatcttgaccagctgaaccacattttgggtattcttggatccccatcacaagaagacctgaattgtataataaatttaaaagctaggaactatttgctttctcttccacacaaaaataaggtgccatggaacaggctgttcccaaatgctgactccaaagctctggacttattggacaaaatgttgacattcaacccacacaagaggattgaagtagaacaggctctggcccacccatatctgg

SEQ ID NO: 21321 - DNA, 488 bp, Homo sapiens
  misc_feature (1)...(488): n = A,T,C or G
agtgtgcnccctttgaccgcctgcagtagttccgcacgaggacaggcgattctcccctcattttctggactgggcagcctttggggtcatgacccttccctccatcggcatccccctgctattgtggtactccagcaagaggaaatatgacactcccaaaacgaagaagaactgattggggcttccacagccctcctctcccaagaaatccaggctcctctcccaagaaatccaggtgctttccagactccaaagggtatcttaaatgcaatctcttctctcttagcccttggccactttctcctggaagatgaaatgaaagctatgggactcttggaggatacccagtgtctattctgggttagagaagtgcttactaaggggttttctaataaaaacaaatgccacattgaaaaaaaaaaaaaaaaaaaaactcgggggggggcccggcccccaattccccctatagggagccggattacaattca

SEQ ID NO: 21322 - DNA, 494 bp, Homo sapiens
  misc_feature (1)...(494): n = A,T,C or G
cgtgggacnccaattgaccgcctgcggtagtaccccctgcaggattcggcacgagattctgggaattacaacaatcagtcttcaaattttggacccatgaagggaggaaattttggaggcagaagctctggcccctatggcggtggaggccaatactttgcaaaaccacgaaaccaaggtggctatggcggttccagcagcagcagtagctatggcagtggcagaagattttaattaggaaacaaagcttaacacgagaggagagccagagaagtgacagggaagctacaggttacaacagatttgtgaactcagccaagcacagtggtggcagggcctagctgctacaaagaagacatgttttagacaaatactcatgtgtatgggcaaaaaactcgaggactgtatttgtgactaattgtataacaggttattttagtttctgttctgtggaaagtgtaaagcattccaacaaagggttttaatgtagattn

SEQ ID NO: 21323 - DNA, 465 bp, Homo sapiens
  misc_feature (1)...(465): n = A,T,C or G
cggtggggnnnnnnnaaactgatnactgagggcntncgaacgagcggaattncacctgagaacaagtcccgcaaaccggggacggaaggacatttgacttttatttttgtatttaattgacatgaatgtaaaggggacagctcagggttgttttggagcctgttgactttgtatctctgcctgtgattttcttttctaaatgaaactccatgtagcaaccaggacgaagttgagaaggaaaacgccaaatgctttggttattagagtttaataggtaagctctgttacactaggtgttagagttccagaatgttcttttgtttgctaaaccttgaagaaacatgtgcctcagcctagatgttttgtcttctcttttctgcacttaatacctgacagtatgaccgatctctgcgcctttctgggggcgggcaagctggcggtagatttgtgatgtcacagtgcana

SEQ ID NO: 21324 - DNA, 475 bp, Homo sapiens
  misc_feature (1)...(475): n = A,T,C or G
natggttcgacgctgctgaattggctgcgagaatgggtccgtattacttgacccgtggaaccccacgaggtcatgcatatcaagaggttccaatcttcgtgttcactttaagaacactcgtgaaactgctcaggccatcaagggtatgcatataccaaaaggcacgaagtatctgaaagatgtcactttacagaaacagtgtgtaccattccgacgttacaatggtggaattggcatgtgtgcgcacgccaatcaatggggctggacacaaggtcggtggcccaaaaagagtgctgaatttttgctgcacatgcttaaatacgcacagagtaatgctgaacgtagcggttcatatgtagattctctggtcattgagcatatgcaagtgaacagagcacctaagatgcgccgccggacctacatagctgatggtcggattaacccatacatgagctctccctgccacattgagatg

SEQ ID NO: 21325 - DNA, 512 bp, Homo sapiens
  misc_feature (1)...(512): n = A,T,C or G
gaaaaaacctcgancggctgcangacctcgacacgactgagcgattctgctcgagtactcgttcatcatgggtgacacatctggagactacaggaaagtactgcttgttctctgtggaggagatgattaaaataaaaatcccagaaggacaggaggattctcaacactttgaatttttttaacttcatttttctacactgctattatcattatctcagaatgcttatttccaatttttagagtggctagtagtttcttcatttgaaattgtaagcatccggtcagtaagaatgcccatccagttttctatatttcatagtcaaagccttgaaagcatctacaaatctctttttttaggttttgtccatagcatcagttgatccttactaagtttttcatgggagacttccttcatcacatcttatgttgaaatcactttctgtagtcaaagtataccaaaaccaatttatctgaactaaattctaaagtatggttatacaaaccatatacat

SEQ ID NO: 21326 - DNA, 493 bp, Homo sapiens
  misc_feature (1)...(493): n = A,T,C or G
natttgcaccgcgctgcaggaatttggcacgagagaagaaggggaagccagagaaattgaaacggtgcattcgcacagcggcagggagcagctgggaggaccccagcctgctggagtgggatgcagatgacttccggatcttctgtggggatctgggcaatgaggtgaacgatgacatcttggcacgcgccttcagccgcttcccatccttccttaaggccaaggtgatccgtgacaagcgcacaggcaagaccaagggctacggcttcgtcagcttcaaggaccccagcgactacatgcgcgccatgcgtgagatgaatgggaagtatgtgggctcgcgccccatcaagcttcgcaagagcatgtggaaggaccggaatctggacgtggtccgcangaagcagaacgaanagaagaagctgggcctgagatagggtctggggccaggcacccgctcccacctggccgggcgctggctcctccctcagttctt

SEQ ID NO: 21327 - DNA, 473 bp, Homo sapiens
  misc_feature (1)...(473): n = A,T,C or G
cggggatttaattgacgctcgtagctctttgtgaggcccgngtggttgctgccgaaatgggcaagttcatgaaacctgngaaggtggtgcttgtcctggctggacgctactccggacgcaaagctgtcatcgtgaagaacattgatgatggcacctcagatcgcccctacagccatgctctggtggctggaattgaccgctacccccgcaaagtgacagctgccatgggcaagaagaagatcgccaagagatcaaagataaaatcttttgtgaaagtgtataactacaatcacctaatgcccacaaggtactctgtggatatccccttggacaaaactgtcgtcaataaggatgtcttcagagatcctgctcttanacgtcaggcccgacgggaggccaaggtcaagtttgaagagagatacangacaggcaagaacaagtggttcttccagaaactgcggctntagatgctc

SEQ ID NO: 21328 - DNA, 501 bp, Homo sapiens
  misc_feature (1)...(501): n = A,T,C or G
tgggngncnnnnnnatttgaccgtttgcancgcctgcaggaatagggcacgaggcctttggctctgcccgggccaaggaggccgatggtggggctgccacggcagggcccagccgggaacagctcaaggctgacctggatgagttggtggccgctgagtgtgtgtactgaggggagctgatgatccgctctatcgaccgcccgttcatcgacccccagcgctactaggaggagcagctcaaccggctgtaggagggtgtcacctttgatggggggtgggcaatggtgagcagtggcttgaacccacttgagaaggctgcctcctaggctctgctcaaacatcttgcaattgccacactgtgaccacgttgacgggagtatagtagcgctgttggccaggaggtgtcaggtgtgagtgtattctgccagcttttcatgctgttcttcacagctgcaggtatgccagaccatcagcctgcctcccagtagaggcccttcacct

SEQ ID NO: 21329 - DNA, 498 bp, Homo sapiens
  misc_feature (1)...(498): n = A,T,C or G
natgggnnnnnnnnnatttcancgttgagngactcggcacgagggcctttccacctcacagtactgatttcattcctagacagctgggtgaagtagccttctgtggcatcaactgaattctcccagcttcctgtttggtcttccaggggtgaggttgtggtttgatgctgaaaacttaatgtgggcatttctacaaaggtgtagcaccttgattctaatagtggacttcctaaaacctacatcctgtttaggtggaaagtatctgagacttgagcacagccatagtctcatccaggtatgacatgtgccactgtgtctgaaattcctgagcaccgagggccgcttcaggcaccaggcactttgccaacctgagagctgtatggggctggactgtctagtctaactaggcagtgaaccctgtcctgaacagagcttgtttgttcataaagcactctaaagcagtgacttttaaatcttgatctgtgcataatctcactc

SEQ ID NO: 21330 - DNA, 504 bp, Homo sapiens
  misc_feature (1)...(504): n = A,T,C or G
ggaggggnnnnnnnnnnaattgancgtttgcaggacctgcaggaattcggcacgagccaatgtgacacttttcaagtgcctaagaccctacgaggccacggccatcgctgcctgttctaccttagctttggctctgccgtgccctggcttccctggctttgccggtggcccgtccacactggcatatgtccatgcaggtctagagaggcctcttatttcttttttatgtgagtctccattctaaatgttatcatcttaattttgtaccacatattgttttttcttgttcggatgatatcaccgttgctacaataaacaccttccactacaattcatcttctgctttattacacgttgagttgacagaatgccttccaaacattcctttctacttaccctgtgagcttttggccatgttgtacctgagaactgttgctaacttgcggatttcgggcagattacactgaccagagtccacattcactttntattcttacatccaaa

SEQ ID NO: 21331 - DNA, 502 bp, Homo sapiens
gaaaaatttgcccggctgcagattctggcacgacggaacctctccctggagagtggttttcctgcttttctgctgctagaaatgttgctgtatgggagctagtacaatagaaagtgcccagtgactgcaggcgacccttaccgaggattttattcaagtatccaggggaggcttctgctgaacagcacattgtataagcagcgttttccttctttaatcctgtaatcaatacctctctgcctttacaatggctctgcttccaactaggttgattaatagaaaataaaagcctcctggttctttatgcctgagcctggaagaatacctggtctggggagttcctggctgacatctagcaccactctctgccaggaagccctggtggtcagatgggcttcttgtgtaggaagaacctccctcgagtcttgctagggaagggtgaaattggcccctctcagcccctcctcggaatcagctgctgggcggcgagaccaagccatgg

SEQ ID NO: 21332 - DNA, 480 bp, Homo sapiens
  misc_feature (1)...(480): n = A,T,C or G
attgaacgcctgattagancgccgaggggcccttctgcatctgtggcacccaatgcttggtcaacaacaagccctttggggaatccttttcagagcaatatttttccagctcctgctgtgtccactcagcccccatccatgcactcctctctcctggtcactcctcctcagccacctcccagagctggccctcccaaggacatctccagtgatgccttcactgccttagacccacttggggataaagagatcaaggatgtgaaagaaatgtttaaggatttccaactgcggcagccacctgctgtgcccgcgcggaagggagagcagacttcttctgggactttgagtgcctttgccagttatttcaacagcaaggttggcattcctcaggagaatgcagaccatgatgactttgatgctaatcaactattgaacaagatcaatgaaccaccaaagccagctcccagacaagtttccctg

SEQ ID NO: 21333 - DNA, 449 bp, Homo sapiens
  misc_feature (1)...(449): n = A,T,C or G
nttgacccgcctggagacactctgccgaactagagcgagcgcgcgcttgctgggggagccacaggacgaacaggggcccgagggcaggcccaggtccagacacgggaacggaggcctggctgcgttgccctatctccgtctacggcacccacttagcgttttaggcatcaagtaccagcagtttctccgccactatctggaaaattacccgattgctcccggcagaatacaagagcttgaagaacgccgcatgcgattcgcggaagcctgcagagcaagggaagcagcgtttgatgccgaatatcagcgaaatcctcacagggtggacctcgatattttaacctttacgatagctctgactgcctctgaagttatcaaccctctgatagaagaacttggttgcgataagcttatgaatagagaataggtatgtggtgacactacttcan

SEQ ID NO: 21334 - DNA, 450 bp, Homo sapiens
aatagaacaccttgtccccgcgctgcaggaattcggcacgagcggccgcagaagcgagatgacgaagggaacgtcatcgtttggaaagcgtcgcaataagacgcacacgttgtgccgccgctgtggctctaaggcctaccaccttcagaagacgacctgtggcaaatgtggctaccctgccaagcgcaagagaaagtataactggagtgccaaggctaaaagacgaaataccaccggaactggtcgaatgaggcacctaaaaattgtataccgcagattcaggcatggattccgtgaaggaacaacacctaaacccaagagggcagctgttgcagcatccagttcatcttaagaatgtcaacgattagtcatgcaataaatggtctgggtttaaaaaataaaaaaaaaaaaaaaaaactcgggggggggccgggaacccaattagccttg

SEQ ID NO: 21335 - DNA, 505 bp, Homo sapiens
  misc_feature (1)...(505): n = A,T,C or G
tgaggggnnnnnnnnnaatttccnnttttgcncggcctggcgaattcggcacgagcaaatatatcagctcattcaaagaacatatgagtagctgttgagtaatcaggagatgtttctcatttggattcaggaattcagatctataatgatgagctttctgtgggcaaatgttcacacagctacctgcctgggtcttaggctcaccactggaatgggagctgtccactcaccactcaccactggcatgggtgagctgtcagggagaggcgattggagctctatccaagttgagggatgctcagatgctaccagtcacacaaagttcacagccatctgcagcaactctagcttgtttgaactcatggctacaggaacttgagccctgctccagcatctcaccaagacagaagcccatcaacagcagcaccctgtatacgatgacagttttagcttatctttgcaacagacactgccaggcatataagttgaactgcaacaacagaat

SEQ ID NO: 21336 - DNA, 497 bp, Homo sapiens
gagggaaaaaatttgatcgccttaggaattcgtcacgagccctggtctactttgcctactaccatggccttctggggaacaggctttggtcttctctccagacccactgctgctctcaaaacaagtgtaacttctatgacaacaaagacctggaatgcgtgaccaatcttcaggaagtggcccgcatcgtgggcaactctggcctcaacatctacaatctctatgccccgtgtgctggaggggtgcccagccattttaggtatgagaaggacactgttgtggtccaggatttgggcaacatcttcactcgcctgccactcaagcggatgtggcatcaggcactgctgcgctcaggggataaagtgcgcatggaccccccctgcaccaacacaacagctgcttccacctacctcaacaacccgtacgtgcggaaggccctcaacatcccggagcagctgccacaatgggacatgtgcaaccttctggtaaacttacag

SEQ ID NO: 21337 - DNA, 482 bp, Homo sapiens
  misc_feature (1)...(482): n = A,T,C or G
cggggnnaagggggnnnnattgaccttcaccggctgcacgattcagtgtaactggctggaagcttggctggaccattgatccaaattatttgatcaaacattgacagacagttgatcaaaacacgatttatacttgtgcaactcctttacaggaaaccttggctcaagctttctggattgacatcaagcgcatggatgacccacaatgttactttaattgtttgccgaaagaggtacaagttaaaagagatcggatggtacgtttacttgaaagtgttggcctaaaacccatagttcctgatggaggatacatcatcatcgctgatgtgtctttgctagatccagacctctctgatatgaagaataatgagccttatgactataagtttgtgaaatggatgactaaacataagaaactatcagccatccccgattcagcattctgtaactcagagactaaatcacagtttgagaagtttgtg

SEQ ID NO: 21338 - DNA, 484 bp, Homo sapiens
  misc_feature (1)...(484): n = A,T,C or G
tggggnggaagggggnnnnccattgattggcatcggcattcggcacgagagggagtcgggccgcgactgtggtcgtttttataccttcccgcgcggacgccggcgctgccaacggaagggcgggtagggcgagacggagtttcgtcatgttggccaggcccatttgagatctttgaagatatcctcaacgtgaggcaaggtgcccggcgacgactgcccgctggtgtggggccagtgctcccactgcttccacatgcattgcatcctcaagtggctgcacgcacagcaggtgcagcagcactgccccatgtgccgccaggaatggaagttcaaggagtgaggcccgacctggctctcgctggaggggcatcctgagactccttcctcatgctggcgccgatggctgctggggacagcgccccttgagctgcaacaaggtggaaacaagggctggagctgcgtttgttttgccatcactatgttn

SEQ ID NO: 21339 - DNA, 488 bp, Homo sapiens
  misc_feature (1)...(488): n = A,T,C or G
atagatcccccntgnngaannttcgacccccgctgcaggaattcggcacgagggcgcagggactcaagccacaacgagttgtattatgaagaggccgaacatgaacggcgagtaaagaagcggaaagcaaggctggtggttgcagtggaagaggccttcatccacattcagcgtctccaggctgaggagcagcagaaagccccaggggaggtgatggaccctatggaggccgcccaggccattttcccctccatggccagggctctccagaagtacctgcgcatcacccggcagcagaactaccacagcatggagagcatcctgcagcacctggccttctgcatcaccnncggnatgacccccaaggccttcctagaacggtacctcagtgcgggccccaccctgcaatatgacaaggaccgctggctctctacacagtggaggcttgtcagtgatgaggctgtgactaatggattacgggatggaat

SEQ ID NO: 21340 - DNA, 504 bp, Homo sapiens
  misc_feature (1)...(504): n = A,T,C or G
cgcgcacccnanaattgctccgccctgcaggaattcggcacgagcatagcaacatcgccccctgtctacaaaaatgaaaaaccaaaaagcaaaccaaaagaaaaatctgaaatttccatctggggattaacttctgtctttctggtgaacaatatagcaattcacgcattcttcaagcagcaaaagttcccggaacaattagggaagacgtatggtctgaatttatccaggcagtgggtctgctttggtttttgctggaaatttatatcagtgtctgggctcccaagaacataaatgtaattgccaaagcaaaaaaaaaaaaaaaaaaaaaaccttgggggggggcccgggcccccatttccccttagggggggggtaataaaaatcctgggcccgcgttttaaaaccgcggggagggggaagcaacnnnccngtcttgtcttgcgtcttctttcgtctcccgctccccgatgagggtgttggacctggtcaccgggagcaccg

SEQ ID NO: 21341 - DNA, 488 bp, Homo sapiens
  misc_feature (1)...(488): n = A,T,C or G
agcgtngtnnnaattgaccttcttgagcaattcggcacgagaaagatctggcagtttcttatgaagttaaatacacttacccaatgattcagcagttctcctagatatttgcctaagagaaatgaaaataaaaatcgaccaaaaagattcttatgagaagtacatacataatatatgtgcataatatagcttcaatcatactagccagaaactggaatagcccagcttcccatcagtaagagaatggataaacagactgtggttattcataaaatgaaacactggcaaattatctgtgaggggaaaggatgagaaaagtcgttgcttctaggggatgggacgggaactgactgggaaggattttgaaggaacaaactttgggtagtggtaatgatttgggttacaaggtatatgcatttgtaaaaaaacttatggaatggtacacttaagattggtgcatttcattntatataaattntgcctcaaga

SEQ ID NO: 21342 - DNA, 476 bp, Homo sapiens
  misc_feature (1)...(476): n = A,T,C or G
gtggnnnttttgaatgatcgcatcggaatccgacgagagaccccactttccagttctgttctcttcatgaaagtgttcttgcccaaggaggaattgtacatgcccccactggtgatcaaggtcatcgaccacaggcagtttgggcggaagcctgtcgtcggccagtgcaccatcgagcgcctggactgctttcgctgtgacccttatgcagggaaagaggacatcgtcccacagctcaaagcctcccttctgtctgccccaccatgccgggacatcgttatcgaaatggaagacaccaaaccattactggcttctaagctgacagaaaaggaggaagaaatcgtggactggtggagtaaattttatgcttcctcaggggaacatgaaaaatgcggacagtatattcagaaaggctattccaagctcaagatatataattgtgaactagaanatgtagcagaatttgaggggcctgn

SEQ ID NO: 21343 - DNA, 479 bp, Homo sapiens
  misc_feature (1)...(479): n = A,T,C or G
attgcccgcctgcagaattcttgcgagcaatgtgcaggtgcatttcacagagaggtcatttgatcttttggtaaagaatctaaatgggaagagttactccatgattgtgaacaatctcttgaaacccatctctgtggaaggcagttcaaaaaaagtcaagactgatacagttcttatattgtgtagaaagaaagtggaaaacacaaggtgggattacctgacccaggttgaaaaggagtgcaaagaaaaagagaagccctcctatgacactgaaacagatcctactgagggattgatgaatgttctaaagaaaatttatgaagatggagacgatgatatgannncaaccattaataaagcctgggtggaatcaagagagaagcaagccaaaggagacacggaattttgagactttaaagtcgttttgggaactgtgatgtgatgtggaaatactgatgtttncagtaagggaatattgg

SEQ ID NO: 21344 - DNA, 471 bp, Homo sapiens
  misc_feature (1)...(471): n = A,T,C or G
gcccgcccccccccccgcccccccnattcgacccgcnatttgcaccgcgctgcaggattcggcacgagcaggcgtcaagctcaccgttgtgcgtggcaagtacgactgtggccacgtgcagaagaagtgacggctgggggcacagtgggctgggcgcccctgcagaacatgaaccttccgctcctggctgccacagggtcctccgatgctggcctttgcgcctctagaggcagccactcatggattcaagtcctggctccgcctcttccatcaggaccactattaagccataggagtcctgggggtgcaaagggtgcccctctgtcaacacccttggctcctgtgtttagaggggtggcctgaaggaccttttctgctgggacaagacactgtactgccctctgctgggaaggggttttaataaacagaccctggcgcttgtgatgtaaaaaaaaaaaaaaaaaaaaaaaa

SEQ ID NO: 21345 - DNA, 427 bp, Homo sapiens
  misc_feature (1)...(427): n = A,T,C or G
catgaccccctcnatagatccgcctgcaggaattccgcacgaggggactggcctttgaagctctggccagggatggggtgggggccaaaaggacagagcctggtatgtcttcatagtcattgagaatgtggagataccagtttgggtggggggtgatcaccaggggacctagggagatccccttcccaccctctctgttggcctcagagtcactcctgccccctctccctgacttggtgctcacatgcacctcactagggtttgtgaccagggtctggatgagcttgaatttgaatgaattgagtttgtatttctagaaccctgggtttttacatgtttggtctttttttgttttggtttgtcaccctcgataaaggaagtatattcatccaaaaaaaaaaaaaaaaactggggggggggcccgggc

SEQ ID NO: 21346 - DNA, 482 bp, Homo sapiens
cattgcccgccttgaagaattcggcacgaggtgaagttaaacttaagaacagttgggttttatcggacccagtacagctctgccatgctggaaagtttattaccaggcattcgtgacctttctctgccccctgtggatcgacttggattacagaatgacctcttctccttggctcgagctggaatcattagcactgtagaggttctaaaagtcatggaggcttttgtgaatgagcccaattatactgtatggagcgacctgagctgtaacctggggattctctcaactctcttgtcccacacagacttctatgaggaaatccaggagtttgtgaaagatgtcttttcacctataggggagagactgggctgggaccccaaacctggagaagtcatctcgatgcactcctgaggggcttggttctgggaaaactaggaaaagcaggacataaggcaacgttagaagaagcccgtcgtcggttt

SEQ ID NO: 21347 - DNA, 500 bp, Homo sapiens
  misc_feature (1)...(500): n = A,T,C or G
gcgcggtnnnnnnaattgatcgcctgaggaactcggcacgagcttccctggagaaaacatagtttcaaaaagcttttcttctcactctgatctgattacaggtgtttatgagggaggcttaaaaatctgggaatgtacctttgacctcctggcttatttcacaaaggccaaagtgaaatttgctgggaaaaaagtcttggatcttggttgtggatcaggtttactaggtataactgcattcaagggagggtccaaagaaattcactttcaagattataacagtatggtgattgatgaagtaaccttacctaatgtagtagctaactccactttggaagatgaagaaaatgatgtaaatgagccagatgtgaaaagatgcaggaaaccaaaagtaacacaactatataaatgccgatttttttctggtgagtggtctgagttttgtaagcttgtactaagtagtgaaaaactttttgtaaaatatgatctcattctcacct

SEQ ID NO: 21348 - DNA, 474 bp, Homo sapiens
  misc_feature (1)...(474): n = A,T,C or G
nattgccttgcatgcacgaattcggcacgagctcagtttatgtttaacagcacacagtggcacttctatgattcaaatacatttgataccctttgaaatcaatcagaatactgcaaaattaatttttctaaaacaatgcttttatcgttatttctcctgttgaatcatcagtacaatttccaaatgaaaacacttaaaataatctcatattacaatctttctctaacagaaccatgatgtaaggacagtgataacaaatatctgacaatgatatgattatttcctcatccatggaaattttccttaataaactaaagggctattttctaaaaagccaaagcattgcttacaagaacttttcatcatgacatggatagacactcagattcatacattcaaagggaagtgtcatgtattccctttcaatccaccctattctattggggtatcttcctaaattattttctatctacn

SEQ ID NO: 21349 - DNA, 472 bp, Homo sapiens
  misc_feature (1)...(472): n = A,T,C or G
nattgacttgcatgcgcgaattccgcacgaggtcggttgggtaggcagtcatggatcangtaatgcagtttgttgagccaagtcggcagtttgtaaaggactccattcggctggttaaaagatgcactaaacctgatagaaaagaattccagaagattgccatggcaacagcaataggatttgctataatgggattcattggcttctttgtgaaattgatccatattcctattaataacatcattgttggtggctgaatacattttggaagagagtttttcatcttagagattggtgaacaagtgtgagggtgtgagaaactcacagaatacaaatttgcctgtatgttttgtgggtttttttttttcctttcaagagggtttctatttctaaattaaagtaattcccaagtaaaaaaaaaaaaacggtggaggagctcaaccttggaaaaatggggggcattccttggatc

SEQ ID NO: 21350 - DNA, 487 bp, Homo sapiens
  misc_feature (1)...(487): n = A,T,C or G
ggatggctnnnnnntttgcccgcctgcttgaattcgcctcgagggagactgcagttgcagttgttccgtgtaggctgttcttgactctcgtatgaaagcccacgcgatccaagtgccctgcacgttttggtccagggaaaagttggtctctgcagatgactgtaaatgactacctggaggtcgattaaagtgcggtactgcgggattcaaccgatttccttcttcctctgactgcccggaaatatcagccaaaggccagcgttctaaggacatatggaattggctatggataattcatatgctttcaatcaacgaagcacatgtaatggaattccatctgagaagaaaaacaacttccttgtatcagaagatcatggacaaaaaatcttaagtgtactacagaattttagagaacaaaatgtcttttatgatttcaaaataattatgaaagatgaaataatcccgtgtcatcgttgtgtgttagcan

SEQ ID NO: 21351 - DNA, 465 bp, Homo sapiens
  misc_feature (1)...(465): n = A,T,C or G
agagcgtnnnnnttagggatggaggctacgcagagcgaagacttaggcacgctgcctcctggaacagctatgcagggagggaggacccacactgctacacttctgatcccctttggttttactacccaaatctaaatagatacttttgataatagataactgctcttttactaagacatagtctctacctatagaaatgtattttgaaaacacttattttacacagcaattttgtatccatttaaactaaccttttatcaataaagcactattgtttagatattattaaaaaaagaaaaaaaaaaacttggatggtttccagctcctccttggaaaaaagctacaagctgcctgacggccaggtgttgacctttggcaatgagcgagcccgctgccctgaggcacttttccaaccttcctttctgggcttggggtcctgggggatccccgaaactacctttaact

SEQ ID NO: 21352 - DNA, 470 bp, Homo sapiens
  misc_feature (1)...(470): n = A,T,C or G
nttgaccgcctgcggttaaattgtcctccttgnggcagcgtgggccaaattaaaacaaacaaaaccgcaactcctccacagaaacacaaacacagttattccatgaagtttagtatttggttgacatagtgctcttcaaattcatcccattaccctaaaagtaataactttgatgcttgctttaactttagtcccatctctgccactttgatgctatttgggttatgatggggcaagatggcagaggtattgggtttttttgtttttttccattcctctctacttctgtttcctagctttttctttctggagtttaagtacagtgatggttggcttgagtacctttttaaatctagcccagtataaacattagcctgcttaatatttagacatttataggtagaattctgagcactcaactcatgtttggcattttaaagtaaaaacaagtgtgacttcgaggaccaaag

SEQ ID NO: 21353 - DNA, 490 bp, Homo sapiens
  misc_feature (1)...(490): n = A,T,C or G
tggagggaannnnnntttgcccgcctgtttccaccgcctgcaagaattcggcacgagttaatttcctttgctactttccttagctcttcagtctcagtctcagccactgaaatgtgtcttggccactggtggtacagcacagggtgacactgttgtcagcgagaggaagatgctttttttttttttgaaagggagtttggctttgtggcccaggctgaagggcaggggggcatttttggctcattgaaccctccaccgcccggggttaaagcgattttccggtctaaccctcgggagtagctgggattacgggcccccacccccttgcccagttattttttgtttttttagaaaaaagggggtttggccatatgggccaggctgggtgaaaactcctgacctaagggggcccaccggcctgtgcctcccaaagggctgggattatagacttgacccactgcccccaaacgggaaaatgctttggtaaccg

SEQ ID NO: 21354 - DNA, 483 bp, Homo sapiens
  misc_feature (1)...(483): n = A,T,C or G
ggaaggtnnnnntttgcccgcctgctgaattcggcacgagagatgttaaccctggatccatctctaagtagagagagggtgcccattgcctaggtgagtgtgccaagctcaggattccaactggtgcctctgagcttcccaatcaatacttcctggagccagccccacccacccctgagaacagaggtcagacacagctgcgtaacatccatcctgctacaactcttccaccccaaacaaaagggctcaggctacacacgaccatgatttatgttttcaggggatgcccatttgtcccaagcttatcctgtaattctagaattacctggtgtcctgatgcattttccactagaggttgctaatcagcatgttttagcccaagtccaccttcctgctgtggttaacctgttatgttgcttttggaaggagactctcagacagggaaagcaagttcatggtacatacgcagccattgtctctgtt

SEQ ID NO: 21355 - DNA, 507 bp, Homo sapiens
  misc_feature (1)...(507): n = A,T,C or G
naggggnnnnnnnnacgngnnnnnnnnnntactgaccgatctgccgacttcggcacgaggcactttgggaggctgagggaggtagatcacctgaggtcagaagttcgagaccagccttaccaatatggtgaagccccatctctactaaaaatacaaaaattagccctgcatggtggcaggtgcctgtagtcccaggtactcgggaggctgagacaggagaatcgcttgaacctgggaggcggaggttgcagtgagccaagatctcgccactgcactccagcttgggcaatagcaagactccatctcaaaataaaataaaataaaacttagagcaaagtttaaaactgagtattcatattaagtgttttattttccatattagagatgggaagggaaccttatgtgtattttattttgctttcaaccatcaataaagttttctctagaaaaaaaaaaaaaaaaaaactggaaactagttcctcgggccgaattcggcacaaggggggg

SEQ ID NO: 21356 - DNA, 473 bp, Homo sapiens
  misc_feature (1)...(473): n = A,T,C or G
agaggggnttttncctaggactgataggcattcggcacgagaacagntactcagctgcttaagctggcccacaagtacagaccagagacaaagcaagagaagaagcagagactgttggcccgggccgagaagaaggctgctggcaaaggggacgtcccaacgaagagaccacctgtccttcgagcaggagttaacaccgtcaccaccttggtggagaacaagaaagctcagctggtggtgattgcacacgacgtggatcccatcgagctggttgtcttcttgcctgccctgtgtcgtaaaatgggggtcccttactgcattatcaagggaaaggcaagactgggacgtctagtccacaggaagacctgcaccactgtcgccttcacacaggtgaactcggaagacaaaggcgctttggctaagctggtggaagctatcaggacccattaccatgacagatacgatgagatccg

SEQ ID NO: 21357 - DNA, 321 bp, Homo sapiens
  misc_feature (1)...(321): n = A,T,C or G
gagggggnngnaattgaatagcatggcggtccgaattcggcacgagggttgactcttccatgagggcagaaccaggctggcaggaggggaggacggtgtacctgctgctcagagcccccaaggctctcctctgagagccaccaagcaggacagagcagctcttgtcccaggtccctcgggctgagcgccgtgtcaccaggagaatagtgctcacagcccaggcagggtgtgtggctcctggatgggctcgtggggcgggatgggacagggcacgggctctcagaaaataaactgctttattggaaaaaaaaaaaaaaaaaa

SEQ ID NO: 21358 - DNA, 473 bp, Homo sapiens
  misc_feature (1)...(473): n = A,T,C or G
naattgaccgcttgtangaccttgcacgaggggtaacagcctcttcccagcacccacctgccagccctgcttgcctggccctgtcctggacccagctttgctaggtctccttggaaaccaggcctgggcctcaaaatggagatggatcccaggtcttgtgggaccctgggatgtttggggactttactatctagcaccccagtaggcctgtcctggccagagaagactggtaggggccgagtggggtttgaaggcagccggcccggcccagcccaggagcgctatttattgcatatttattgtttggatgtcaccatcagagacgaagggaagggtagccagggagggagtccagcccagctgcctgcaggaagatctggctcagtctactatgggcagggccccccaccaagctgagccgaatggagacagctgagctgaggcctgactttttcaataaaacattgtgtagt

SEQ ID NO: 21359 - DNA, 500 bp, Homo sapiens
  misc_feature (1)...(500): n = A,T,C or G
cgcccccccgcnnngnnnnnattcgcccgcctgcaggtgaatgggaagttacgcgaagtccacccagcgtttctgaggcaatctgaaggcaaatcctgtttagacccaggcgaaggttcccggtgacccgggctctcaccagccaattgtcccttgccgtcctcctgagggtgcctggagcttaagcactgtgtgctcttggcctccacactggggatgccgctgactcccactgtccagggcttccagtggattctccgaggccctgatgtagaaacttccccattgggtgcaccaagagcagcctcacatggtgtgggctgacatcaagagctgccagatccaacaggaagatggccaatctttcctaagctgctcaccttacaagaaaacgaatcgtactgctaagaattcaaacttcagcagtcatggggagccttggaaggagcccgaatcactgatgngaattgacagtgcatgngagatggtcagcaggacaa

SEQ ID NO: 21360 - DNA, 470 bp, Homo sapiens
  misc_feature (1)...(470): n = A,T,C or G
agggcnnttttnataggctacagtggcattcggcacgagctcaatttatggaatgttctgctctggtaagttggatggaattctatctgatgctgttttaaaaacaaattatgtagaagccaaaccattttacttccctcactgtagaccacacatagcaacacagtctgtgtctttgttcatgtttttagaattccatcgacagagaggagaaaatacatctggggaatttgccgctgctctgagttccaaagtccaaaccaatgtaattgtttcggaataacggatgacacttttagcttgcaaacaaggggcgccaatgcgtgaattctggtaggaggtgaggcctaaggtgtacctatcataataagatcatatattttttgtagtgctttatataaatctacctataatcaagattacctangaagctaagtaaaaataaaacgcctctttgcttgaatcccatc

SEQ ID NO: 21361 - DNA, 493 bp, Homo sapiens
  misc_feature (1)...(493): n = A,T,C or G
tggaaaaaaaaantttgccacgccctgtttgactcgcgctgcatgagatacgtgcgagtggctaccatcggtgagtcccctgttaagccataccccctaaaggcctccacactgctgtttaacggcacacttgacaacggcttcaacagcacgcttgacaatgacgtgggaggaggtcacatgccctatctgcctggaccccttcgtggagcctgtgagcatcgagtgtggccacagcttctgccaggaatgcatctctcacgttgggaaaggagggggcagcgtctgtcctgtgtgccggcagcgctttctgctcaagaatctccggcccaatcgacagctagccaacatggtgaacaaccttatagaaatcagccaggaggccagagagggcacacagggggaacggtgtgcagtgcatggagagagacttcacctgttctgtgagaaagatgggaaggccctttgctgtgtatgtgcccagtctcagcaa

SEQ ID NO: 21362 - DNA, 493 bp, Homo sapiens
agagggacattgatcgcctgtggatagagccacgatggagatttgaaaaccaacttttccccttcggataagaacttccagcgttacctaaaaatgcaataaaaatctttatagtctaagcttcttggcatataatttttcatcagggttttcttttattaattgagcacaatactgttttgatttaatttttttccctcaaaccacccagctccttacatagtttttaattatatagctatctgaaagaggtggctaagacatttgctgcacacacttgaactaatgttgggtcagtagcttcgtgatactgccctgatcccactgtaattcaggtggaaaggtatttttatctcacagggatatgtagctatgtattttactaattgtgaaacactggaaattaatgatgcagacaacttggtgtggtctttgaacagctctctgcagtattttttttttcctgttaccataaattgtatttaagagcttg

SEQ ID NO: 21363 - DNA, 471 bp, Homo sapiens
cttcgattctccatcgcgctgcaggaattcggcacgagagcttgtttgtgtccctgtgggtggacgtggttggtgattggcaggatcctggtatccgctaacaggtcaaaatgcagatcttcgtgaaaacccttaccggcaagaccatcacccttgaggtggagcccagtgacaccatcgaaaatgtgaaggccaagatccaggataaggaaggcattccccccgaccagcagaggctcatctttgcaggcaagcagctggaagatggtcgtactctttctgactacaacatccagaaggagtcgaccctgcacctggtcctgcgtctgagaggtggtatgcagatcttcgtgaagaccctgaccggcgagaccatcaccctggaagtggagcccagtgacaccatcgaaaatgtgaaggccaagatccaggataaagaaggcatccctcccgaccagcagaggctcatct

SEQ ID NO: 21364 - DNA, 544 bp, Homo sapiens
  misc_feature (1)...(544): n = A,T,C or G
gagagctcggcgccttcgacggctgcaggaattcggcacgaggtaaaatttaggaccctgctagctgtgcagaacccaattgccctttgcacagaaaccaacccctgacccagcggtaccggccaagcacaaacgtcctttttgctgcacacgtctctgcccttcacttcttctcttctgtccccacctcctcttgggaattctaggttacacgttggaccttctctactacttcactgggcactagacttttctattggcctgtgccatcgcccagtattagcacaagttagggaggaagaggcaggcgatgagtctagtagcacccaggacggcttgtagctatgcatcattttcctacggcgttagcactttaagcacatcccctaggggagggggtgagtgaggggcccaaagccctctttgtggcttccccacgtttggccttctgggattcactgtgagtgtcctgagctctcggngttgatggtttttctctcagcatgtctcctccaccacgggaccccagccctgaccaacccan

SEQ ID NO: 21365 - DNA, 494 bp, Homo sapiens
cccccccattgatcgcccttaggattgaggcacgatctgatacttggcaatgagtaggcaattgctatgtgaaatatggggaaagatttctaagcaaagaaaaattaaaaaaagagagagattgtgatttgtggcatgtactcaaggaattaaaaaggttagtatgattggttggcataaaaagaacataggctagaatgaagttaagatgtaatatgtttacaatatgaagaaaatgtagtgaaaaaacttaataactgagaatgtttattttttatgcatcatattatgactatctaataaatattaaatgtatacataactacctatgatgcttaaataaatctattatttatttagttgatattttgaaatatgggactaatagtaattaacctgttatctgtcatgttctcatggtttaaattcctagtcccctaccatggagagcaatcatttaattgaaaatatttcctttaaactgtattttctaa

SEQ ID NO: 21366 - DNA, 468 bp, Homo sapiens
  misc_feature (1)...(468): n = A,T,C or G
nattgccttcgctgcacgaattcggcacgagaaaaggtggaatcccaaatgttgaaggtgctgccaaactgctgtggtctgagtggacaggtgcctcattagcttactattgccatccccctacatcttggactcctcctccatattttaatgagagtattgtggtagacatgaaaagcggcttcaatctggaagaactggaaaagaacaatgcacagagcataagagccatcaagggccctcatttggccaatagcatccttttccagtcttccggtctgacaaatggaataatagaagaaaaggacatacatgaagaattgccaaaacggaaagaaaggaagcacgaggagagggaggatgacaaagacagtgaccaggaaactgttgatgaagaagttgatgaaaacagctcaggcatgtttgctgcagaagagacaggggaggcactgtctgaggagactacag

SEQ ID NO: 21367 - DNA, 469 bp, Homo sapiens
  misc_feature (1)...(469): n = A,T,C or G
atttgccctctccnccgcgctgcaggaattcggcacgagcgggaccggagctgaggcaggaagagccggcgccatggtggagaaggaggaggctggcggcggcattagcgaggaggaggcggcacagtatgaccggcagatccgcctgtggggactggaggcccagaaacggctgcgggcctctcgggtgcttcttgtcggcttgaaaggacttggggctgaaattgccaagaatctcatcttggcaggagtgaaaggactgaccatgctggatcacgaacaggtaactccagaagatcccggagctcagttcttgattcgtactgggtctgttggccgaaatagggctgaagcctctttggagcgagctcagaatctcaaccccatggtggatgtgaaggtggacactgaggatatagagaagaaaccagagtcatttttcactcaattcgatgctgtgtgtctgact

SEQ ID NO: 21368 - DNA, 465 bp, Homo sapiens
  misc_feature (1)...(465): n = A,T,C or G
tgagacaaaattttgttgcgtcgcctgcggaattcggcacgagggagccggagccagagccagagctggaacccgaggctgaagcagaaccagagccggaactggagccagaaccggacccagagcccgagcccgacttcgaggaaagggacgagtccgaagattcctgaaggccagagctctgacaggcggtgccccgcccatgctggataggacctgggatgctgctggagctgaatcggatgccaccaaggctcggtccagcccagtaccgctggaagtgaataaactccggagggtcggacgggaaaaaaaaaaaaaaaaaaaaaaaaagaaaagaaaaaaaataaatttccgtggggggggggccgggccccaattcccccttaagggggggggataaaaatttcgggggcggggttttaaaacggggggggggggaaaacaaaaatcnanngttaatgn

SEQ ID NO: 21369 - DNA, 492 bp, Homo sapiens
  misc_feature (1)...(492): n = A,T,C or G
cccctttccccgcctgcggaantttgccccgcctgcgggtagtgcagtttttagaanaggacagcaccctcacggaaccagtggtgatggcacttctcacatactggccaaagactcacagtccaaaagaagtaatgttcttaaacgaattagaagagattttagatgtcattgaaccatcagaatttgtgaagatcatggaacccctcttccggcagttggccaaatgtgtctccagcccacacttccaggtggcagagcgagctctctattactggaataatgaatacatcatgagtttaatcagtgacaacgcagcgaagattctgcccatcatgtttccttccttgtaccgcaactcaaagacccattggaacaagacaatacatggcttgatatacaacgccctgaagctcttcatggagatgaaccaaaagctatttgatgactgtacgacacagtctcaagcagagaaactactagagaagctaa

SEQ ID NO: 21370 - DNA, 501 bp, Homo sapiens
  misc_feature (1)...(501): n = A,T,C or G
gccccccattgaccgcccttnngtttgcaccgcctgcaggaattcggcacgagccgcagagtgtccctacctcctctccagagcatcattcctttctatctgctgccagagccacggtgccatttactccaaggactcactttctaaaattccacacctggagtgacctctagtcgctcagcatccactttgtgtctccaaattgtgtaggactctgtaatcttttgattagtttctgagaaaacacaatgaagcacttcacttttttttattcaaagccatttaataaaacacagttggtcagcccagtgcaaagcttgttatctgccaccagtacataccattggttctcttcattccttgggccagcttctcaggtggctttagacctcaacaagccgtatcttcaccagtgttctatcttgttcccctaaattaataaaatgtttttctccaggaaaaaaaaaaaaaaaaaaaaaaaaaaaaaaaacctgggggggg

SEQ ID NO: 21371 - DNA, 488 bp, Homo sapiens
aggaaaaaaattaggaaagcctgttttccaccgcgctgcaggaattcggcacgaggagatcacctcactgcctctcatttgccttacccagacgcaccgtcaccctgcaccagctttggccctcagcactttttttctcctgtctccgcattccctcccccttgaaaacctgactgaggagacattctggaaggttccggtcccactgtgtgtcccctggcgctcttgcccatagagagccagacaccaatcctcaatggcaccttggtggcttccctctgccatgacagcccctaggccaggaaccatcaggggggccagccggcatccaattcctgcggataagtagcgttgggagagaacgggaaaggggacttgggttacagggtgacccagaaagacgattcagctgtgtccagcctgccacccatacgtaggccaaccaagcacttcatgaagaggaggcctcgtggcatattcagtttacc

SEQ ID NO: 21372 - DNA, 500 bp, Homo sapiens
gccccccattgacccgcgctgcaggaatttggcacgagcttgggcgcaccactcatcctgccacccccagaatgcatcctgcctcatcaggtccagatttctttccaaggcggacgttttctgttggaattcttagtccttggcctcggacaccttcattcgttagctggggagtggtggtgaggcagtgaggaagaggcggatggtcacactcagatccacagagcccaggatcaagggacccactgcagtggcagcaggactgttgggcccccaccccaaccctgcgcagccctcatcccctcttggcttgagccgtcagaggccctgtgctgagtgtctgaccgagacactcacagctttgtcatcagggcacaggcttcctcggagccaggatgatctgtgccacgcttgcacctcgggcccatctgggctcatgctctctctcctgctattgaattagtacctagctgcacgcagtatgtagttaccaaaagaat

SEQ ID NO: 21373 - DNA, 473 bp, Homo sapiens
  misc_feature (1)...(473): n = A,T,C or G
tggggtnnaggaagncccctttgaacccactgatcgcctcggattgcgacagaagagacatggcttatcattcctgcccgcgggggccatcaccggcgacagcggtggagagctgagctcaggggacgactccggggaggtggagttcccccatagccctgagatcgaggagaccagttgcctggccgagctgtttgagaaggctgccgcgcacctgcaaggcctgattcaggtggccagcagggagcagctcttgtacctgtatgccaggtacaaacaggtcaaagttggaaattgtaatactcctaaaccaagcttctttgattttgaaggaaagcaaaaatgggaagcttggaaagcacttggtgattcaagccccagccaagcaatgcaggaatatatcgcagtagttaaaaaactagatccaggttggaatcctcagataccagagaagaaaggaaaagaagcaaatn

SEQ ID NO: 21374 - DNA, 469 bp, Homo sapiens
gaaaaaattgacgctgttcaccgcctgcagaagacgcctatgagcagggaccgtactgctctgtacaagacctttaaacacctcttcaagaaacttagtctttgcgcagctgctaaccttactgcaatatttattttcccttatttttccatactacttagtagacaaatggcgatcaagctcacttgttctccctctctctgtctcccccccatgtacacatatatatatcccttcagcttgacttgctattatttttcattgcataaatatgaaattcttggcatcacaatgatggcattagtttagggaaaaaatatgtaggacactagagaaaaatgttaatttttttcccactgtgaattgccttctgtttgccttatcttttcagatagtctttaaagttgggcaatattcaggcagctatttagaacagtttctcagagtggatttgggtctctcatttgag

SEQ ID NO: 21375 - DNA, 501 bp, Homo sapiens
  misc_feature (1)...(501): n = A,T,C or G
cgcgggcaccttcatcggccttcngattgcnncgcctgtcggaattcggcacgagtgccaccgtatagcaaagggtgaacatgttttcaaccctttaactttttacggtgtttgaagaccagctactccttaatatttatcaatggattaagaagtttaagattttgcagatttatcaatttgggtttttgtactgaagttgtcttgcggctttgcaagtgtccctttatatttaaatttgaaagttgtaagcactgatgttaatgtgattgatcagcatgggcatatgtaaaatgtccttttctggttgcctctctatgctattgtgttcagatacttacaccataattaaacagtaagttatagacttgctgagtttggcatagatagtgcactcatttaatctgtgcctctcaaaacttcagaatattagcatattaccacaaataatttttggtgaaactattgagatattaaaatttttgaaatcactactgttac

SEQ ID NO: 21376 - DNA, 509 bp, Homo sapiens
  misc_feature (1)...(509): n = A,T,C or G
atggttctatgctatctgtangcttcggcacgagccgactgctgtggacgcccaccgaggagcagtggccctctatgaccaagctgccagactataagccctatccgatgtacccggccacaacatccctggtgaacgtcgtgcccaaactcaatgccacagggagggatctgctgcagaaccttctgaagtgtaaccctgtccagcgtatctcagcagaagaggccctgcagcacccctacttctccgacttctgtccgccctaggccccgggacccccggcctccaggctggggcctggcctatttaagccccctcttgagaggggtgagacagtgggggtgcctggtgcgctgtgctccagcagtgctgggcccagccggggtggggtgcctgagcccgaatttctcactccctttgtggactttatttaatttcataaattggctcctttcccncnnnnnnnnnnnnnnnnnnnnnnnnnnnnnnaaaaaaaaaaaaaccggggg

SEQ ID NO: 21377 - DNA, 494 bp, Homo sapiens
aggggcatttgctcggctgcggatagcggcacgagcctactactgcgggacttgtggccgctggttccgcgccatggcgggcttgcgactgcatcagcgggtccatgcccgagctcggactttgacgctacagcctcccagatcaccatctcctgccccacccccacctccagagcctcaacagactatcatgtgcacagagctgggggagaccatcgccatcattgagacatcccagccactggcgcttgaggacaccctgcagctgtgccaggctgcactgggggccagtgaagcaggcgggctcttgcagttggacacggccttcgtgtgacgcagctgaaaagcaacaacaaaagggtttggttgcaacagccagtgtgggtacctctggggagagaggacctcctctgacaaactggtctggtacccaccatgtgccaggatccaccctggcctctttttacccactgactccccagaacaacccttcc

SEQ ID NO: 21378 - DNA, 499 bp, Homo sapiens
  misc_feature (1)...(499): n = A,T,C or G
ggcgggcccccaattgacgcctgtngatgaccggctgtggaattcggcacgaggtggtgtggcagcgggagtggcagtcctggacaacccataccctgtgtgagggcacaaccaggccacgggaccttctatcctctgtatttgtcattcctctcctagccctcctgaggggtatcctcctaaagacctccaaagtttttatggaagggtaaatactggtaccttcccccagctttccatctgaggaccagaaaagttgtgtctcccttagatgagatctagacgcccccaaatccttgagatgtgggtatagctcacggtaagctgctctgaggtaaaggtccatgaaccctgccccactcctgtcagcccctcatcagccttttcagcaggttccagtgcctgacttgggataggactgagtggtangaggagggggagtggaggggcatagcctttccctaattctgccttaaataaaactgcattgctgattcaa

SEQ ID NO: 21379 - DNA, 469 bp, Homo sapiens
  misc_feature (1)...(469): n = A,T,C or G
agggaaannnncctgacctgatgcgcctgaggaatncgcgacgagagctgatgcatggcatcaaggaccctgacctgaaagaaatgacagatgccaccactgaggatgatacagaaataaaagaagacactaaggcccccagtcccaagcggaaggtggaagaaccagttctggagttcaggcctccccgaggagcattcactcaaccactgaaaaagctgaaaatcaatgtttttaaggttcacaagtgcgctcgtgcgtggcttcaccaccgaaaacctgctgcaatttcacgaacacatccctcagcacaaatcggatggttcttcctaccagtgccgggagtgtggcctctgctacacgtctcacgtctctctgtacatgcacctcttcatcgtacacaagttaaaggaacctcagacagtgttcaagcaaaatggggctggggaagataaccaacaggagaact

SEQ ID NO: 21380 - DNA, 480 bp, Homo sapiens
gagaaaaatttgcccgcctgcttgaattcgcctcgagcacatacgcacgggccttgagctgtcgctgccgtggcaccccttctagaagtcgtgaaggggcctcgtgactgggcctcatgccaaacaactcattacacacggagctatggccccagaccactacgaagcttcatgagacctctcctcatctgtgcacggacaagtgtctgactctggagcccaggctgttgctttacagtctggcggtgaatccttcacagtctggcgaaatctgtaacttcacatgttggctcaccagagcactattaagagagataatcatcagcaatatccacacaaattgcattccttaaagcaaaccaattgctttgaaggtaagcgaaatgattcttcacggagaagtaccaaaatgtccactatgtggtgctgctgtacctgaattacacaaggagggtaaaacagtacactgtacccctgatt

SEQ ID NO: 21381 - DNA, 475 bp, Homo sapiens
  misc_feature (1)...(475): n = A,T,C or G
gtggcggnnnnnaggggaaattgaccgcgntgaggaaattgacacgcgctgcaggaattcggcacgagcagatacctgctccagtagttgtgaggccactgtgtctcatgggactccaggaagagcagaagagggatcccacgaagttatttttatgcagctggggccaggagggtcagagtggtgccaggtgcaagttaggctaaagaagccaccactattcctctctcttgcccattgtggggggcaaaggcattggtcaccaagagtcttgcagggggacccacagatatgccatgtccttcacacgtgcttgggctccttaacctgaaggcaaattgctacttgcaagactgactgacttcaaggaatcagaaattacctagaagcaccatgttttttctatgaccttttcagtccttcaggtcattttaaggtccactgcagggggttagtgagaaagggtatactttgt

SEQ ID NO: 21382 - DNA, 495 bp, Homo sapiens
cggcgtccaatcgcggcgtggaattggcacactagttagtgcctctaaaatacccaacaaaaaatgattcaaagatgtgatagaagacagttttcacaaatgaagggattctccagtttgtacatcaaagggactcactatatcaagaaaataattgaatgaattggagttgtagaacaatgtaaataaaaactaatacaagcaatggaagttgaacagtgcagggaggagaagtgaagaaaatataattgtacccttcatatcccagctattctagctgtccccagatactgagcctgttgggtacaatctctttggggaataagttttaaacgaaatcctacatctcaaaccatgagttcccaccttacacctagcccctttcccctggttggcccaaagtactgggagccaggcttataccatctaggcagaatattgaaatatttctttcgagggaaaatggtactgacattttgggattctctaaaggaa

SEQ ID NO: 21383 - DNA, 473 bp, Homo sapiens
  misc_feature (1)...(473): n = A,T,C or G
ntttgatccgcgctgcaggaatttggcacgaccaggtgctggccagcctggagctgcaggatggtgaggacgagggctacttccaggagctgctgggctctgtcaacagcttgctgaaggagctgagatgaggccccacaccaggactggactgggatgccgctagtgaggctgaggggtgccagcgtgggtgggcttctcaggcaggaggacatcttggcagtgctggcttggccattaaatggaaacctgaaggccatcctctttctgctgtgtgtctgtgtagactgggcacagccctgtggccggggggtcaggtgagtggttgggtgatgggctctgctgacgtgcagggctcagcccagggcatccaggaacaggctccagggcaggaacctgggcccaggagttgcaagtctctgcttcttaccaagcagcagctctgtaccttgggaagtcgcttaattgctctg

SEQ ID NO: 21384 - DNA, 504 bp, Homo sapiens
  misc_feature (1)...(504): n = A,T,C or G
agagcaggcccncaatagaccgcctgcagtcgagatccgtagctgaaccaagcctcttcaaaagcagagtggactgcatttaaatttgatttccatcttaatgttactcagatataagagaagtctcattcgcctttgtcttgtacttctgtgttcattttttttttttttttgggcaaaagttcccactatcccaatcaaaaaataacagtccacatccccaaaatccaaaaaggggtcccggccccactctgtaatagttcagaaaaataaccattatttccttccaaattttccctatccccaaaaggcaaaaaacacctggccatttttatattttacagaaaaaaaaattttgtggttccattttatgcaaaaccaaattttgcgtggtgaaaaaataataaggcaaacagttttctaccaattttttttgttttttttaacaacatggcctttgctggactctggctgagggcggaaaatttaaattaattggtcccc

SEQ ID NO: 21385 - DNA, 469 bp, Homo sapiens
  misc_feature (1)...(469): n = A,T,C or G
gtgcannnaantttgatttgcatcgcctgcaggaattccgcacgaggaaagatgtagtggcctatgttgaagtgtggtcatccaatggaacagaaaattattcaaagacatttacaacacagcttgtggaaactcaggatgtggaaatcaggaaaggaagttggaaggatccattaatgacattaaaagtgatgtgtgtatttcttcacttgtattgaaagcaaataatattcattcatcaccatctttcactcacctcgataaatcaagtcctcagaaatttctgagtaatctttcaaaggaagaaataaacttgcaaagaaatattgcaggtaaagtagtcacccctcaccaaaagcaggctgcaggtatgtctcaggagacgtttgaagagaagtatcgtttgtctcctaccttatcttcaacaaaaggccaccttttgatacattcaagacccaggagttcctca

SEQ ID NO: 21386 - DNA, 447 bp, Homo sapiens
  misc_feature (1)...(447): n = A,T,C or G
tgtggggaannnnaattgcccgcctgaggaatccggcacgagggaagatcaggaagacatgaacgaattgatgaagaagcacaaggctgccgtggctcaggcttcccgggacctggctcagataaatgatctccaagctcagctagaagaagccaacaaagagaagcaggagctgcaggagaagctacaagccctccagagccaggtggagttcctggagcagtccatggtggacaagtccctggtgagcaggcaggaagctaagatacgggagctggagacacgcctggagtttgaaaggacgcaagtgaaacggctggagagcctggctagccgtctcaaggaaaacatggagaagctgactgaggagcgggatcagcgcattgcagccgagaaccgggagaaggaacagaacaagcggctacagaggcagctccgggacaccan

SEQ ID NO: 21387 - DNA, 484 bp, Homo sapiens
  misc_feature (1)...(484): n = A,T,C or G
attgcccgcctgcggaattcngatcccccggctgcaggaattcggcacgagcagggacaccttgtacacgatgctgataaagtgggtcaacaaaaccgggcgagatgcctctgtccacaccctgctggatgccttggagacgctgggagagagacttgccaagcagaagattgaggaccacttgttgagctctggaaagttcatgtatctagaaggtaatgcagactctgccatgtcctaagtgtgattctcttcaggaagtgagaccttccctggtttaccttttttctggaaaaagcccaactggactccagtcagtaggaaagtgccacaattgtcacatgaccggtactggaagaaactctcccatccaacatcacccagtggatggaacatcctgtaacttttcactgcacttggcattatttttataagctgaatgtgataataaggacactatggaaatgtctggatcattccgttt

SEQ ID NO: 21388 - DNA, 484 bp, Homo sapiens
  misc_feature (1)...(484): n = A,T,C or G
agggcnggnnnnnnnnngttcgaccgcctgcggaattcgatgaagaccatattggttgcctctgcctttgtgatcctgagtccagaatggtacacaatgtgattttatggtgatgtcactcacctagacaaccagaggctggcattgaggctaacctccaacacagtgcatctcagatgcctcagtaggcatcagtatgtcactctggtccctttaaagagcaatcctggaagaagcaggagggagggtggctttgctgttgttgggacatggcaatctagaccggcagcagcgctcgctgacagcttgggaggaaacctgagatctgtgttttttaaattgatcgttcttcatgggggtaagaaaagctggtctggagttgctgaatgttgcattaattgtgctgtttgcttgtagttgaataaaaatagaaacctgaatgaaaaaaaaaaaaaaaaaactcgggggggggcccggcacccaa

SEQ ID NO: 21389 - DNA, 467 bp, Homo sapiens
  misc_feature (1)...(467): n = A,T,C or G
aggatannnnnactgattgcgatcgcgatttccgcacgagtttggcttcaagaaacacgttgtttaacttaagcaattttttggataaaagtggattgcatggatatgacatgtctacatttattaggcggtatagtagatatttaaatgagaaagcagtttcatacagacaagttgcatttgatttcacaaaagtgaagagaggggctgatggagttatgagaacaatgaacacagaaaaactcctaaaaactgtaccaattattcagaatcaaatggatgcacttcttgattttaatgttaatagcaatgaacttacaaatggggtaataaatgctgccttcatgctcctgttcaaagatgccattagactgtttgcagcatacaatgaaggaattattaatttgttggaaaaatattttgatatgaaaaagaaccaatgcaaagaaggtcttgacatctataag

SEQ ID NO: 21390 - DNA, 445 bp, Homo sapiens
  misc_feature (1)...(445): n = A,T,C or G
cctgggcnnnannaattgaccgcctgaggaatctctcacgaggctttttcactgactggctactgaagagcaaggcagagctgggtggcatctcagaactggcatctggacctccctaactgggccccgctggtcccatttgctcattagaatttcctctcacatcagtgggatacagaattcagtttctcccttgccaggtccttgggatggttgacccctgcctctgcagtagccttttgtgagtctgctaaggtagctctcacacacctcggctctggggttgatacctgagcctgcaatagagccctgaaatcaagagcatggcttgagtgtgtgaatatgatgtgtgcacatgcttaatgagcgtgcaagtgtgcacacgtttgtggagaggagggtgttctggcctgagaaggtaaagaagaggcatgtccagtatgcn

SEQ ID NO: 21391 - DNA, 301 bp, Homo sapiens
  misc_feature (1)...(301): n = A,T,C or G
cgagggggcccccncaattgacnccctttgacccccgctgcaggaattcggcacgagcaggtgcaccaccacacctggctaatttttgtattttttgtaaagaggggggtctcactgtgttgcccaggctggtctcgaactcctgggctcaagcggtccacctgcctccgcctcccaaagtgctgggattgcaggcatgagccactgcacccagccctgtattcttattcttcagatatttatttttcttttcactgttttaaaataaaaccaaagtattgataaaaaaaaaaaaaaaaaa

SEQ ID NO: 21392 - DNA, 513 bp, Homo sapiens
  misc_feature (1)...(513): n = A,T,C or G
aagtgtnacattgaaactcgatggccgtangattcggcacgaggagctgtgatgcccacttcactcgggtgcctggtgggccctacctgggcacctgctctggttgcagttgcaatggccatgccagctcctgtgaccctgtgtatggccactgcctgaattgccagcacaacacggaggggccacagtgcaacaagtgcaaggctggcttctttggggacgccatgaaggccacggccacttcctgccggccctgcccttgcccatacatcgatgcctcccgcagattctcagacacttgcttcctggacacggatggccaagccacatgtgacgcctgtgccccaggctacactggccgccgctgtgagagctgtgcccccggatacgagggcaaccccatccagcccggcgggaagtgcaggcccgtcaaccaggagattgtgcgctgtgacgagcgtggcagcatggggacctccggggaggcctgccgctgtaaggcaacaagactga

SEQ ID NO: 21393 - DNA, 445 bp, Homo sapiens
  misc_feature (1)...(445): n = A,T,C or G
cgtgggtaaannnaatgaccgcctgaggaatctcgcacgagggggaagcggagccaacatgccagtggcccggagctgggtttgtcgcaaaacttatgtgaccccgcggagacccttcgagaaatctcgtctcgaccaagagctgaagctgatcggcgagtatgggctccggaacaaacgtgaggtctggagggtcaaatttaccctggccaagatccgcaaggccgcccgggaactgctgacgcttgatgagaaggacccacggcgtctgttcgaaggcaacgccctgctgcggcggctggtccgcattggggtgctggatgagggcaagatgaagctggattacatcctgggcctgaagatagaggatttcttagagagacgcctgcagacccaggtcttcaagctgggcttggccaagtccatccaccacgctcgcgtgctg

SEQ ID NO: 21394 - DNA, 535 bp, Homo sapiens
  misc_feature (1)...(535): n = A,T,C or G
cgtgtcggaagcactgaaancncngagaacttgcntcctggcttttgttttttgtatcaagagattgtgatataaaacagcagaagataaatggaaacctttcattttaacttacgttgtttctggggtaatgttagaaccttgaaagatgcattcaaagactgtatcttattttgcccttggctattagtgtctcacatatgtgtgtaaatgttttcctaccttctttttgctcagcaaaggcaagcaagtaaaatatatttgctaagtgattagtgatgcacatttggggctagatttttttggtacttttatgtaaagaaaagtggattttgcagtaagggattggcatgagcaggcgtcagaatcacaatcatgattttctacttgaataattacaattcagaaggtatctggataaatagatacatgtctagtgaacaatttgtaacaataacaggtaaggatcacgaaattcagtattcagtttgtcagatttgccagaatgatgaaagtatttgaacatgtgtgtttn

SEQ ID NO: 21395 - DNA, 512 bp, Homo sapiens
  misc_feature (1)...(512): n = A,T,C or G
aggcgtnacattganctctgtaggacttcggcacgagtggaagcctgccgctgccgggcagaggagctgggccgcggcatcgccttgttccaagggctttccaacatcgccttcaactgcatggtcttgggtaccctatttattgggggctcccttgtggccggacagcagctgacagggggagacctcatgtccttcctggtggcctcccagacagtgcaaagcttcctccgtgttgcaccctgtccgaattcccttccgctgcaggctgtgacactccatgcatggaaggaccatccttgacaggctgtgtgagctgcccttccccatgcctgccacttccagggatgacaagctgacccctgtccccacacaccccacccttatagcttattgctttgcgttggtccaaaaccacccgctcagctgagcctctgggatgaccagagctgatcaccagacagctcaaggcgggcctcccccctcctatctctttccaagctaaacacaan

SEQ ID NO: 21396 - DNA, 452 bp, Homo sapiens
  misc_feature (1)...(452): n = A,T,C or G
attgaccgcctgcggaattcgtgcgagccactgcgcagaccagacttcgctcgtactcgtgcgcctcgctttgcttttcctccgcaaccatgtctgacaaacccgatatggctgagatcgagaaattcgataagtcgaaactgaagaagacagagacgcaagagaaaaatccactgccttccaaagaaacgattgaacaggagaagcaagcaggcgaatcgtaatgaggcgtgcgccgccaatatgcactgtacattccacaagcattgccttcttattttacttcttttagctgtttaactttgtaagatgcaaagaggttggatcaagtttaaatgactgtgctgcccctttcacatcaaagaactactgacaacgaaggccgcgcctgcctttcccatctgtctatctatctggctggcagggaaggaaagaacttgcatggtggtgan

SEQ ID NO: 21397 - DNA, 472 bp, Homo sapiens
  misc_feature (1)...(472): n = A,T,C or G
ggatgataccctggaaanncacatangtccttgcgganggacacacacggnttatgtcgntaatatcagttttcacctgagtgctggagaggacaagattaaagtcattagaagccttgaggatgagccaaggttggtgctttgggcccttctagtttacaatgctaccaacaatactaatttagaaggaaaaatcattcagcagaagctcctaaaaaataatgagtccttggatgaaggcttgaggctacatacagtgaatgtgagacaactgggtcattgtcttgccatggaggaacccaaaggctactactggccatctatccaaccttctgaatacgttcttccttgtccagacaagcctggcttttctgcttctcggatatgtttttacaatgctaccaacccattggtaacctactggggacctgttgatatctccaactgtttaaaagaagcaaatgaagttgct

SEQ ID NO: 21398 - DNA, 457 bp, Homo sapiens
  misc_feature (1)...(457): n = A,T,C or G
cgcccgccccatcgacccccctnnatagaccccggctgcaggaattcggcacgaggatcatagaacttttatttagatggaatcattgcgaattacatagaagctaccagcctaagccaaacccatgagggtcatgtgaacttacaggtacacaaataagaaacaaatggtacatccaaaaccataaggaaatattctgatgcccagatgatgaagactggggtgaattaagtccacacatttatttcaagttgttaaagagtttgtgggccacgcaatggaccctcgcatgctagaagtcaaagagctcctccgtgcaatcctcttctgtatgtgatcgagaggatacacgctcatcacagagctctagccgctcccgggcctttacacatttctccaactgctcgcattgctctctcactgttgttaggggatccgagcagaaggccagctggcn

SEQ ID NO: 21399 - DNA, 472 bp, Homo sapiens
  misc_feature (1)...(472): n = A,T,C or G
ntttgcactcgtgagcaattcggcacgagcttccgagtgtcatagtaaacaagaactggaggctgatgtcagccataaagaaaccaaaaggaaactcgtagaagcagaaaattctaagtcaaaaagaaagaaaccaaatgagtattcaaaaaatctggagaagaccaataggaagtcagaagaacttagcaaaagaaacaactcttctgggataaagctagattcttccaaagattctggaactgaagacatgctttggacagaaaagtatcaacctcagactgccagtgaacttataggaaatgagttagctataaaaaagttacatagttggttgaaagactggaaaagaagagctgaattggaagaaaggcagaatctgaagggaaaaagagatgagaaacatgaagatttctcgggtggcatagactttaaaggcagttcagatgatgaagaagagagtcgtctttgc

SEQ ID NO: 21400 - DNA, 495 bp, Homo sapiens
  misc_feature (1)...(495): n = A,T,C or G
ggtncnnnaggangtnccaggnngtnnnnnnngttgatnnccccttgaccgcctcgcagaattccgcacgaggagaactcttggccaaaggtttttggggggaggaggaggaaaccagctttctggttaaggttaacaccagatggtgcccctcattggtgtccttttaaaaaatatttactgtagtccaataagatagcagctgtacaaaatgactaaaatagattgtaggatcatatggcgtatatcttggttcatcttcaaaatcagagactgagctttgaaactagtggtttttaatcaaagttggctttataggaggagtataatgtatgcactactgttttaaaagaattagtgtgagtgtgtttttgtatgaatgagcccattcatggtaagtcttaagcttgttggaaataatgtacccatgtagactagcaaaatagtatgtagatgtgatctcagttgtaaatagaaaaatctaattcaataaan

SEQ ID NO: 21401 - DNA, 464 bp, Homo sapiens
  misc_feature (1)...(464): n = A,T,C or G
nttggccccgcgctgcaggaaanncctctgcacccggctgcaggaattcggcacgagctcctgtcaacagcggccagcctcccaactacgagatgctcaaggaggagcaggaagtggctatgctgggggtgccccacaaccctgctcccccgatgtccaccgtgatccacatccgcagcgagacctccgtgcctgaccatgtggtctggtccctgttcaacaccctcttcatgaacacctgctgcctgggcttcatagcattcgcgtactccgtgaagtctagggacaggaagatggttggcgacgtgaccggngcccaggcctatgcctccaccgccaagtgcctgaacatctgtgccctgattttgggcatcttcatgaccattctgctcatcatcatcccagtggtgtcagccaggcccaacgatagatcaggacgcatcattganggcaagagctcttgc

SEQ ID NO: 21402 - DNA, 475 bp, Homo sapiens
  misc_feature (1)...(475): n = A,T,C or G
agggcttaaatgagccgatgatggcatgagaagnggcgncgncggcctccaggacgaggcagaccccaacttccagctcgccctaaacttcgcctggtccaacttcagatttcatcgtttcttggatgtcaacagccacaaaatagaaaaaacaatcgaaggaatttatgaaaaatctggcattcattctgatctaagcaaagctgctagttggaagagattaacggaggaatttctaaatgcaccacttcccagtataaaggaaataaagacagatgcacattattccatactgtcacttcttctgtgtctgtcagactctccttcaaacagcagttatgtggagacaccaagaaataaagaagtggaaaagaaagatgatttcgactggggaaaatacttgatggaagatgaagaaatggacattggtccgtacatggacacaccaaattggtctgaagaaagtgaagaggaa

SEQ ID NO: 21403 - DNA, 511 bp, Homo sapiens
  misc_feature (1)...(511): n = A,T,C or G
acgggggttnnnaattganattcgatngctgtacgaaancggcacgagctggttagttgaaggacattgtgatttgactctggtcacgcgaggaagtagaagggcatagacaggaccggcagtttacatttccagtggttaaacctcacggtactttgggactgcttgttaacttttgtggttgtctgaggccaatctaacgtgaccatttctgacacctcaacagagagaggaaagcaacttgagcaatgagagtaaataacttgggctctcagagatttgaagatagagatctcattgtgagggggactattttgcaggtcctcatttctccaagaaagagatggtgttacaggaacccactgaaagccatatcccattaaatgaggaactaattttggctgggccttcttgtaatgtcctcgcaggtgtgttgtgaagattaatgcagggtagtatgtttgtagattgacacctagtctaaacttgaggtaattggtgctctgtgaat

SEQ ID NO: 21404 - DNA, 471 bp, Homo sapiens
  misc_feature (1)...(471): n = A,T,C or G
nattgacatcgccnccgcgctgcaggaattcggcacgaggtggagtccaccctggctgtggacctattcaaactcagtctgtctcttgactggaggaggagaaggaaaagttgagcacattgccaaccggagttccccaagaatggcaagttaaaaccaaagtgtcagcacctcaacaacatttttttttggcttaacaaaacatcaaacggcatacaaatgatgggactgtctagttgcaggaaaacaagctcaggcctcctgctgatcctattttatggcagaaatccacaatggaggggaactctgtgactttatggaaaatggagaaatcttcagtgaacactcatgccttaatgcacacatgggaactgaaaatacaggggacacttatgactgtgatgagtatggagaaaactttcccatgttacacaacagtgcccctgctggagagacactttctgtgttgan

SEQ ID NO: 21405 - DNA, 495 bp, Homo sapiens
  misc_feature (1)...(495): n = A,T,C or G
ggtggtgnnaggggggggnaaaggacccgcctgtaggaattcggcacgagctcacttttgttgactgccaacatacaaagtaagggaaactcaagatattaagatggctgtatcagttcttaaaatctgcagagcctggttcaaaatcagtcactcccttcagaagcagacatggcatctgttccttgcttgcttgttggttgtgtacctttcacgagacctgaattttagaattgcccagtgctgccagagtgagtgagtgtaattctcctttcaggtaaagataggctatctcaacactgctgagtgattcataaacatatcaaccaatagcattaacccattttatttcctgtccttagtggctgaagatgctcaccagttttctgtgtacagtaaggcagcatgctaaaatgcttttggtcaggtctgtataatttgaaatagcagcgtgttctctgatgttacctgcagggcaccctggacaaaaataaa

SEQ ID NO: 21406 - DNA, 493 bp, Homo sapiens
  misc_feature (1)...(493): n = A,T,C or G
ggggnnnnagggagttncccggntttnnnnaacatcgaccgccctaggacggctttctggtctcggccgcagaagcgagatgacgataggaacgtcatcgtttggaaagcgtcgcaataagacgcacacgttgtgccgccgctgtggctctaaggcctaccaccttcagaagtcgacctgtggcaaatgtggctaccctgccaagcgcaagagaaagtataactggagtgccaaggctaaaagacgaaataccaccggaactggtcgaatgaggcacctaaaaattgtataccgcagattcaggcatggattccgtgaaggaacaacacctaaacccaagagggcagctgttgcagcatccagttcatcttaagaatgtcaacgattagtcatgcaataaatgttctggttttaaaaaatacaaaaaaaaaaaaaaaaaaaaacctcgggggggggccgggcccccattcccccttatagggagcggaataaa

SEQ ID NO: 21407 - DNA, 478 bp, Homo sapiens
  misc_feature (1)...(478): n = A,T,C or G
ngagtgattcgacgctgttcgcacggctgcaagtctgtgtgaagtcgcgcggcttccacccacgcagtgttctaagtgaaggccagaaactcgctcgccatgtcggctgcagaggcggggggtgttttccacagagccaggggcaggaccctggccgcgtttcccgcagaaaaggaaagcgaatggaaaggcccattctacttcatcctgggcgcagacccacagtttgggctgataaaagcctggtccactggggactgtgacaatggcggtgacgaatgggaacaggagatccgtctaactgagcaagccgtccaggccatcaacaagctgaaccccaaacccaaattcttcgttctgtgcggcgacctcatccacgccatgccagggaagccgtggcggacggagcagacggaggacctgaagcgagtgcttanggcagtggacagggccatcccactggtccttgtcagcggca

SEQ ID NO: 21408 - DNA, 399 bp, Homo sapiens
cgatgtcgtggactgccgcgactacgctggcgtccggcatgcacgtgttcctggttttagaatatttaccatgatgctttaaagaagatgaaaaatgggctaatgtttgtaaaactggttaacccctgttcaggagaaagagccatttacttgttcaatatgtgtctacagcagctcgtttgaagtaaagagttatcaaggaaaaacaccattcttggtttataaatcaatcagttcaatcaggaggtcttctccattttgccacacctgtggatcctctatttctgcttctccactacctcataaaggctgataaggaggggaagtttcagccccttgatcaagttgtggtggataacgtgtttccaaattgcatcttgttgctgaaacttcctggag

SEQ ID NO: 21409 - DNA, 450 bp, Homo sapiens
  misc_feature (1)...(450): n = A,T,C or G
attgcccggctgcggaattcgtccgagggaagctaggggagctgctgtggcccagggctcagtggggaggaagaggaggccaggagtcttggactagctgcagggtttgagctaggctgaagcagcaaaaccacagaggtggctgagcaggggcctggccctgggacccagccatccacactcacacatccacttctccctccagagcccggccctgaagcaggtctctgctccacgcttttccttagttggggaatcgagagttgggggatcaaagccccccacatctccctcacccgctgcagctatgtttatcaaggtgatgtttggggctggctgctcggtgctggtgaacacctcttgcaggctggtgaacctcaccgcccacctgaggcagaaagcagggttgcccccagatgcgaccattgctctcctggctgaggatggcan

SEQ ID NO: 21410 - DNA, 501 bp, Homo sapiens
  misc_feature (1)...(501): n = A,T,C or G
aggcgnnatnnnnttttctagcaccgtcctgcaggaattcggcacgagctacggtgacacttcgcgtgcggtgtaggcgcatcttcgctctgttggccgtggctttagtaagcacacacctgcctgctactctggttatcgtggcgacggcaggtctggattgccagacaggtttttctttttacctcgaggctttctctgaagggagtcggagcatttaaaaggcggcctcaaggtggattgagtcgggggaggattagcagtatttgcttaggttgtaaaaccgcgactttatctaataaatcgccattcaaggtgcaaatacaaacttggaacagagatgtaaatgaattcctcaaggtcagagactgtttttattcatttctacatctccaacacctggcaaagtgcctcggccataaaagataatctgcctctgaaaccttccgtgggcacagaaatttctggcaggaaagcatcagcaaccagaataatttggtg

SEQ ID NO: 21411 - DNA, 479 bp, Homo sapiens
  misc_feature (1)...(479): n = A,T,C or G
ggtggtttaaatgtcgccgactgataactttatgatntatctctgaaagcacatatgcacatacttcaaacacggaaaattaatctggaagtgaatgccataacagatcagctactgaccatcatgcagcaagaggtgaaatggacccactggccctcaggaccccacagtgcctgcaggaagggtgaaaacccaggaagctgaagccctacacgctgccgaggaaaacgcaacagacatggcaggtgcctcacgacaagaaacacttacaaatagaatcaaaactgattcaagtcatacagtgaaaggacaaaaggaaaaaggaaagagatcaatatgatccgaaacaatcgttttaagagtaagttgctgaccttctgctggccctccagtccgagatgcctgagggtgagctggtgctcctgcatggnngccgccttgacagcaagcgcactttcgtctgtgcacacttcgaatcn

SEQ ID NO: 21412 - DNA, 460 bp, Homo sapiens
  misc_feature (1)...(460): n = A,T,C or G
agggggtcccaattgaccccccntnnnatagaccctcggctgcaggaattcggcacgagctcggccgtagcggagctgcgagttacagaatgtctgaaggggacagtgtgggagaatccgtccatgggaaaccttcggtggtgtacagatttttcacaagacttggacagatttatcagtcctggctagacaagtccacaccctacacggctgtgcgatgggtcgtgacactgggcctgagctttgtctacatgattcgagtttacctgctgcagggttggtacattgtgacctatgccttggggatctaccatctaaatcttttcatagcttttctttctcccaaagtggatccttccttaatggaagactcagatgacggtccttcgctacccaccaaacagaacgaggaattccgccccttcattcgaaggctcccagagtttaaattttggcatgc

SEQ ID NO: 21413 - DNA, 477 bp, Homo sapiens
  misc_feature (1)...(477): n = A,T,C or G
ggtggacnnnntttgacttcatgcgcatttccgcacgagctcttgtctgccctcatgaagaagcttccctcacgtgatgtagtgccctcgtaggtgtcatgtggagtagtgggaacaggcagtactgttgagaggagagcagtgtgagagtttttctgtagaagcagaactgtcagcttgtgccttgaggcttccagaacgtgtcagatggagaagtccaagtttccatgcttcaggcaacttagctgtgtacagaagcaatccagtgtggtaataaaaagcaaggattgcctgtataatttattataaaataaaagggattttaacaaccaacaattcccaacacctcaaaagcttgttgcattttttggtatttgaggtttttatctgaaggttaaagggcaagtgtttggtatagaagagcagtatgtgttaagaaaagaaaaatattggttcacgtagagtgcaaattagaac

SEQ ID NO: 21414 - DNA, 489 bp, Homo sapiens
  misc_feature (1)...(489): n = A,T,C or G
aaaatggaanaaattagcccgcctgttttgcccgcctgcaagaattcggcacgagtagaggctcacacctgtaatcccagtactttgagacgctgaggtgggaggatcacttgagcccaggagttcaaaaccagcctgggcaatatagtgagaccgtatcactacaaaaaagtttttttagttcaccgagcatggtggcacatgcctgtagtcccacctactcgagaagctgagatagggtcacctgagcctggtaggctgaggctgcagtgagccaagatcgcactactgcactccagcctgggtgacagagtaagaccctgtctcaacaaaaaaataacaggttctgttgctgctgagctttcgtcaggaagataagactttcccaacagtccgaagcctatgatatgagggctgaggaggactcaaaccgttgcagtcagagagacacctattttggtgaatattttttgaaatagttaagtggcc

SEQ ID NO: 21415 - DNA, 463 bp, Homo sapiens
  misc_feature (1)...(463): n = A,T,C or G
aatagatcgccctcaggaattcggcacgagagacatcaatatatgtaagatgaacgttggttccctcgggaaaggcgggacaactcgaagcagggagggggcttccaggtcacagagagcctacgactagatttgcatctttacgtcctgcgcggaggctgctacacacatgcagaagtcatgctggtggcctggacattgaagggagagaagtggatttgggagacatttangagatggcaccgaaagcgaaggaagctcctgctcctcctaaagccgaagccaaagcaaaggctttaaaggccaagaaggcagtgttgaaaggtgtccgcagccacacgcaaaaaagaggatccgcatgtcactcaccttcaggcggcccaagacactgcgactccggaggcagcccagatatcctcagaagagcacccccaggagaaacaagcttggccactatgctatc

SEQ ID NO: 21416 - DNA, 479 bp, Homo sapiens
  misc_feature (1)...(479): n = A,T,C or G
tggggngaagggggnnaattgaatgcgtcggcaattggcacgagtgcagggcaggttccacatgtatgaagggtacccactctggaaggtgacattcccagtgagggttttccaccttctgggtgtggacaccctggtagtcaccaatgcagcaggagggctgaaccccaagtttgaggttggagatatcatgctgatccgtgaccatatcaacctacctggtttcagtggtcagaaccctctcagagggcccaatgatgaaaggtttggagatcgtttccctgccatgtctgatgcctacgaccggactatgaggcagagggctctcagtacctggaaacaaatgggggagcaacgtgagctacaggaaggcacctatgtgatggtggcaggccccagctttgagactgtggcataatgtcgtgtgctgcagaagctgtgagcagacactgctagcatgagtacagtaccagaagttt

SEQ ID NO: 21417 - DNA, 456 bp, Homo sapiens
  misc_feature (1)...(456): n = A,T,C or G
cctgtgcncccgctgtaggaattcggcacgagctcagggcctgacagtgtgggacaggctcttctttcccaaaattagggagctcttgacagaaagcagttctgatgcttacatctggaatctgaggcatcctctgactccactcaaagagggtgagggccttcttaagatacaaatggtggaggattgctgccagagaagtctggtcagagccacagggtctgcctccagccaaacgggagcttttggtgagaaggtgttggacaggggattggcgcccccctttggtttggcctccatcctcatctctcttgggccaagccagctgcctaggtcccccaagcatgggggaccccttcccacatataagttgagaaggtgcctgccatagccaggagcgcatctcaatggaaacatcactggggtcacttgggaagaggacttcggggtagaggc

SEQ ID NO: 21418 - DNA, 488 bp, Homo sapiens
  misc_feature (1)...(488): n = A,T,C or G
tggggnnnnaaggggnnnttttgttggctgcagcattcggcacgagcggaggtggcagccatctccttctcggcatcatggccgccctcagaccccttgtgaagcccaagatcgtcaaaaagagaaccaagaagttcatccggcaccagtcagaccgatatgtcaaaattaagcgtaactggcggaaacccagaggcattgacaacagggttcgtagaagattcaagggccagatcttgatgcccaacattggttatggaagcaacaaaaaaacaaagcacatgctgcccagtggcttccggaagttcctggtccacaacgtcaaggagctggaagtgctgctgatgtgcaacaaatcttactgtgccgagatcgctcacaatgtttcctccaagaaccgcaaagccatcgtggaaagagcttgcccaactggccatcagagtcaccaaccccaatgccaggctgcgcagtgaagaaaatgagtaggc

SEQ ID NO: 21419 - DNA, 490 bp, Homo sapiens
  misc_feature (1)...(490): n = A,T,C or G
cgcgcgcccattganatcgcaccggctgcaggaattcggcacgagcttggtggcagctgttgcctttgggaaaggactatctaattggagaccttcaggcagcagtggtcctggccaggcaggccagccaggagctgggacgatccttgcaggaacctcaggattacagcaggtgcagatggcaggagctccaagccagcagcagccaatgctcagtggggtacaaatggctcaggcaggtcaaccagggaaaatgccaagtggaataaaaaccaacatcaagtcggcttccatgcatccctaccagcggtgagtgtggctggcaacctcgactccctggtgctctttgcagagatgggcagtgaaattaccttttgctcaaggctcacctagatgggtacaataaaaagaacatgggctttcagcagcagacaaatcccacttccaccactgactagctgtgtgaccttggacaagtgacctaattttt

SEQ ID NO: 21420 - DNA, 463 bp, Homo sapiens
  misc_feature (1)...(463): n = A,T,C or G
aatttgccccgcgctgcacgaattcggcacgaggaacagcgggagacctgtgctagttttacagattgcctcctaatgacgcggctcaaaaggaaaccaagtggtcaggagttgtttctgacccactgatctctactaccacaaggaaaatagtttaggagaaaccagcttttactgtttttgaaaaattacagcttcaccctgtcaagttaacaaggaatgcctgtgccaataaaaggtttctccaacaaaaaaaaaaaaaaaaaaaaaaaccttgggggggggcccgggccccaattcccccttatgggggggggaataaaattccctggcccgggttttaaaacggcggggagggtgggaacccctnntntnntntttgnnnnnnnnnttttgtttttttttttntnttnttttnnntnntnttttntttttnnnnttttttttttttttgggtttnttt

SEQ ID NO: 21421 - DNA, 469 bp, Homo sapiens
  misc_feature (1)...(469): n = A,T,C or G
atttgccatctccnccgcgctgcaggaattcggcacgagcaacatttaatatcctttacaagatggaattcgtgacaagttcaaaaggagaacttcctttgttttaatgcagctgtgctcagaagcctgtgatttcctaggaaaccatctgggtttagcccattagaaaaatgcagtttaaagcagtgtcacactggctgcctgaaggtacccttggagatactggagcgcttctgcattcaggctggtgctcaccattgatggaacccttcctggacaggcggtagacaacttgtgaagtgactgtgccaggtgaattttggggttattcaccatttgacctacaggatcatgctcttttttcccagcaaatgccaactgtgagaaggcagtctgatatcctggtgtatcttctatgtcaataaaatgttcctcatcaggaatggtatcatcttcgggtaactcaaaa

SEQ ID NO: 21422 - DNA, 493 bp, Homo sapiens
  misc_feature (1)...(493): n = A,T,C or G
gagaggcncaatgacgcctcggaannatagatcgcgtgcaggaattcgccacgagctaatcagtcagcaagtccacctggaaggaaaagaaaatctcaactattaatgtgccttcacattgtgattttgtctaaaaaaatgtagtgagtcaaaaaacccacaagccagccaacagtaactccttcacatatataccagagtttatagaaataacatgtcagctttgggctatgtgctcctttgtttaaaatcttctatttggttatggcttgtataggctcaagcctgatttctttaaggtgtggtggctcatcttatcctaatgtgtatgatagatacagtccatcctgctttggaaaagattatgtaactccttgagagcatactctttctctagcccaaaggcagtgagagagttttcttgttcaggattgcttaactttccatttaagctttttctttttaaattaatacaaacttctacactttcagg

SEQ ID NO: 21423 - DNA, 486 bp, Homo sapiens
  misc_feature (1)...(486): n = A,T,C or G
gggagtgnnnnnaggagnnnnnttctgcccgccttttgttaggcactggcggagtaagagtggagatgcatttaacatggatggcggcggccgcagcaagtcgaggagtcggggcaaagctgggcctgcgtgagattcgcatccacttatgtcagcgctcgcccggcagccagggcgtcagggacttcattgagaaacgctacgtggagctgaagaaggcgaatcccgacctacccatcctaatccgcgaatgctccgatgtgcagcccaagctctgggcccgctacgcatttggccaagagacgaatgtccctttgaacaacttcagtgctgatcaggtaaccagagccctggagaacgttctaagtggtaaagcctgaagcctccactgaggattaagagcaacagccccagagcctgggctctgctggacttagtataatgtgaaaaaaatgtgttctcctattcctcataaagcttgtgctg

SEQ ID NO: 21424 - DNA, 487 bp, Homo sapiens
  misc_feature (1)...(487): n = A,T,C or G
tggggnnnnnccggggnnnaattgattggcttcggcattcggcacgagagctggtgcgcctgcccgggaacatcctcctggactcaatcatggcttgtggtctggtcgccagcaacctgaatctcaaacctggagagtgccttcgagtgcgaggcgaggtggctcctgacgctaagagcttcccgctgaacctgggcaaagacagcaacaacctgtgcctgcacttcaaccctcgcttcaacgcccacggcgacgccaacaccatcgtgtgcaacagcaaggacggcggggcctgggggaccgagcagcgggaggctgtctttcccttccagcctggaagtgttgcagaggtgtgcatcaccttcgaccaggccaacctgaccgtcaagctgccagatggatacgaattcaagttccccaaccgactcaacctggaggccataagctacatggcagctgacggtgacgtcaagacaaatgtgtgcct

SEQ ID NO: 21425 - DNA, 494 bp, Homo sapiens
  misc_feature (1)...(494): n = A,T,C or G
tggggnnnnnnaaggggnnnaattgaattgcactcggctgcaggaattcggcacgagccaactccaccgagcgggccatcaccatcgctggcgtgccgcagtctgtcaccgagtgtgtcaagcagatttgcctggtcatgctggagacgctctcccagtctccgcaagggagagtcatgaccattccgtaccagcccatgccggccagctccccagtcatctgcgcgggcggccaagatcggtgcagcgacgctgcgggctacccccatgccacccatgacctggagggaccacctctagatgcctactcgattcaaggacaacacaccatttctccgctcgatctggccaagctgaaccaggtggcaagacaacagtctcactttgccatgatgcacggcgggaccggattcgccggaattgactccagctctccagaggtgaaaggctattgngcaagtttggatgcatctactcaaaccacccatgaactc

SEQ ID NO: 21426 - DNA, 472 bp, Homo sapiens
  misc_feature (1)...(472): n = A,T,C or G
ntttgacccgtcctgcaggacattcaggacgagctcatgtcaccaatttctctgttgcatgaattttagtgttttgctataagacagcatgagggctatcaggccaaaattcattattgtatttccaatacagtttgtcttgaatgtctgtctcttaaaccagtttttacttgtcagttttctctcagcaaacagtcttactattatgtggaatttaacttttcagagaaaatttccaaagtcctctaccttatttggcttttatctgtgtcttttggaaaaggagctgcatggcctcagtgcctccataaaaagcttaagttgagttcatgggagaacattaagatcgttttttttcccttttagctcggtaatctcatgtaccacaggtaatgaccaagcatctctgctagaggatgtacctctcataactcctgtgtanaatgaggatcctgtggtngatctcatccaa

SEQ ID NO: 21427 - DNA, 486 bp, Homo sapiens
  misc_feature (1)...(486): n = A,T,C or G
gcgagtcnnattgacgcttgagaatatcgaagagccgtcagggagaaccagcgagtcagggaagaaatattggcaaaaggtggctttcttcctccagaagaaataaaagaaagatttgacagcaactgtattacaccaggaactgaattcatggacaatcttgctaaatgccttcgctattacatagctgatcgtttaaataatgaccctgggtggaaaaatttgacagttattttatctgatgctagtgctcctggtgaaggagaacataaaatcatggattacattagaaggcaaagagcccagcctaaccatgacccaaatactcatcattgtttatgtggagcagatgctgatctcattatgcttggccttgccacacatgaaccgaactttaccattattagagaagaattcaaaccaaacaagcccaaaccatgtggtctttgtaatcagtttggacatgaggtcaaagattgtgtcggt

SEQ ID NO: 21428 - DNA, 489 bp, Homo sapiens
  misc_feature (1)...(489): n = A,T,C or G
cattgcccgcctgcaggaattctggacgagcggaagtgacatcgtctttaaaccctgcgtggcaatccctgacgcaccgccgtgatgcccagggaagacagggcgacctggaagtccaactacttccttaagatcatccaactattggatgattatccgaaatgtttcattgtgggagcagacaatgtgggctccaagcagatgcagcagatccgcatgtcccttcgcgggaaggctgtggtgctgatgggcaagaacaccatgatgcgcaaggccatccgagggcacctggaaaacaacccagctctggagaaactgctgcctcatatccgggggaatgtgggctttgtgttcaccaaggaggacctcactgagatcagggacatgttgctggccaataaggtgccagctgctgcccgtgctggtgccattgccccatgtgaagtcactgtgccagcccagaacactggtctcgggcccgagaagacn

SEQ ID NO: 21429 - DNA, 496 bp, Homo sapiens
  misc_feature (1)...(496): n = A,T,C or G
atagcaccgccctgangaattttggaccagcctgcaagaattccgtacgaggcgatgggcatctctcgggacaactggcacaagcgccgcataaccggaggctagagaaagccctaccacaagaagcggaagtatgagttggggcgcccagctgccaacaccaagattggcccccgccgcatccacacagtccgtgtgcggggaggtaacaagaaataccgtgccctgaggttggacgtggggaatttctcctggggctcagagtgttgtactcgtaaaacaaggatcatcgatgttgtctacaatgcatctaataacgagctggttcgtaccaagaccctggtgaagaattgcatcgtgctcatcgacagcacaccgtaccgacagtggtacgagtcccactatgcgctgccccttggccgcaagaagggagccaagctgactcctgaggaagaagagatttaaacaaaaaacgatctannaaaattcagaagaa

SEQ ID NO: 21430 - DNA, 502 bp, Homo sapiens
  misc_feature (1)...(502): n = A,T,C or G
gtgcgggaacccntttgatcgccctcggtagattcccctgtcaagaattcgccacgagtacaagtaatattttgtataaaacatagcagtttaagtccccataatcctcaaaaatagtcacaaatataacaaagttcattgttttagggtttttaaaaaacgtgttgtacctaaggccatacttactcttctatgctatcactgcaaaggggtgatatgtatgtattatataaaaaaaaaaacccttaatgcactgttatctcctaaatatttagtaaattaatactatttaatttttttaaagatttgcctgggtaaacactaaaagtattacacaaaatctggactgaaggtgtcctttttaacaacaatttaaagtactttttatatatgttatgtagtatatcctttctaaactgcctagtttgtatattcctataattcctatttgtgaagtgtacctgttcttgactcttttttcagacattttctgcacgcatcg

SEQ ID NO: 21431 - DNA, 474 bp, Homo sapiens
  misc_feature (1)...(474): n = A,T,C or G
ctacgaccacantaaanantttgcatagcgctgcaggaattcggcacgagcaagaatgtgtctgtcaaggatgttcgtcgtggcaacgttgctggtgacagcaaaaatgacccaccaatggaagcagctggcttcactgctcaggtgattatcctgaaccatccaggccaaataagcgccggctatgcccctgtattggattgccacacggctcacattgcatgcaagtttgctgagctgaaggaaaagattgatcgccgttctggtaaaaagctggaagatggccctaaattcttgaagtctggtgatgctgccattgttgatatggttcctggcaagcccatgtgtgttgagagcttctcagactatccacctttgggtcgctttgctgttcgtgatatgagacagacagttgcggtgggtgtcatcaaagcagtggacaaaaaaggctgctggagctggcaagggcaccac

SEQ ID NO: 21432 - DNA, 411 bp, Homo sapiens
  misc_feature (1)...(411): n = A,T,C or G
actgaccgcctgaggaatncngattgaccccgcgctgcaggaattcggcacgagaatgccccacaagtgttaccatggcaaaactggaagagtctacaatgttacccagcatgctgttggcattgttgtaaacaaacaagttaagggcaagattcttgccaagagaattaatgtgcgtattgagcacattaagcactctaagagccgagatagcttcctgaaacgtgtgaaggaaaatgatcagaaaaagaaagaagccaaagagaaaggtacctgggttcaactaaagcgccagcctgctccacccagagaagcacactttgtgagaaccaatgggaaggagcctgagctgctggaacctattccctatgaattcatggcataataggtgttaaaaaaaaaaaaaaaaaa

SEQ ID NO: 21433 - DNA, 491 bp, Homo sapiens
  misc_feature (1)...(491): n = A,T,C or G
ggatgtccnnagtcgnccccctgaagcccgtagaccgcatgagcaanggcccctttgagctgtcacctttttgccatgtttaacagcatcttggttggcactctagtcttaatcttgctccttaactttgaatatgcagtctaaaatgtcagtagtcaacatgtaattttcctttgaaattctgaatattccagtgctggaacttatccaaaaagaagacctcagaaacttagattggtagatctctagtgcatattatcatgtgggcaccttctcttaaggtggaatgaggcagtctggatgcagcatagttaaaaggagctgtttaatattctctgtagtctggcctcttaactagaaagtaaagctaaatcagaagcctgtatttaaccatgtgaacagggagggatttagtgttctgatggctgattaatagaacagctagatacttagagcatgacgtgggatgggatgagtttacagctgctgcc

SEQ ID NO: 21434 - DNA, 468 bp, Homo sapiens
cctagacccacgctgtatgccccgcgctgcaggaattcggcacgagccccatcctccccggatcggccttgccccaacgcgtgttcgggacgtatttccgcgtgggcttctacagggcccacttcagtgacctggataagcaatagtgtgaggcgctgacctactaatcacgaagctggcacagatctctcaccggatgctggagttctacacggagagatctggggactacgcatgcgcgaatatcaaagactctaaccctgtggacaagtccaagcttgactcacaaaaggcctacatccagatcacgtatgtggaaccgtactgtgatacctacgagctcaatgaccgggagacctactttgaccgcaactatgggcttcgcacattcctgttctgcacgccgttcacgccggatgggcgcgcacactgtgagctgcccgagcaacacaagcgtaagacgctgct

SEQ ID NO: 21435 - DNA, 467 bp, Homo sapiens
cttttgccccgcgctgtaggaattcggcacgagcaacgctaggcaccgctccctaaaggcagccagatagacgagaactggccacgctctggacaccgctcaagtaccggaaaggcccgcagaaagaagggcaaaagggaatggcgtcaggggctgtcctacgaatcgttctctcagaaacagcagctactctgagcctgggttagaggtggaagcgggcagcggtttccgcatgcgcaaagaagatctgccggccccacctgccgctcgcggtgggcggggccccagaggcggagtctcgccctgacgctacgagttttacggactgataaattgcagtttatggattccagtattcatatttggaaaaagtacgacgtggagccacatacatagtttgaagttcactttcatattcattctctctctctgcaccaaactcccggcgtcgttatctccattttata

SEQ ID NO: 21436 - DNA, 503 bp, Homo sapiens
  misc_feature (1)...(503): n = A,T,C or G
agaatnagaaaanattttgaanacccanaacttgganccgccctgcaggaattcggcacgagctggtgcctgtgttgttgggagtcttcattcacagaggaccccaagaccggactcggtgccatttctctccttctggcccgttgctggcccttatgcattacttgcctttttctcagctctgtctggactcatgaggtcctgggggcagaatcagtctgtgtcccctgaatgctgagtgccctctaggtgcttaaatgttgttcacttttcacagggaaagtcttcagatggcagtaggcccattcctccacatcctagagagcaacctgctgaaagccatggactctgccactgcccccgacaagatcagaaagctgtatctctatgcggctcatgatgtgaccttcataccgctcttaatgaccctggggatttttgaccacaaatggccaccgtttgctgttgacctgaccatggaactttaccagcacctggaatcn

SEQ ID NO: 21437 - DNA, 493 bp, Homo sapiens
  misc_feature (1)...(493): n = A,T,C or G
ggggnnnnnnngcggggnnnttttgaattgcatgcctgcggattcggcacgagccttgttgacgctctgcaaaagtttgcagatgacatgtacagtctttatggtgggaatgcagtggtagagttagtcactgtcaagtcatttgacacctccctcattaggaagacaaggactatccttgaggcaaaacaagcgaagaacccagcaagtccctataaccttgcatataagtataattttgaatattccgtggttttcaacatggtactttggataatgatcgccttggccttggctgtgattatcacctcttacaatatttggaacatggatcctggatatgatagcatcatttataggatgacaaaccagaagattcgaatggattgaatgttacctgtgccagaattagaaaagggggttggaaattggctgttttgttaaaatatatcttttagtgtgctttaaagtagatagtatactttacatttat

SEQ ID NO: 21438 - DNA, 485 bp, Homo sapiens
  misc_feature (1)...(485): n = A,T,C or G
catagcccgccttgangaattcggcacgagcgtttctaggtaaaacatggctaanagcttacggagtaagtggaaaagaaagatgcgtgctgaaaagagaaaaaagaatgccccaaaggaggccagcacgcttaaaagtattctcaaactacacggtgatgttttaatgaaagatgttcaagagatagcaactgtggtggtacccaaacccaaacattgccaagagaaaatgcaatgtgaggtaaaagatgaaaaagatgacatgaaaatggagactgatattaagagaaacaaaaagactcttctagaccagcatggacagtacccaatatggatgaaccaaaggcaaagaaaaaggctgaaggcaaagcgagagaaaagaaaggggaaaagcaaagcaaaagcagtgaaagtggcaaagggtttggcctggtagactcttaaaaccttggaaaatgccacatgggatagatgacggattataa

SEQ ID NO: 21439 - DNA, 464 bp, Homo sapiens
  misc_feature (1)...(464): n = A,T,C or G
gagcggcnnnnnnnacctgaattctctgcggtattcggcacgagcaggtatagatgctaagaaaacgtcctgtgagtttactggggatattctccgaacaccggtgtctgaggatatgcttggtcgggtattcaatggatcgggaaaacccattgacagaggtcctgttgtactggccgaagacttccttgatatcatgggtcagccaatcaaccctcaatgtcgaatctacccagaggaaatgattcagactggcatttcggccatcgatgggatgaacagtattgctagggggcagaaaattcctatcttctctgctgctgggctaccacacaatgaggtgaggactgggatcggtttgctatgaagtttagcagacaagaatttctataatgcatcactgttactgagaaaccgaataaagggttttcaaaatnnaaaaaaaaaaaaaaatccaaccccca

SEQ ID NO: 21440 - DNA, 395 bp, Homo sapiens
  misc_feature (1)...(395): n = A,T,C or G
gtgagaacaccacntttgatcgcctgcggtagtcggcccgagattttccctactcatgcttcctagagatttggtgaggatttgttgagtcatgggacatttcagcttgccaagcttctttagctttagcacgtgtttccaccagtgtcccttaacggagaggatgactatgtcactgaagaagtagaggggctgaaaatggactcagctcttggcccctgtagagactgcaagactccgtgcacaacgtgacagtcggggcttcctctgagcactgcgccgttcagccctattgcgcaacctgccacgccctgttactgtaaatggaacaccggctgtgagctggtcaaggccctgccatgacaaggccacttgcataggactccaaattaaaa

SEQ ID NO: 21441 - DNA, 404 bp, Homo sapiens
  misc_feature (1)...(404): n = A,T,C or G
agaacaaaattagataacctcntttgaccgcctgcggaattcggcacgagattttccctactcatgcttcctagagattcggtgaggatttgttgagtcatgggacatttcagcttgccaagcttctttatgtcttgtacgcgcattcaccactggcccttatcggagagaaagactatgtcactgaagaagtagaggggctgaaaatggactcagctcttggcccctgtagagactgcaagactccgtgcacaacgggacagtcggggctctcctctgagcactgcgccgttcagccctattgcgcaacctgccacgccctgttactgtaaatggaacaccggctgtgagctggtcaaggccctgccatgacaaggccacttgcataggactccaaattaaaa

SEQ ID NO: 21442 - DNA, 503 bp, Homo sapiens
  misc_feature (1)...(503): n = A,T,C or G
agaaaacttgaccgcgctgcagaattcgcccagcgctgcaggaattcggcacgagaataattggtcacagctggcgccagggaaaggcacgctcctaatagatagaaaacacctgaaaatggtcatcagcagcttcctgagaagatctcaggagttgggtgagtgggctcaagcacatgcttgcagacaacctaccccaagggaagaatcggggcaaagtaacgcgagaccctgggagtaagccaacatataaaacccccaagtcaaacggtcacacggtgcacttgatctcccaagttgcccacttagccctcttctgagtgtactttctttttttcctttcattctggcgctaaaacttttggataaactttcactcctgctctaaaacttgcctcagtctctccttctgccttatgctcctcagtcgaattctttcttctgaggggggcaagaattgaggttgttgcagacccgtatagaagtgaatttgccactggtan

SEQ ID NO: 21443 - DNA, 494 bp, Homo sapiens
  misc_feature (1)...(494): n = A,T,C or G
tggggnnnnnnagcggggnnnccttgaattgcttcgcaattcggcacgaggaanaccgtgtgctattagccatggtcaaccccaccgtgttcttcgacattgccgtcgacggcgagcccttgggccgcgtctcctttgagctgtttgcagacaaggtcccaaagacagcataaaattttcgtgctctgagcactggagagaaaggatttggttataagggttcctgctttcacagaattattccagggtttatgtgtcagggtggtgacttcacacgccataatggcactggtggcaagtccatctatggggagaaatttgaagatgagaacttcatcctaaagcatacgggtcctggcatcttgtccatggcaaatgctggacccaacacaaatggttcccagtttttcatctgcactgccaagactgagtggttggatggcaagcatgtggtgtttggcaaagtgaaagaaggcatgaatattgtggaggcc

SEQ ID NO: 21444 - DNA, 497 bp, Homo sapiens
  misc_feature (1)...(497): n = A,T,C or G
ggggnnnnnnnggcggggnnnntttgacctcgcaccggctgcangaattcggcacgagcagcctccaagcaggtcatcctgacactgcaacccactttggtggctgtgggcaagtccttcaccattgagtgcagggtgcccaccgtggagcccctggacagcctcaccctcttcctgttccgtggcaatgagactctgcactatgagaccttcgggaaggcagcccctgctccgcaggaggccacagccacattcaacagcacggctgacagagaggatggccaccgcaacttctcctgcctggctgtgctggacttgatgtctcgcggtggcaacatctttcacaaacactcagccccgaagatgttggagatctatgagcctgtgtcggacagccagatggtcatcatagtcacggtggtgtcggtgttgctgtccctgttcgtgacatctgtcctgctctgcttcatcttcggccagcacttgcgccagcagcg

SEQ ID NO: 21445 - DNA, 442 bp, Homo sapiens
aactgaccgcctgcggttttcttcagtgtccaagcttaacacataattttaccaatgagagcagctgagaagtttcgagctgccttttggtgatctcagactctttcactgagcttcaggccgggacagtcaagagtcactcctgcaatccgctgtcctggccttccttaactcacagttttacaacttgccaaaactaaattgcctttgcggtcaactgcttttcctttcagacttaggagatgttaggaaccatgagcgttgcagtctgtgcagtctgcgcctgcctttctaagtttggccatcctgggaagtagaagtgtaaaagctgtagaatttgaaacttttggaccacaactcaaaacaagtgtatggagacccagtattacatgtacacaggcacgtctacctgaaacaaagtcactggccgtaccatgtgcaa

SEQ ID NO: 21446 - DNA, 451 bp, Homo sapiens
  misc_feature (1)...(451): n = A,T,C or G
gttgancgcctggggaannaaacgacccccgctgcaggctccggctccggcgccggctcctgctcctcctggccgcccggggccaaggcgacgagaggttgtaaaaatccatgtgggacggccccggggcgagcatcggaaagatctctgagtggagttattttctggtacggactgtgaaaagaatgcggtgaaaattctggacaatcgtggaaatattagctcaaaccccaacttaatatagcatttcttctcttcagtaacacctcataatacaagaaaaatgtatggaagtgcaagaacaatcaccaatctggaaggtagcccttccagatcccctcgtttgccaaggtctcctcgtttgggccaccgaagaacaagtagtgggggaggtggaggaacaggcaagactctgtctatggagaatatccagtccctcaatgcagcctat

SEQ ID NO: 21447 - DNA, 274 bp, Homo sapiens
  misc_feature (1)...(274): n = A,T,C or G
aagcagtaaaacaaangtagatcgccctngngttgatccggcctgcgngaattcggcacgagcggtggcagacacctctggcctgaagtcacagcagagttcaccccagagcgcctgggcgcatcttgtggcatgcccatgggctgccgagtcctgccctctcgccacatttcccccaagttacattcccaggaggacctttttaatgttctcaatcgtggctctcagacacaaataaatttttttgtaaactctgaaaaaaaaaaaaaaaaaa

SEQ ID NO: 21448 - DNA, 442 bp, Homo sapiens
  misc_feature (1)...(442): n = A,T,C or G
aactgaccgcctgcggaattcgttggaggcatcttgccatcctctcagaattgctttgtggcgataaagcaatcgtccgttgaaaccatctgtttttatagcatgaagatttaatgcctataattaggaaggagttttcacagaaaccctccctcatgacagatttgactaagctggtaaatagtttggtgttgctctcattctgggtgaagatttcaatgtggaagatctagcaaatgctttggaaaggcctgtgaatggtgtgctcccctctgtgtctccatggcctgcagtccatgctcttgtgaaggagtttgggacactggctgttgcccggtgtttcagcactttcagtttacgggaaatgtgaatcaataggtatgatccatttctaatcaatttggccttctgctgctggaagtaactttacttataagtaacn

SEQ ID NO: 21449 - DNA, 486 bp, Homo sapiens
  misc_feature (1)...(486): n = A,T,C or G
ntttgcccggctgcaggaattctgcacgagggatacccatatccttaccctccttgggactgaaggggaaccccggggtgcccacaggccgccctgcgggtgaacaaagcagccacgacgtgcaacaaggtcctctgtcagtcacagccacccctgagatccggcaacatcaaccccagagtcattcgttctgtggagggacaagtggactcagggcaccgccaggctgaccacagcacagccaacacgcacctgcctcaggactgcgacgaaaccgagggggctggttctgtaattgagtgtgatgtgaagccaattcagacaggcaaataaaagtgaccttttacactgacaaaaaaaaaaaaaaaaaaacctcggggggggcgccgggcaccaaatgagccctatagggaggcttataacaatacctgggcggcggtttaacactgcgagacgggggggagnnngntngcctcgggctaattt

SEQ ID NO: 21450 - DNA, 500 bp, Homo sapiens
  misc_feature (1)...(500): n = A,T,C or G
cattcgcccgcgctgcangcaaatagacccgcgctgcaagaattcggcacgaggtaaaaggtgatgagggcaattctgtcctactgtttttacaggcctttttcaaatgcaaattttgtcataaagttgctatagattttttaaaatgcttttttaatattaaaacgtacttttacattcttaatctttttttagaaaggaaaagttttcttcatttagctgctgatttaaaagtaaagatctccaattctttttttttgcttactctattttttttaacctgtgaaatttctttacagttttccaagaaattaagcataacagtttcatctacggcagttcattacactgtcaatgttaacatcattgctgcattttgcactttgaacacacacataatatatataaccagaggtgaatcatgactcagtacagtgcaagttttttcactttcacttacacataatatataatggatattcatttatactgatttatga

SEQ ID NO: 21451 - DNA, 392 bp, Homo sapiens
atttgcaccgcgctggcaggaattcggtatccaccgcgctgtacgaattcggcacgagccactgctcacccttcaacatgcctggtttaggcagcatcttgggctgggaagaggtggtggcagagtctcaaagctgagatgctgagagagatagctccctgagctgggccatctgacttctacctcccatgtttgctctcccaactcattagctcctgggcagcatcctcctgagccacatgtgcaggtactggaaaacctccatcttggctcccagagctctaggaactcttcatcacaactagatttgcctcttctaagtgtctatgagcttgcaccatatttaataaattgggaatgggtttggggtattaaaaaaaaaaaaaaaaaaa

SEQ ID NO: 21452 - DNA, 537 bp, Homo sapiens
  misc_feature (1)...(537): n = A,T,C or G
tgctttgatcagtgtccactcatggtcattttcggtggtcactattgatgtacatcgcggcagcagaaacaaaatttgatcgcctgangattcaccccatgaggaggcgccggncgcagctagtcgaggagtcggggcaaagctgggcctgcgtgagattcttatccacttatgtcagcgctcgcccggcagccagggcgtcagggacttcattgagaaacgctacgtggagctgaagaaggcgaatcccgacctacccatcctaattcgcgaatgctccgatgtgcagcccaagctctgggcccgctacgcatttggccaagagacgaatgtccctttgaacaacttcagtgctgatcaggtaaccagagccctggagaacgttctaagtggtaaagcctgaagcctccactgaggattaagagcaacagccccagagcctgggctctgctggacttagtataatgtgaaaaaaatgtgttctcctattcctcataaagcttgtgctggggtacacactaacctacctgtacacag

SEQ ID NO: 21453 - DNA, 494 bp, Homo sapiens
  misc_feature (1)...(494): n = A,T,C or G
gttcaaatcgatgccntaggattgagcaccatatggagcgaggggagcaggtgggcccagcctgagcggggcctctgcacagccagctttcccccacacctgtctccagccagggcacccacaggccctttctctcccaggatgaagcctgctgggagcgtgaatgacatggccctggatgccttcgacttggaccggatgaagcaggagatcctataggaggtggtgagagagctccacaaggtgaaggaggagatcatcgacgccatcacgcaggagctgagtgggatcagcaccacgtaaggggccggcctcgctgcgctgattcgtcgagcccatccggcgacagaggacagccagaagcccagccagccccagactccagtgcaccagagcacgcacaggagcctgggcgcgctgctgtgaaacgtcctgacctgtgatcacacatgacagcgaggaaaccaagtgcaactcctgggtttttttagatt

SEQ ID NO: 21454 - DNA, 492 bp, Homo sapiens
  misc_feature (1)...(492): n = A,T,C or G
nggggnatagccacggctgcaggaattctgcacgagatcatcccaggctccgtctatgatcggagcagccagggccggccttccagcatgtacttccagacccatgaccagattggcatgatcagtgccggccctagccacgtggctgccatgaacattcccatccccttcaacctggtcatgccacccatgccaccgcctggctattttggacaagccaacgggcctgctgcagggcgaggcaccccgaaaggcaagactggtcgtgggggacgccagaagaaccgctttgggcttcctggacccagccagactaacctccccaacagccaagccagccaggatgtggcgtcacagcccttctctcaaggcgccctgacgcaaggctacatctccatgagccagccttcccagatgagccagcccggcctctcccagccggagctgtcccaggacagttaccttggtgacgagtttaaatcacaaatcgac

SEQ ID NO: 21455 - DNA, 484 bp, Homo sapiens
  misc_feature (1)...(484): n = A,T,C or G
aattcgccccgcgctgcaggaattcggcacgaggagaattatccctaaacccgaatttcccagagctgatggcatcgtccctgaaacgtggattgatggccccaaagacacatcagtggaagatgctttagaaagaacctatgtgccctgtctaaagacactgcaggaggaggtgatggaggccatggggatcaaggagacccggaaatacaagaaggtctattggtattgagcctggggcagagcagctcctccccaacttctgtcccagccttgaaggctgaggcacttctttttcagatgccaataaagagcactttatgagtcacaaaaaaaaaaaaaaaaaaaaaaaaaactttgggggggggcccgggccccaattcccccttaagggggggggtttaaaattcctgggccgggggtttaaaacgggggggggggggggaagaggggnnnnctnnncttntgccgnnntnttntctct

SEQ ID NO: 21456 - DNA, 508 bp, Homo sapiens
  misc_feature (1)...(508): n = A,T,C or G
cccccccccccccccccccccatcgcccgcttttgcccgcctgcacgaattcggcacgagcttttggacaccaggttggtgaatcagaatgcaagcaggtgggaaagttttgatgtcacccccgctgtgatgcggtggactgcacagggacacgccaaccatggattcgtggtggaagtggcccacttggaggagaaacaaggtgtctccaagagacatgttaggataagcaggtctttgcaccaagatgaacacagctggtcacagataaggccattgctagtaacttttggccatgatggaaaagggcatcctctccacaaaagagaaaaacgtcaagccaaacacaaacagcggaaacgccttaagtccagctgtaagagacaccctttgtacgtggacttcagtgacgtgnggtggaatgactggattgtggctcccccggngtatcacgccttttactgtcacgaggaatgcccttttcctctggctgatcatctgaactccc

SEQ ID NO: 21457 - DNA, 470 bp, Homo sapiens
  misc_feature (1)...(470): n = A,T,C or G
ntttgacccctcgaccgcctgcggaattcggcacgagaaaagtctcataactgagaaggctctgttttgggccgggtgggtctgctggcctccactcactgtgctgtttcctttgagtggcacacttgggaagctccggggcatgtgaaggagctgcaaacatgagaactaatgaaccaaggcggctgccaccaggaaggaacagaacgcaggcattcaaccatgacgtctgcacagtgttagtaacatgtcattgtggtttcgttctcactgtggtaaaatttatttctgagcacttaaattgtgttgcatacccctaatttttttttttttctgaatcttccttgccctcaaataccctgaggtgataaactgttccagttgtagccaactaccactgctaggcctcaatgtaaattcagttgaaatttgcaattctatcagcaatttaatgtattgaattcagatca

SEQ ID NO: 21458 - DNA, 458 bp, Homo sapiens
  misc_feature (1)...(458): n = A,T,C or G
gattgattncccctnnnnnnnnnncncttgacccngcgctgcaggtttatattctggaagaaaagaactgtgaacaaattagaaccccggaacactctgacgtccatggacgcattccagaaaagtggcaagagatgagtctttcctcctccaggaagcattttggtagaatttccatagagcattgtctgtgagtgactgatcccaacatgtatgttactaagccccaaaacgaacttcaaactgggtgtggtggcacgtgcctttagtcccagctacccgggaggctgcggcaagaggattgcttgagcccaggagttcgagtccaacctgggcaaaagagtgagaccccatctctaaaaccaaaaaggtaccttagaaggtcacctggttggctaaccttttaaaggcaggggcgtgacacgtaggacacattgggaatgtcttggctactacat

SEQ ID NO: 21459 - DNA, 443 bp, Homo sapiens
  misc_feature (1)...(443): n = A,T,C or G
gatgatcnccctgaggaatnctttgagagtcgttttttttacacgctccaatttttttaattagacccaacagaaacaaaaacactccaataaattgtttataaaagcttcctgtcagtatctgtacttatttcctcacagaccagtaacatctggttggcaggcactggtctgaggaccacacttcggtgctaaaagcctgtactatagggcatccaattcagtcagcaaaaccggggttcaagacctgacttcattactactagctggatagccagagaaagatcacttagcctttctaaggtccactttactcatttggatcagggtaattatatctatgattaagctttctgtgagagctcaataataatgtactaacctctcaggaagtacttgaaagttgaaactgaatcacataattggtacatttacatattaaa

SEQ ID NO: 21460 - DNA, 484 bp, Homo sapiens
ctttgacccgcctgcaggaattcggcacgaggtctgtattaatggggcccgttgtatctcggaattttgaggttggaacaatgggagccctgttgagcgtttcctaaagtgacttaaccgcctgcgttgtttgaccacggaagcaacaggaaatggcagctagaggccctccctgtgcgtgacctcttgtcacactcaggggggtaactgtcagctgttatctactcttcacgttttggagaaacacacaataagttatgaggaaaagcaaatttctctcctgagtatttacatgtctctgtatgctcaaatatgcagaagtgtccctatgcgtgtatattagcttattttttaggctctagccattttatattctttcatgtgcttctcaatattcattttctttgcactttatacaaattaaaagcatttttaaagcttcttctgtactggaaactactaagtgctttgccaaccagacaga

SEQ ID NO: 21461 - DNA, 479 bp, Homo sapiens
  misc_feature (1)...(479): n = A,T,C or G
tgggtnctnnaattgcccgcctgaggaactctgcacgagtttaaagtcaggtagatttgggcctgccactttacatctgtagctgatgtttaaaggagatgataaaaatgctgcaacccagataatgatcaccttactcttcaaaaatactgcccaaggaagggaagatacacacagaggagaaggtggtgtgaagatggaagccaagactgttgataccagttggagagcaccaagaactacccgcagccactgaaagctaggagagaggcataggactgtctccttcagaccctccagaaagaccaaacctgcccgtgccttgatttcagacttttggcctcccacattgtgagagaataaaattttgtttttgaagccccngncgtncnnnggttcgcggaaggaaaaagccctccgggggggggccgggcgcccaattcccccttagggggggcgttaaaattcgctgggggggg

SEQ ID NO: 21462 - DNA, 496 bp, Homo sapiens
cattgcccgcctgcagaatttttgccccgctgcaggaattcggcacgaggaagaacagagccttctacatgtaacattcctgatgaaggtacaattctttaaaattcactaatgattgaggtccatatttagtggtactctgaaattggccactttcctattacacggagtgtgctaaaactaaaaagcattttgaaacatacagaaaggtctattgtcattgggaaatttttctttctaacccagtggaggttagaaagaagttatattctggtagcaaattaactttacatcctttttcctacttgatatggttgtgtggaccgataagtgtgcttaatcctgaggcaaagtagcgaatatgttttatatgttatgaagaaaagaattgttgcacagagttgagtctactcttatatgctggactgcattcacacatggcatgaaataagtcaggttctgtacaaatgggattctgatagatactcgattgtgg

SEQ ID NO: 21463 - DNA, 481 bp, Homo sapiens
cgggaactgctgctgagattcgccgagccgtccggcccggtcctgcaccctgcacaggtggccccaagccgctgtcacctgcgtctagccaggacaagctgcccccactgcccccactaccgaaccaggaagagaactacgtgacccccattggagatggcccagctgttgactatgagaaccaagatgtggcttcctctagttggccagtcatcctgaagccaaagaagttgccaaagcctcctgccaagcttccaaagccacccgttggacccaagccagagcccaaagtctttaatggtggcttgggcaggaagctgccagtcagttcagcccagcctctcttccccacagccgggctggcagacatgacggcagagctacagaagaagctggagaagaggcgggcactggagcactgattcggacacaccagggaccagcgggctagtcccagggcatggcccagcggccagattcc

SEQ ID NO: 21464 - DNA, 507 bp, Homo sapiens
  misc_feature (1)...(507): n = A,T,C or G
cgcgcccccccnaaggggnnaatagaccnccntnnnattgcaccgcctgcaggaattcggcacgagctgcctcagccagtggcacaggagactccaaggagctactgacattcctaagagtggaggaggaggaggagccttgctgggccagggaaacaaagtttacattgtcctgtagctttaaaaccacagctgggcagggtgagaagctagatgcccctgcagtttggccctggagccagggcagaggaatgtagggcctgcatggagaagggttctgccctgcctgaggaggaggacacagcacaagggcacattgcccatggctgggaacatgacccagcctgaaagatacaggggatcatgttaaaaatagcagtattatttttcgtctcaatggtattgtaactaagttatttactcctcctgctcctcacccctgtagggaaaccttggagaggagagtggcaggtgggctgcctgctgtgttaagaggacttagtttgn

SEQ ID NO: 21465 - DNA, 420 bp, Homo sapiens
  misc_feature (1)...(420): n = A,T,C or G
cggggncgggnatttganngccattgaccngcgctgcaggaattcggcacgaggaaaacccttttctacagttagggttgagttacttcctatcaagccagtacgtgctaacaggctcaatattcctgaatgaaatatcagactagtgacaagctcctggtcttgagatgtcttctcgttaaggagatgggccttttggaggtaaaggataaaatgaatgagttctgtcatgattcactattctagaacttgcatgacctttactgtgttagctctttgaatgttcttgaaattttagactttctttgtaaacaaatgatatgtccttatcattgtataaaagctgttatgtgcaacagtgtggagattccttgtctgatttaataaaatacttaaacactgaaaaaaaaaaaaaaaaaa

SEQ ID NO: 21466 - DNA, 481 bp, Homo sapiens
  misc_feature (1)...(481): n = A,T,C or G
cggggnantgnaattgaccccgctggaagaactcggcacgagcccccattgagtgtgggtgggacatgtaacctgcttctaaccaacagaatatggcaaaagtgatgggatcatctctcccatattatgttatggtatataacaaaagtgaagagaagttgcagatatacataaggtttctaatcagctgactttgagttaatcaaagagatcccctgggtgggcctgacctaatcagactagtcctttaaaagagagtgaaccagtcagagactctctctcctattagccttaaataagcaagctgccatgagctctacggctgcaaggaaataagttttgtgaacaaccatgtgatcttggaagaagcatctgaacctcagataaaagcccagccccagccaacgccttgcttgcagctttgtgaaactctgagcagaggacccagctaaatcacgtttggactcctgacccacagaaa

SEQ ID NO: 21467 - DNA, 508 bp, Homo sapiens
  misc_feature (1)...(508): n = A,T,C or G
aggggcncnnaattcgacatctgtcgacttcggcacgaggttcattctagggacatgacaatgggagttctcttctgttcttcatgttgccctgatttgccatttatttatgcctttggaggtcaaaaagaagggcttcgggtctgggatataagcacagtctcttcagtaaatgaagcatttggaagacgagagaggcttgttcttgggagtgcaagaaattcatctattagtggcccttttggcagcaggagctcagatacacccatggagtcttaatgaagatcatctaatttcctgcttaccttaactgggaattttaaaaagttggcctaaaaatgttccatgcgtggcagcaaccatgcagagtgactgaaacacaattcatttctgactgacattcctttctgcaactgcggtggcaccacaaatatccggtctttgtgcttgctcttcagatgggatggttgtaaggctcttggtgcatttcttaaaaaagagtaataaa

SEQ ID NO: 21468 - DNA, 472 bp, Homo sapiens
  misc_feature (1)...(472): n = A,T,C or G
cggcgggnnnnnattgaaattgatccgcgctgcaggaattcggcacgagatttttgtatttttaggagagacaaggtttcaccatgttggccagactggtctcgaactcctgacctcaggtgatcctcccacctcggcctgtcaaagtgctcggattacaggcgtgagccactgtgcctggccagactgccctttctcacagaaacaaagcaactagtagccagtaaattcacataaaattttcatagtggaaaaaatccccatgcaacaatcgctggtaagacagaatcattactaaatgaagcaaagagttatatctggtcttaggaagaaagataccaggcctagaatgtcatttacaaaatgaaaagaatctgagggtataagaagaaaagaaatttagatataaaatagaaaaggaaagcgaccttacagaaccagatgattcagagaactctttgtcaaaaaaaaa

SEQ ID NO: 21469 - DNA, 481 bp, Homo sapiens
  misc_feature (1)...(481): n = A,T,C or G
nattgaccccctnttnnaanannnnnaaggtccccgcgctgcaggaattcggcacgaggtccattcatctctcagttaactaaatagaagtgatgcaagggaggactccaaggaagccctagggatcatgaagctacagaatgggagaattgctgtcaccacagttctggaagaagaattgttcaggagaacagccattggactatggcatgccaaagaaatctctgttgtgaaaccacaattaaaagttgttcttcctgcctctgcttcttgaccaacccctgagtggccctgtatagtgttctccctaggaaactgtggattctacttctggtgaagatgacgtgaacattgctgaaatggcaacaaaggattcagaagattacatcaacttagtttggcaaagcagtggcagagtttgagaggactgactccaattttgaaagtgggtaaaatgatgtcaaagagcatcacatggtgg

SEQ ID NO: 21470 - DNA, 511 bp, Homo sapiens
  misc_feature (1)...(511): n = A,T,C or G
tgggccnnnnnnnaagggggnnaatagaacggccctcggnataganccgccctgcaggaattcggcacgaggagagagagagagagagagagagagagagagagagagactcgtgccgaattcggcacgaggcttcccaggccagctcaatgctgacctgcggaagctggctgtgaacatggtcccgtttccccgggtgcactttttcatgcccggctttgccccactgaccagccggggcagccagcagtaccgggcgctgaccgtgcccgagctcacccagcatatgtttgatgccaagaacatgatgggtgtctgcgacccccgccatgggcgctacctgacgggtgccgccgtgttcaggggccgcatgtccatgaaggaggtggatgagcaaatgcttaatgtccaaaacaaaaacagcagctattttgttgagtggatccccaacaatgtgaaaacgggtgtgtgtgacatcccacctcgggggctaaaaatgtgcgccaccttt

SEQ ID NO: 21471 - DNA, 493 bp, Homo sapiens
  misc_feature (1)...(493): n = A,T,C or G
agagaaaaaaaattttcacncgccctgtttgacccgccctgcaggcttatccaaggctcatactgtcctgtccttaccctcagatggagccaggaagctcagtgaaaggcttccctaccctttgcactagtgtctctgcaggttgctggttgtgttgtatgtgctgttccatggtgttgactgcactaataataaaccttttactcaactctctaaattcttcagcattactccctttcttgagaaggtttcccctctgcttttgcctttctctcaccttaattccctttcttccttactttgttacctacccttatcttagtgctaacttctctttcacgaggatgtctgggagtagtgtgcacttcacagctgctttcccatgtaccctcctgcattcttccctcctatctcctgttctgtagcagccaaagctctctagtgatctgaactgtgtacttcccagggtctgcctttatcctaaattccatgn

SEQ ID NO: 21472 - DNA, 474 bp, Homo sapiens
  misc_feature (1)...(474): n = A,T,C or G
attagaaaactttgaccgcctgcggtgacgctggagtgaagaggaaaggaactgatgttcccaagtggatcagcatcatgaccgagcggagcgtgccccacctccagaaagtatttgataggtacaagagttacagcccttatgacatgttggaaagcatcaggaaagaggttaaaggagacctggaaaatgctttcctgaacctggttcagtgcattcagaacaagcccctgtattttgctgatcggctgtatgactccatgaagggcaaggggacgcgagataaggtcctgatcagaatcatggtctcccgcagtgaagtggacatgttgaaaattaagtctgaattcaagagaaagtacggcaagtccctgtactattatatccagcaagacactaagggcgactaccagaaagcgctgctgtacctgtgtggtggagatgactgaagcccgacacggcctgagcgtncag

SEQ ID NO: 21473 - DNA, 487 bp, Homo sapiens
  misc_feature (1)...(487): n = A,T,C or G
tggatgggcnnaggttcgaccgcctgcttgaattcgcctcgaggccgggcgccgggtccagcgcagaccaggacgacgaggaaggagtggtaaaatttcagccttccctttggccttgggactcagtgaggaacaatttgagaagtgccctgacagagatgtgtgctctctatgatgttctcactattgctagggataaaaaatttatgactcttgatcctgtctctcaagatgcacttcctccaaaacagaatcctcagacgttgcaattgatatctaaaaagaagtcacttgctggagcagcacaaatcttattgacgggggcagaaagactgactaaatcagttaccgaaaaccaggaatacaagctactaagagacttcaattctgagcttttgcgattacggcaacactggaaacttcgaaaagctggagataacattctcggagatctgagctacagaagtgcaggatctctctttcctca

SEQ ID NO: 21474 - DNA, 477 bp, Homo sapiens
  misc_feature (1)...(477): n = A,T,C or G
nattganngctgagcgccttcggaattcggcacgaggggaaccagtctttcaaaatgggaaaatggctttgttggcctcaaatagctgctttattagatgcaatgaagcaggggacatagaagcaaaaagtaaaacagcaggagaagaagaaatgatcaagattagatcctgtgctgaaagagaaaccaagaaaaaagatgacattccagaagaagacaaaggaaatgtaaaacaatgtgaaatcaattatgtaaagaaatttcagagcttccaagaccacaaacttaaaataagtaaagaagacagtaaaattcttaaaaaggctcggaaagatggatttttgcatgagacgcttctggacaggagagccaaattgaaagccgacagatactgcaagtgactgggatttttgtttctgccttatctttctgtgtttttttctgaataaaatattcagaggaaatgcaaaaaaaaaa

SEQ ID NO: 21475 - DNA, 456 bp, Homo sapiens
  misc_feature (1)...(456): n = A,T,C or G
aatttgcaccggtctgcaggaattcggcacgaggctgatgagacctctattaatacacgaagtttctcaaagtttgtaggaatgagtgcagatgcaacccctcttcatgtagctagaagtgggaatgacactgaagatttcagcaacccttctgcttgctcagatatttatggtgagagtatttcatctcattttacagagtcaacaggaaagttgatagagagcttgtcagattgtgcttcctccttacctataaaaaagattgctggtagtaattataacacttttttggactctgaactcagtatgttaaatgggacaaaagttctttcagacagtgccgtgggcattgacctgggtagtactggtgatacaacagaagcattgcacgaactaagaactgccgaagagttcaaaacagaagagcaagatgactcanggagtatagaatttggn

SEQ ID NO: 21476 - DNA, 482 bp, Homo sapiens
  misc_feature (1)...(482): n = A,T,C or G
agaggggttctgaatcctagagtcatcggcaanaggcacgagccactggagagccccgcccctaaggtactatgagtcctcaggggtcaaggtcagaaacggccctttcagacctaaacccacacgcccacaaaggggattgcacacagacaagaactcccgtgcgggccttcactctattcccacccttgagggagcccccttactgggggagggtccttgcaattccagcgaatcggaggccaggccaggacgtccttgctccctgcaccctcactgttctgtgcactttttctacctacataaacacacgcattccacctcaaaaaaaaaaaaaagaagcgggcacgaaaaatctggatatcttaacataccacgacccccggggctgggttggggcatcacccaacccttgaacccttgggttgcccggaaaaatttaataaccacccgtgtaaattgggggacaagaattttactgt

SEQ ID NO: 21477 - DNA, 513 bp, Homo sapiens
  misc_feature (1)...(513): n = A,T,C or G
aggggnnnttttgannccccnttttctgnccgcctgcaggaattcggcacgagctttcttgctgttttaatgtggtgcacactatagcctcacaaacctgttattccagtgtaatctgcagtgtcgtaactaaagttactggcttggtcttatttgcacagtttttgcgtcttgtttgcttcttgcatctgattaactagaatatttctctttcccccttttaatttgtgatgtcacttgaccccatttatgtgtaggagcactacaccattggtttccaatactgcacacataagatacatacttgtgtgcagaaagtatcttcctccaggcttgtaatacccttcacatggaagattaatgagggaaatctttatattctgtataaaaacaaaagcaaatttatatactaaaatcatttgtctaaaaatttaagttgttttcaaataaaaattaaaatgcatttctgatatgcaaaaaaaaaaaaaaaaaaaaaaaaaacccggggggggg

SEQ ID NO: 21478 - DNA, 507 bp, Homo sapiens
  misc_feature (1)...(507): n = A,T,C or G
aggggnnacctgcccggctgcagtagtcggcacgagcccccacacccctcacccctacctcacacacggctaacacctccccccggcccgtctccggcatggagagagagcggaaagtgagtatgcggctgcaccgcggggcccccgtcaacatctcctcgtccgacctcacaggccgacaagatacctctcgcatgtccacctcacagaatagcattcctttcgaacaccacggcaagtagctgctcgtctcccatcggaaggcagcactggattcctggtcgggtggcttccagtggtcttcagtctgtcgtgcaccgatgagaactctccttattgctgtgaagggcagacaatgcatggctgatctactctgttaccaatggctttactagtgacacgtcccccggtctaggatcgaaatgttaacaccgggagctctccaggccactcacccagcgacgctcgtgggggaaacatactanacggacagactccaagagctgc

SEQ ID NO: 21479 - DNA, 478 bp, Homo sapiens
  misc_feature (1)...(478): n = A,T,C or G
ggggnngagggggnnntttgactgctgtggcattcggcacgaggaagagcgggcgtcatctctcgggaggtgtacctccttatactgagtgtgaccacgctcagcctcttgctcgccccggtgctgtggagagctgcaatcacgaggtgtgtgcccagaccggagagacggtccagcctctgatggctcggagatgatggaccgtggaagggaagcgtctgtggggagtgagcgcttanatggccagcagctgctccttctgggaagctcgcaccttggcaacagaacagccctctagcagagcgtcagtgcagtcgtgttatcccggcttttacagaatattcttgtcctattttagaattttccggagtagtttatttgcagtctgttgattatgtgcagtagacccgggacactgcgttttaccgatcaccttgaatgtggtgcctggatgtgccttttttttttttccctgaat

SEQ ID NO: 21480 - DNA, 503 bp, Homo sapiens
  misc_feature (1)...(503): n = A,T,C or G
ggggggcaccttgttcgcctgtangtagtcggcacgagccaggatgtgcagtctcccatagtggcttcccagcaacaacttttgacttagatggggggtatgtattatggtgagaggttagccttcctggcacatcttcccttaaaacttctaacttgcccctcctagtccaagtcacctctcagatgaagtcttttttgaccccctttcagccactgggtcccttagtgctgtgtatgtgactgctgtagcattccactgcacctgctgcatacagcttacattggaaaaaaaaaaaaaaaaaaaaaaaaaaaaaaaaaaaaaaaaaaaaaaaaaaaaaaaanannnnnncctggggggggggccccccccccccctcccccttaaggggggggataaaaaaaatccggggcggggttttaaacagggggggggggaaaaaaannngnccnttgnttttatcctgggcaccagaacaaaactcctctcaaaaaaaaaaaaga

SEQ ID NO: 21481 - DNA, 460 bp, Homo sapiens
  misc_feature (1)...(460): n = A,T,C or G
gggncgcgnaattgacnncccctnnnattgacccccgctgcaggaattcggcacgagagaggtcgaatcaacgtgagtggcttaaccaccaaaaatctagattacgtggccacctccatccatgaagcagtcaccaaaatccagtgaagaaacaccacccgtccagtaccaccaaagtagttctctgtcatgtgtgttccctgcctgcacaaacctacatgtacataccatggattagagacacttgcaggactgaaaggctgctctggtgaggcagcctctgtttaaaccggccccacatgaagagaacatcccttgagacgaatttggagactgggattagagcctttggaggtcaaagcaaattaagagttttatttaagaataaaagagtactttgatcatgagacataggtatcttgtgcctctcactaaaaaggagtgttgagtgtggcggaca

SEQ ID NO: 21482 - DNA, 482 bp, Homo sapiens
  misc_feature (1)...(482): n = A,T,C or G
tggggnngagggggnnnttttgttttcaccggctgcangaattcggcacgagctccagttggggggctggggcgggcagcctggatgagataacgtgagccttttttccctctttgtttttttaacaagattttctaatcgacttgcagagtagttgaagtgggtaagcagcagggtaccttgtataatgcacgacagttgcagtatgggaagaatggaccgggcccctgggataaaatcagagtggtcctcacacctagaggacggggacaaccagctttcagagtagcctcatcagtgcccttgcagtctgactgtgtacacttggttcagctaatgtctgagagtcctgcactgggttactttatactagtgaggacgttaaccagccatattggctcaataaatagcttcggtaaggagttaatttccttctagaaatcagtgcctatttttcctggaaactcaattttaaatagtcc

SEQ ID NO: 21483 - DNA, 467 bp, Homo sapiens
  misc_feature (1)...(467): n = A,T,C or G
nctttgccccgcccctgcaagaaaannctttcccccgcgctgcaggaattcggcacgagcaccttctcactgcatccttatgtggtggaagaggcaggggagctctctggggtctcttttgtaaccccattcttgaggcttgtccactctcatgacctaatcacctcccagaggccctgcctcctaacaccattaccgtagagtgagagcttcagcctatgaattttggggggacatgaacattcaagactaatattctttcagtattccagttactgaatggtgtgtagtattcagtggagaaggtagctgaaattaaggggttaaaattgtaataatggccggttgcggtggctcacgcctgtaatcccggcactttgggaggctgaggccagtggatcacaaggtcaggagttcgagatcagcctgaccaacatggtgaaaccccgtctctactaaaaatacaa

SEQ ID NO: 21484 - DNA, 513 bp, Homo sapiens
  misc_feature (1)...(513): n = A,T,C or G
ggggagcnnnnnnccnntttgcccgcttgcacggcctgcagatatgggcacgaggtcatccgcggcgcggcggcggctctggggtttcagcgagagtcttctaatccgaggcgctgcgggacggtcattatattttggagagaacagattaagaagtacacaggctgctacccaagttgttctgaatgttcctgaaacaagagtaacatgtttagaaagtggactcagagtagcttcggaagactctgggctctcaacatgcacagttggactctggattgatgctggaagtagatacgaaaatgagaagaacaatggaacagcacactttctggagcatatggctttcaagggcaccaagaagagatcccagttagatctggaacttgagattgaaaatatgggtgctcatctcaatgcctatacctccagagagcagactgtatactatgccaaagcattctcttaagacttgccaagagctgtagaaattcttgctgatataatancaaa

SEQ ID NO: 21485 - DNA, 317 bp, Homo sapiens
ctttgccccgctttgcaccgcgctgcaggaattcggcacgaggattacaccttcccacttgctgaaaaggtcaaggccttcttggctgatccatctgcctttgtggctgctgcccctgtggctgctgccaccacagctgctcctgctgctgctgcagccccagctaaggttgaagccaaggaagagtcggaggagtcggacgaggatatgggatttggtctctttgactaatcaccaaaaagcaaccaacttagccagttttatttgcaaaacaaggaaataaaggcttacttctttaaaaaaaaaaaaaaaaaaaa

SEQ ID NO: 21486 - DNA, 504 bp, Homo sapiens
  misc_feature (1)...(504): n = A,T,C or G
gggggggaaattgannggccctnngtatgcaccgncctgtcggattcggcacgagctgaaacagcctgaagggaattctccctaggtctcctgggagtcgagtcccaattcttggcttaagcctgttttagtcagagaccacccaacttatcgtgcaggtcaccggagtgggtggagggtcagaggtcgggtcttcggccctgagaagcagaaatgcaggggccgtgctgtccctggtcccccagggaacagcaaggaaggaactgagccttctccagcagggcttcctgtcccgatgcttctgtctccactcggctttcccaaaaggcggcacccagctcctcaatcgaagcatctgcctcccacccctcggccccctcaagcccaccatctgcttctgagtgtcgcactaggattttcattgcnttaagtgtcttaatcctttgttcccagacacacaacccctctagctctcggaggggcgatcatgagaaaccttccagg

SEQ ID NO: 21487 - DNA, 478 bp, Homo sapiens
  misc_feature (1)...(478): n = A,T,C or G
atagacccgcgctcgggnnnncnatttacccccgctgcaggaattggcacgagcgacagtcagccgcatcttcttttgcgtcgccagccgagccacatcgctcagacaccatggggaaggtgaaggtcggagtcaacggatttggtcgtattgggcgcctggtcaccagggctgcttttaactctggtaaagtggatattgttgccatcaatgaccccttcattgacctcaactacatggtttacatgttccaatatgattccacccatggcaaattccatggcaccgtcaaggctgagaacgggaagcttgtcatcaatggaaatcccatcaccatcttccaggagcgagatccctccaaaatcaagtggggcgatgctggcgctgagtacgtcgtggagtccactggcgtcttcaccaccatggagaaggctggggctcatttgcaggggggagccaaaagggtcatcatctctgc

SEQ ID NO: 21488 - DNA, 472 bp, Homo sapiens
  misc_feature (1)...(472): n = A,T,C or G
nnggtgatctagctcctcctacgatcctctcggaanccgacgagctcttaggaggaagtgacctgcttattttgcacaggtaagagagtagttagctaacctatgggaattatactgtggggccttgtgagctgcttctaagaggctaacctggaaactaagctcagaggcaaggtaataaagcacttcagggcttgctccccaagtgggcctgatttagcaggtggtcctgcgggcgtccaggtcagcaccttcctgtagggcactggggctagggtcacagcccctaactcataaagcaatcaaagaaccattagaaagggctcattaagccttttggacacaggaccccagagaggaaaaagtgacttgcccaaggtcgtaagcaagctactggcatggcaagagcccagcttcctgacggagcgcaacatttctccactgcactgtgctagcagctcatcagggcctn

SEQ ID NO: 21489 - DNA, 475 bp, Homo sapiens
  misc_feature (1)...(475): n = A,T,C or G
ggatatgcnccgcgctgcaggaattcggtacgagggaacgtctctcagttgattatggcaagaagtccaagctggagttctccatttacccagcaccccaggtttccacagctgtagttgagccctacaactccatcctcaccacccacaccaccctggagcactctgattgtgccttcatggtagacaatgaggccatctatgacatctgtcgtagaaacctcgatatcgagcgcccaacctacactaaccttaaccgccttattagccagattgtgtcctccatcactgcttccctgagatttgatggagccctgaatgttgacctgacagaattccagaccaacctggtgccctacccccgcatccacttccctctggccacatatgcccctgtcatctctgctgagaaagcctaccatgaacagctttctgtagcagagatcaccaatgcttgctttgagccagccaaccc

SEQ ID NO: 21490 - DNA, 516 bp, Homo sapiens
  misc_feature (1)...(516): n = A,T,C or G
nggnaggaannnnnttagaanngccctttgacccgcgctgcaggaattcggcacgagaagaagttcaccttcgtctgcatggctctgtcactcacgctctgtttcgtgatgttttggacacccaacgtgtctgagaaaatcttgatagacatcatcggagtggactttgcctttgcagaactctgtgttgttcctttgcggatcttctccttcttcccagttccagtcacagtgagggcgcatctcaccgggtggctgatgacactgaagaaaaccttcgtccttgcccccagctctgtgctgcggatcatcgtcctcatcgccagcctcgtggtcctaccctacctgggggtgcacggtgcgaccctgggcgtgggctccctcctggcgggctttgtgggagaatccaccatggtcgccatcgctgcgtgctatgtctaccggaagcagaanaagaagatggagaatgagtcggccacggagggggaagactctgccatgacagacatgcctncg

SEQ ID NO: 21491 - DNA, 513 bp, Homo sapiens
  misc_feature (1)...(513): n = A,T,C or G
ggggnaggggnnccnnnnnttttgcccgctctgcacgaattcggcacgagccgtcctcacactggcaggacggtgttcatcgcattctcttctgtgaccagcctctaggctagcggctgcattcgtggtctgtgcaaacacttcgtggttctatatatcagcagcaagtgtgcaaaataaaggacctgttaactcagatttctggatattttggtggtagcttctagtcccagaatctgtgtttttaaaatactacatgacattctgtctattcaatcacctggtggccatctttcttgtactaattaactgttgatgagcattttggatattctaggagaaagcctataatttcacatagtttctctttttcatgtaactgtaacctaaatgtattacttctgataaaactatatatcanatgtcactgcaaattagttttatatctgtcatgtgagatnttgcttacttatttttcttttgggtgccatggaagttatggccctgaacatn

SEQ ID NO: 21492 - DNA, 520 bp, Homo sapiens
  misc_feature (1)...(520): n = A,T,C or G
gggggagcnnncnnnnnnnntttggacccgctttgccccgcgctgcaggaattcggcacgaggaaccttggcttttgtgttaccacacgcttttagctcaagcccgacgaaagcaggaaccaggaccaggggcagagacgatcttgaagataagtcataaaagtcatttcacgctaaaggtcctgtgggtggcgtcagagcagataaggcctcgcttaggagagcgaaacacaggagagaccccacattcctcccacggagcagcaaggccagtagccgctgtgacagtgctcactgctggcagtttccaaatctccagaggagttccttagatccttcacaggggaaccttccagtgtgttcttcacacctgatgtgcgtcctcacacctgatgagtctgtgctttggtgttagaggactcacacctggggctggacctgagtgtttttctaagtgtggctaccgctgacgggcaggtgccatacatcaggctgaggctcggctcttatgctaacctga

SEQ ID NO: 21493 - DNA, 482 bp, Homo sapiens
  misc_feature (1)...(482): n = A,T,C or G
gaatggccccgcgctgcaggncnacnattgccccgcgctgcggtgaacctgaagaagtttccatagaagacagtgcccagagtgacctcaaagaagtgatggtgctgaacgcaacagaatcatttgtatatgagcccaaagagcagaagaaaatgtttcatgccacagtggcaactgagaatgaagtcttccgagtgaaggtttttaatattgacctaaaggagaagttcaccccaaagaagatcattgccatagcaaattatgtttgccgcaatgggttcctggaggtatatcctttcacacttgtggctgatgtgaatgctgaccgaaacatggagatcccaaaaggattgattagaagtgccagcgtaactcctaaaatcaatcagctttgctcacaaactaaaggaagttttgtgaatggggtgtttgaggtacataagaaaaatgtaaggggtgaattcacttattatgaaatacan

SEQ ID NO: 21494 - DNA, 456 bp, Homo sapiens
  misc_feature (1)...(456): n = A,T,C or G
ccttgccccgcgctgcaggtttggttgtaaaagagaacccttgttcccttcctaagaaactgccttccacaattaaagaatactcatagaaagaaaataatcataaatcatatttgattaacatttcatttaagcttttaaaatatcaattttttaaatagctcccatttacccaaaataactagttatgggtctatttcttccatgattagaggagagagaacttgattcaagatactgaaaaatagagctgggactgagcctgtgaatgacaggaatgatctattaccaggtgactagtcggaaactacacagacgtgcactggtctgcatttgggggctaaagtgtatatattccatttaaaatggaatttggttgtatttggggcagtcttcagtaaagcctttctcctttcttttctccattgaggacagntctgctcagcaaaattggtg

SEQ ID NO: 21495 - DNA, 459 bp, Homo sapiens
cttcgcccacgcttatcccccgcgctgcaggaattcggcacgaggaaacctggggcgtctcgcgcaaacgtccataactgaaagtagctaaggcaccccagccggaggaagtgagctctcctggggcgtggttgttcgtgatccttgcatctgttacttagggtcaaggcttgggtcttgccccgcagacccttgggacgacccggccccagcgcagctatgaacctggagcgagtgtccaatgaggagaaattgaacctgtgccggaagtactacctgggggggtttgctttcctgccttttctctggttggtcaacatcttctggttcttccgagaggccttccttgtcccagcctacacagaacagagccaaatcaaaggctatgtctggcgctcagctgtgggcttcctcttctgggtgatagtgctcacctcctggatcaccatcttccagatc

SEQ ID NO: 21496 - DNA, 445 bp, Homo sapiens
  misc_feature (1)...(445): n = A,T,C or G
acttgacctccgctgcacgaattcggcacgagattgttggtgacccaagtacagctaagagccaatttctcaagcacgtggaggagttcagccccagagctgtctacaccagtggtaaagcgtccagtgctgctggcttaacagcagctgttgtgagagatgaagaatctcatgagtttgtcattgaggctggagctttgatgttggctgataatggtgtgtgttgtattgatgaatttgataagatggacgtgcgggatcaagttgctattcatgaagctatggaacagcagaccatatccatcactaaagcaggagtgaaggctactctgaacgcccggacgtccattttggcagcagcaaacccaatcagtggacactatgacagatcaaaatcattgaaacagaatatattaaattgggcnnatnntgtannnantcttgg

SEQ ID NO: 21497 - DNA, 497 bp, Homo sapiens
  misc_feature (1)...(497): n = A,T,C or G
catcgcccccctgggganttagaccccgctgcagtatttgcagactggatccaaatcaggagcccagatgaacttaaagaagcgagcatgggattcttagtttttcaagatccgtacacacgaagcctttaatcagcatcaactccagtgtccgttttctctggttttgtgaagactgcacaaaactctcatgatggagaaccaaaggacttagttacctgtttcagtgtcatctaaagtcaactgaaaagtgaagcaggcagtaatacagccatggaaagaaattcaagtttatggaagaacctaatagatgaacacccagtctgcacaacctggaagcaagaggccgaaggagccatttatcatcttgccagtattttatttgtagatcaaagtgacagttgatggcgaatttctgcattacattatcccccttcagttcctggattctcctgagtgggattcactgagacccacagaggaaggcatttttcagg

SEQ ID NO: 21498 - DNA, 479 bp, Homo sapiens
  misc_feature (1)...(479): n = A,T,C or G
ggagggngttttcctaggatagcagtggctgtaggaattcggcacgagaaaagatgagcctcgattttaaaatctatccacatccaactgatggcaccattgatgtgcaaataatgagattccctatctccttttagacctgggacggcaaaagggaagggaaggaaacttagcagagtgctattgactatagattcacatattagcaacaaaatcccgtaattcttttggccaacagcagctattttggggagcagctgtggctgttacataaatagagatgcagccaaaattttaggccttttatcctgcttctagcagaaaaatgcagggagagtcaagtagtctagggtttcaggttgcctcccctcatatggtttttggccaagtgactaaaacagttttccacaactggtaacaaactgctaagccccacctcaaacttgttcactggggactttgcttatcgntcttggggt

SEQ ID NO: 21499 - DNA, 485 bp, Homo sapiens
  misc_feature (1)...(485): n = A,T,C or G
ggacgggannggtttgaccgcctgctgaattcgcctcgagcttttcttggcagttatgtccatgaaatcaagagtgtgatgttctagctattttttttatatatatttttaaatgttcaatattcaactattgaaacaaatgtacatctgtgaactagctaaaatcatcttatgtaccactaatatgcccagcacattttgtaaaacagtcctgatttggcctccaagggtatttattgaactaccagcagtatctaagagaccacgaaggaataccacgaaggaatttatgctccagtgcttgccataatttgtctgagaaggaatctgttaaataaaagcttttatcctctaacctttaccttcatcagaccttataaaaggtcaaatggtgattcttaagttttttagtcacaaatcttacttattcagtattagtgcgaagagtagaatactttcaagtaagcctaaacttacatgataac

SEQ ID NO: 21500 - DNA, 474 bp, Homo sapiens
  misc_feature (1)...(474): n = A,T,C or G
agggcggggtgnaatagaactgcatggcntcggacnnggcacgagattggatcatgttggaaagaaggcaagtgaaaaggtcagagatgaagtagcgaagttatggaatatcgtggaaaggatactagttgtgaaatggaaagagacaagttatagtaccccaaaagcaaaacaagcaggagatgcaagagatgccccaaaaggacaaagcaacaattttctgttgccacctttataccggaagactctgttgtagaagaaaagaaggctttggtgcaccttatgtgggaggaggaggggcagggcatgctgatgctgagcgtacaggcagacaagagcgtagcctgctgttgcctccatcactatgaaatgacttattttacctgaaggacccatgagttatgttcctctaattcctttcactctccctaagccctctgagagagatgaagatagatgattttatttgtacta

SEQ ID NO: 21501 - DNA, 503 bp, Homo sapiens
  misc_feature (1)...(503): n = A,T,C or G
gagccnnnnnnaattgacatctgccggctgtangaattcggcacgagagacaaagaactctatacacagaatgggattgtacatatgctggacagaaataagagaatcaagccccggccagaaagattccagaactgcaaagacctgtttgatctgatcctcacttgcgaagagagagagtatgaccaggtggtggaagatctgaattccagagaacaggagacctgccagcctgtgcacgtggtcaatgtggacattcaggacaaccacgaggaggccaccctgggggcgtttctcatctgtgagctctgccagtgtatccagcacacggaagacatggagaacgagatcgacgagctgctgcacgagttcgaggagaaaagtggccgcacctttctgcacaccgtctgcttctactgagcccagcgcccgcatggagccgcctctggagctatctgtagtcatactttttccttcctgacatttgtgtttacttaacagag

SEQ ID NO: 21502 - DNA, 458 bp, Homo sapiens
cctatgccccgcgctgtatgaattcggcacgagaaattccaccatggcgtaccgtggccagggtcagaaagtgcagaaggttatggtgcagcccatcgtatcctacgcaggatgtcaggactaggagccactgtggtgcagaacctcatcttcagatacttacaaaatagatcgcggattcaggtgtggctctatgagcaagtgaatatgcggatagaaggctgtatcattggttttgatgagtatatgaaccttgtattagatgatgcagaagagattcattctaaaacaaagtcaagaaaacaactgggtcggatcatgctaaaaggagataatattactctgctacaaagtgtctccaactagaaatgatcaatgaagtgagaaattgttgagaaggatacagtttgtttttagatgtcctttgtccaatgtgaacatttattcatattggtttg

SEQ ID NO: 21503 - DNA, 473 bp, Homo sapiens
  misc_feature (1)...(473): n = A,T,C or G
cttcgacccccctnatagacccgcgctgcaggaattcggcacgagctacctgggactgagccatcacctgctggcactgaattntatcattgtttcttttggcaaaaaaagcgcgtggtcttctgcccaagtgaaggtgaccgacacagactttgatggtgtggaagtcagagtgtttgaaggccctccgaagcccgaagagccactgaaacgcagcgtcgtttatatccacggaggaggctgggccttggcaagtgcaaaaatcaggtattatgatgagctgtgtacagcaatggctgaggaattgaatgctgtcattgtttccattgaatacaggctagttccaaaggtttattttcctgagcaaattcatgatgttgtacgggccacaaagtatttcctgaagccagaagtcttacagaagtatatggttgatccaggcagaatttgcatttctggtgacagtgctggtg

SEQ ID NO: 21504 - DNA, 472 bp, Homo sapiens
  misc_feature (1)...(472): n = A,T,C or G
aagcgagnttttnaatcgactgctgaggcattggacgnggacggnctgatgatccacagcggagaccctggtaactactacgttgacactgttgtgcgccacgtgttgctcatacagggcgggctgggcatcaaggtgaggatgatgctgccctgggacccaactggtaagattggccctaagaagcccctgcctgaccacgtgagcattgtggaacccaaagatgagatactgcccaccacccccatctcagaacagaagggtgggaagccagagccgcctgccatgccccagccagtccccacagcataacagggtctccttggcagctgtattctggagtctggatgttgctctctaaagacctttaataaaattttgtacgaagaccaaaaaaaaaaaaaaacccttgggggggggccgggtccccaattccccttatagggagcgtttaacaattcattggccggcg

SEQ ID NO: 21505 - DNA, 459 bp, Homo sapiens
  misc_feature (1)...(459): n = A,T,C or G
cctcgcccccgcngatgcccccgctgcaggaattcggcacgagcccaggtcagcaagggcacctgcgagcaaggtccttccatagtgacgccccccaaggacatctggaatgtcactggtgcccaggtgtacttgagctgtgaggtcatcggaatcccgacacctgtcctcatctggaacaaggtaaaaaggggtcactatggagttcaaaggacagaactcctgcctggtgaccgggacaacctggccattcagacccggggtggcccagaaaagcatgaagtaactggctgggtgctggtatctcctctaagtaaggaagatgctggagaatatgagtgccatgcatccaattcccaaggacaggcttcagcatcagcaaaaattacagtggttgatgccttacatgaaataccagtgaaaaaaggtgaaggtgccgagctataaacctccagaatn

SEQ ID NO: 21506 - DNA, 457 bp, Homo sapiens
cctatgccccgcgctgtaagaattcggcacgagctggctcttccatagtccattttccccttttatctcccattaatttctgtcttcctctctcaccttttccatgtctctagcatcctccaggatttaaaatcatctttacccaacttatctgtgaagtaatggcaaaagaacatctccaaattaagtactccttttcttcaaaggagtttcatgggatgtacagctagtataaaataaaaatatgggaagatgtccaatcttaaaaaccataagggcaaattaagacaaaactaagctgcccagagcagggtgagtggaaccagttttatgaataaagatgcttgtctcagcactatatgtggatatcaaaaattgtgaacaacttgaacacctatcaggaggagaatactttaatcaattatggcacattcaggagataatgttttacagtcat

SEQ ID NO: 21507 - DNA, 474 bp, Homo sapiens
  misc_feature (1)...(474): n = A,T,C or G
gactgtcccctnggnannncaactaggtgtcgtgcggaattccgcacgaggtaccaggaggcttacgatgagtgcctggaggaggtgcagtccctgcccctacccctatgaggggctccggtagcacctgggcacctgccgctggaagctattgggctggcagcaggacgactggctgtcctcctgcccacccacactgacggcatcttcccagttccccaaggcacgccttcttcccaggcagctctaacagccctttcatgaaggtaatgctagtcttctgtccatcagtgccatttcctgtagaactaaaggctgttccaagaatgtggggtggggaaagtaaatgctaagactannnaaaaaaaaaaaaaaaaaaaaacaaaaaaaaaaaaaaaaaaaannnnnnntnnnnnnnnnnnccccgggggggggccccacccccatttccccctatggggggggccttgaaac

SEQ ID NO: 21508 - DNA, 477 bp, Homo sapiens
  misc_feature (1)...(477): n = A,T,C or G
atagaaaacaaataaaanttttgccccgctgcaggaattcggcacgagacgccatggaaaccatgatgtttacatttcacaaattcgctggggataaaggctacttaacaaaggaggacctgagagtactcatggaaaaggagttccctggatttttggaaaatcaaaaagaccctctggctgtggacaaaataatgaaggacctggaccagtgtagagatggcaaagtgggcttccagagcttcttttccctaattgcgggcctcaccattgcatgcaatgactattttgtagtacacatgaagcagaagggaaagaagtaggcagaaatgagcagttcgctcctccctgataagagttgtcccaaagggtcgcttaaggaatctgccccacagcttcccccatagaaggatttcatgagcagatcaggacacttagcaaatgtaaaaataaaatctaactctcatttgacaagca

SEQ ID NO: 21509 - DNA, 518 bp, Homo sapiens
cgaccccccccccgcccccccccccttttgccccgcgttgcaggaattcctcacgagggcatgcgaggtgcctttggaaagccccagggcactgtggccagggttcacattggccaagttatcatgtccatccgcaccaagctgcagaacaaggagcatgtgattgaggccctgcgcagggccaagttcaagtttcctggccgccagaagatccacatctcaaagaagtggggcttcaccaagttcaatgctgatgaatttgaagacatggtggctgaaaagcggctcatcccacatggctgtggggtcaagtacatccccagtcgtggccctctggacaagtggcgggccctgcactcatgagggcttccaatgtgctgcccccctcttaatactcaccaataaattctacttcctgtccaaaaaaaaaaaaaaaaaactcgggggggggcccggcacccaattggccctataggggtcggataacaatccatgtgccggcgtttaacaccgtgggg

SEQ ID NO: 21510 - DNA, 470 bp, Homo sapiens
  misc_feature (1)...(470): n = A,T,C or G
aggcgtntnnnatagaactgagggctgcggagcgagacgagcctttcgagcgcagctcaagcatttggttcaaggtcctactgccggagtcgtctgaggcctccatccgtctgtcgtcacgaaaaaggttttggggggactaataagcacttcctgaatgcacatttgctccacgcccctgctgtagggagagggtctgcagacacttcaacaaatagaatcctaggaccttacctgtgagtacaagagctggaatcttcccaccaacttcttaaaattcaatcctatacttggtccatttagcttagactggaaatttcccaaggcagtttgttttgcaatcttttgcatgattttagctctgtatagtttagtgaatgtttatggtactgaataaaacagtctaaaaacgttgggtaannnanaaaaaaaaaaaaaaaaaaaaaaaaaaaaaaaaacctggggggggg

SEQ ID NO: 21511 - DNA, 459 bp, Homo sapiens
cttcgcccccgcttagtgactcgctgcaagaattcggcacgagccaggattcacaagaaggtggcccggaccatcggtatttctgtggattcgaggaggcggaacaagtcctccgagcccctgcgcgccaacgtgcagcgtctgaaggagtaccgctccaaactcatcctcttccccaggaagccctcgaaccccaacaagggagacagttctgctgaagaactgaaactggtcacccagctgaccggaccggtcatgcccgtccggaacgtctataagaaggagaaagctcgagtcatcactgaggaagagaagaacttcaaagccttcgctagtatccgtatggcccgtgccaacgcccggctcttcggcatacgggcaaaaagagccaaggaagccgcagaacaggatgttgaatagaaaaaataaagccctcctggggacttggaatcaaaaaaa

SEQ ID NO: 21512 - DNA, 456 bp, Homo sapiens
  misc_feature (1)...(456): n = A,T,C or G
ntttgccccggctgcaagaattcggcacgagccggcattcacaagaaggtggcccggaccatcggcatttctgtggatccgaggaggcggaacaagtccacggagtccctgcaggccaacgtgcagcggctgaaggagtaccgctccaaactcatcctcttccccaggaagccctcggcccccaagaagggagacagttctgctgaagaactgaaactggccacccagctgaccggaccggtcatgcccgtccggaacgtctataagaaggagaaagctcgagtcatcactgaggaagagaagaatttcaaagccttcgctagtctccgtatggcccgtgccaacgcccggctcttcggcatacgggcaaaaagagccaaggaagccgcagaacaggatgttgaaaagaaaaaataaagccctcctggggacttggaatcaaaaaaaaaaaaaaaa

SEQ ID NO: 21513 - DNA, 472 bp, Homo sapiens
  misc_feature (1)...(472): n = A,T,C or G
catcgacccccccnatagacccgcgctgcaggaattccgcacgagctttgaaagactgtgctgtcctttaacataggtttttaaagactaggatattgaatgtgaaacatccgttttcattgttcacttctaaaccaaaaattatgtgttgccaaaaccaaacccaggttcatgaatatggtgtctattatagtgaaacatgtactttgagcttattgtttttattctgtattaaatattttcagggttttaaacactaatcacaaactgaatgacttgacttcaaaagcaacaaccttaaaggccgtcatttcattagtattcctcattctgcatcctggcttgaaaaacagctctgttgaatcacagtatcagtattttcacacgtaagcacattcgggccatttccgtggtttctcatgagctgtgttcacagacctcagcagggcatcgcatggaccgcangagggca

SEQ ID NO: 21514 - DNA, 495 bp, Homo sapiens
  misc_feature (1)...(495): n = A,T,C or G
aattgatcgccttngtttgacngccgttccctagtcacaactatttttgtaaaagacatttgatagaaaggaacacgtttttacatacttttgcaaaataagtaaataataaataaaataaaagccaaccttcaaagaaacttgaagctttgtaggtgagatgcaacaagccctgcttttgcataatgcaatcaaaaatatgtgtttttaagattagttgaatataagaaaatgcttgacaaatattttcatgtattttacacaaatgtgatttttgtaatatgtctcaaccagatttattttaaacgcttcttatgtagagtttttatgcctttctctcctagtgagtgtgctgactttttaacatggtattatcaactgggccaggaggtagtttctcatgacggcttttgtcagtatggcttttagtactgaagccaaatgaaactcaaaaccatctctcttccagctgcttcagggaggtagtttcaaagg

SEQ ID NO: 21515 - DNA, 474 bp, Homo sapiens
  misc_feature (1)...(474): n = A,T,C or G
gtgcgccnnnananaattgagnatcgtgccgcgctgcacgaattcggcacgagccaagatggccgcgtgtgggatcctcgggtaccgggagcgaacgaggaggttctggctcagtgcatccactctgggagagcgtgggcctggttcctgggggcgatcgacagtcacccatcaacattcggtggagggacagtgtttatgatcccggcttaaaaccactgaccatctcttatgacccagccacctgcctccacgtctggaataatgggtactctttcctcgtggaatttgaagattctacagataaatcagctgcacttagtgcattggaacgcactcacatttgaaaactttgaggatgcagcactggaagaaaatggtttggctgtgataggagtatttttaaagtggcactatcacaacagagtgacataatggtgggataacatggacacttgtcttcttccttactgt

SEQ ID NO: 21516 - DNA, 492 bp, Homo sapiens
  misc_feature (1)...(492): n = A,T,C or G
atcgcncngcctgcaggaatatcgaacgacggttcttgtaaattagatacgtgtagtggtgtttcagaatgtttgtttatgcactagttcagacaactttccctgttacttgttcttgataagtgaaaactgcagggaaataaaaaatacatatcaaaacatggacatgctgcatatgtgtttatttcacaatgtgcacacagtataagtgaaaatttaagggagatgatagcacttaacagcacttttcatgttcacatgctttccaagcattaatgaaaagaactataggaagctcatctgtgggctctattgggtttcagataatccaatataaactacctttgatatgaaagttcgtaagatattttacagaatgtaagtaatttgcagtatcgcagtcattgaaatgtcataagtgagcctcattttataaataaaagtttagagtagaattatattgcaaggcggttntgtcaagtaagtactggg

SEQ ID NO: 21517 - DNA, 472 bp, Homo sapiens
  misc_feature (1)...(472): n = A,T,C or G
ngggcgtcntgnaatagggaatttagggctagnannggcncgagccaattggagaattgccagacttgtggtaccaattatatcatctcagtcttgaatttactcacgctgattgctgaacagataaatacgaaactgccatcatcatttgtagaaaaactgtttataccatcatctaaactactattcttgcgttatcataaagaaaaagaggttgttgctgtagcccatgctgtttatcaagcaatagctcagcttgaagaatattcctgttttggagactgcctataagataatattgggagaaatgacttgtgccctaaacaaccttctgcacagtctgcaacttcctgaggcctgttctgaaataaaacatgaagcttttaagaatcatgtgttcaatgtagacaatgcaaaatttgtagttaaattagacctcagtgccctgactacaattggtaatgccaaaaaa

SEQ ID NO: 21518 - DNA, 497 bp, Homo sapiens
  misc_feature (1)...(497): n = A,T,C or G
cttcccccgccccgggnnnnatagaccagcgctgcaggttttggtaaatgtagactgtgcacttgagaagaatgtattttgagttgttgggtacattgttttgtgtgtgtcaggtgacattgactaatcctgttgctcagagctcctgtacccttactgactgacttaagcctggtttctcagttactgagagaggcctgtgaacagttctagctatgatcatgaacatgtgttttcttcttagttatgtgagtttttgctatacgtgttttggggctattttgtcagatgcctacaaatttaggattgttttatcttcctgtcgaactgaccttgtcattattatgaactatttctcttcgcctctccttttcacttcttgccttctgtggattttgtctgatactaatccaggcacactgctgctgttttggtcagcggtttcataatgcatcttcttccctccttctactgtactggatttaaagcgcaccttt

SEQ ID NO: 21519 - DNA, 454 bp, Homo sapiens
ccttgcccgcctgtaggtttttttgtttttttggttttttgatttaacgctctttttacatcagtgcaacagctttgccggccttgctgaatttagcagatgagagtcggtgtttacactgggttaggttcagctttctgcgtatcgggtagtatttggagtagagagaaagattggctgcaggggaaataaattgcatgttatagaccgatgtcagctcgaaaggagcaaagccattttggaaatctagctcttggccagtatctacgtttaggcacgacagcgccgttaagcaacacaaaatgaagggcgaggaatgattttctacacactgtgcttggaaaatttaaataggtaacctttgggcttgcacctgggcgtcttcttcggagtccagatctgggaagtcctataataaaaaaaaatcacaagaggtgtgatcagttatacttca

SEQ ID NO: 21520 - DNA, 492 bp, Homo sapiens
  misc_feature (1)...(492): n = A,T,C or G
gggggggcnnnnaagggaggggnnttttgannnccnnttctgactagcgctgcaggaattcggcacgagccagactgaggaagacccggaaacttatgggccacgtgagccacggccacggccgcataggcaagcaccggaagcaccccggcggccgcggtaatgctggtggtctgcatcaccaccggatcaacttcgacaaataccacccaggctactttgggaaagttggtatgaagcattaccacttaaagaggaaccagagcttctgcccaactgtcaaccttgacaaattgtggactttggtcagtgaacagacacgggtgaatgctgctaaaaacaagactggggctgctcccatcattgatgtggtgcgatcgggctactataaagttctgggaaagggaaagctcccaaagcagcctgtcatcgtgaaggccaaattcttcagcagaagagctgaggagaagattaaaagtgttgggggggccc

SEQ ID NO: 21521 - DNA, 500 bp, Homo sapiens
  misc_feature (1)...(500): n = A,T,C or G
agaggttncagggngggggnnnnaaattgaaaacccattgatccgcgctgcaggcaggtatgtggaccgagtgactgaattcctccagcaaaagctgaagcagtcccagctgctggctttgaagaaagagctgatggtgcagaagcagcaggaggcacttgaggagcaggcggctctggagcctaagctggacctgctactggagaagaccaaggagctgcagaagctgattgaagctgacatctccaagaggtacagcgggcgccctgtgaacctgatgggaacctctctgtgacaccctccgtgttcttgcctgcccatcttctccgcttttgggatgaagatgatagccagggctgttgttttggggcccttcaaggcaaaagaccaggctgactggaagatggaaagccacaggaaggaagcggcacctgatggtgatcttggcactctccatgttctctacaagaagctgtggtgattggccctgtggtctatca

SEQ ID NO: 21522 - DNA, 489 bp, Homo sapiens
  misc_feature (1)...(489): n = A,T,C or G
catagaccccgctgcaggaattcggcacgaganagaacttgttcctggctgatccaagtgcagtggtatttacaactaattgatcacaaccagtttgtagatttctttgttccttctccattcccactgcttcacttgcctagtcttgaagaaaaaaaacaaaaaacaaaaaaaaaccttgttcctttataggttcctggtagaatcagtagagatgatttcagctcattgacatttttttaagctatatccccttgtcattccattgagaaagctgacaactgggatagggaggggattagataatagatggggtcaaattctgtgtgaatgtgaacttgcctagtaagcactttgtctctgttcactactgcgatagaggaaatctatctccctatcttgggtccttgaactacagcctgctgtcttacaccagtggagctaccctttaaatgacaaattatttgatgctaatgaatatggtgaaat

SEQ ID NO: 21523 - DNA, 475 bp, Homo sapiens
attgaaaccataaaaaatttgaccccgctgcagttctgcttcaattacaccagttctggggcaaagacactgatgaaacaacacccatacctgaaaagaataaatgtgtgactttcaaatcccctttcgcagtgaaagaaacagcaaacacttaagattcagcatctgttctccagttgcactgaggaatgcactgtctcgcagcaccagctctgcagagcccttgccccagactctttgcggttttatttatatgtatttccatatttcattcctgtgtgtcactgctgcattggtgtggcagcaagtgaccaaatgctacaggtcttactatggacaccaggtcaggtgcaaccacacaaaacaaagccagttccatgagctgcctatgatatgcattgcggaagtaacattttacccagggtgtgccattgcagtgatataaatatatttttttcttagactaaaaaaaaaa

SEQ ID NO: 21524 - DNA, 451 bp, Homo sapiens
  misc_feature (1)...(451): n = A,T,C or G
agtggaaataactcctnccctgcgcgaanncgcacgagcgtaaagctagttttcaagaggaagaaaaccacacttactaatgttttctgtatctaatcaaatactcttcatatataattaagcctcatgttatcttttttttaaatcaaccttttgaacttcaactacagtctaaaagtcttgatggtaactatagtgtaattatctttttgtctcactggattttatagttagtggaaaatgcctttacaaaatgtatttaaaatagctgtcatctcatttgtaaattttgtcgtgtattgtgatatagtgaaccttattgtccttatgaaatggtagctttgtgaaatacattcaccaaaaatcaaaatttgaacatctttatgattccttaccagctgaagccagatagacaggtattaattgagctgatgccccacttgagtttata

SEQ ID NO: 21525 - DNA, 464 bp, Homo sapiens
  misc_feature (1)...(464): n = A,T,C or G
aatagatcaccttgnttancagacctgcggagacggcagcnntagccgggcctgagctgtgctagcacctcccccaggagaccgttgcagtcggtcagcccccttctccacggccttgcccactatgtaaccatgtgcgaccgaaaggccgtgatcaaaaatgcggacatgtcggaagagatgcaacaggactcggtggagtgcgctactcaggcgctggagaaatacaacatagagaaggacattgcggctcatatcaagaaggaatttgacaagaagtacaatcccacctggcattgcatcgtggggaggaacttcggtagttatgtgacacatgaaaccaaacacttcatctacttctacctgggccaagtggccattcttctgttcaaatctggttaaaagcatggactgtgccacacacccagtgatccatccaaaaacaaggactgcagcctatattc

SEQ ID NO: 21526 - DNA, 498 bp, Homo sapiens
ggcggtgcaattgacggctgtggaaatcgacaggcgctggcctccgcttcgctcgattgcactgcactccgctgagaatcctggaggaatacacaattcatcgttgcacccccacctcagagtgtaatcgcatttctgcttggtagaggccgagcccagcaaaggtggctccttctgaatgtgtggtcagcatctgtacaaatgcattttatttgctatagtttgtaaagctgtaaagttaaaagagatgaaaaccttttcagcataaatatattttacttgcactgtgttttttagctaaaagtgaaaacctagattaaataaaatcaaagttgagaagaatcatcaaaagactgtttctcggtgtgaatcaagtgttgaaaaatggttggtgtattttgtcagtaattgtacataacttttggcacatgacatagaaatggctatgtaaactataattattttgctaagagactgtatgcaagccttgggccgact

SEQ ID NO: 21527 - DNA, 302 bp, Homo sapiens
  misc_feature (1)...(302): n = A,T,C or G
aggggtttncacggnggagnnnnnnaatttgaaagccaattgatncgtcantgcaggaatnccgcacgagcattgcggctccctccggttctgctgctgacaaagttgtgattgaggcctgcgacgaactgggaatcatcctcgctcatacgaaccttcggctcttccaccactgattttaccacacactgttttttggcttgcttatgtgtaggtgaacagtcacgcctgaaactttgaggataactttttaaaaaaataaaacagtatctcttaatcactggaaaaaaaaaaaaaaaaaa

SEQ ID NO: 21528 - DNA, 412 bp, Homo sapiens
cgcggtgttttacctgacggctcgtttacgacggctgagagctaatttggcccaaggctgggggctgtgttttgtgtgtgtgtataaatttgcactgaagtcttgtttcagaaaccagaccactgaggagagcctgctgagctgaggccatggcctgcgtggcttggggaaatgagttggtggataccttctgggcttttgaacttgcccctcccccatttccctctcccccatgtgtctgaccctgtcttacccatttcaagttcaagcggtgcagcaccttcgaagcatcaatgcacacacctgctgttgcttttgatttctggaaggcatgtagtttcaacttgtaacaaaaatatttgtagtcttcaataaactgtggtatttctttaaaaaaaaaaaaaaaaaaaaa

SEQ ID NO: 21529 - DNA, 459 bp, Homo sapiens
  misc_feature (1)...(459): n = A,T,C or G
natagcccgccctgaagaactctgcacgaggggaaaaaaatttttttaattacaaactcaattcatttggtgcatttcaaaggtgcaatacttttcttcatttatcagtgaaagaagttagaaattaacttcccaaaaaaatcagcaaatggcaaacaaatgtccttgaaagtcacagtcacatatagtgcgtcctataaaagaggaggggcaagatgggctccacccactttcatgagtttcatcaaatactggatctactcaagggtggagagaaaaggcaactttcaaaaaggagtatgttattaaatgaggcatttactatactccttcctaagagcaccagatggggaacatgttttctaaactagatctaggaagtggaatgtggaatcaatccgtcctcctccccttaagggctaaccactggttaatgaattaaaaaaacaagactaaaaa

SEQ ID NO: 21530 - DNA, 484 bp, Homo sapiens
  misc_feature (1)...(484): n = A,T,C or G
gagccggnnnnnnnnnnnttactgacctgcctgcacgaattcggcacgaggtctctagtaaatgcagctagattcaaatgggctgataaccaaattttaacacatcagcattcaccaccaggtttacttttattttcagattggctcattttgtgcagaccttagagcaaagtttcctttatggtatctgtgtacgtatccaaacttcttttaattgttcacagattttaaaagcggtagcaccacatggttgtgtagatcagacctgtgtatttagatcagacctgtgtatcacgtaagtgtgtgagtgcagtgcagatgagcaccatttagttatatgtgctaggcaaatctccaacacagttgatgtgtagtcttgtggtagatttgtgcatactgtaagcaaattgcttagcttctctagacatcagtttccacatctgaaaaataagaagatgagagtacacggttgttatgaacaaat

SEQ ID NO: 21531 - DNA, 468 bp, Homo sapiens
  misc_feature (1)...(468): n = A,T,C or G
gaggtanaaaatgaaggcangatagctagggaanangccacgaggntttattgcgtttggtccacagtcgtatttcacattatctcacggagcagggcccctgggtggggggtccctgtgcagtacttggcggggcatgtggccggggaagatggagcagtataagctggtcgggcccagaagggaggagggctggggactccttaaaacctactgagggcctgggcacggtggctcacacctgtaatctcagcgcttggggaggcggaggcgggcggatcacacctgaggccaggagttcgagaccagcctggccaacatggggaaaccccatctctactaaaaatacaaaaattagccaggcctggtggcacgcgcctgtaatcccagctacttgggaggctgaggcaggagaatcacttgaacctgngaggtggaggttgcagtgagtcaagatcgtgtcactgc

SEQ ID NO: 21532 - DNA, 492 bp, Homo sapiens
  misc_feature (1)...(492): n = A,T,C or G
cggggttcccggnnggnnnnaaattgaccgccatagaaatccgctacgaggaacggtggcgagaagaaaaagggccgttctgccatcaacgaagtggtaacccgagaatacaccatcaacattcacaagcgcatccatggagtgggcttcaagaagcgtgcacctcgggcactcaaagagattcggaaatttgccatgaaggagatgggaactccagatgtgcgcattgacaccaggctcaacaaagctgtctgggccaaaggaataaggaatgtgccataccgaatccgtgtgcggctgtccagaaaacgtaatgaggatgaagattcaccaaataagctatatactttggttacctatgtacctgttaccactttcaaaaatctacagacagtcaatgtggatgagaactaatcgctgatcgtcagatcaaataaagttataaaattgcaaaaaaaaaaaaaaaaacctggggggggggcccggtaccaa

SEQ ID NO: 21533 - DNA, 496 bp, Homo sapiens
gcggtggaatgacggcgtggaatcgacggctgcggcgcagtgcaatgcctgaggggatcaggcttttctactccaggcaaacctgccccatcttgtcgcttttaggacctcccacaacctggatccccacacatccatagttctgcctacccagcttctcctacacacttgtgaatagtatttattagcttgccgaggcttcctgctagcaaccacactgaagagatcgatgcctcctttcaagctagccaagttttctgcgagccttcagagctaggagggcaccctaggctctgggatcccgtgtctttccagacaatgatttgtttcctttcctttgttttttcttttaactggaataattaccattgaaaaagaagttcctttgagcatgtatgtgtctgcctctaggatgagctcagagcgagagatgacacaatgcctcactcaggccccgggctccctggccacaagctttttctatcctgttttcatg

SEQ ID NO: 21534 - DNA, 465 bp, Homo sapiens
  misc_feature (1)...(465): n = A,T,C or G
ngattgatcgcctgcggaatnccttggagcgcctctttcggntctggctgggatcatccgcggcggccgggctcgtggggcgcctggagtgagggttctggttcccgccggcgaggattgttaaaatgagtcttcggaagcaaacccctagtgacttcttaaagcaaatcatcggacgaccagttgtggtaaaattaaattctggagtggattatcgaggggtcctggcttgcctggatggctacatgaatatagccctggagcagacagaagaatatgtaaatggacaactgaagaataagtatggggatgcatttatccgaggaaacaatgtgttgtacatcagtacacagaagagacggatgtgaagacaccaagagagcaacgcttttcatagttggatatatttttttatgaattttttctaatttttgcttcttttgtgatacaatttgtcctctttct

SEQ ID NO: 21535 - DNA, 289 bp, Homo sapiens
  misc_feature (1)...(289): n = A,T,C or G
agttgacccccttgnnnnncactgaccgcctgcggaattccgacgaggcgatttgtctggttaattccgataacgaacgagactctggcatgctaactagttacgccggcatcctgcagctggtggagagcgtccggcagccgggctgcctcctggagcagctggtcctgtacgacatttactggtctgaggagatggaggaccggctgcaggccctggagaaggacaagccatccctgagggtcatctcctgaggctcttcctgctgctgctctccctggacgaccgg

SEQ ID NO: 21536 - DNA, 495 bp, Homo sapiens
  misc_feature (1)...(495): n = A,T,C or G
gggggggttnnnaattcgccccgcgctgtatgaattcggcacgagctcaaacctggagagtgccttcgagtgcgaggcgaggtggctcctgacgctaacagcttcgtgctgaacctgggcaaagacagcaacaacctgtgcctgcacttcaaccctcgcttcaacgcccacggcgacccctacaccatcgtgtgctacagcaaggacggcggggcctgggggaccgagcaacgggaggctgtctttcccttccagcctggaagcgttgcagaggtgtgcatcaccttcgaccaggccaacctgaccgacaagctgccagatggatacgaattcaagttccccatccgcctcaacctggaggccatcaactacatggcagctgacggtgacttcaagataaaatgtgtggactctgactgaagtcagtctgcccatgggccccaataaagagagctggctctgatccctctaaaaaaaaaaaaaaagagctgctgg

SEQ ID NO: 21537 - DNA, 484 bp, Homo sapiens
atttgccccgcgcttttgaaatgcgctgcaggcagacatgctgctcatagggaacactgggctcagctcagagcaatcccgggcccatatggccctgtggacggtgctggcagcccccctcttgacgtccacagacctgcgtaccatctccgcccagaacatggacattctgcagaatccactcatgatcaaaatcaaccaggatcccttaggcatccagggacgcaggattcacaaggtaatgaagatgttctggaattacagtacttacgggtgcctatctttctgtacaaataacacatggcttttgcctcctgactggagcctttcaggtatacagagagcctacaattagctgctgttcaaggatccacgtgagagacacggaggctgggacaggggtgatcgcagtgaaaatgaagaaggactggccagatctccaggactcattgatcatcgtgaggggctgccaggacatatgcaa

SEQ ID NO: 21538 - DNA, 469 bp, Homo sapiens
  misc_feature (1)...(469): n = A,T,C or G
natttgcccctcgctgcaggattcggcacgagtgggagcctggctttcccctccgagagggttcaggtgcctctgccatagcttctgtcgcctgtgctgtgacccgcactggtcgtgggagtcacctgaaaggcaagaaatggattcagtggcctttgaggatgtggctgtgaccttcacccaagaggagtgggctttgctggatccttcccagaaaaatctctgtagagatgtgatgcaagaaaccttcaggaacctggcctctatagggaaaaaatggaaaccccagaacatatatgtagagtacgaaaatctaaggagaaacctaagaattgtgggagagagactctttgaaagtaaagaaggtcatcagcatggagaaattttgacccaggttccagatgacatgctgaaaaaaacaactactggagtaaaatcatgcgaaagcagtgtgtatgngaaagtangc

SEQ ID NO: 21539 - DNA, 492 bp, Homo sapiens
cattgaccgcgctgcggcttttatggtcagggtgagggggggaaagacactcaaataaatacatttttaaattaaaatttagcccagttggtgagtcagagttctactgtcccatgaaacatctcaacagttgttaaaaagtcgatttgcattttttttcaaagtgaaacgtgtatgtaaacatcataaagtaaacaatttacaggaatttcgaggcttctatctgaacatagcttaggctctttctggggctatttttatgattaggaaaaaaaatcccaaacttttataaagttcctttttgttaagaagtgcaattccacctgtgcgagacgcggctgggtctctctttcattcacaccagtgctgctggtaggaacctgttctagaagagcacttgtcgcaggggtggggtggggagccctatttggtacaacaaaagagtgcatctcaccacattaaaaatacacattcctggaaatttatatccct

SEQ ID NO: 21540 - DNA, 473 bp, Homo sapiens
  misc_feature (1)...(473): n = A,T,C or G
ntttgaccgcgctgcaggaatttggcacgacgtgagagagagagagagagagagagagagagagagagagagctcgcgccgaattcggcacgagccagcacctactgagggaaaggaaaagcccctggaaatgcgtgtgacctgtgaagtggtgtattgtcacagtagcttatttgaacttgagaccattgtaagcatgacccaacctaccaccctgtttttacatatccaattccagtaactctcaaattcaatattttattcaaactctgttgaggcattttactaaccttataccctttttggcctgaagacattttagaattttctaacagagtttactgttgtttagaaatttgcaagggcttctttttcgcaaatgccaccagcagattataattttgtcagcaatgctattatctctaattagtgccaccagactagacctgtatcattcatgggataaattttac

SEQ ID NO: 21541 - DNA, 502 bp, Homo sapiens
  misc_feature (1)...(502): n = A,T,C or G
ctttcgcccgcgctgcanganatttgctccgcgctgcaggaattcggcacgaggggaccctacctgacccatcagcaaaaggtgttgcggctttataagcgggcgctacgccacctcgagtcgtggtgcgtccagagagacaaataccgatactttgcttgtttgatgagagcccggtttgaagaacataagaatgaaaaggatatggcgaaggccacccagctgctgaaggaggccgaggaagaattctggtaccgtcagcatccacagccatacatcttccctgactctcctgggggcacctcctatgagagatacgattgctacaaggtcccagaatggtgcttagatgactggcatccttctgagaaggcaatgtatcctgattactttgccaagagagaacagtggaagaaactgcggagggaaagctgggaacgagaggttaagcagctgcaggaggaaacgccacctggtggtcctttaactgaagctttggccc

SEQ ID NO: 21542 - DNA, 497 bp, Homo sapiens
  misc_feature (1)...(497): n = A,T,C or G
gggggatnnnnattctcgcacgcctgcaggaattcggcacgagcaaatgtaaagactgtgttcacaaccgtagtaaaatttggtttcattggaaatgaaacaaattctaaagtatgctttttcactagtccctttgattttgctatatcataacctcttggttcatatgctgagaaatttttcagaaagtccatttttgtttaaaattagaacttttcagaatgccaaatgaaggctaaaattttggccagaacattacaaaagttttaaatcgtagacgtaactccccctgaaataaagttaggtagtaaaaatccttaatgaaaccagtggatgtgcttaacgtaaggttagtaaagcatacaaagaatctagtgtgctcagagcttggtacaatgagctgaattagatggccttatgaaactctntctaacctcttacccaacctgtttctccttggttaaaattatacttgaaggcccagaacactcatggcc

SEQ ID NO: 21543 - DNA, 497 bp, Homo sapiens
  misc_feature (1)...(497): n = A,T,C or G
ggggcgttnnnngggccttgatcgcctgtggaattcggcacgagcattcccatccgaatgtccactgcgctcacagattcctttcctcctaaaacttcagccttggccaggctcacggccaggattatggtggctcacgcctgtaatcccagtactgtgggaggccgaggcaggaggatcacgaggtcagaagatcgagaccatcctggccaacatggtgaaactctgtctctactaaaaatacaaaaattagctggacatggtggcgggcgcctgtattcccagctactggggaggctgaggcaggagaatggcttggaggcagtagaactgcttgaaccctggaggcggaggttacagttatccgaggttgtgtcattgcactccagcctggggaacagagcgagactccatctcaaaaaaaataaaaaacttcagcttttgcatgagcaggcgcaaaaaaaaaaaaaaaaaaactcgggggggggcccggtccc

SEQ ID NO: 21544 - DNA, 471 bp, Homo sapiens
cggcccccattgccatttgcccgcgctgcggtgagcgtgcctaccaaaagcagccgaccatctttcaaaacaagaagagggtcctgctgggagaaactggcaaggagaagctcccgcggtactacaagaacatcggtctgggcttcaagacacccaaggaggctattgagggcacctacattgacaagaaatgccccttcactggtaatgtgtccattcgagggcggatcctctctggcgtggtgaccaagatgaagatgcagaggaccattgtcatccgccgagactatctgcactacatccgcaagtacaaccgcttcgagaagcgccacaagaacatgtctgtacacctgtccccctgcttcagggacgtccagatcggtgacatcgtcacagtgggcgagtgccggcctctgagcaagacagtgcgcttcaacgtgctcaaggtcaccaaggctgccggcaccaaga

SEQ ID NO: 21545 - DNA, 485 bp, Homo sapiens
  misc_feature (1)...(485): n = A,T,C or G
gaaggaaaaatttgcccgcctgttggcccgcctgcangaattcggcacgaagtcctgcaggacacagttgtatgtgaactatgttgaaaacaggatgcatgactggcggccagaacaaagaagtttggtttaatttgtatctatacacccagtaaaatatctgtaataccactggaaaaccttaaaatacattatctatttcttgtaaaagaatgatgaaatgtgaatttgaacagcataaatatgtacaagtatctcttctcaacggaaaaaattatgtttgtggatgaaatatgaaccgagtttgtggatgaaatatgagcagcatgaatatgcacagatatctctcctcaatggaaaaaatcacgtacaaaatataagaacccagtttgtggatgcgtgaataatgataaattgaggccgggcgcggtggctcacgcctgtaatcccagcactctgggaggctgagatgggcggatgacccg

SEQ ID NO: 21546 - DNA, 475 bp, Homo sapiens
  misc_feature (1)...(475): n = A,T,C or G
ntttgacccgcgctgcaggaattcttcacgagcgaagtccagttcaaggaaattccagtgatttgaataaaagcatctgggatgaattcattagtgatgaggcagatgaaaagacttataatgatgcactttttcgatacaatggcacagtgggattgtggagacggtgtatcaccatacccaaaaacatgcattggtatagcccaccagaaaggacagagtcatttgatgtggtcacaaaatgtgtgagtttcacactaactgagcagttcatggagaaatttgttgatcccggaaaccacaatagcgggattgatctccttaggacctatctttggcgttgccagttccttttaccttttgtgagtttaggtttgatgtgctttggggctttgatcggactttgtgcttgcatttgccgaagcttatatcccaccattgccacgggcattctccatctccttgcagataccat

SEQ ID NO: 21547 - DNA, 507 bp, Homo sapiens
  misc_feature (1)...(507): n = A,T,C or G
ggatgcngagccgnccncnnnnntttgaccgtttgcccgcctgcaggaattcggcacgagcttaggcccaacctttccacagagaaatcacctctcttcctttgtcttttaagaactatttggtattaactagtttcagaattagtaaatgtgagattcagtcacataattatcagacattccatttgtcagaaatgtatttggctttttaaactcctttccacaaaagtttaagtctaatgaccttcttagagaagttgagcatgcctggcaagatcatttcatggaataagcagatgtttaaagttggattttttttttttttttttttttggggacctaccagggcccggggcccgggtttttaggtttttagccggggaatctaccaatgggcggcccaaattttggagccgacctagggtttggccttgcccctgggaggccctactaggggaagccattctctcggaatttaaattccctcctataaaaataggaacaaat

SEQ ID NO: 21548 - DNA, 491 bp, Homo sapiens
  misc_feature (1)...(491): n = A,T,C or G
attcgcccgcgctgcaggaattcggcacgagatgcactgtctgaggcctgtggtcaggaaataactactaagcaaatgctgcccatcgtattaaaaatggcaggagaccaagtagcaaatgttcgcttcaatgtggccaaatctctacaaaagattggaccaattctagataccaatgctttacagggagaagtgaagccagtactacagaagttaggtcaagatgaagacatggatgtcaaatactttgcacaggaagctataagtgtggtggcacaaaggctgaggaagctagaatttcctgtgaaggacagtggagaacccagtgtccctcgggctgacaagaaccacttcccaagacccacagtgcctggagaggacatggggaagggaccagtgtatcagttgcgtggagatactagagacacacttgcccagctgggaattgcgagctagtgcatttctccanagcacagactaataccccagat

SEQ ID NO: 21549 - DNA, 450 bp, Homo sapiens
  misc_feature (1)...(450): n = A,T,C or G
nattgacatgcgtgcgcgatgcggcacgaggggacaggggcccttaagtccagcgaggaaagctcggtgtgggcccgctctacgctccgtttggggtgacctggaacgcctcttctaccagctccctccagccatcagcagcctcttgtcaagcttctgcctcgccccagtctatccccaaccccaaatcaagaccacctttcttcacggtcactatttattctttgttcctttttctttttgtaagaaacattcacaaaaccagtgcaaaaccatcaaaaaaaaaaaaaaaaaaaactggggggggggccgggcccccaattccccctatagggaggggaataacaattcacgggccggggtttaacaacgtcgggacgggaaaaacannnnnnnnnnnnnnnnnnnnnnnntnnnnnnnncctntnntnnnnnnnantntnctttcag

SEQ ID NO: 21550 - DNA, 457 bp, Homo sapiens
  misc_feature (1)...(457): n = A,T,C or G
natagaaccgctttgaggttcttttttttatacaaacattatgtatctttatttaaatttgcaaatgaaaacaacacatatttcatgttagttttaataaaagattccctatcctctgccccagtaaaacctaaccaagccagcctgacaggttatatcaatacagggagctggagtgggagccaagggtggtgttaaataggggtggggtacaaatcaagggggcctgggagactcagtgactggaagtctctgcccctcactcttggtgagtagctaatttcagcagctggcttcataaggaggagtcaggggtgggtggaggctcctcccaattccagatccacttcctcttctccttctgtctcctggacacttaggtcttactgagatggttttcccacagtaaagagaggtgggggcagagtactaagggtcaggagtgtgactctttccc

SEQ ID NO: 21551 - DNA, 489 bp, Homo sapiens
  misc_feature (1)...(489): n = A,T,C or G
aggccgggnnnnnnnnnnnaactgataatcgatgcgccgctgacgaattcggcacgagctgcagggaagaccacgatcctctacaagcttaagctgggtgagatcgtgaccaccattcccaccataggcttcaacgtggaaaccgtggagtacaagaacatcagcttcactgtgtgggacgtgggtggccaggacaagatccggcccctgtggcgccactacttccagaacacacaaggcctgatcttcgtggtggacagcaatgacagagagcgtgtgaacgaggcccgtgaggagctcatgaggatgctggccgaggacgagctccgggatgctgtcctcctggtgttcgccaacaagcaggacctccccaacgccatgaatgcggccgagatcacagacaagctggggctgcactcactacgccacaggaactggtacattcaggccacctgcgccaccagcggcgacgggctctatgaaagactg

SEQ ID NO: 21552 - DNA, 488 bp, Homo sapiens
  misc_feature (1)...(488): n = A,T,C or G
ggagttncccccttnannnaaatgagcgcaatcgaaanccgtacgagggaaacagtaccaaggagaccagccctaccttgatctggggatagtcttggggcaaagaaagctgcgtagtgctgaacattaagctttctgggccactggaacaaagaactaggatctcacaggaaaagctgggtaactcaagcagctattctttctgtagggaccagaacacgagaatttgaagagcatggcaaagccctctctctcccaagccccaggcagagtacaagctcatttttctcggtggttattctgatatcccattttggtgtgtcataatacttcaaactggaaagtcacctggtcgagtctagggaggagggagtggaagggtctctgcttctgtacaaaatctccaggatttacaaaaatgtaacctgccttccttcaatcccatatttggtaaataagttaatatttgacatgtttggtgttctctg

SEQ ID NO: 21553 - DNA, 505 bp, Homo sapiens
  misc_feature (1)...(505): n = A,T,C or G
agggggnnnnaaggnnngnnnnnnttttgccccgcctgtaagaattcggcacgagaatttttgtatttttagtagagacagggttttgccatcttggccagcctggtctcgaactcctggcctcaagtgatctgtccacctcagcctcccaaagtgctgggattacagatgtgagccaccacacctggcctaaaatgtcatatattttgaactgactgacttctccaaaaacttatggttattagttgagagagaaaacttgagagaaagtttccctgcacttggatgagaggagagcggaacagcctgcatctctggtgctggggagtatcaaacaaggggaattgggagaaggatggaggcaacagcgtagctctttgcctttcaaaattaaaatgggatgctgctttatattacaaatctaaggaattagaagagcagcaaactaagcaactaagtttgttctccttgcataaactntaaaaagccagcttaaaagttctca

SEQ ID NO: 21554 - DNA, 496 bp, Homo sapiens
  misc_feature (1)...(496): n = A,T,C or G
agagccacgggtcctgccaatgaagnccagccagctagcgggaanncgcacgaggcagcgggtatgggatcctatgtgccccccaggcggctggcagtgcccacggaagtgtccactgaggtccctgagatggatacctctacctgacatggcctgaagatgcagggcagaggaattgcccatggacagtgacgcaaggactaggctgggagggagcgtgccaaccccttttgcctctgggtttggggagcggagggcctcttcttggtgccctgcccccaataaaggaactggacnaagagaaaaaaaaaaaaaaaaaaaaaaaaaaaaacaaaaaaaagaaaaaaaaaacctctggggggggggccgggccccaattccccctaaaagggggggtaaaaaaaattggggggccgctttttaacacaggcgggggggggagaccncggtnngccttggngagcccgaggatggactcgcttatgcgagctctctn

SEQ ID NO: 21555 - DNA, 477 bp, Homo sapiens
  misc_feature (1)...(477): n = A,T,C or G
naattgcaccgctctgcaggaattcggcacttgcagaccatgagttaactaagtaaaaatgtaaatatggtttgcatgctgttaacatggcagaggggtaaaaagaatacagtcctggggagaaaggtcacttcactgagaaggcttacttaaaaatgtttttctccctgcactttcatgattattaagtacccctagaaaatgaactcatagcagcaaataatctaatgactccttttaggttacagagcaaagtagctttctacttccacatcacattataatatagccttataatttcttctttcctgcaaccttcactttcctacctaggaaaactcacctccggtgccagagaaacttcccaggatgcactagggccctgtgaacaatacagaagttgtggactctggctctttgtcccacctaagtccttccagaagggctctacagcatggcttagtgacattaanaaaa

SEQ ID NO: 21556 - DNA, 475 bp, Homo sapiens
  misc_feature (1)...(475): n = A,T,C or G
catcgctccgcctgcangaattcggcaccagaganagccgctggggttacagtgggacgagtgatcgaatcagattcacagttaatagaaggatctctatagttggatttggcttgtatggatctattcatggccctacagattatcaagtgaatatacagatcattgaatatgagaaaaagcaaaccctgggacagaatgataccggctttagttgtgatgggacagctaacacattcagggtcatgttcaaggaacccatagagatcctgcccaatgtgtgctacacagcatgtgcaacactcaaaggtccagattcccactatggcacaaaaggattgaagaaagtagtgcatgagacacctgctgcaagcaagactgtttttttcttttttagttcccctggcaataataatggcacttcaatagaagatggacaaattccagaaatcatattttatacataatttagcat

SEQ ID NO: 21557 - DNA, 499 bp, Homo sapiens
  misc_feature (1)...(499): n = A,T,C or G
agaggcaggggggccggccaactggtggcatgagtaacntccgcgagancntttgcctttgttcagaatacatgacattggtaaatatgccacatgcctttggtggaagtacaactgttgttattactctatacaagtatgagatcagggttaggaaaaaaagacaaagaggtgatgacagacacacagtggaaaccccacatcgtctcatggcaaaccgaagaacgggatgtgggaagctcagcttcatttgactgcaaagtcccagggttttgttgcacatttgctcatgcacatgggtggtgggaggaaagggggatagcagagacacacagaagagggtacagggtgggtgagaaagaaagtagaagggctaatacccccaaagaacaaggccaactacacctggtgagcctcagagggacagaaacccaggaatgattcctgtgatagggctgggagagccaagaggacggattcgctccaggcttgggacacn

SEQ ID NO: 21558 - DNA, 470 bp, Homo sapiens
  misc_feature (1)...(470): n = A,T,C or G
catagaccgcctgcggaattcggcacgagccgcctagcctcccaagtgctgggattacaggcgtgagccaccatgcctggccaggttttttcaacattatagagataaaatggttcattgcagctctagttgaagtcgtgaataaagatgagattgaaactaagatatggatttgccaagtatacgaattaaataaactcttgatcttgactaggttttatttgttggtaagctacttttttgtggaagagtattttgatacatagaaataatcctccccctttgttattttgctctagtttattaaataaatcatttgattctaataagcgtagataaggtggttagtttattttctggaagtacaagtaaacaagcccatggaaacagcactaagtgctgaagactttctgctctcataatgtttctggttatcgaaatatgtctccatctgtaatttagcagaaacn

SEQ ID NO: 21559 - DNA, 500 bp, Homo sapiens
  misc_feature (1)...(500): n = A,T,C or G
agaggcacgggtgctgccaactgaaanccctacnngngccggtcangnncncnngcgacggactctgcattccagagccatggcccaatttgtccgtaaccttgtggagaagaccccggcgctggtgaacgctgctgtgacttactcgaagcctcgattggccacattttggtactacgccaaggttgagctggttcctcccacccctgctgagatccctagagctattcagagcctgaaaaaaatagtcaatagtgctcagactggtagcttcaaacagctcacagttaaggaagctgtgctgaatggtttggtggccactgaggtgttgatgtggttttatgtccgagagattataggcaagcggggcatcattggctatgatgtttgaagaccaatctttaacatctgattatatttgatttattatttgagtggtgttggaccatgtgtgatcagactgctatctgaataaaataagatttgtcaaaactcagtgt

SEQ ID NO: 21560 - DNA, 484 bp, Homo sapiens
  misc_feature (1)...(484): n = A,T,C or G
nattgcaacgctntgaggaattccgcacatagattcgtctgcangaattccgcacgaggacaatttaccagaaaaatactggcgaaaatatcaatatgcttccaggtttgtacagcttgtaagatctaaatctcccaaaatcacttattttacaagatatgctaaatgcattttgatggagaattctcctggtgctgattttgaggtttggttttatgatggggtaaaaatacacaaaacagaagatttcattcaggtgattgaaaagacagggaagtcttacactttaaaaagtgaaagtgaagttaatagcttgaaagaggagataaaaatgtatatggaccatgctaatgagggtcatcgtatttgtttagcactggaatccataatttcagaagaggaaaggaaaactaggagtgctccctttttcccaataatcataggaagaaaacctggtagtactagttcacctaaggccttatca

SEQ ID NO: 21561 - DNA, 467 bp, Homo sapiens
  misc_feature (1)...(467): n = A,T,C or G
cctcgcccnagcgcngtagcccccgcgctgcaggaattcggcacgaggtgtttctctatgtttctctaagttggggggtgagcgtgtgtgacagtctactggatttctttactactgatcctttcgctgtgttaaaaatcaagtcacagagacctctcttctggatttgtcccatggggaccctgagactactaaagctgctttcttctgaaggtccagttggacagtctgggaatgtccagaaataaccagtgagaggggcagttctctggccacacccacttatgtactttaactactgtgactttgtctgcagaagagctggaaaattctcgaagctgcaccgtgtcctctgtgtgctagaataagggacaaatgggttccctgtgcttctcagctcactgtttttccttgagttctcctacaggaagcagatgagaactgcccagtcttcaggtttaggccat

SEQ ID NO: 21562 - DNA, 480 bp, Homo sapiens
catcgaccgcccctcggaattgcaccgcctgcaggaattcggcacgagaagaagctgacgagtattgagaagcacgtctagtactggattcagcgaagttagaagcctgaaacttttctcgtatgggggggtgtttgcattaaatcctgcggtccattttacaatccattatttttgaccactgctatgtgttcaagtactatgagaatgtgattgtttttatctggttacatatatatttctttgtctaatttaatatgtccaatagaatgagttcatctaacaaaagcaagaaaaatttttgctgggggggcctgggaccccatatgctttatccgtggacgtgatgaaacaccccggccgtggtttgcctgctgtgggtcagggaacttcactgaggggaaccctcgctgggagcaaacacatctgacctacaggattgaaaattacacgccagatttgccaagagcagatgtggat

SEQ ID NO: 21563 - DNA, 463 bp, Homo sapiens
  misc_feature (1)...(463): n = A,T,C or G
cctagaccnccatagatccgcgctgcaggaattcggcacgaggtttttgtcatctgtaatccagaatcttcgaactgttggcacccctattgcttctgtgcctggatccactaatacgggtactgttccgggatcagagaaagacagtgactcgatggaaacagaagaaaagacaagcagtgcatttgtaggaaagacaccagaagccagtccagagcctaaggaccagactttgaaaatgattaaaattttaagtggtgaaatggctattgagttacatctgcagttcttaatacgaaacaataatacagacctcatgattctaaaaaacacaaaggatgcagtacggaattctgtatgtcatactgcaaccgttatagcaaactcttttatgcactgtgggacaaccagtgaccagtttcttagagataatttggaatggttagccagagccactaactgg

SEQ ID NO: 21564 - DNA, 484 bp, Homo sapiens
  misc_feature (1)...(484): n = A,T,C or G
atttaattgcccccccccanannnnaaatttgcnccgcgctgcaggaattcggcacgagccgagacccacgcacatgttggggcttctgggccaagagtactttttatataactaatttctaaatccaaaagctcaaggaatagacagtgttctgtgacatggattggtttgaaggagttacccaccatcccagcacgataatgtcatctcccaagttggatggcagcacgatctggccctagggagcttcctgttcccagaagtcattgtcctgggctatccagatgtccctagtaaatcttgcttccttctgcaatgttagtaatgccttaagctgacagttgctattttgcagaacagttttcctctttgcttagctagtaacttgcctctgagcctgggctgatctgagaaacaggtgtgacaagagcatgaaccagaggtgcacctggggcagttccctaataaaactggtttgtacag

SEQ ID NO: 21565 - DNA, 501 bp, Homo sapiens
  misc_feature (1)...(501): n = A,T,C or G
agcggcgggggangtgaaacctcgaagaattgatgaccgtgcgaaancggcacgagctggagtctgctctctgaagctactgggaaaatttttgacctcctgccaaataagattcggagaatggatctagagctgtatatcagcatagcaaaatgcctcttagaaatgacagatgatgatgccaatcggatcgcccaggttactaagagcaacatagaaaaagctgcctttgtcaaactgtacttagtctctcaaggacgattccccttggtgaacctgaccgatatgctgagcgttgctgtgcagcaccgtgagaaagaggtgttggcctggatgattctgcacagcttataccaggcacggattgtgagccatgccaatacgggcgttttgaagagaatggagtggctcttggaactgatgggttatattagaaatgttgcttaccagtcaacatcctttcacaatacggctcttgacgaggctctggacttcttcttg

SEQ ID NO: 21566 - DNA, 505 bp, Homo sapiens
  misc_feature (1)...(505): n = A,T,C or G
gtatgcgnnagggngaannnnttttgcccgcgcatctgaccccgctgcaggaattcggcacgagccgaacccggcgggagggcctgccatgttcgcggcgggcgtgacgcggaatcgtagataatgaggcccagggcgggtccgaacgcactgccccgcgggctccagagctgctaacgccccatagtgtgcatggaggcctgcataaagaaaatgcggatgagggtccccgtgggacccactcagaggtgggccgtaaagatcccggaagggtggatggcattatataccacctaatactccagcatgggctgtgttaccgaattgggatctcggcctcttcttccagtctggggaaaagtgtgttaaatgctaaacatcagtgtttatcgagtgaggcccagcctgtctggcataatgatttttaaaatctacattccaatattaaataaaaactcaacctccccttttttttaaagggggggaaaggttactttggggccag

SEQ ID NO: 21567 - DNA, 497 bp, Homo sapiens
  misc_feature (1)...(497): n = A,T,C or G
catcgccccccctnnnnnnnnatagccccgcgctgcaggaattcggcacgagaaccagtggaactgagaacgaagtggggccggagaggacatatcaaggaacctttaggtacccatggccacatgaaatgcagctttgatgggaagctaaaatctcaagacacagtactgatgaacctgtataaacgagtcttccccaaatggacttatgatccatatgtaccagaaccagtaccctggctgaaaagtgagatttcttcaacagtgcctcaagggggcatggagtaatggattcaaagagattctgtcttaccggtgccagtcagtactccagggatgggaggcacaagttgtgattgggcaaagtttattttctatgtcagcctgtcagtccactgccccattttgcaagacttttttttagccttgacaaaatgtctcagttaagtataaaagtttttccactacttagtccaaaaaaaactattaaatcttaa

SEQ ID NO: 21568 - DNA, 461 bp, Homo sapiens
cctttgccccgcgctgtaagaattcggcacgagggactgcagaccaggaaacacccagaactcgtgacatttcatgacaacgtccagctggtgctgctacagaacgcagtgcatgaggcttccaaccagagcatctgcggagaaagaggcacagcatgtgcctgaacggaagcacgcaggagtcctagcttcacgttagacttctcagggttttatttaattcttttaaaatgaaaaattggtgctactattaaattgcacagttgaatcatttatgcgcctaaattgattttgcctcccaacaccatttctttttaaataaagcaggatacctctatatgtcagccttgccttgttcagatgccaagagccggcagacctgtcacccgcatgtggggggagtctcggagctgccacaggggctcaccgaaatcggggttgcatcacaagctatgttaaaa

SEQ ID NO: 21569 - DNA, 458 bp, Homo sapiens
  misc_feature (1)...(458): n = A,T,C or G
nattgacccgccttgaagaactcggcacgagggcaggcgagagctctgttagctgctcccagagctgtccccaggctgcagttctggtccctggttgtcaggtaggaagggtgcacttgaagcaggtgctcatctaggatccttaacgtttatagtctgacccctcacttaggctttcctctgccaccccggtccagggaagaggctcgctcccgcccatggtcatcactggtctgcctgctctgctgtctgttctttccctgactccctcccaccgaaggcctgaaggctactcacccctctgggatggctatgggagaggaggagcgatggggaccgccaccttttctgcaggaaatgtgcccagcagctcttggtcaaagcactgttgctataagctatctctgagatgcctctaggcccccttccctctacacacctctgggaagagattacac

SEQ ID NO: 21570 - DNA, 462 bp, Homo sapiens
catcgaccatctgctccgcgctgcaggaattcggcacgaggtctgatggccttaagagaacgtagaatgaaagtaacaaatgaagacttcaaaaaatctaaagaaaatgttctttataagaaacaggaaggcacccctgaggggctgtatctctaatgaaccatggctgtcatcaggaaaatggttgggagatttctcaatccctgaaagggatgaggttgggggagttgcccagaggaatccctgttcccactgatttttattagcaaaacatcctgtgtcttttggagtacgatgtgtaagtgcccattgggtggcctgttggtcactgtgcagcagtctgcttcccaataaagcgtgctctttcaccaaacaaaaaaaaaaaaaaaaaaatcttgggggggggcccgggcccccaatcccccttaaggggggggtattaaaaaaccagggcccgcgttt

SEQ ID NO: 21571 - DNA, 446 bp, Homo sapiens
aattgatttgcactgcaggaattcggcacgagcccagaggaagcagcactggaggctgaggcagagctgggcggccagccctctttgactgctgaggactcagagatctcgtcccaatgcccatcagccagtggctccagtggctctgacagcagctgtgtgtcagggcaggccctgggtaggggcctggaggacttaccctgtgtctgagcccgggactggacgagcagtagatccagcagcctgcagctccaaggaacattgcctctctggatctgctgtgaccagggtgtggctgacacctgggctacctccaacctacatgtgcaacgctgttgactaccctttctgatgtgtgtggccattggactaactggcacggggcctctctagggaagtctggttgtagagcctgaataggctcctggccccatgaccccttctcc

SEQ ID NO: 21572 - DNA, 510 bp, Homo sapiens
tccgaataaaaattaattggggggtaaaaagggggagaaaaggattgaaggactttcgcaccgcctgcaggaattcggcacgaggagagctgagagctggagtacagaacctgctaaggccatcaaacctattgatcggaagtcagtccatcagatttgctctgggccggtagtactgagtctaagcactgcggtgaagaagatggtagaaaacagtctggatgctggtgccactaatattgatctaaagcttaaggactatggaatggatctcattgaagtttcaggcaatggatgtggggtagaagaagaaaacttcgaaggcttaatgatgtcaccatttctacctgccacgtatcggcgaaggttgggactcgactggtgtttgatcacgatgggaaaatcatccagaaaaccccctacccccaccccagagggaccacagtcagcgtgaagcagttattttctacgctacctgtgcgccataaggaatttcaaaggaatattaag

SEQ ID NO: 21573 - DNA, 451 bp, Homo sapiens
  misc_feature (1)...(451): n = A,T,C or G
gggatgganannnaaatgcccgcctgaggaatccggcacgaggatatttctggactctagccaagaaaaagctaattctggggatagaatgataaaagactcaagcactaaaaatatacattgccgaatctctttttctagctttgaaaagttgtggcctgcttgtccctctgttgactggtcatctggaccatcgtacttgctgtggctacttctaagacaatgtagagggttattaaaccttgaaactgcctttcctaagtagagaacaagactattcaacaacttctttgctgaagcactgaggagatttgtaatactcctaaaggaagggccaaactagagattttcaatcatagactttgtgacagcatttggggaactaaaagattcatgtgtttcagcctaatgggagagagtgggggagaggaagagagagagagagcatgtn

SEQ ID NO: 21574 - DNA, 471 bp, Homo sapiens
tgtgggcctgactgcctgccgtgggcattggacctgcctatgccatcccagtagctttgcaaaaagcagggctgacagtgagtgacgtggacatcttcgagatcaatgaggcctttgcaagccaggctgcctactgtgtggagaagctacgactcccccctgagaaggtgaaccccctggggggtgcagtggccttagggcacccactgggctgcactggggcacgacaggtcatcacgctgctcaatgagctgaagcgccgtgggaagagggcatacggagtggtgtccatgtgcatcgggactggaatgggagccgctgccgtctttgaataccctgggaactgagtgaggtcccaggctggaggcgctacgcagacagtcctgctgctctagcagcaaggcagtaacaccacaaaagcaaaaccacatgggaaaactcagcactggtggtggtggcagtggacagatc

SEQ ID NO: 21575 - DNA, 464 bp, Homo sapiens
cttgccccccgcttatccccccgctgcaggaattcggcacgaggaaagattcagcacatatacttcagataaagatgaaaacaaattaagtgaagcttctggaggtagggctgaaaatggtgaaagaagtgacttggaagaggacaacgagagggagggaacggaaaatggagccattgatgctgttcctgttgatgaaaatcttttcactggacaggatttggatgaactagaagaagaattaaatacacttgatttagaagaatgacaccaaacacatcgctgaaaaaattaagtcagctcagcacgagttgaaattgactacattaatttctttccacctagaatcaacaggatgtttatttcctatgctgattctggaggagttaacctcctgcaaaaaaggcatcttgtccctacatcttctcttctgactttggctacatctcatagtaagttcagag

SEQ ID NO: 21576 - DNA, 492 bp, Homo sapiens
  misc_feature (1)...(492): n = A,T,C or G
tcttgacccgcgctgcaggaatttcgcacgcgcggngtcttcgtgctgtccctctcggccatcccggtcacctatgtcttcaaccacctggcggcccagcatgattcctggactattgtaggggttgctgccctcatcctgttcctggtagcactgctggctcgtgtcctcgtcaaaagaaaaccaccccgggacccactgttctatgggaaacttatagaaccattggcctatattgggttggatctattattatgagtgttgttgtttttgtgccaggaaacattgtagggaagtatggaacacgaatttgccctgcttttttcttaagcataccatatacttgtcttcctgtctgggctggtttcagaatctataatcagccatcagaaaattataattacccctcaaaggttattcaagaagcccaagcgaaagacctgctgagaagaccatttgatttaatgttggntgtgtgtctcctcctagcaa

SEQ ID NO: 21577 - DNA, 511 bp, Homo sapiens
  misc_feature (1)...(511): n = A,T,C or G
tgggcncnnnnnntttcgttcgcccgcctgcaggaattcggcacgaggttctggggagggaaggaaaaggtgttggaggccttaattatggactgttgggaaaagggttttgtccagaaggacaagccggacaaatgagcgacttctgtgcttccagaggaagacgagggagcaggagcttggctgactgctcagagtctgttctgacgccctgggggttcctgtccaaccccagcaggggcgcagcgggaccagccccacattccacttgtgtcactgcttggaacctatttattttgtatttatttgaacagagttatgtcctaactatttttatagatttgtttaattaatagcttgtcattttcaagttcattttttattcatatttatgttcatggttgattgtaccttcccaagcccgcccagtgggatgggaggaggaggagaaggggggccttgggccgctgcagtcacatctgtccagagaaattccttttgggactggagn

SEQ ID NO: 21578 - DNA, 485 bp, Homo sapiens
attagacaaccttgatccgcctgcaggaattcggcacgaggagaggccccggggaagcagctccaactgagggtgattaaaatctgaagcaaagaggccaaagattggaaaccccccacccccacctctttccagaactgcttgaagagaactggttggagttatggaaaagatgccctgtgccaggacagcagttcattgttactgtaaccgattgtattattttgttaaatatttctataaatatttaagagatgtacacatgtgtaatataggaaggaaggatgtaaagtggtatgatctggggcttctccactcctgccccagagtgtggaggccacagtggggcctctccgtatttgtgcattgggctccgtgccacaaccaagcttcattagtcttaaatttcagcatatgttgctgctgcttaaatattgtataatttacttgtataattctatgcaaatattgcttatgtaatagga

SEQ ID NO: 21579 - DNA, 499 bp, Homo sapiens
  misc_feature (1)...(499): n = A,T,C or G
agagtctggggtgctttccccaggggcccagggagctcgcggaanggcacgagnggagtgttcttgactccgctgctcgccatgtcttctcacaagactttcaggattaagcgattcctggccaagaaacaaaagcaaaatcgtcccattccccagtggattcggatgaaaactggaaataaaatcaggtacaactccaaaaggagacattggagaagaaccaagctgggtctataaggaattgcacatgagatggcacacatatttatgctgtctgaaggtcacgatcatgttaccatatcaagctgaaaatgtcaccactatctggagatttcgacgtgttttcctctctgaatctgttatgaacacgttggttggctggattcagtaataaatatgtaaggcctttctttttataaaagaaaagagtatagtaaaataaaaaaaaaatccttgggggggggccccggcccccatttcccctagaagaggggggatg

SEQ ID NO: 21580 - DNA, 485 bp, Homo sapiens
atcgcccgcctgcaggaattgcacacatacatggagatcgaggaacagatggaaaagcaagcagagatagtaggaatgtagacaagaagccagataaacctaaaagtgaagactatgagaaggacaaagaacgagagaaaagtaaacacagagaaggagaaaaggacagggataggtaccacaaagatagggaccacactgacagaactaaaagcaaaaggtaaaatttgcaggctgcttcaggattacatttaaataactgttaaaatgttgtatcttgtaaacaaaagaaagattgcctgctaggattgtgccatctttaaaatttttactattggtcatttgcagaacagtaaattctgtgtgttggtacagagtgctctgtaccagtgctcatcatcccttcttcataccaacggtccctagttataggaatttaatatttttaaaagttgtacattgctgtatattcaaagatttggttt

SEQ ID NO: 21581 - DNA, 483 bp, Homo sapiens
  misc_feature (1)...(483): n = A,T,C or G
gggggctnnnnattgacnccccttgatcagcgctgcaagaattcggcacgagtcctgagcccgctgctttgggctccagttctgcacattgcacaaacaatggggtgaaagtcggggactgtgatctgcgggacagagcagagggtgccttgctggcggagtcccctcttggctctagtgatgcatagggaaacaggggacatgggcactcctgtgaacagtttttcacttttgatgaaacggggaaccaagaggaacttacttgtgtaactgacaatttctgcagaaatcccccttcctctaaattccctttactccactgaggagctaaatcagaactgcacactccttccctgatgatagaggaagtggaagtgcctttaggatggtgatactgggggaccgggtagtgctggggagagatattttcttatgtttattcggagaatttggagaagtgattgaacttttcaagacattgga

SEQ ID NO: 21582 - DNA, 492 bp, Homo sapiens
atttgccccgcgctgcaggaattcggcacgagctgaagcgcctgtgacaggctacatgtttggtaaagggatctatttcgctgacatggtctccaagagtgccaactactgccatacgtctcagggagacccaataggcttaatcctgttgggagaagttgcccttggaaacatgtatgaactgaagcacgcttcacatatcagcaagttacccaagggcaagcacagtgtcaaaggtttgggcaaaactacccctgatccttcagctaacattagtctggatggtgtagacgttcctcttgggaccgggatttcatctggtgtgaatgacacctctctactatataacgagtacattgtctatgatattgctcaggtaaatctgaagtatctgctgaaactgaaattcaattttaagacctccctgtggtaattgggagaggtagccgagtcacacccggtggctctggtatgaattcacccgaagcgctt

SEQ ID NO: 21583 - DNA, 538 bp, Homo sapiens
  misc_feature (1)...(538): n = A,T,C or G
nggagattcacggctgagaattcgcacgagcaatgctccgcgccgcttgtcattgggaggcgccgaaggtggagaggtcggctcggaaggaaaagatcactcactcttgggggcatccagcagccatgttgtgaggacactcaagcagctgtgaagaggtgcacctggagaggaactgaggcctcccaccaaaaccaagcactgacatgccactcatggcctgaggcaagtcctgtaagaggtattccagaagaaggcattgtcgtacgagatgacagctccagctgtgttattgaccccgaagaccttccagtgggacaagatgtggagcaatcacaggaatatataaaacatgagcagaaagaggcctttggagaaatctggaccagcattctcattttacggatgagggaccacggcccatggaggcttgcatagatgattgggacaacccaagaagtggtcctctgtttcagaccccacacagacacaaacctacaagccgagggagccaggatttgggcattcgtccatgcat

SEQ ID NO: 21584 - DNA, 493 bp, Homo sapiens
  misc_feature (1)...(493): n = A,T,C or G
ccgcgcccccgccccccccccttagatcgcctgcggaaatcggcacgcgctgaagaagggggtttgcagaggctgccctggggctggttctgaaagaagagcccacagctgacttcatggtgctacaataacctcagaatctacttttcactctcaggagaacccacatgtctaatatttagacatgatggcaaactgggcggaagcaagacctctcctcattcttattgttttattagggcaatttgtctcaataaaagcccaggaagaagacgaggatgaaggatatggtgaagaaatagcctgcactcagaatggccagatgtacttaaacagggacatttggaaacctgccccttgtcagatctgtgtctgtgacaatggagccattctctgtgacaagatagaatgccaggatgtgctggactgtgccgaccctgtaacgccccctggggaatgctgtcctgtctgttcacaaacacctggaggtggn

SEQ ID NO: 21585 - DNA, 480 bp, Homo sapiens
  misc_feature (1)...(480): n = A,T,C or G
agggtnannnnattgatcgctttgacgagctctgcacgaggtaaaggtggtttcttgcatcccactccccttttaccttggctttgacataggaaaggtatatttaaaaacttaatcagctgggcgtggtggctcacgcctgtaatcccagcactttgggaggccaaggtacgtggatacctgaggtcaggagttcaagaccagcctggccaacatggtgaaaccccgtctctactaaaaatacaaaaattagctgggcgtggtggtgggcgcctgtagtcccagctacttgggaggctgaggcaggagaatcgcctgaacccaggaagcagatgttgtaccgagctgagatcatgccattacactccagcctgggcgacagaacgagacgccatcaataaataaataaatagagtaaagtaaaaaacctattaaattgaggctagagctggagatgtaattggtttttgagaaacatta

SEQ ID NO: 21586 - DNA, 450 bp, Homo sapiens
atggcccgcctgcggaattcgtacgagagcatctgaagcgggtggcagctccaaagcattggatgctggataaattgaccggtgtgtttgctcctcgtccatccaccggtccccacaagttgagagagtgtctccccctcatcattttcctgaggaacagacttaagtatgccctgacaggagatgaagtaaagaagatttgcatgcagcggttcattaaaatcgatggcaaggtccgaactgatataacctaccctgctggattcatggatgtcatcagcattgacaagacgggagagaatttccgtctgatctatgacaccaagggtcgctttgctgtacatcgtattacacctgaggaggccaagtacaagttgtgcaaagtgagaaagatctttgtgggcacaaaaggaatccctcatctggtgactcatgatgcccgcaccatcc

SEQ ID NO: 21587 - DNA, 492 bp, Homo sapiens
  misc_feature (1)...(492): n = A,T,C or G
catcgcacnccnntgngnannatagaccngcgctgcaggaattcggcacgagccacatcctctgagcagaagatggctgtgccacccacgtatgccgatcttggcaaatctgccagggatgtcttcaccaagggctatggatttggcttaataaagcttgatttgaaaacaaaatctgagaatggattggaatttacaagctcaggctcagccaacactgagaccaccaaagtgacgggcagtctggaaaccaagtacagatggactgagtacggcctgacgtttacagagaaatggaataccgacaatacactaggcaccgagattactgtggaagatcagcttgcacgtggactgaagctgaccttcgattcatccttctcacctaacactggactgagtccctgtggaagagaggttgtgtcctgctcattgtggtacagcagtggcttaaaggagaactggagccctgacttcaccccaccccactcn

SEQ ID NO: 21588 - DNA, 461 bp, Homo sapiens
  misc_feature (1)...(461): n = A,T,C or G
aatagataccntttgatatccgtncgagactcaccgngcagaagggggcaagggtgccttagccctggctcaagccgcccagagagcattacaagcacccagcagcttacagctcctttatgacctcaagctcccagttgaggataaaatcaggatcattgcacagaagatctatggagcagatgacattgaattacttcccgaagctcaacacaaagctgaagtctacacgaagcagggctttgggaatctccccatctgcatggctaaaacacacttgtctttgtctcacaacccagagcaaaaaggtgtccctacaggcttcattctgcccattcgcgacatccgcgccagcgttggggctggttttctgtaccccttagtaggaacgatgagcacaatgcctggactccccacccggccctgtttttatgatattgatttggaccctgaaacagaac

SEQ ID NO: 21589 - DNA, 479 bp, Homo sapiens
  misc_feature (1)...(479): n = A,T,C or G
cgggttanaaaactgatgcctgcggaatccgatgggagacatagagagagagagagagagagagagagagagagagagagagagagagagagagagagctccagcgcgcgggcgcgctgtgtctctctgtctctggaccgatataaaaaccgggtgtatatgaaagttgccgaggctctgtgtgagtgccgcctgctcgcatacatatcccaggcgcccacacagatgttctttctcttgcgccttataaacatcatacacgcgcacactctcacccaagagaacgacatgtgtctccacaccaccctggagattctgacgctcgcccgacagagagagcgtgtgcccctgtacctgcgtgtgctgcagcggatggagcacaaaaagaaacaccccggctttgtgctaaacaactcacacaacctggtgcgcttgtggcagcagctctacctgcacagagacagagacagcatctgtat

SEQ ID NO: 21590 - DNA, 482 bp, Homo sapiens
  misc_feature (1)...(482): n = A,T,C or G
gggcnnannattgancgcattgacccgcgctgcaggaattcggcacgaggccgcctggggccccaagggaagctgaacgccctgtgggctcctgggatggttcttcccgttctttgcgccgccttcacccattgaagagcctgtgcccaccctgcccagtcgctctcggggccgcggaggagcttccgctgccatcttcggatcctgtgttccgcacgggggctccaccagggcagggatggtgcagaatggggaaatggagagagaacctgaaagagccccaaactcgaggacctattgctccccaagaataacatcttccagaagaactagacagaaaactaggcgtctgggaactctgaaatccttggaggagtagcatcatcatgaccctctgtgttccttttggcaaaggacttgctcccattgtttgcttgttccattggctgtctgttaaataaataaaacccttttcatatatn

SEQ ID NO: 21591 - DNA, 493 bp, Homo sapiens
  misc_feature (1)...(493): n = A,T,C or G
ngagggaattganattcgcatcgcctgcaggaattcggcacgagcttacctccacacctttgtatatgcaattccctctgtctgggacactcttcctgtgactaactcctgtaaccctcagctttgagtccggcgtgatctctggggagccatctgtgagccttttcccggccctggttaaagtagcaactcaatacgtagctgatgtttactgagagacagtgtagtgtcatggctaggagcacagaccctgcagtttgtcctccaggattcaaatcctagctctaccgtttactagctgtgcatccttgggaaagttactttacttctcagtgcctccatctccccatcggtaaaaatgaggatgatgatgtacccgcttcataacgttgttggggggttaaattaagttgataaatgttgaagtggtatggtcagagctacgtaagtggtataaattgttgttattctacactattctacatttacgtan

SEQ ID NO: 21592 - DNA, 479 bp, Homo sapiens
  misc_feature (1)...(479): n = A,T,C or G
nttgcccgcctgagaatcgccgagagccgcttttcaaacccttccattcccagcccttccgaccagcagatgaagatcatcgaaatcaatttgggcaacgagaccgatcctcatcagctcccaatgtgcatataaacacaatagaacctgtcaatattgatgacttgattagagaccaaggatttcgtggtgatggaggatcaaccacaggtttgtctgctaccccccctgcctcattacctggctcgctaactaacgtgaaagccttacagaaatctccaggacctcagcgagaaaggaagtcatcttcatcctcagaagacaggaatcgaatgaaaacacttggtagacgggactcgagtgatgattgggagattcctgatgggcagattacagtgggacaaagaattggatctggatcatttggaacagtctacaagggaaagtggcatggtgatgtggcagtgaaaatgttgaat

SEQ ID NO: 21593 - DNA, 476 bp, Homo sapiens
  misc_feature (1)...(476): n = A,T,C or G
nggatggccaatagacnatagtgccgcgctgcatcttttctcagctccctgcagcatgggtgctgggccctccttgctgctcgcctgcgacagtgtggacctacctgtagcagctagcaaaggcctctagcagctacagtcccttctggagtctttatttgcatgcaaaatgcaaaggagtcctggtgacctacctccaaggcagctgccctcctgaacactcccttggaaaacagtaaacatcattttggaatgtgaacaaccagagactacacaggagaaaggaaaaaaaaattctgaagatgcaaaatcttgggtggcttcaccgttcagttttttaataaaaggaacaatatacaaaaaaaaaaaaaaaaaaaaacctggggggggggccgggcccccaatcccccttaaagggagcggaattacaatcaatggcccgcggtttaacaaggcggggaggggtggaaannnnt

SEQ ID NO: 21594 - DNA, 496 bp, Homo sapiens
  misc_feature (1)...(496): n = A,T,C or G
nttgcccgcctgcagaatcgccgagagtccgctttgccagcctcttgcaattccacaaggcggaggcaagaataaagcaggcctgatggccataggcgatgagaatatgcagttgaggggtgagaaaagaaaacaaacaaacaacaacaacaaaccctgaagagtactgaagatttataagggactggaaaggacttgttgcgcaatggaagaatctgactctgagaaaacgacggagaaagaaaatctggggccgagaatggatccaccactaggggaaccggaaggatcgcttgggtgggtgctaccaaatacagccatgaagaaaaaggtgctgttgatgggtaaaagtgggtctggtaagaccagcatgaggtctattatctttgcaaattatattgccagagacacacgtcgccttggcgcaacaattgatgtagaacattctcatgttcgatttctgggaaacctggtattgaacctgtgggattgtggg

SEQ ID NO: 21595 - DNA, 488 bp, Homo sapiens
gcgggaattgaactgctgcggaattcggcacgaggctgggccatgtccaaagaggctgcccctctcaccaaagaacagaggcagcaggaagctgcccctgaactgatgcttcctggaaaaccaagggggtcactcccctccctgtaagctgtggggataagcagaaacaacagcagcagggagtgggtgacatagagcattctatgcctttgacattgtcataggataagctgtgttagcacttcctcaggaaatgagattgatttttacaatagccaataacatttgcactttattaatgcctgtatataaatatgaatagctatgttttatatatatatatatatatctatatatgtctatagctctatatatatagccataccttgaaaagagacaaggaaaaacatcaaatattcccaggaaattggttttattggagaactccagaaccaagcagagaaggaagggacccatgacagcattag

SEQ ID NO: 21596 - DNA, 494 bp, Homo sapiens
  misc_feature (1)...(494): n = A,T,C or G
ngaggggattggnattcgcaccggctgcaggaattcggcacgagcccatttctatgaggtttcgcataagctcttggagatgtacaggaaggagctgctcctgaagcgcacggtggccaaggagcttgcccacaccggggatcccgacctcaccctgagctacctgtccatgtggctgcaccagccctatgtggagagcgacagtaggctgcatctggagagcatgctgctggagacaggccaccgagctctctgacgtcctgagacggctgcggacactggctccttccacgtctcaccaggcagacagtctgcctaggacccagtgccgcaggcctggatcagaccccaggatcagaccttcttggggtcttctggccagagcttgtcaccagccccatggactctccaggcgtgctcatgcccacaacccgcggccagccccacgtggtgccgctcagccttctctgcccctcctgggaatctgtcattcg

SEQ ID NO: 21597 - DNA, 473 bp, Homo sapiens
  misc_feature (1)...(473): n = A,T,C or G
attagcacgccttcgtgaattcgcacgagcggcagtctacacgatgtaaggtccgttggattaagagggcagtattaagtatgtctcccttcccaccaccgcctcgagaagaggcgaaactcaaagggatgctccctcacccccttcctccttccaaagacgtttcagccgcaattggcccgttccttcgatctccgacccgctgctagggagcgaaagtctgtggaatgggctacaccaccaatgtcccaggaaacgggggaagatacaagacgtcacctcttgctttagctgtgcatgccacgtttccttaatcttgaacttggaggacagcgcttcctgactattcacggaactattcataacctaattcttccttgaagatagaaatgcaaaaacagtaacctgcttccccctggcttcccccatctggcgaatggaaagtacccgtcaggggatgcgcangcgccgtg

SEQ ID NO: 21598 - DNA, 488 bp, Homo sapiens
  misc_feature (1)...(488): n = A,T,C or G
ggggtaaaaagactgatgccttgggaanncncctgatcgcctgcggaattccgcacgaggatgcttcatgcatagaggctgtcctgcaccaggcgaacacgcttcatacagagagtcagcaccgcaccgtgtgaacacgcttcatacagagggtcagcaccgcactgtgtgaacacacttcacacagagggtctgtaccacattccgtcaacatgtgtcagcaccataccatgtgaacacgcttggtacagtgatatacatgcatgtggcagagctgtgaaattatgacctgcgtgcagacagactttgtacactgtgctatcaaccaactgggcaaatgtggacaagagtccctgcatgtctctattcaccaggtgtctgtcaaaagaaatgggctgaactggataatggcaggtctgacccatgattactgcctgtaagagctgagttatcccacagtgtatgcgtgggatattaaaatatatatg

SEQ ID NO: 21599 - DNA, 476 bp, Homo sapiens
  misc_feature (1)...(476): n = A,T,C or G
cgtgcttttnttctgacgctatgagaacttgcacgaggtggtgcgttctgagccgtctgtcctgcgccaagatgcttcaaagtattattaaaaacatatggatccccatgaagccctactacaccaaagtttaccaggagatttggataggaatggggctgatgggcttcatcgtttataaaatccgggctgctgataaaagaagtaaggctttgaaagcttcagcgcctgctcctggtcatcactaaccagatttacttggagtacatgtgaaagaaaacgtcagtctgcctgtaaatttcagcaagccgtgttagatggggagcgtggaacgtcactgtacacttgtataagtaccggttacttcatggcatgaataaatggatctgtgagatgcactgctacctggtactgctttcagtgtttccccctcagcccctccgggtgtcaggcatactctgagtagatatttgtat

SEQ ID NO: 21600 - DNA, 486 bp, Homo sapiens
  misc_feature (1)...(486): n = A,T,C or G
nacgggtcctgatagtcatcggcattggcacgaggnggnaggcgtggctgaggtgagaaactggcgctgctgctgcctcggcagcacctgctggtgtttgagctctcgtgctggactgcgtgttggccgccctgtgcttcgcttccctggccctggtccgccgctaccttcaccacctcctgctgtgggtggagagccttgactcgctgctgggggtcctgctcttcgtcgcgggcttcatcgcggtctctttcccctgcggctggggctacatcgtgctcaacgtggccgctggctacctgtacggcttcgtgctgggcatgggtctgatgatggtgggcgtcctcatcggcaccttcatcgcccatgtggtctgcaagcggctcctcaccgcctgggtggccgccaggatccacagcagcgagaagctgagcgcggttattcgcgtaaaggagggaggaagcggcctgaagtggtggcgcttgc

SEQ ID NO: 21601 - DNA, 464 bp, Homo sapiens
  misc_feature (1)...(464): n = A,T,C or G
gggnnggttccaattgacccngcnntgnaatattctccgcgctgcaggaattcggcacgagaggatcgcccgtggcaaaatcacagacctggccaacctcagtgcagccaaccatgatgctgccatctttccaggaggctttggagcggctaaaaacctgagcacgtttgccgtggacgggaaagattgcaaggtgaataaagaagtggagcgtgtcctgaaggagttccaccaggccgggaagcccatcgggtgtgatgcttccacgagcctcccggcacctgctccttggtggtcctggaacgcggcgctgtgctgtccaggtctcagctgcgtctggtgctggcagggcgagagccgcacttgcgtgggtgaacatcagtgaggcgcactcgcgatggccgctcactaccgagttctgtcagccgaacaaggatgaggatctatcggaatcctctgtctcc

SEQ ID NO: 21602 - DNA, 251 bp, Homo sapiens
  misc_feature (1)...(251): n = A,T,C or G
tgggtgncgggggggnnnnaggaaattctcggctgcagaatttgcacgagcgaagaagcatcgttaaagtctctcttcaccctgccgtcatgtctaagtcagagtctcctaaagagcccgaacagctgaggaagctcttcattggagggttgagctttgaaacaactgatgagagcctgaggagccattttgagcaatggggaacgctcacggactgtgtggtaatgagagatccaaacaccaagcgctcc

SEQ ID NO: 21603 - DNA, 488 bp, Homo sapiens
  misc_feature (1)...(488): n = A,T,C or G
aggagtgnnnnnaatagaaaaccatggatagccatgcacgaattcgccacgagcaaaacagtgggctactgtatcatccctatatgcttggcagttatttgcaatcgccaccaggcatttgtcaaggcttctaatcagatcagcagactacaactgattgacacgtaaaatcagtcaccgttttttccctacgattacaaaactgccagtcctatatggagtctgatcacaagactgcagtttcttcacagatctcaggaagttgtcgtggggcagaggctttttaaaaacatgtgattagggagctatctttatctgaataataacgaatttttaggtaaaacctgagatagagtactacaaaatcatgttgatgacttcagattttggaagttaaatcatgtctgttatttgcattctttagaaacttgactaagtacctgaattcatatttctattctactgtgcaacatagtgatgattcagaa

SEQ ID NO: 21604 - DNA, 471 bp, Homo sapiens
  misc_feature (1)...(471): n = A,T,C or G
natagaccgctttggagaactctccacgagcttggactgagccagaatgtgattttcctgatgaaaaagactcatactgggaattctagggctgccaaatcattttatgtcctatatacttgacactttctccttgctgctttttcttctgtatttctaggtacaaataccagaattatacttgaaaatacagttggtgcactggagaatctattatttaaaaccactctgttcaaaggggcaccagtttgtagtccctctgtttcgcacagagtactatgacaaggaaacatcagaattactaatctagctagtgtcatttattctggaatttttttctaagctgtgactaactctttgtatctctcaatataatttttgagccagttaatttttttcagtattttgctgtcccttgagaatgggccctcacaggacagtgcttccaagtacatcttctcccagattctc

SEQ ID NO: 21605 - DNA, 490 bp, Homo sapiens
  misc_feature (1)...(490): n = A,T,C or G
gggagggccnnnntttagaaaaccctagatcagcctgcangaattcggcacgaggcgaaccccaagagtgcagagtgtggagcgtggagcgccgggactgtgcacgcttgaccggaagcccagaccagtgcggtcctagccagagagaaaggacatttgccaacaatgagacacgaagcgcccatgcagatggcctctgcccaagatgccaggtacggccagaaagactcctctgatcagaactttgactacatgttcaaattactcatcatcggcaatagcagtgtggggaaaacatcttttctattccgttatgcagatgactcctttacatctgcattcgtcagcacagttgggatcgatttcaaagtaaaaactgtattcaaaaatgaaaagagaatcaagcttcagatttgggacacagcaggccaggaaagatacaggactatcaccacagcctattatcgtggagccatgggctttattttaa

SEQ ID NO: 21606 - DNA, 472 bp, Homo sapiens
attagaaaacccattgcaccgcgctgcggaattcggcacgagccccagtgctcatgcaccttgcactagaggcttctgactcctgggactttggagcttaccagagatgcagtccctcccaggaacctgttggagaggcaggacctgctgctttagagtgcggctgaacccgggccttgcgtccctgtttggccagagcaaggatctggcctggagaggcccatcctataccccttattagagccatgacagcctacagagtgaggtgaggtgctcccaccttcccagatggttcctttctgccccttcctggaaggaaaggtgaggctgccaatagcctcctggcaccagccagacctcacccttgaccaacctctcggggctgggggttcattcctggggcactgtggcctggttttgctttgaaaccaagaaagagcaaagggaacccagcagttctgagtgagttctg

SEQ ID NO: 21607 - DNA, 461 bp, Homo sapiens
  misc_feature (1)...(461): n = A,T,C or G
atgtgcnnattgaaattgactcgctctgcaggaattcggcacgaggcagtatgagagttgtaacggcccgactggtgagtgagggggagcaggggattccaacggcttgcgctgtctttgtgcaccagccggtggtcggtcacgtctgggactggctggggtaggagagggcggtccccagtgcagttgggtgaactaccgttgcgcactggagtttctggtgtctttgcttggaactgacctagctcgtggcagggggaactcggctagcggccccacagcccatgctgactcaaaacaactgagttgtacgacgttcatcgccgtgttatccttgagtaaagaatgaactctggaagcccagccagggacaatgcaccttcacagagattctgcactaatctgagtgaaggtctaaggtttggaatctccccctcatggagagaagctttgtatggctg

SEQ ID NO: 21608 - DNA, 485 bp, Homo sapiens
  misc_feature (1)...(485): n = A,T,C or G
ggtccgnnaattgaccccctcnatgatcgcctgcgcgaanggcacgaggacagcttcacgtaccgggctgaagtcaagggcgtttatcagttttgcttcagtaatgagttttccaccttctctcacaagaccgtctactttgactttcaagtgggcgatgagcctcccattctcccagacatggggaacagggtcacagctctcacccagatggagtccgcctgcgtgaccatccatgaggctctgaaaacggtgattgactcccagacgcattaccggctgcgggaggcccaggaccgggcccgagcggaagaccttaatagccgagtctcttactggtctgttggcgagacgattgccctgttcgtggtcagcttcagtcaggtgctactgttgaaaagcttcttcacagaaaaacgacccatcagcagggcagtccactcctagccccggcatcctgctctagggcccctcatgccccaggc

SEQ ID NO: 21609 - DNA, 453 bp, Homo sapiens
  misc_feature (1)...(453): n = A,T,C or G
ntttgacccctggctgcacgaattcggcacgaggcactatcaacctgcaggatctgcagtgacggcagcctcggcctgggcaggcccaaggccacggtctaggacacaccttccctgagactcatgacatgagcctggggagacctcatttggtttccgttcagaagaccagcgtagcccttttgagacttttgggtacatttatcaaaaatgttttccttttgttttaccaggaatgagttcgggctatactctttgaaactgcctttgtgagcaaagtgctttggcaaggcaagggtctccctcagcagggctaggtgcactacagcctctttccccgtgtcccgttggatctgagctgtgtagcacttgttgcattacaaagaaaaagacttctgcaggaaatagggtagagaacaggctgtctagtcagatgcagcttgatctgtggcn

SEQ ID NO: 21610 - DNA, 490 bp, Homo sapiens
  misc_feature (1)...(490): n = A,T,C or G
ntttgccccgcctgcacgaattcggcacgaggcgacctgngagaggggaattgctggaactgcttccttctctatacccttctctatgttttattgcataaataggaaacattgttgaaaagactttcctggtaaactgttctgaattttacgtttatcgaaatatctccaaagactcaatttagaactttattatgcccttatttatttaacatttctttgtaacaaacatgtatattgcccttatgttgtgccaggcagtgctcaaagcactttcttcccagagagagatgaattctactgttctcccaaacctttgttagctactaaaatatacacattttgctatcataaataccagggtggtggccagtgcggtggtcatgcctgtaatcccaggacgttgggagggaggctgaggcaggaggattgcttcagctcaggagttccagaccagcctggngaacatggagaaaccccaactctacaa

SEQ ID NO: 21611 - DNA, 480 bp, Homo sapiens
  misc_feature (1)...(480): n = A,T,C or G
nattgacccgcgcttaggaattcggcacgagggcccttgnggcccctctgtgagatctcaatgctgtctggggaccctaagagttttctcacctgttcagtctcatctaaccttccaatgtctgatgttcctgccaaattcctgcctgattctgggtccgtcctgacctccaaaggtcagcttggtgcttgaggtctccctgctcttggtggcagtggtagcagcaacagcagcagcagcagcagcagcagcagcagagacctctccactttcccttagcccctctgctgggtagagaggcactttcagggacttccctccagctgcctcttcatctgggaatgagctaagcaaggctgagcctcctcctggtgcttgaaataatgatgatataaaggcttgatttggaagtttgatccccctgtccctctgggatgctcatataaacccttccactcccttgaaaaaaaaaaaaaaaac

SEQ ID NO: 21612 - DNA, 466 bp, Homo sapiens
  misc_feature (1)...(466): n = A,T,C or G
atcgcccccgcngttggactccgcgctgcaggaattcggcacgaggtccttccgaggaagctaaggctgcgttggggtgaggccctcacttcatccggcgactagcaccgcgtccggcagcgccagccctacactcgcccgcgccatggcctctgtctccgagctcgcctgcatctactcggccctcattctgcacgacgatgaggtgacagtcacggaggataagatcaatgccctcattaaagcagccggtgtaaatgttgagcctttttggcctggcttgtttgcaaaggccctggccaacgtcaacattgggagcctcatctgcaatgtaggggccggtggacctgctccagcagctggtgctgcaccagcaggaggtcctgccccctccactgctgctgctccagctgaggagaagaaagtggaagcaaagaaagaagaatccgaggagtctgatgatgac

SEQ ID NO: 21613 - DNA, 493 bp, Homo sapiens
catcgacccgcgctgcaggaattcggcaccaggaagaaagagaggtgaaggagaaaagaacattccaagaggagatgcctccgcgtccttgtggaggacacgcatccagctccctgccaaagagccacctggagccaagcctagaggagggcttcattgacactcattgtcacctggacatgctctattccaagctatctttccaagggacctttacaaagttcagaaaaatttacagcagctccttccctaaggaatttcagggctgcatctctgacttctgtgatccccgcaccctgacagattgcctatgggaggagctgttgaaagaggatctggtctggggggcctttggctgtcaccctcattttgcacgttactacagtgagagtcaagaaagaaatcttttgcaagccttaaggcaccctaaggctgtggcatttggagaaatgggcttggattactcttacaagtgcaccacgcctgtcccaga

SEQ ID NO: 21614 - DNA, 509 bp, Homo sapiens
  misc_feature (1)...(509): n = A,T,C or G
agcggngtnnnccttgtactgcatggcgtacgtcacagatcaagagatacacttctaagtaatctatatgtcaagtaagacaaaatgaaattagaaaatatttttaagtcaatgatattaaaccatactacacatcaaaacttgtgggatgcacttaaagcagcatgtagagggagattatattcataaatgcttatggtagaaaagaaggaagtctgtacattatgtagctatgcacccatctaaagaagttaggaaaatgacatcaagtagaacatcaaaagaaagaaggaaaggataacttaaaacagaaatgaatgaaataaaaccagaatagaagagacgatctacaaatccaaaagttggtttgttgaaaatactagtagagctgacatacctgtggtgagactgatggaaataatgcagttacaactaaccaatatcataattggaaaggaaatcactataggtgctgtaaaaattataaagataatagaatattatgaaca

SEQ ID NO: 21615 - DNA, 472 bp, Homo sapiens
  misc_feature (1)...(472): n = A,T,C or G
ntttgcacctctccgccgcactgcaggaattcggcacgaggcctggctgacctttctatcttctctaggctcaggtactgctcctccatgcccatggctgggccgtggggagaagaagctctcatacgccttcccactccctctggtttataggacttcactccctagccaacaggagaggaggcctcctggggtttccccagggcagtaggtcaaacgacctcatcacagtcttccttcctcttcaagcgtttcatgttgaacacagctctctccactcccttgtgatttctgagggtcaccactgccagcctcaggcaacatagagagcctcctgttctttctatgcttggtctgactgagcctaaagttgagaaaatgggtggccaaggccagtgccagtgtcttggggcccctttggctctccctcactctctgaggctccagctggtcctgggacatgcagccagga

SEQ ID NO: 21616 - DNA, 472 bp, Homo sapiens
cgccccccctttgcccccactgaagtgaccgcgctgcaggtttgaatgtgggagggaagatattcacgacaaggttttctacgataaagcagtttcctgcttctcgtttggcacgcatgttagatggcagagaccaagaattcaagatggttggtggccagatttttgtagacagagatggtgatttgtttagtttcatcttagattttttgagaactcaccagcttttattacccactgaattttcagactatcttaggcttcagagagaggctcttttctatgaacttcgttctctagttgatctcttaaacccatacctgctacagccaagacctgctcttgtggaggtacatttcctaagccggaacactcaagcttttttcagggtgtttggctcttgcagcaaaacaattgagatgctaacagggaggattacagtgtttacagaacaaccttcagcgccgacctg

SEQ ID NO: 21617 - DNA, 482 bp, Homo sapiens
  misc_feature (1)...(482): n = A,T,C or G
aattgaccgccctcagatagatccgcctgcggtcaaaacctgnagggaacggcttctgaacagttgccttcagaactagtttgagctgctcaataaaaccagtgactttactcataccttgtttttgaccaaaggctgcattctttacatcatccagtcttgactctcatccattctacctcctagaatatttctctctcatctttccacttccctaactaggcactatatcctatttagctattaactcctccaaattggtgcagtaacctcctaacaggtctctagtctcaccccattccttacattgcagccagagttttcaatatacagacctgatctcttctctcctgttgctcttagatagggtgaaacccttaacataaagcacaaggctgtgcatgactagagtcccacctaggtgtctggcataatcagacctcagcaaatgcctttggggccttcccacagctctgacctcg

SEQ ID NO: 21618 - DNA, 468 bp, Homo sapiens
  misc_feature (1)...(468): n = A,T,C or G
ntttcccccgtgctgcaggaattcggcacgagggcgctgagacggtttggcggtgagtcctgggccaggcgcagctgaaaggcccgcaacccgggaaacgtcaaaacaaacagaaggacttgggattccggagcagtcgcccctatcgctgctcctgcagttgcggacgccaccgaccccgccgccggaggactgggcactgaaaggcctctaggcctaggcgcggcccgcggagccagacgtgttgctgccgtgagtaaaacgagcgccctctccgcactcgtttacaaattaaaatggaggaaatttcgttggccaacctggatactaacaagctagaggccatcgctcaggagaattacgtagacctgatagaggattcttgtttgggattctgctttgaggtgcaccgggcagtcaagtgtggctacttctancctgagttcgcagagactggtagcgtgaagg

SEQ ID NO: 21619 - DNA, 465 bp, Homo sapiens
  misc_feature (1)...(465): n = A,T,C or G
tgagaaacaaaaananttaganccgctctgcangctttagtagagacgaggtttcaccatgttggccaggctggtctcagactcctgacctcagatgatccactgcctcggcctaccaaagtgctgggattacaggcgtgagccacaccacctgatcccacctcttaaaagggggaggggggtgcaaaatatctgtactcctggagcttgtagtctaattggaggtatgacacatcaaaagaaaatatgtcatagattgtaagtagtcagagctcattagaggtttaaaagaaataacgtgtaaagtttttagaagaatatctgaccagagttctcagtaaatgttagctgtggaatctcattaatccctttggtcatctgtattccagcaagctcactgtgatgatggttttccaacattcgcagtttccaccagaaagggtttccttagtgttgggtaaacct

SEQ ID NO: 21620 - DNA, 467 bp, Homo sapiens
  misc_feature (1)...(467): n = A,T,C or G
atgcgcccccccnnaattgaccccgcgctgcaggattaaagcagcttccccacttggaagtcctgagctatgcccaagtgctttacacggtctgagccaggccatgaaactgcccagccctgcccaccacctctggagtctgctctctgaagctactgggaaaatttttgacctcctgccaaataagattcggagaaaggatctagagctgtatatcagcatagcaaaatgcctcttagaaatgacagatgatgatgccaatcggatcgcccaggttactaagagcaacatagaaaaagctgcctttgtcaaactgtacttagtctctcaaggacgattccccttggtgaacctgaccgatatgctgagcgttgctgtgcagcaccgtgagaaagaggtgttggcctggatgattctgcacagcttataccaggcacggattgtgagccatgccaatacgggcgttt

SEQ ID NO: 21621 - DNA, 470 bp, Homo sapiens
  misc_feature (1)...(470): n = A,T,C or G
agggtnnctaaattactgacttctatcgcactgcagcaattcggcacgagaagaagtgaaaataaagccacctaaacagcaacagacgacagaaattcattctgataaattatctcgatttaccacttcagcagaaaaagaggcaaaattagtttatagcaattcctcctctggtcctactgctactctgcagaaaattcccaacacccatttgtcatctgttacaacctctgacctctctccagggccttgccaccattcttctttatctcaaattccttcagctatccccagcatgcctcaccagccaacaattttactgaacacagtctctgccagtgcttctccctgcctacatcccggggcacagaacatcccaagccctactggcctgccacgctgtcgatcaggaagtcacaccattggtcccttttcttccttccaaagagctgcacacatctatagccaga

SEQ ID NO: 21622 - DNA, 474 bp, Homo sapiens
  misc_feature (1)...(474): n = A,T,C or G
ntttgaccctctccgccggactgcaggaattacggcacgagaaacactcatttcccagtggcagcgcacagctttccatttcatgcaggccccaagagctcctccagtggagactggagatctgccagaatgcacagtcttcctctaccttcctgtgcgggttgagatcgggagggtggggtctcagccctgcactcctagcactgcctaccccttctatcctggcccctgggggccaggtgagctggtgaagtgcccttgatctcagctccaccccctccccagcctctgggctcctgaccatttcaacctcctcctctctctgcctgtcacctcagccttcaaggcatagcacagactatgtgctcagtcccttcctctggttttctggtctatctgagggaggcctgttctagaaggtggggagcctttgttgaagtccacattcaagcccctgatgtgacctgaagtggn

SEQ ID NO: 21623 - DNA, 462 bp, Homo sapiens
  misc_feature (1)...(462): n = A,T,C or G
nttgccctgctgcagcattcggcacgagccgctgagaacaaaactcagactcactcttcagtcattcagcaagatacaaccattctaccctctccagcgggcggatctcactgtgctgatgcccccgggaaggcctccccggatctcggctcctgcttcctttcagggagaggggagatctaatcaggacagacagaccccacgtgcgccctcatggtgacctctggtctccttgcctcttctttttctcaggttcagtcgctcacttgtaacagattccctgaaacactgctttttccggagaaaaaaaaactcctcttttgggggctcatgggcaagaggagggggagctgattaagagggaagctccagcctccgatcaaagagacagatacacactgctgccgatttgtggcgctggccggccttccccccaggtgcctccgccctctgtcatgcggc

SEQ ID NO: 21624 - DNA, 487 bp, Homo sapiens
  misc_feature (1)...(487): n = A,T,C or G
ngagatgcnnnnaattgatcgcctgcggtattcggcacgagattgaatgctgctgtgaacagggtgtcagtgaatctgctgagggcttgttttccgtattctgggcatggccctttgtgtctgcctttgctggagcacctccccgggatgcgtttgtttataggatgttcagacgaatgtcagaacccactgggcggttcactcactgaggggggcccgcgtcccctccatttctgcattcccagttcttggtatggttcctctgaggttcggttttcctgagcacctggggtgtttgcagggatgtgagngggttcctgcagaagacaccacccacatccacgcacctgctcagattcccgggccatggtcggggccaccgcccgtggggatgactccggatgggagtggcagaaaagggcctgctgggccgaggggaggcgtctccgggaagagagggaggtgtgagcggngagaacccactttg

SEQ ID NO: 21625 - DNA, 354 bp, Homo sapiens
  misc_feature (1)...(354): n = A,T,C or G
nattgannctcgatcnncgctgcaggattcggcacgagccgccgtcccgccccttcgcgtcccgggaaccggctggcttccgagccgcactcgccgatcctccaggcatgccccgctacgagctggctttaatcctgaaagccatgcagcggccagagactgctgctactttgaaacgtacgatagaggccctgatggacagaggagcaatagtgagggacttggaaaacctgggtgaacgagcgcttccttataggatctctgcccacagtcagcagcacaacagaggcgggtatttcttggtggatttttatgcacccaccgcagctgttgaaagcatggtggagcacttgt

SEQ ID NO: 21626 - DNA, 477 bp, Homo sapiens
  misc_feature (1)...(477): n = A,T,C or G
ntttgacccgcttgacccgcgctgcaggattcggcacgagggcaccgccctggccttccgcaccctcgtcacccgcatctccaacgacctcgagctctgagccaccacggtcccagggcccttactcttcctctcccttgtcgccttcacttctacaggaggggaaggggccagggaggggattctccctttatcatcacctcagtttccctgaattatatttgggggcaaagattgaaaaaaaaaaaaaaaaaaaaaaaaaaaaaaaaaacctttggggggggggcgggaccccaaagggcccttaaaggggggctaataaaaatttcggggggggggtttaaaaagggggggggggggaaaaaaaccgcgggggggggggggggggcnnnttggggcgggggggagggggatccggttgagggagggaaaagtttaaaatngcgggggtggggaaaacgcgacgtgctgcggacg

SEQ ID NO: 21627 - DNA, 492 bp, Homo sapiens
  misc_feature (1)...(492): n = A,T,C or G
tggggnnnnnnnaagggaggggnnttttganncccctaattgacccgcgctgcaggaattcggcacgagcaggaccgagctgctgtggccacattcctgcagtctgtgcaggtccccgaattcacccccaagtctggcgtcaagatccatgtttctgaccaggagctgcagagcgccaatgcctctgttgatgacagtcgtctagaggagctcaaagccactctgcccagcccagacaagctccctggattcaagatgtaccccattgactttgagaaggatgatgacagcaactttcatatggatttcatcgtggctgcatccaacctccgggcagaaaactatgacattccttctgcagaccggcacaagagcaagctgattgcagggaagatcatcccagccattgccacgaccacagcagccgtggttggccttgtgtgtctggagctgtacaaggttgtgcaggggcaccgacagcttgactcctac

SEQ ID NO: 21628 - DNA, 466 bp, Homo sapiens
  misc_feature (1)...(466): n = A,T,C or G
tggannnnnncctgaattcctgacgctggaagaaacatggctggtgatctttcagcaggtttcttcatggaggaacttaatacataccgtcagaagcagggagtagtacttaaatatcaagaactgcctaattcaggacctccacatgataggaggtttacatttcaagttataatagatggaagagaatttccagaaggtgaaggtagatcaaagaaggaagcaaaaaatgccgcagccaaattagctgttgagatacttaataaggaaaagaaggcagttagtcctttattattgacaacaacgaattcttcagaaggattatccatggggaattacataggccttatcaatagaattgcccagaagaaaagactaactgtaaattatgaacagtgtgcatcgggggtgcatgggccagaaggatttcattataaatgcaaaatgggacagaaagaatatagta

SEQ ID NO: 21629 - DNA, 467 bp, Homo sapiens
  misc_feature (1)...(467): n = A,T,C or G
tgganntnnncctgcattcctcgcgctgcagaattccgcacgagaataaaataggtaataggactttcgtattctcctatcatgaatatgacttgcatttctaaatgccatttgatcctttttacgtgaggagtttatatgaaatcctcatgttcttttaaatttcccaactaaattgtgtgctcctacgaataccttttaggtatgcacacatacacagagcatcttattttatactggtgaaatctatgttgtttaggatacagataatgtcattgtatttatcctatcagaataggcttttcccctatttcaaaatagatgctattggctttattttttatttttaaagtgtttttaaacacggacttaccatgttgcccaggctggtctcatactcctagatgcgagctatcatcccacctcgatcacccaaagtgctgggagtacaggcagaggacaccatg

SEQ ID NO: 21630 - DNA, 479 bp, Homo sapiens
  misc_feature (1)...(479): n = A,T,C or G
ntttgacccgcgctgcaggaattcttgacgagcacagccccgtccagagtctaatcctgaatctcatgattccaccacaaagacctcagcgggatcaaagagtgcgagaacaacgaataaatattcctccccaaaggggacccagaccaatccgtgaggctggtgagcaaggtgacattgaaccccgaacaatggtgagacaccctgacagtcaccatctcttcattggcaacctgcctcatgaagtggacaaatcagagcttaaagatttctttcatagttatggaaacgtggtggagttgcgcattaacagtggtgggaaattacacaattttggttatgttgagtttgatgattctgagcctgctcagaaagtccttagcaacaggcccatcatgttcagaggtgaggtccgtctgaatgtccaagataacaacactcgagctgccaaggaaggcgaccgacgagataatcgcctt

SEQ ID NO: 21631 - DNA, 439 bp, Homo sapiens
atgagatgtggcgatcgacgagtaaatgcacatgggatcccggtttggatcttggaccacaaaaaaaagctattagtgggaaaactgaaaacaaggtctgtagattgaggtagttgtattttgtccatataaatttcttcatttgaataactacttttatgtaagatgttaaccttaggggaagttgcgcaaagggtatacaaaaatgccatatgatttttgcaacatctctgtaagtccaaaattattttaaagtaaaatgttttgaaatacccatcatacatgtgaggtacttttggtttgaaggaagatggttataaacgtccctggttctgccagggacttagaggggctttgaagcatgtgagaaggtgctcttttgttctgtcacggtgctatagacttggcagtcttggcccctgaaggctggatatcactg

SEQ ID NO: 21632 - DNA, 472 bp, Homo sapiens
  misc_feature (1)...(472): n = A,T,C or G
atgcgttntnaaccatgacttgcctcgcgctgcagcaattcggcacgagatttgagggcgcgaccccagcgctctccacggaccagccagagggactggagccaggtgtgcatgggttcaaggccctggccctgcccagcctctgtcttgggagctcagccccagggttcggtcgtcagcagtttcccaagaacaagatgtgatggcatctgctgctgaaaccctgatgaggaccaggccccctgcaccgctgtcagcctgaggaattaaagctttggtgctgggaaaaaaaaaaaaaaaaaaaaaaaaaaaaaaaaaaaaaaaaaaaaaaatcttgggggggggggccgggccccaattcccccttttggggggggtttaaaaatttcggggggggggttttaaaacgggggggggggggaaaanannncnnnncncngntctctactttcctantgcctactggcctctg

SEQ ID NO: 21633 - DNA, 420 bp, Homo sapiens
  misc_feature (1)...(420): n = A,T,C or G
natttgaccnttttgccccgcgctgcaggaattcggcacgagagcttccgaaccctgggctgtttccttagtcttcattttataaaagttgttgcctttttaacggagtgtcactttcaaccggcctcccctacccctgctggccggggatggagacatgtcatttgtaaaagcagaaaaaggttgcatttgttcacttttgtaatattgtcctgggcctgtgttggggtgttgggggaagctgggcatcagtggccacatgggcatcaggggctggccccacagagaccccacagggcagtgagctctgtcttcccccacctgcctagcccatcatctatctaaccggtccttgatttaataaacactataaaaagttaaaaaaaaaaaaaaaaaaaaaactcgggggggggccgggac

SEQ ID NO: 21634 - DNA, 466 bp, Homo sapiens
  misc_feature (1)...(466): n = A,T,C or G
acttgacccgccctgcaagatanacttcgaccccgcgctgcaggaattcggcacgagaaaatccattccattgtctgtggaccaagatgttctatgtaattcagaagcagaactcttggctaaagggctagtgtggccttcagaaaccattcaattattttctccctacacctttgtcagtttgaaaccagtgaggaaaaaaggtatgttgataagaaacctatattgctaggtagaatttgtacttgttttcttggtagcagttttgaaatattctgtacagtacgttcctattgtttaataataaattcaaaaatatttctaaaaccttaaaaccaactatgccaagcattaagataaacaaatatgatgttctttgacgtaaatcaacgtgatgattctttcacatgtaaacacattttagtgtttctgggttgtcatttttgttgctgatgctgatgatgta

SEQ ID NO: 21635 - DNA, 449 bp, Homo sapiens
  misc_feature (1)...(449): n = A,T,C or G
ggggggnccnnaattgccccctttgcccccgcgctgcaggaattcggcacgaggaagagtccactgatgagtgaattccagtcacagatcagttctaaccctgagctggcggctatctttgaaagtatccagaaagattcatcatctactaacttggaatcaatggacactagttagatgtttgttcaccatggggaccattacatatgaccatacaatgcactgaattgacaggttaatcataagacatggaaagagaagtgtctaaaagcttcaaaatgttccacttttttttccttcatggagactgtttgtttggctttcttccattgttgtttttgtagcatttatttcagaaatgtgtatttccataatccagaggttgtaaaaccactagtgttttagtggttacagcaacatttgaaatggaaactaaaagttaggatttn

SEQ ID NO: 21636 - DNA, 446 bp, Homo sapiens
  misc_feature (1)...(446): n = A,T,C or G
gatgggtaannnaaatgaccgccttaggaatccggcacgagcaggagcgggaggaggcagcctcacctatttggctgctttaaagtcactgttccgtgtcacagctcactttgcccagattgttatctaaatatcaatgtatttcactaaattcatgtcaggaaacggataagtggtttcaaaaattttttgcaaataaaccgtgttttctacagaataatgatgcaagtagagtgaataataagaaacagactggccgggtgtggtggcttatgcctgtaatcccagcactttgggaggctgaggcgggcggatcacttgaggtcaggagttcaagaccagcctggccaacgtggtgaaaccccatctgtaccaaaaatacaaaagttagccagacgtggtgctgcatgcctgtaatcccagctactcgggaggttgaggctgga

SEQ ID NO: 21637 - DNA, 458 bp, Homo sapiens
  misc_feature (1)...(458): n = A,T,C or G
atttacacgctctgccccgcgctgcaggaattcggcacgagcaggcggctacacagacattgtggggctgctgctggagcgtgacgtggacatcaacatctatgattggaatggagggacgccactgctgtacgctgtgcgcgggaaccacgtgaaatgcgttgaggccttgctggcccgaggcgctgacctcaccaccgaagccgactctggctacaccccgatggaccttgccgtggccctgggataccggaaagtgcaacaggtgatcgagaaccacatcctcaagctcttccagagcaacctggtgcccgctgaccctgagtgaaggccgcctgccggggactcagacactcagggaacaaaatggtcagccagagctggggaaacccagaactgacttcaaaggcagcttctggacaggtggtggggagggacccttcccaagaggaaccaan

SEQ ID NO: 21638 - DNA, 456 bp, Homo sapiens
  misc_feature (1)...(456): n = A,T,C or G
nattgaaaatcgatcgccgctgcaggaattcggcacgagccagcttctcgggaggctgaggcaggagaatcacttgaaccagggaggcagaggttgcagtgagcccagattgtgccactgcactctagcctcggtgacagagtaagattccatctcaaagaaaaaaaaaaaaagtgaaaatggccattggctggggttatgacaatacagggaaagtctgttgtcttaaatatccaaatccttagggagaaattaaaacaaactggagactggcctttgacacatggactctgcctagctgggttaaaaaaatatttaactccaagccttaaaattcccaaagggagtgggggcttacctcattcacacaatccaaaagttcactgggtcctgaacctctaaagggaaaaggtctcccctggagcaggagcatcaaagtttgctcgggggcataag

SEQ ID NO: 21639 - DNA, 491 bp, Homo sapiens
  misc_feature (1)...(491): n = A,T,C or G
aggccgtcggggnccgaattgaaatccctaaattgaagtccttaggaattcggcacgagccgcacccagccttggttctccctttcttcatctggataaggaaggctggactgcaccttctctacaggctgagttggacattcgcagatctaccctcccaacctgcattctgcctcaagcagcaacgcccaccccaggctcaggccacatggagaagccacccctagttccagtggtggatgtggcacctcggcctggccaatcagagctcccttgtcctaggttcctagtgattggttcgagatggacacgtgacccaatgagcggcctttcctgggagttctaccaggagcatcaggaaggttgagctgggtgtatgggaaccaggccggggcgaggggttccaggggggacctgagaacattgcgtggagccctggatccaactgtacctgacactagccaatttcatttcttcagtttcatggaccc

SEQ ID NO: 21640 - DNA, 326 bp, Homo sapiens
  misc_feature (1)...(326): n = A,T,C or G
actcacacatgttcattctcttcctgcttctgctctgggccggtggggggctctcacaaaatacttgctgctggcaaaaggcctgtactcaggcatttgctttgacttgatgttgccaagggactgaggccattggcaggcttagtaccacctgctcctcatcttacgagtctccttttcaaataattaggctctgttcccattttaaaactctgatattggccttcacctgtgactggacactttactagaggcccattttcactaaacaatagaatctanatacattgggaggaataacaaccaccaaggagaaaaaaataaag

SEQ ID NO: 21641 - DNA, 483 bp, Homo sapiens
  misc_feature (1)...(483): n = A,T,C or G
tgggnnnncnnnnnncaattcgcccgcctgcaggaattcggcacgcgctgcgcgcatactctgtggtgctccctctgtgccgnggccaccagcctccacctttcaacagccagagcattgaaactaccttctttcctttaatgtaatcaaattcttgggcagagttgatcgtaatcagtgttgactgtttgttattttaaatagtaattttttttcttatcctggcaaagttcatctccttgtggctccagattttcagtctagttattttatgtcttccaccatttgtgtctgaaaggttaaatgtggtgcctttttttccttaccgcatgcataaatgcatgtattttctgtatttggacgtanaactctgtgtgttgggggctgggataaagaaagaggcaaccatctttggctgatgtgttagagatatgcttactttacaataaacaaaggctctttgtgaaaaaaaaaaaaaaaaaa

SEQ ID NO: 21642 - DNA, 500 bp, Homo sapiens
  misc_feature (1)...(500): n = A,T,C or G
acgatggggggaatattggntaatggggcggganggggnnttttgaccgtcgtgaggcattcggcacgagaaaaagtgaagtgaaggaggaggtaacagtagagacgatggcaatatcatcaaggacaaaagtaaaaacgtttagctacctgctgatttttagtgactgttcatatatgttgtatttcaagtatggctggtgaagccagtcagcttttcgggacgttagcaagtggaaactgagtcagtatcatccaaaaccatatctagtcttaacacatggagaatgctggagtgagggttgtgagttcagggtatataatcaagaaaacactcccagcataatgctaggggtcaccagtgtccatcccccagaactgtatggatctaggatatacacagctgcgttgcattaagaaagagatgaaatctctattaaaatacacaagatttttgtatctccttgtgcagaggatatttgccactgcccattgggaagc

SEQ ID NO: 21643 - DNA, 452 bp, Homo sapiens
  misc_feature (1)...(452): n = A,T,C or G
nattgaccttcgctgacgattcggcacgagaaagatgatgggggaactgccccgcatgccgaggaaagctcgcccagctgcgcaaaatgctctgcttgacgtcgggtttctgcgcaccaagctgagccatgaccaagggttagagccgaggcgaccccggacgtgggcgctccatctgctgctgcggttccccctgttctcggctaaaccgtggctggaaccggtgcccgccagaggtgcaggagccgccccgcgggcagaaggaggcggtagccctggtccctgaaaaccaggccctgctgacaaatctcagacgccaggaacagaagaaccaggaaaaatgcctgacagcttgagccagatggacggactgttggaacacctgagggtgaagctgcgcgaactcctcaaagaggaacagcaaagcagccaccaagatggaccagaaagaa

SEQ ID NO: 21644 - DNA, 482 bp, Homo sapiens
  misc_feature (1)...(482): n = A,T,C or G
aattgcaccgccntgtttggaccgcgctgcaggaattcggcacgagcggaatgttatttatatcaatgaaactcacacaagacaccgcggatggcttgcaagacgcctttcttacgttctttttattcaagagcgagatgtgcataagggcatgtttgccaccaatgtgactgaaaatgtgctgaacagcagtagagtacaagaggcaattgcagaagtggctgctgaattaaaccctgatggttctgcccagcagcaatcaaaagccgttaacaaagtgaaaaagaaagctaaaaggattcttcaagaaatggttgccactgtctcaccggcaatgatcagactgactgggtgggtgctgctaaaactgttcaacagcttcttttggaacattcaaattcacaaaggtcaacttgagatggttaaagctgcaactgagacgaatttgccgcttctgtttctaccagttcatagatcccata

SEQ ID NO: 21645 - DNA, 456 bp, Homo sapiens
  misc_feature (1)...(456): n = A,T,C or G
aggtggaaactgaattgactggctctgttcgatacgaggggaggtgggagccatgtccaaacggctccggagcagcgaggtgtgcgctgactgcagcgggccggatccttcctgggcatcagtaaataggggaacgtttttatgtgatgagtgctgcagtgtccatcggagtctagggcgccatatctcccaagtgaggcatctgaaacacacaccgtggcctccaacactgcttcagatggttgagaccttgtataataacggtgctaactctatatgggagcattctttgctggaccctgcgtctattatgagtggaagacgtaaagctaatccacaggataaagtacatcccaataaagcggaattcatcagagccaagtatcagatgttagcgttcgtccatcgcttgccctgccgggatgacgatagtgtgactgccaaagatcttagcan

SEQ ID NO: 21646 - DNA, 500 bp, Homo sapiens
  misc_feature (1)...(500): n = A,T,C or G
gccccttgcccgcctgcagaattttgcacgcgctgcacgaatgtctgacgaggaaataagtctctgtccattcactgtctggaccctggcaacctgtaagtgaataccctgtgagagctccgacaccagaagaagcctccggaactgaagaaggatcagctgtagtaccaacagagcttagtaatttctaaaaagaaaaaatgatctttttccgacttctaaacaagtgactatactagcataaatcattctagtaaaacagctaaggtatagacattctaataatttgggaaaacctatgattacaagtgaaaactcagaaatgcaaagatgttggttttttgtttctcagtctgctttagcttttaactctggaagcgcatgcacactgaactctgctcagtgctaaacagtcaccagcaggttcctcagggtttcagccctaatatgtaaaacctggataatcagtgtatgttgcaccagaatcaacattntttttt

SEQ ID NO: 21647 - DNA, 504 bp, Homo sapiens
  misc_feature (1)...(504): n = A,T,C or G
acggacgggaaatattattganatatggggcgaaaaggannantttgattttcgaccgcactgcggaatnccgcacgaggaaactaggagatccctttcccattctcagcccaaaacatgggatcttatccatagaacagctcatcagccgggttggtgtgattggagtgactctcatggctcttctttctggatttggtgctgtcaactgcccatacacttacatgtcttacttcctcaggaatgtgactgacacggatattctagccctggaacggcgactgctgcaaaccatggatatgatcataagcaaaaagaaaaggatggcaatggcacggagaacaatgttccagaagggggaagtgcataacaaaccatcaggtttctggggaatgataaaaagtgttaccacttcagcatcaggaagtgaaaatcttactcttattcaacaggaagtggatgctttggaagaattaagcaggcagctttttctggaaacagctg

SEQ ID NO: 21648 - DNA, 483 bp, Homo sapiens
aaaaaatggggcggaaagggaaaaatttgaccgtcgtgcagcaattcggcacgaggggacacactggcactgcagtagggaagctgttgacgcttggaggacttgggatttggtggtttgttgaccttattttgctaattactggagggctgatgccaagtgatggcagcaactggtgcactgtttactaaaaagagctgccatcatggcccagggaggcgggtgaaagctccgtcttctgaattcatctctacaggctcaaaactcctctttgatatcagacctgatgttattttccttcttttggagggcatttgtttggttaagaaggcttctttggactttggaatttcaacccagattttaccttgcagacggaatgacaagcaaaaagtgttgtggggaatcaaatttgttcctttcctcatgcacaaaacataaaggatagtggcgagtttacaagctgtggatgggtttccatag

SEQ ID NO: 21649 - DNA, 456 bp, Homo sapiens
  misc_feature (1)...(456): n = A,T,C or G
cgatgggtgngccnnaattgaccccccatttgaccgcgctgcangaattcggcacgaggggaacagtcaccccagccaatgcttcaggaataaatgatggtgctgcagctgtcgttcttatgaagaagtcagaagctgataaacgtggacttacacctttagcacggatagtttcctggtcccaagtgggtgtggagccttccattatgggaataggaccaattccagccataaagcaagctgttacaaaagcaggttggtcactggaagatgttgacatatttgaaatcaatgaagcctttgcagctgtctctgctgcaatagttaaagaacttggattaaacccagagaaggtcaatattgaaggaggggctatagccttgggccaccctcttggagcatctggctgtcgaattcttgtgaccctgttacacacactggagagaatgggcagan

SEQ ID NO: 21650 - DNA, 451 bp, Homo sapiens
  misc_feature (1)...(451): n = A,T,C or G
tgatgggtannnnnnaattgacccctctgaggaattcggcacgagcccggctggcctctcgcatggcggatgacatgctgaagagaggcatctttgtcatcgggttcagctaccccgtggtccccaagggcaaggcccggatccgggtacagatctcagcagtgcatagcgaggaagacattgaccgctgcgtggaggccttcgtggaagtggggcgactgcacggggcactgccctgagctctgggtaaggacgagaagagccaaggtccgcctgctgccacagggtcaaaggaggttttcgatcagcccagaccagaggctctgagccctgaaccaaagtcccagagctgggctgggacgtgacctgtgctgagggctgtgagaatgtgaaacaaacagtgtgaaaattggctgtgaaaaaaaaaaaaaaaaaactcgagggggggccc

SEQ ID NO: 21651 - DNA, 467 bp, Homo sapiens
  misc_feature (1)...(467): n = A,T,C or G
nattgaccgcctgcggaattccgcttgagaaaccgttcttgcaggtaatgtttatgatatgttaaacgttgtaatttcttatcgtaattataacattcccattcttttgtagatgaaacttctacatattgaaccacagattttctgagcttctaaatgtagcctttcattgcacatttcagtgatcagaatagatatccttttacacgcacaaaagcaatagattcattcagtggacaagttccttgtttaactacacagctatgatggaatgatatatccaagttccttgcctcagtgaaatatgcatatgtatatcatgaaagtgggatgccaagtaagcttaaaatggcattctctagcaaagagattagacttttaaataactcttataaaacaggttggcgatcatttcccaagattggtttcccttgagtttttgctaaaacaaatcttagtagttntgg

SEQ ID NO: 21652 - DNA, 487 bp, Homo sapiens
  misc_feature (1)...(487): n = A,T,C or G
ggccgtaggnnccgaattgaatccctaactgnngggctacgnanncggcacgagctttgcaagaagagattgcctttttgaagaaactccacgaagaggaaatccatgagctgcaggctcagattcaggaacagcatgtccaaatcgatgtggatgtttccaagcctgacctcacggctgccctgcgtgacgtacgtcagcaatatgaaagtgtggctgccaagaacctgcaggaggcagaagaatggtacaaatccaagtttgctgacctctctgaggctgccaaccggaacaatgacgccctgcgccaggcaaagcaggagtccactgagtaccggagacaggtgcagtccctcacctgtgaagtggatgcccttaaaggaaccaatgagtccctggaacgccagatgcgtgaaatggaagagaactttgccgttgaagctgctaactaccaagacactattggccgcctgcaggatgagattca

SEQ ID NO: 21653 - DNA, 453 bp, Homo sapiens
  misc_feature (1)...(453): n = A,T,C or G
ntttgacccgcctgcaggaattcggtcgaggccgattgaggggggctgtgtggcaagtgtgccccgacatggtggccttttatgagtataccatgtagttgttgagtcttttccgcgttagaaagaatagagagtctactttttgcctatatttgatatttggacctctgtttctttatttaatgaactctcacacacactgtgactccttggtgaacacgtgcagggattgtacatttgattgccttattgcagaaatattcacctatcagtccatgttttgcagaaactggagatgtgaatttatgatgctctcccataatacagcagtaatgatttgcagtttctcacaaaatgattttcatgctgctctgtggtgtaggtcttgttcagaactttcgacctttttctttgatgtaacacgtataaatgcagctgtcatgcaagtctttn

SEQ ID NO: 21654 - DNA, 450 bp, Homo sapiens
  misc_feature (1)...(450): n = A,T,C or G
ntttgagttcgtccgccactgcgaanncgnacgaggtacccggagcatcctggcgccggcggcgggtactacccaggcgggcatggttgggctcccggagggcctgcgtttcccggacaaactcaggatccgctgtatggttactttgctgctgtagctggacaggatgggcagatagatgctgatgaattgcagagatgtctgacacagtctggcattgctggaggatacaaaccttttaacctggagacttgccggcttatggtttcaatgctggatagagatatgtctggcacaatgggtttcaatgaatttaaagaactctgggctgtactgaatggctggagacaacactttatcagttttgacactgacaggagtggaacagtagacccacaagaattgcagaaggccctgacaacaatgggatttaggttgagtccccaggcg

SEQ ID NO: 21655 - DNA, 479 bp, Homo sapiens
  misc_feature (1)...(479): n = A,T,C or G
gcgcggnnntttaaattgacggcgtactgattgccctagaaaagatctcaaagacaaggccttgaagttctaccagaacatgatccaatacgtgaccaaagttggtatgtgaacaaaaagctccgtcaaaggctgcttgaagaatatggagtcagaacctgtactcttattcagttccttggtgatgctattgttttgccagcgggagcacttcatcaggttcagaattttcacagctgtattcaggtaactgaagattttgtgtctccagaacatcttgtagagtcatttcatttaacacaggaactgagacttttgaaggaagaaatcaattatgatgataaactacaggttaaaaatattttgtatcatgcagtcaaagaaatggtgagagccttgaagatacacgaggatgaagtagacgatatggaagaaaattaagtgtgatccagtttgatatttttaggttgttgaactgg

SEQ ID NO: 21656 - DNA, 509 bp, Homo sapiens
  misc_feature (1)...(509): n = A,T,C or G
cgccgttgcccgcctgcagaaatttgcacngcgctgcaagaattcggcacgagtagacaccttgcggcaggagctgcagcagacggacccaacgctgttgtcagtataggaggcggttcttgcggtgctgctgacgctagtcttctggaagttaatccggagcagaaggagcagtcagagagctgttcttcttgttggcctttgtgattccgggaaaacgttgctctttgtcaggttgttaacaggcctttatagagacactcagacgtccattactgacagctgtgctgtatacagagtcaacaataacaggggcaatagtctgaccttgattgaccttcccggccatgagagtttgaggcttcagttcttagagcggtttaagtcttcagccagggctattgtgtttgttgtggatagtgcagcattccagcgagaggtgaaagatgtggctgagtttctgtatcaagtcctcattgacagtatgggtctgaagaatacacatcatt

SEQ ID NO: 21657 - DNA, 453 bp, Homo sapiens
  misc_feature (1)...(453): n = A,T,C or G
cgggtcccnccaattgcccccnaggacccccgctgcaggaattcggcacgagcgactcccggacgtaggtagtttgttgggccgggttctgaggccttgcttctctttacttttccactctaggccacgatgccgcagtaccagacctgggaggagttcagccgcgctgccgagaagctttacctcgctgaccctatgaaggcacgtgtggttctcaaatataggcattctgatgggaacttgtgtgttaaagtaacagatgatttagtttgtttggtgtataaaacagaccaagctcaagatgtaaagaagattgagaaattccacagtcaactaatgcgacttatggtagccaaggaagcccgcaatgttaccatggaaactgagtgaatggtttgaaatgaagactttgtcgtgtacttaggaagtaaatatcttttgaattagagaaag

SEQ ID NO: 21658 - DNA, 378 bp, Homo sapiens
  misc_feature (1)...(378): n = A,T,C or G
nattgagnatcgatccgcactgcacgaanncggcacgagcgcacacgagaacatgcctctcgcaaaggatctccttcatccctctccagaataggagaagaggaaacacaagaagaaacgcctggtgcagagccccaattcctacttcatggatgtgaaatgcccaggatgctataaaatcaccacggtctttagccatgcacaaacggtagttttgtgtgttggctgctccactgtcctctgccagcctacaggaggaaaagcaaggcttacagaaggatgttccttcaggaggaagcagcactaaaagcactctgagtcaagatgagtgggaaaccatctcaataaacacattttggataaaaaaaaaaaaaaaaa

SEQ ID NO: 21659 - DNA, 482 bp, Homo sapiens
  misc_feature (1)...(482): n = A,T,C or G
aggcggnnttttaaattgacggcttnatagattggtctagctgagccctctcttggagtcaagaagcctaccaaagccctgctctttgtactcttgagcccagtgggaccttatttttcaagtggaacctttaatccagtgtccctgtgggccaatcccaagtatgtaagagcctggaaaggtggaactggggactgcaagatgggagggaattacggctcatctctttttgcccaatgtgaagcagtagataatgggtgtcagcaggtcctgtggctctatggagaggaccatcagatcactgaagtgggaactatgaatctttttctttactggataaatgaagatggagaagaagaactggcaactcctccactagatggcatcattcttccaggagtgacaaggcggtgcattctggacctggcacatcagtgggtgggtgcctttgatatgaacaacttttgtaagcctgaaataan

SEQ ID NO: 21660 - DNA, 450 bp, Homo sapiens
  misc_feature (1)...(450): n = A,T,C or G
nattgacatcgctgcgcgaattcggcacgagcgcagctactctagaggtggtggggaccagggctatgggagtggcaggtattatgacagtcgacctggagggtatggatatggatatggacgttccagagactataatggcagaaaccagggtggttatgaccgctactcaggaggaaattacagagacaattatgacaactgaaatgagacatgcacataatatagatacacaaggaataatttctgatccaggatcgtccttccaaatggctgtatttataaaggtttttggagctgcactgaagcatcttattttatagtatatcaaccttttgtttttaaattgacctgccaaggtagctgaagaccttttagacagttccatctttttttttaaattttttctgcctatttaaagacaaattatgggacgtttgtaaacctgag

SEQ ID NO: 21661 - DNA, 502 bp, Homo sapiens
  misc_feature (1)...(502): n = A,T,C or G
tgggnnnnnnnaattgancgatttgancgacctgtcggaattcggcacgagaaaacatcaaaacatgttctgatgttctgtctctgtgcggtgtgctggggaatgcatggggtttaaagtcaggtagatttgggcctgccactttacatctgtagctgatgtttaaaggagatgataaaaatgctgcaacccagataatgatcaccttactcttcaaaaatactgcccaagttctttgttcaagatgccaagaacctggataccctccactggtaacaaatatgactttgtttttagcaagcaactttgcagtgtaattaagttaaggatcttgagatgagatcatcttggaatatctgggtgggccctaaatccaatgacaagtgtcctcataggaagggaagatacacacagaggagaaggtggtgtgaagatggaagccaagactgttgataccagttggagagcaccaagaactacccgcagccactgaaagctagga

SEQ ID NO: 21662 - DNA, 476 bp, Homo sapiens
  misc_feature (1)...(476): n = A,T,C or G
nattgatccctntnnnnnnnncnaatgatacccactgcggaatncggcacgagcaagaacccaagagaagtgacagaggccaagcaagaattaataacctaccctcagcctcagaaaacatccataccagcaccattggaaaaacagcccaaccagcccctaagaccagctgataaggaacctgaacccaggaagagggaagaaggccaagagtcacgcttaggacatcaaaagagagaagcagaaaggtatctgcctccttctcgaagggaagggccaactttccgaagagaccgagagagggagtcatggtctggagagacacgccaggatggagagagcaaaactatcatgctaaagcgtatctatcgttccacaccacctgaggtgatagtggaagtgctggagccctatgtccgccttactactgccaacgtccgtatcatcaagaacagaacaagccctatggggcatat

SEQ ID NO: 21663 - DNA, 459 bp, Homo sapiens
  misc_feature (1)...(459): n = A,T,C or G
cggcgggannnnnnaatggccccgctgcaggaatctcggcacgagaaggagcacatcaaaaacaagagacaaaaagaaagaggacaaagaaaagaaacgttctaaaacaccaccaaaaagttacagcacagccagacgttctagaagtgcaagcagagagagacgacgacgaagaagcaggagtggcacaagatctcctaaaaagcctcggtctcctaaaagaaaattgtcccgctcaccatcccctaggagacataaaaaggagaagaagaaagataaagacaaagaaagaagtagggatgaaagagaacgatcaacaagcaagaagaagaagagtaaagataaggaaaaggaccgggaaagaaaatcagagagtgataaagatgtaaaacaggttacacgggattatgatgaagaggaacaggggtatgacagtgagaaagagaaaaaaaaaaaaan

SEQ ID NO: 21664 - DNA, 476 bp, Homo sapiens
cgcactttgccggctgcggttttcttggctgcacatttcacttaactatttgaagtatttataggcaaatacaatacgcagggaagcttcccgccccgagacagctcctccacgcaacctaccacagactctgtaattagagtggcctgaagaagccgggagaggctccatgaccccggcaggctctggccaaaccttgctgcgtttcatggagcccctccctgtccgcgcctgggacgcactggccccaacaggttcctcgactcgaattcgctgtttgggttgctctgtggtttcctcgctgactgaaagtggatgagaataagaaggaaactgagagatgatcaggcaggccagccttcgcgatttatgaatgaggagcctcccaccctgtagaactgcttggattagaagtgggcaagttatttaagcttacatgcatgcttataaagcttctgttttcacatgtagtaagg

SEQ ID NO: 21665 - DNA, 503 bp, Homo sapiens
  misc_feature (1)...(503): n = A,T,C or G
agggagggaagcgggcccnnnnnnaattganngtatgacncgcctgcaggaattcggcacgagactaaagctgcttttgttcttcggaatctgctttgcctccgtcagcctgcttccttccccacacatgctggccgcactgtccccactccagacctctgctgtgtgtcctgggcagggccgcgttttggcagtaccctttcaactcatcctaagcttcgtgtagattactttagtatatattttttataaaacataaagcctttcctctcgatggaaatcaaagcttaccatgtgagcactcgaacttctaagttgtgacaggaataacaaaactgcaaggagtggaaaagatggaaaagcctgtgggaaatccgaggccttttgaaagaagggagctgatgacttcacgaccagctcctggagcccctcctttctgctgaagccgcggcatttccctccgtggccacacgagggcacccttggcccttttatcaaagcgc

SEQ ID NO: 21666 - DNA, 512 bp, Homo sapiens
  misc_feature (1)...(512): n = A,T,C or G
agagttcccnnagtagggcccaaacgatnctctaacgaancgtctagtaggaatccgcacgagggacttttctggtgggcgaacgagtgacattggctgacatcacagttgtctgcaccctgttgtggctctataagcaggttctagagccttctttccgccaggcctttcccaataccaaccgctggttcctcacctgcattaaccagccccagttccgggctgtcttgggggaagtgaaactgtgtgagaagatggcccagtttgatgctaaaaagtttgcagagacccaacctaaaaaggacacaccacggaaagagaagggttcacgggaagagaagcagaagccccaggctgagcggaaggaggagaaaaaggcggctgcccctgctcctgaggaggagatggatgaatgtgagcaggcgctggctgctgagcccaaggccaaggaccccttcgctcacctgcccaagagtnaccttgtgttggatgaatttaagcgcaagtactcc

SEQ ID NO: 21667 - DNA, 476 bp, Homo sapiens
  misc_feature (1)...(476): n = A,T,C or G
nattgancnccntnnnnnnnnnnnaatagacccgcgctgcaggaattcggcacgagcgaggatgagggacgctatgcctcatgcccgttttgggtgtcctcaccagcaaggctgctcgggggcccctggttcgtccctgagcctttttcacagtgcataagcagttttttttgtttttgttttgttttgttttgtttttaaatcaatcatgttacactaatagaaacttggcactcctgtgccctctgcctggacaagcacatagcaagctgaactgtcctaaggcaggggcgagcacggaacaatggggccttcagctggagctgtggacttttgtacatacactaaaattctgaagttgnnanaaaaaaaaaaaaaaaaaaaaaatttttgggggggggccgggacccaaattccccttatagggggcggaataacaattcatgggccggcttttaaaaccgccgggacgggaa

SEQ ID NO: 21668 - DNA, 467 bp, Homo sapiens
aatgaccgcctgcggcgaaagcatagaagacgctcctgcccctcctaaagctgaagccaaagcgaaggctttaaaggccaagaaggcagtgttgaaaggtgtccacagccacaaaaagaagaagatccgcacgtcacccaccttccggcggccgaagacactgcgactccggagacagcccaaatatcctcggaagagcgctcccaggagaaacaagcttgaccactatgctatcatcaagtttccgctgaccactgagtctgccatgaagaagatagaagacaacaacacacttgtgttcattgtggatgttaaagccaacaagcaccagattaaacaggctgtgaagaagctgtatgacattgatgtggccaaggtcaacaccctgattcggcctgatggagagaagaaggcatatgttcgactggctcctgattacgatgctttggatgttgccaacaaaattg

SEQ ID NO: 21669 - DNA, 512 bp, Homo sapiens
  misc_feature (1)...(512): n = A,T,C or G
ggggtnnnnnaaagtggggnnnnnttggaanncaatcgagcggctttagngaattcgcacgagcccaggcgcatggctccatgaagcaagaggaggaggcagagcgcgagagatcccgtccgccccagccgcgtctgggccaggagaaaagcaaaaccatattcctgctgctgtcagttttgatgcactgagaaaacttcagagacctaagctttttccagagaagagaagctttactggtgttccagccctaaggctcatataacattaacagacaagacacttttcagaaagacaggcaacgtgttggaccttccggagcttctcagaagacagagggttttcttttgagacagggtctcattctgtcttgcaggctgttgtacagtggcctgattatagctcactgtagcctcgaaattctgggccgaaatgatccgcctgcctcagcctccaaagtagctgagactacaggctggtcttgaactcttgggctgaagagatctaccacc

SEQ ID NO: 21670 - DNA, 504 bp, Homo sapiens
  misc_feature (1)...(504): n = A,T,C or G
aggagggacggaggccnnnnnnttttganngatcgacngacctgcaggaattcggcacgagctcattcactcaaaaagcaacagtgagacaggaaaaataataaaacaaccccccaagccagccatttattacaagaagcaacaggttattgacattacatgtttgaaaattccctttggtctttagggaaaataaacaggaagccaagatttggagcctttgtaataaggacttcctgcagaaagtcttttctttactataattgagtaattcatatttagagtcacatgtccagtagcatttctaattttgagcattcaccttgctacctttaaaaaacatctgagttttaagtggcctttttatcatcatacacatgtgcatacaaagaagggacttggcagtttaaaagccacatatattcacttttattgccctaaatttacatgaaacagacatactggcaaactcacatattgctggtgctaaccttatatttcata

SEQ ID NO: 21671 - DNA, 457 bp, Homo sapiens
aataggaatttcgcccccgcgctgcaggaattcggcacgagcaaacatcctgtccggttttttgtacataagaggccccatgtggatttcttcctggaagtggtgagccagtggtacgagctggtggtgtttacagcaagcatggagatctatggctctgctgtggcagataaactggacaatagcagaagcattcttaagaggagatattacagacagcactgcactttggagttgggcagctacatcaaggacctctctgtggtccacagtgacctctccagcattgtgatcctggataactccccaggggcttacaggagccatccagacaatgccatccccatcaaatcctggttcagtgaccccagcgacacagcccttctcaacctgctcccaatgctggatgccctcaggttcaccgctgatgttcgttccgtgctgagccgaaaccttc

SEQ ID NO: 21672 - DNA, 329 bp, Homo sapiens
  misc_feature (1)...(329): n = A,T,C or G
atttggcccgcgctgcaggngcaagnattttccaccgcgctgcaggaattcggcacgagggcccccacacctagactcagtaaggaagtcgggttggaccttaacatctgcattggacaactccaccccttccttggccttgcccctgcccgcctacactcctacgtgtccagggcttgggccgtgacttangcagaggagtgcagaggagggtctggcaggggctgctcaggccgcctagctgcccctttgccaggttaataaagcactgacttgtttctcagcctccctccaaaaaaaaaaaaaaaaactcgggggggggcccgggc

SEQ ID NO: 21673 - DNA, 497 bp, Homo sapiens
  misc_feature (1)...(497): n = A,T,C or G
ggttannccaaggccccccccatgcccggcttggaatcctccgacttctcacgctgactacctggggcccgacccggttggcggggaactggcaagccaggaataggaggaagccctggaggggctggaggtgatggatgatttcctccggatgtcaaggctccacctctttcgggccgtagagccagggctggtgcagaaggtctccctgcgagactgcagcccacggctcagtgaagaactctaccaccggtgccgcctcagcaacctggaggggctagggggccgtgcccagctggctatggctctctttgagcaggagcaggccaatagcacttagcccgcctgggggccctaacctcattacctttcctttgtctgcctcagccccaggaagggcaaggcaagatggtggacagatagagaattgttgctgtattttttaaatatgaaaatgttattaaacatgtcttctgccaaaaaaaaaaaaaaaaaaa

SEQ ID NO: 21674 - DNA, 445 bp, Homo sapiens
  misc_feature (1)...(445): n = A,T,C or G
ntttgccccgcgctgcaggcaaattgctacatccgggcccccaccagaaggtggacttaggtggacagtttcataaagcataacatgagtagaagaatctactgccaataactgtttattatctgcaatcaagtgggcttcatcaatttaatttcttctctttgagtaaatgaagattcagactttgtaatattattgcccttaagtgcaatgctaaaaaaacgttgattttcaagcttagagaatggctagacttttcattaaatactgattttcctacaaaaaaaaaaaaaaaaaaaaacctcggggggggcccggtgcccaaattgcccttataggggggggtttaacatttcctgggccgcggtttaacaacggggggatgggggaaagcnncnccnngcncnnnggntcttggtgccttgccaccgtctggcacggctgg

SEQ ID NO: 21675 - DNA, 444 bp, Homo sapiens
  misc_feature (1)...(444): n = A,T,C or G
atagcccgctctgcangaattcggcacgaggaaaattgtagctgaatatgaaaagactattgctcaaatgattgaagatgaacaaaggacaagtatgacctctcagaagagcttccagcaactgaccatggagaaggaacaggccctggctgaccttaactctgtggaaaggtccctttctgatctcttcaggagatatgagaacctgaaaggtgttctggaagggttcaagaagaatgaagaagccttgaagaaatgtgctcaggattacttagccagagttaaacaagaggagcagcgataccaggccctgaaaatccacgcagaagagaaactggacaaagccaatgaagagattgctcaggttcgaacaaaagcaaaggctgagagtgcagctctccatgctggactccgcaaagagcagatgaaggtggagtccctgga

SEQ ID NO: 21676 - DNA, 457 bp, Homo sapiens
cctttgccccgcgctgtaggaattcggcacgagccaggtccggtgttggggtgtccgagttgccgccggagaggagtggcctcgcccgcttgagttttgattcatcatggataatctgtcatcagaagaaattcaacagagagctcaccagattactgatgagtctctggaaagtacgaggagaatcctgggtttagccattgagtctcaggatgcaggaatcaagaccatcactatgctggatgaacaaaaggaacaactaaaccgcatagaagaaggcttggaccaaataaataaggacatgagagagacagagaagactttaacagaactcaacaaatgctgtggcctttgtgtctgcccatgtaatagaacaaagaactttgagtctggcaaggcttataagacaacatggggagatggtggagaaaactcaccttgcaatgtagtatctaaa

SEQ ID NO: 21677 - DNA, 438 bp, Homo sapiens
attgaagctgccccgcctgcagattcgcacgagattactctcccatgacttacgtctatatccctccagctgccctttggtatgtgggatagggattgctaaccttacttcccagagagataatgaggcctggagaacataggtgagttgctcaagacccagcacaagcatccatgattcctgcaataaggcttccctctgctgttttcactgcagccttaccaagtatggttgggtgtgcaaagcttacattttaaggacctctgctgctgccactgtcattgtggtgaatgatggctttaaggcttattcttattcccggatctttgagagaggaagagagtgggattgctacccacattctaatgaaggtggagctgagccgtacaactctatgggagccatccaacctggctgtggctcataacaaagcattga

SEQ ID NO: 21678 - DNA, 478 bp, Homo sapiens
  misc_feature (1)...(478): n = A,T,C or G
ggagagnngtnnnnattgattatgattggcctgangaattcggcacgaggttgccgaggagactaggagggggaggagaggggatctcgcgaaaggaaagaggtcgggagcgctcgcgagatctcggaccacccaacctgaaaggtgcttaggaagttgaaaggcccagaggaggcctccgggcaaatggccggagctggaccgaccatgctgctacgagaagagaatggctgttgcagtcggcgtcagagcagctccagtgctggggattcggacggagagcgcgaggactcggcggctgagcgcgcccgacagcagctagaggcgctgctcaacaagactatgcgcattcgcatgacagatggacggacactggtcggctgcttcctctgcactgaccgtgactgcaatgtcatcctgggctcggcgcangagttcctcaagccgtcggattccttctcttgcggggagccccgtg

SEQ ID NO: 21679 - DNA, 477 bp, Homo sapiens
  misc_feature (1)...(477): n = A,T,C or G
gacggggttnnaataganttgcagtagcaattcggcacgaggtctcattgttttcaaataaacagtgttttccatgactgagatatttatttttgggaaagcaacgaggtaaaaattatgtttctcacatgcactgctactttggcgttattactgtgttctcagaaactcgttgtgcaccactaggaattagtagtagaaaaaaaaaaacaataacaaaaaaaaaaccaccgggaaagggatgtcttcacattagggggggagtattaacacccaaaaaaaaagttgggatattaccttttaactactagttaacatcatgctggatcaacattggctcctagttatcaccattaaattaaaaccttaatggtaaactgaggttactgatgcatcatcacatttaagtaaaaataatttcatgttttccccaaaaaaaaattaagcctcccaatcttaagatccagttgggcagga

SEQ ID NO: 21680 - DNA, 477 bp, Homo sapiens
  misc_feature (1)...(477): n = A,T,C or G
ggagggggtnnncctaggctagcatggctgtangaattcggcacgaggtcctcttcttgggaaagccactgtttttgttgtggcttcacaatgggcgtagttgcttcggggtgaaccggagtggctacacacttataaggaaagatagtgaggaagaagtttcattgctgggaagccaagatatagaagagggaaatcaccaggtggaagatggatgtagagaaatggcgtgtgaagagtttaattttggagaaatattaatgacccaagtaatccattccatcgagtactgtctgggatgcatctccaacaccgcctcctacctgaggctctgggcgcttagcctggctcacgcacagttgtctgatgtcctgtgggccatgctgatgcgcgtgggcctccgcgttgacaccacctatggcgtcttgctactgctcccggntatcgcgctctttgcagttttgaccattttcatcc

SEQ ID NO: 21681 - DNA, 513 bp, Homo sapiens
  misc_feature (1)...(513): n = A,T,C or G
ggggtnnnnnnaaggatggnnnnnnattgannnncattgatcgcctgcggattcggcacgagccagggtgttgcagctggcccagaggatggtgctcgggaggcaccagttctctgccattccaaacccaaagccctgccttgctctgcccctcctgagaggctcctgcttctgagtctcaatcaacagcacacaaggaacaggagtggggccgcttccaggggtgcccatggagcccggcgtgttggttttcatctgattcccaggcttcaggcagtttccagaggcttggggacaccacggctgtcttcctagtggaacaaaacgaacagaattcttgggctggataaccagctgtcatccccagtttcctggataattccagcagggatgtgaggctctgggtgctgaaaaaagtaactagaaccgtaccaaacactcttctcacttccatctgggtgctaaggagcctagaggggagcaactctgtgtctagacacagtggcatctacc

SEQ ID NO: 21682 - DNA, 462 bp, Homo sapiens
  misc_feature (1)...(462): n = A,T,C or G
actggatcgcctgaggaatttgaacgaccctgagttgaaacttctcctgtggttactggtattgagaaatcagctaccaaagtgaaaaaggacaagatcaattcttttctagtcagttctaagactgctagagagagataccaggcccttagccttgctctcagtagcgtcagccccagttctgagcctccccacattacacttaacaagcagtaaaggagtgagcactttgggtccttagactcatgtctggggaggaagagcaagtagaaaagtggcattttcttgattggaaagggggaaggatcttattgcacttgggctgttcagaatgtagaaaggacatatttgaggaagtatctatttgagcactgatttactctgtaaaaagcaaaatctctctgtcctaaactaatggaagcgattctcccatgctcatgtgtaatggttttaacgttactn

SEQ ID NO: 21683 - DNA, 466 bp, Homo sapiens
  misc_feature (1)...(466): n = A,T,C or G
gggaannnncctgatgcatggcgtgaggaattcgtacgagtggagaagcgagagggctacccacttcggccagaacttattgaaagcgcaatgtacctctaccgtgccacgggggatcccaccctcctagaactcggaagagatgctgtggaatccattgaaaaaatcancaaggtggagtgcggatttgcaacaatcaaagatctgcgagaccacaagctggacaaccgcatggagtcgttcttcctggccgagactgtgaaatacctctacctcctgtttgacccaaccaacttcatccacaacaatgggtccaccttcgacgcggtgatcaccccctatggggagtgcatcctgggggctggggggtacatcttcaacacagaagctcaccccatcgaccctgccgccctgcactgctgccagaggctgaaggaagagcagtgggaggtggaggacttgatgt

SEQ ID NO: 21684 - DNA, 467 bp, Homo sapiens
aattagctccgtgctgcaggaattcggcacgaggcttcccggcccagagacatgaggtgtccagggccaggccccccaccctcagttggggctgttccgggggtgactgtgagcgatcccaccccaaacctgagatggggtagcccgtcctgtgtcctccacagggacaagcagtgggaggagtctgaatggtcaccaggaagcccgggctccatcttgacctcctttttcagggacaggagcaacaggcccctcttccctgactctaagcccttccctgtaaggtgaggcagggtctggagagctctttattggaacagatctggtggttcaaataaacacagtcatgctagcctgaaaaaaaaaaaaaaaaaaaaaaaaaattcgggggggggcccggaccccatttccccttatagggggcggatttacaattccttggccgcggttttacaagggcgggatgg

SEQ ID NO: 21685 - DNA, 474 bp, Homo sapiens
  misc_feature (1)...(474): n = A,T,C or G
agaggggnttttttctgactgccgtatgcattcggcacgagatctaatcaaaatggatctggattactatgtaaattcacagcagtaagataatataaattttgttgaatgtattaacatcatatggtctgaaaatgtgggtttttatttggcacatttaaataaaatgtttctaactagatttttgatttgtgttcaatattaacacttcttaatttgatatatttgagagtcagacattataattgttaaccttattcatacatacctacattcagaattgaaaggtgttggttaagtcttgaacatcactattctatgcataaaacttggccaggatcttaagggactttgaaaattccatcttacccttgtagctctgggtaagatgacctgagtcccttatgatacagcctgaatgcatcatgacagatccttaagttagctaatccgtttgaagttggggtagtaggt

SEQ ID NO: 21686 - DNA, 469 bp, Homo sapiens
  misc_feature (1)...(469): n = A,T,C or G
ntttgaacggttgtatgacttctgcacgaggtttccggaagacgtggcggctctcgcctgggctgtttcccggcttcatttctcccgactcagcttcccaccctgggctttccgaggtgctgtcgccgctgtccccaccactgcagccatgatctccttaacggacacgcagaaaattggaatgggattaacaggatttggagtgtttttcctgttctttggaatgattctcttttttgacaaagcactactggctattggaaatgttttatttgtagccggcttggcttttgtaattggtttagaaagaacattcagattcttcttccaaaaacataaaatgaaagctacaggtttttttctgggtggtgtatttgtagtccttattggttggcctttgataggcatgatcttcgaaatttatggattttttctcttgttcaggggcttctttcctgtcgattgtggg

SEQ ID NO: 21687 - DNA, 505 bp, Homo sapiens
  misc_feature (1)...(505): n = A,T,C or G
nggatggaaggggggcnnnnnnaattgancgcttgcaccgcctgcaggaattcggcacgagaaataattcagaaacacttgtatggtcctgtaaaacttctctggtgtttgttgacttctgcctgtgggtctgaggaagggagaaggcagaacccataggcagtccctgggcaagggaggattttcccggccgcagcacagccttccattcatgtgcacgtgagtctggtgaaaatggccttgtgaagtccagtgtctgtcatgcccctgagttcttttggtcccagagaggcagcctgggcagtctgtttacagctggcaaacagactggctggcaagttgtggggctgggtcagaaagtgtctggacttgtaatcgggtgccctgctgtccacaggtggactctggggaagccaggcccctggatcccaagtcctttgtgtccggagcctttcctggcctgtgcctggagggtagcacatctttccagcctcccagggctttg

SEQ ID NO: 21688 - DNA, 470 bp, Homo sapiens
  misc_feature (1)...(470): n = A,T,C or G
aatcgatnccccctcganannctcgatccgcgctgcggaattccgcacgagccctgctctacccatgagcctgcccgctgcaatgcctagacttcccaacagccttagctgccagtgctggtcactaaccaacaaggttggcaccccagctaccccttctttgcagggctaaggcccccaaacatagcccctgccccggaggaagcttggggaacccatgagttgtcagctttgactttatctcctgctctttctacatgactgggcctcccttgggctggaagaattggggattctctattggaggtgagatcacagcctccagggccccccaaatcccagggaaggacttggagagaatcatgctgttgcatttagaactttctgctttgcacaggaaagagtcacacaattaatcaacatgtatattttctctatacatagagctctatttctctacggntttataa

SEQ ID NO: 21689 - DNA, 462 bp, Homo sapiens
cttgcccgcctgaggaattcttttccccgggctgcaggaattcggcacgagatctcctcctcctgccggctcacctgcagcagcggcttgaccttggtgaagagccgccaccactgccagttccgcagcttcaggtaggcagcgcagttccgctggaggaccttcatggcggtaagctgctgctgccgcttggcaaatgctttcctggccaggtagcccctgcagcaggcctggaaccctatgatgacgtcggtgatcttcaggtctcgctcctcctccaggtgggccagcacaccggcacggaagaagactttgctctggccaatgcggtacagattgctgtcgagctccagggcttttatcatgagcacgcacgcctgcttcccgtccatgaaacccttgggaatggagtttggagtcaggatctcatatctctgccgaaactcctggaagaccaccctg

SEQ ID NO: 21690 - DNA, 469 bp, Homo sapiens
  misc_feature (1)...(469): n = A,T,C or G
gtggcannnnnnaattgaccttcgatgacgatttcggcacgaggtgatttgaagctctcctttgaatcatcataaagcctagttttatgtcaatgctatcggttttgacaggaagcacgatggtaagaataccactaacgaaaacctttgtggtgtctcaatgacaaatatgcagatgccaccctcctttgtctaatgtacggtgctttagggcagctatttaatataaagcaactcagaacttgtttcaggaagtgttgctctttcgccttacatgccaaggttctagggaaaaagctgaccatatgtaaaaacattgatgctcaagcacataaagaattacattctttaaacatagagtacataggatcaagtctctgcacaataattgagatgtgttataaggaaaagtgagcacagtgctattgtccacttagtcttggtgaatgtgcagtangctcacccctaa

SEQ ID NO: 21691 - DNA, 471 bp, Homo sapiens
  misc_feature (1)...(471): n = A,T,C or G
cgtggcngcnaaaaattganatcgatccgcgctgcacgaattcggcacgagatttcatccttctctccatgtggcacgactggggttggttggggcctacagtctccttgtccctcacagtctgcccgtgtcagggctcggtcctcagagtaaggaaaggaaatggaagtcaggaggaagggaagatgtgagtgtgcggtgcgggtggcaaaagcagccttcggggcaaccccgtgagcgtcattgccaccaaaggctggctgttcccttgattccttgcataattgctctttaaaaccagtatgcacgccagtgccaagctcttcagcagcctgtccttgggtagtaagtgctgtggtctgtcaggactgatggccagcagctgtttctatgttgggcttttaactttttttattttatttatttatttatttatcttttttgagatggagtctcactctgtggcccagg

SEQ ID NO: 21692 - DNA, 471 bp, Homo sapiens
  misc_feature (1)...(471): n = A,T,C or G
nattgcccgcgctgaagaattcggctcgagggcctctgggggtccagcaagactatgaatctctgttccaaatgctttgctgattttcaaaagaaacagccagacgatgattccgctccaagtacaagtaacagccaatcagatttgttttccgaagagaccaccagtgacaacaacaatacctcgataaccacgccaactcttagtcccagccagcagccgcttccgacagaactgaatgtaacttcaccgagtaaagaggagtattcacagtctgagaatgaggcttcaccagtaaaacggccacgactacttgagaatacggaacggtccgaggaaaccagtcgatctaaacagaagagtcgacgtcggtgcttccagtgccaaaccaaactggagctggtgcagcaggaattgggatcgtgtcgctgcgggtatgtgttctgtatgttacatcgcctccccgagcag

SEQ ID NO: 21693 - DNA, 461 bp, Homo sapiens
aattgatcgcctgcggaatttcgacgactgtcttttaaacattcagatgagttagaagctttttatcccttcctctcaagaaaatattctttcaccctgtctctcaaaccacctagaactttagaggatccatctttaagggccggtgtggatgaatgagaaaatgcacctttctgacagtatctccactttacttaagaaaactagcaaatatatgaaaagacccttagtaccaaatacactcaattgcctttttaatgaatgtacttgtcttggataggttgctggtaaaccattttaaactattttttatagctgaagttcttcactactataaacatgtcttctgtactataaaatccatttaactggtgttcttaaaatcagagcgtccagaggaaattcttcctaaaactaggattcctgttcctttgtcttctcactcgcactctggcactgct

SEQ ID NO: 21694 - DNA, 496 bp, Homo sapiens
  misc_feature (1)...(496): n = A,T,C or G
cgccccattcgctccgcgctgcaggaaatctgcacgcgatacagcgggagccgctgctctccggctgagggaatcagagacagctccgtccctagtggagcgcaggggaggcagaagtcatgacaggcgaggtgggttctgaggttcacctagaaatcaatgacccaaacgtcatttcacaagaggaagcagatagtccttcagatagtggacagggcagctatgaaacaattggacccttgagtgaaggagattcagatgaagagatatttgtaagtaagaagttgaaaaacaggaaggttctacaagacagtgattccgaaacagaggacacaaatgcctctccagagaaaactacctatgacagtgccgaggaggaaaataaagagaatttatatgctgggaaaaatacaaaaatcaaaaggatttacaaaactgtggcagacagtgatgaaagttacatggaaaagtctttgtatcaggaaaatcttgaagn

SEQ ID NO: 21695 - DNA, 501 bp, Homo sapiens
  misc_feature (1)...(501): n = A,T,C or G
atggnnntnnnntttgttcgacctcctgtangaattcggcacgagggcccacccagctgagctcatcatcctgcctcagcctccattttccagaaagtctggtcacctcaggagcagtggagacccagaacttctaaaatggcttataaaggaaaccacccacaagcctaaagagaaaagaatgaacttagaaagtaagaaaaagtctccagctgcagtctcctcacagagctttgttctctgagtcctagctctgaaaagcacccaggtgaaatgataaggccagggtcttggataataaaatatccccttccctaataaaaccaacttatttagcatcaaaaaaaaaaaaaaaaaaaaactggggggggggccgggcccccaattccccttataggggggggaataaaaatcaatgggccgcggtttaacaccggggggaagtgagaacannnnnnncttnnnnnnnnnnnnnngaaacacnnnnnnncccccnacccn

SEQ ID NO: 21696 - DNA, 460 bp, Homo sapiens
aatagaccgcctgtggaattccgcacgagcctcactcttaggcttccaacggaggtgcgtgtcctgcgtcgcggggtccgctttctctggtccccgcttggcctcggcttctcgcagtaatggccagggctctgccctggaccacttcctcggattctctcagcccgacagttcggtgactccttgcgtccccgcggtgtccatgaacagagatgagcaggatgtcctcttggtccatcaccctgatatgcctgagaattcccgggtcctacgagtggtcctcctgggagccccgaatgcagggaagtcaacactctccaaccagctactgggccgaaaggtgttccctgtttccaggaaggtgcatactactcgctgccaagctctgggggtcatcacagagaaggagacccaggtgattctacttgacacacctggcattatcagtcctggtaaacag

SEQ ID NO: 21697 - DNA, 492 bp, Homo sapiens
  misc_feature (1)...(492): n = A,T,C or G
ngcggggacttgacttcttgtgcgttgcgcagtgcggngatccccgcttcagtcggcagagagagagctcgcgggtggttccggtccggcttttcaggccggactggtgtctgcccctcacgtgcgagtttgtgcggtaaagaacacaccccggagatgtggacacggccgccccaggagggtccttgtttggaggtggaaatcaacgagaacttgcccgccagaaaaacatgaagaaaacccaggaaattagcaagggaaagaggaaagaggatagcttgactgcctctcagagaaagcagagggactctgagatcatgcaagaaaagcagaaggcagctaatgagaagaagtctatgcagacaagagaaaagtgatgactggctatttggaaaacctgggtgctactgccaactgggtgtatcataagctctaagatcaagattttgtagagtggacagtcattacatatgttataacttatcctttaaa

SEQ ID NO: 21698 - DNA, 468 bp, Homo sapiens
attagcaccgcgctcgcaggaattcggtatgccccgcgctgcaggaattcggcacgagcttgaactccttaagcatatgcacactgtgggggaaaaggtgattgtagattttgctgggtccagcaaactccgcttccgattgggctaccacgccattccgagtatgagccatgtacatcttcatgtgatcagccaggattttgattctccttgccttaaaaacaaaaaacattggaattctttcaatacagaatacttcctagaatcacaagctgtgatcgagatggtacaagaggctggtagagtaactgtccgagatgggatgcctgagctcttgaagctgccccttcgttgtcatgagtgccagcagctgctggcttccattcctcagctgaaagaacatctcaggaagcacctgacacagtgattctgcagagcctgagctgctgctgtggtgtgcccacctga

SEQ ID NO: 21699 - DNA, 468 bp, Homo sapiens
  misc_feature (1)...(468): n = A,T,C or G
atttgccatctccnccgcgctgcaggaattcggcacgaggtgcttacgaaatgaaagaagtcccgggtctgtctctctcactctcgctctcactgggggagggaaagaatggctttggtggctttgttcacacagctgatgcgtgccctgggaaggtgtccacagtgagccctgtgtgcaggactgtccacacggttcacaccttgtcaccatcaggcctttctggctcctgatagggtggagcaaaagtggaaaggaaaggaaagaggccttttctcacagccattatattaaatagtaggtcgattcacatcctcgtgctcctggccaccctcccctgtgcctcagtgacatgtagatgactgactgccaatacttgtcaccattccctggaagcagctacctaggggaaacaagatgtagtgctattgccgataacaagtaaaatttccacactacagctgggtn

SEQ ID NO: 21700 - DNA, 413 bp, Homo sapiens
gcgggaattgaattcgctcgcctgcaggaattcggcacgagcctaggtcgcggcgacatggccaaacgtaccaagaaagtcgggatcgtcggtaaatacgggacccgctatggggcctccctccggaaaatggtgaagaaaattgaaatcagccagcacgccaagtacacttgctctttctgtggcaaaaccaagatgaagagacgagctgtggggatctggcactgtggttcctgcatgaagacagtggctggcggtgcctggacgtacaataccacttccgctgtcacggtaaagtccgccatcagaagactgaaggagttgaaagaccagtagacgctcctctactctttgagacatcactggcctataataaatgggttaatttatgtaaaaaaaaaaaaaaaaaaaaa

SEQ ID NO: 21701 - DNA, 491 bp, Homo sapiens
  misc_feature (1)...(491): n = A,T,C or G
agtgcggtancncccaattcancgccctgattagaacggcacgaggagcaattgaggctttcagactttgccaagattatattccaaatgaggggattcaaacccaggctgtcagcctccgcagtgcaggctttcttcaccagcatcatcacacatggtgataactcccaaggttcacagcttgtctgttcactatgcatcgtgctgaggggcttccatgcacttcctccattcccgctcacaacagtatctcaggttacaggtatgggcctgtggaggcacggcccctcctcacaacgacaagcaagtggcaatggccaatggaagcccagcaacttgtttcagtccacccccaaagtagcacttcttttccactggaatgggccctgaggaggaggaaaaggaggcacaagatgagcaggcttaggcctagggcgccaagattttaccagaaggcagtatggggcaaccctctgaacgaacccaaatgt

SEQ ID NO: 21702 - DNA, 490 bp, Homo sapiens
  misc_feature (1)...(490): n = A,T,C or G
nattcgacccgcgctgcaggaattctgcacgcgctagtgcccgtcactcttggaggactcctgtgacgtggtcagcctcattcatccttgcccttctcagggctagctgctcctctcacaggctggggacagaggtggccctggatcacttgccggccctttgcaatgaatgactcttcctgagcctggcaccaggagccctaggcaggccgccgtctccccactcacagccccagcaggtaagcagtgtagacaaacccttggggcttttttatttggagaaccgtccagcatgcatcctggcccacggcctgagcaagctgcagcccttctgaggccatgggcttcgttggctaagttgggggtcttagccttgcatgcgttgtgggcatcaaatctacctccaaaagacccatcctggggagccctctggcccctcgttgccttttcacttcaaaacctcttttttctgggagaggcccgtgacccc

SEQ ID NO: 21703 - DNA, 469 bp, Homo sapiens
aattagcaccgccctgttggatccgccctgcaggaattcggcacgagtgcccggccaaatctgggcttaaaaattttttttggagagggagttaacaggaataccactgtatttaagcccccaaacagctggtgctgtgaacgaaacattcagaacagagagctagctactgctggataaataccaagctggagacctgtacttaacaactgttgagtctctaaaaatggacaggaaaattaaaaacacatttaaaaagcgcttaataaaatgattttgatttatagctttaattctatattcccctgtgctatagttttttgaatttgcttaatttgggggagatttacattttaaaatatggatatgcataagccatcccaaaggtaaccataaaaatatctactaactctacaaagtgttaacaaacttttaaaagtacatgaaaaatacaaagctttctataagt

SEQ ID NO: 21704 - DNA, 493 bp, Homo sapiens
  misc_feature (1)...(493): n = A,T,C or G
gcggggattgaattcgctcgcctgcaggaattcggcacgagcaggaaaggcaaggggcagatcgagaagaggaagctgcgggagaagcggcgctccaccggcgtggtcaacatccctgccgcagagtgcttagatgagtacgaagatgatgaagcagggcagaaagagcggaaacgagaagatgcaattacacaacagaacactatacagaatgaagctgtaaacttactagatccaggcagttcctatctgctacaggagccacctagaacagtttcaggcagatataaaagcacaaccagtgtctctgaagaagatgtctcaagtagatattctcgaacagatagaagtgggttccctagatataacagggatgcaaatgtttcaggtactctggtttcaagtagcacactggaaaagaaaattgaagatcttgaaaaggaagtagtaagagaaagacaaganaacctaagacttgtgagactgatgcaan

SEQ ID NO: 21705 - DNA, 505 bp, Homo sapiens
  misc_feature (1)...(505): n = A,T,C or G
agcgntgnnnnnaattgctggctgtcgattcggcacgagaaaagataccctcattgtgtcaaagagtgtgccaatctatttttgtatcagcattggaagtgcactttcccctggggcgtgtgggtgtgtgaatgtgcaagtgtctgagagatactgcatcagccctagacccccagagccagtcccgccctttacagagcagcccttagcctggggccatgggtcaggctgaccttcaacaattatttctagatgatttctggataagaattgctctctcggtaccagacagtttgacatcctccacccttagaaaatgactgacattgttttgttactgctcctacccaccaaggggataaagaaggcgagttctgagtgttggatgagtcagtcgcgtggaaggacgtggagcgtggcgctctgtaacttcctgccgtctgccaccccgccacgtgtatttaaccctcgcactntctccactgtggagatggctggggcggcg

SEQ ID NO: 21706 - DNA, 479 bp, Homo sapiens
  misc_feature (1)...(479): n = A,T,C or G
gggaggnanccggangaanaaaaattgatcgcctttggaattcgtacgagatttcagggttttgagactgggaaaaggaaagtgtcattaatagaaaactggtaagttgggaagactgattttgatggtaggagtagtatttgtgattgtaattggtcattcaagtggaaatgattgttggcggtaggaaataaggaagtggaccttggccgtgcgtggtgcctcacatctgtaatcccagcacttgataatctgctgaggcatgtggatcacttgaggtcaggagtttgagaccagcctggccaacgtggtgaaaccccgtctctactaaaaatacaaaaactagtcgggcatggtggtgtgtgcctgtaatcccaactactcgggaggctgaggcaggataattgcctgaacccatgaggcagaggttgcattgagccgaggtcgtgccactgcactccagcctgggcaacagagca

SEQ ID NO: 21707 - DNA, 451 bp, Homo sapiens
atggcccgcctgcagaattcgtacgaggacattccactaatggatcacattcttccagttaagacatcatctgcagaaaactgtgctagatggcatccaccactgcccaagtattatttaacccactagaacctgtgactgtatcaactttatatactggacctcaacctggaacaaaggagagctacacttggatactacacacaagtggtctggatagattatgctgggaaaagaagcctggagcaggcagtacagcgggagaacaagacagaagtgcttgccttggtgatccaaaaaaggcaggatccggccggcggcaaggagattattctgtctgacgaggagaataacagccactttgtggtattgacagaagaatgaaagtaaaggcccccaaaagatgaactccaatctgcttgccctatacgcattctccactcgactgaag

SEQ ID NO: 21708 - DNA, 489 bp, Homo sapiens
gcgggaattgattgccttaggcattcggcacgagctggagccctcactccacgggcccaactggggggagctctgcagagacggagacagacagcttctccctccctgaggagtacttcacaccagctccttcccctggcgatcagagctcaggtgaggaccggaggaaagcaggaggaaacaatagctagctgcgagcgacaggcagcccaggacatctgtcttaggctccagtggacccccgtgcctcctaaggcttgagtgcaggtacccgtgttcctagagcacaggacgctgtctgcggctccccatcttccctgccagctccagcctgaactcaaggactgttaagaccactccactgatccctaaagctgttgatgacaagttgattcatttaaaacttctgtacatgcattctcagactcatcttttttgtaattaaaattaaaaattaagttaaatttagtaataatcatctaatttcta

SEQ ID NO: 21709 - DNA, 364 bp, Homo sapiens
aatgtgcaccgcgctgcatgaattcggcacgaggaaaaatacttccaattccaagaagagggcaaggaaggagagaacagggcagttatccattatagggatgatgagaccatgtatgttgagtctaaaaaggacagagtcacagtagtcttcagcacagtgtttaaggatgacgacgatgtggtcattggaaaggtgttcatgcaggagttcaaagaaggacgcagagccagccacacagccccacaggtcctctttagccacagggaacctcctctggagctgaaagacacagacgccgctgtgggtgacaacattggctacattacctttgtgctgttccctcgtcacaccaatgccagtg

SEQ ID NO: 21710 - DNA, 479 bp, Homo sapiens
cttgcccgcctgcagatttgaccccactgcaggaattccgcacgagattgacaaaattcttgaaccacctgaaggccaagatgaaggtgtgtggaagtatgaacatttaaggcagttctgccttgagctaaatggacttgctgtcaaacttcagagtgaatgccatccagatacttgcactcaaatgacagcaactgaacaatggatttttctttgtgcagctcataaaactccaaaagagtgtcctgctatagactatactagacacacacttgatggtgctgcatgtcttctgaatagcaataaatattttcccagcagggttagcataaaggaatcatctgtagcgaaactaggatcagtatgccgtaggatttacagaatattttcacatgcttattttcatcatcggcagatatttgatgaatatgaaaatgaaacatttttgtgtcatcggtttactaagtttgtgatgaaat

SEQ ID NO: 21711 - DNA, 477 bp, Homo sapiens
  misc_feature (1)...(477): n = A,T,C or G
cttggaggagccctnaanantttgcccccgcgctgcaggaagatggcggacattcagactgagcgtgcctaccaaaagcagccgaccatctttcaaaacaagaagagggtcctgctgggagaaactggcaaggagaagctcccgcggtactacaagaacatcggtctgggcttcaagacacccaaggaggctattgagggcacctacattgacaagaaatgccccttcactggtaatgtgtccattcgagggcggatcctctctggcgtggtgaccaagatgaagatgcagaggaccattgtcatccgccgagactatctgcactacatccgcaagtacaaccgcttcgagaagcgccacaagaacatgtctgtacacctgtccccctgcttcagggacgtccagatcggtgacatcgtcacagtgggcgagtgccggcctctgagcaagacagtgcgcttcaacgtgctcaaggtg

SEQ ID NO: 21712 - DNA, 464 bp, Homo sapiens
cctgtgcccagcgctgtatgccccgcgctgcaggaattcggcacgagaaacagtagaagattccataattgaggatgaagatgatgaagccgatgtagaacaagatgaacccacagatttggtagaagataaagaggaagaagatgtgtctggtgaacctgaagcttcaccgagtgcagatacaactatactgtttgtaaaaggagaagattttccagcaaataacattgtgaagttcctggtaggctttaccaacaagggtacagaagattttattgttgaatccttagatgcctcattccgttatcctcaggactaccagttttatatccagaatttcacagctcttcctctgaacactgtagtgccaccccagagacaggcaacttttgagtactctttcattcctgcagagcccatgggcggacgaccatttggtttggtcatcaatctgaactacaaag

SEQ ID NO: 21713 - DNA, 473 bp, Homo sapiens
  misc_feature (1)...(473): n = A,T,C or G
ggcggnnttgnttactgactgcatggcatcggacattcggcacgaggaaaaggacaaggatccaaactggcgaatttgctgatcttcgcgtccctctccgctttccggccggcagcgctgccagggtatatttccttttttccgatcctgcaacagcctctttaaactgtttaaatgagaatgtccttggctcagagagtactactcacctggcttttcacactactcttcttgatcatgttggtgttgaaactggatgagaaagcaccttggaactggttcctcatatttattccagtctggatatttgatactatccttcttgtcctgctgattgtgaaaatggctgggcggtgtaagtctggctttgaccctcgacatggatcacacaatattaaaaaaaaagcctggtacctcattgcaatgttacttaaattagccttctgcctcgcactctgtgctaaactgggaca

SEQ ID NO: 21714 - DNA, 458 bp, Homo sapiens
  misc_feature (1)...(458): n = A,T,C or G
aatagcancgcctgttggaattcggcacgagccgctgtccgtctctcctcagttcctagaactcaagcacagctcccgccgatcctggggcggcgccgcctctccacccgcagcctgcggaggcggggacttgggtgtcggcttttctgagggtgatcttttgttttccgagtttgggattcggctgttgggaaaaaaaaatcgcgtttgtaccttttccccccacagatgagaagtgtttgtaatggatttgtatttttcttaattttatgctctttagacgtttaaaagaaccaaaaaagaaacttttgcttcttcgttttcggttgggatttgcagtttaatggcctcagatccttctccagatccccagggtttctttgtcttatttatggagaaaaaccggtcactttgtccagcgcactgtgaggcccccactcaggccagccctggccccc

SEQ ID NO: 21715 - DNA, 464 bp, Homo sapiens
  misc_feature (1)...(464): n = A,T,C or G
aatcgacaaccnggttgatcgccntcaggaattcgccacgagngaaatggcagccctggaatctacaatttggctctccactgagcaccttatcttgccaccttagccttaagaatgaatatgaagaaaaatacacagccacctctgtccagggcagtaagaagggctgcaaggaaggggaggatggggacaaggaaaggatcagatacctgctccagtagttgtgaggccactgtgtctcaggggactccaggaggagcagaagagggatcccacgaagttattcttacgcagctggggccaggagggtcagagtggtgccaggtgcaagttaggctaaagaagccaccactattcctctctcttgcccattgtggggggcaaaggcattggtcaccaagagtcttgcagggggacccacagatatgccatgtccttcacacgtgcttgggctccttaacctg

SEQ ID NO: 21716 - DNA, 507 bp, Homo sapiens
  misc_feature (1)...(507): n = A,T,C or G
ngagccgngnnnnaattganaatcgatcgcctgtagaattcggcacgaggttcttgactccgctgctcgccatgtcttctcacaagactttcaggattaagcgattcctggccaagaaacaaaagcaaaatcgtcccattccccagtggattcggatgaaaactggaaataaaatcaggtacaactccaaaaggagacattggagaagaaccaagctgggtctataaggaattgcacatgagatggcacacatatttatgctgtctgaaggtcacgatcatgttaccatatcaagctgaaaatgtcaccactatctggagatttcgacgtgttttcctctctgaatctgttatgaacacgttggttggctggattcagtaataaatatgtaaggcctttctttttataaaaaaaaaaaagaacataaaaatacaaaaaaaaaaaaaaaaaaaaaaaaaaagcgggggggggggcccggcccccaatttccccttaaggagcttctaa

SEQ ID NO: 21717 - DNA, 462 bp, Homo sapiens
  misc_feature (1)...(462): n = A,T,C or G
aggtgcacaaaantttgtttgacccgcgctgcaggaattcggcacgagggaaaacaaaaccaaaaaaaccagaaaccacgaataagaatggaaatgacaatggctgcctgtcatttttctgtcacgattttcctgatttggtttgttccctttgtctcagagaagcaggagatgttgatgaggctgtatttttttttctttttcttgtttttgagacaagagtctcgctctgtcacccgggctggagtgtaacgtggcatgatctcagctcactgcaacctctgcctcctgggttcaagcgattatcctgcctcagcctcctgagtagctgggattacaggcatgcgccactatgcccagataatttttttgtatttttagtagagacagggtttcaccatgttggccaggctggtctggaactcctaacctcaggttatccacccaccttggcctcccaag

SEQ ID NO: 21718 - DNA, 546 bp, Homo sapiens
  misc_feature (1)...(546): n = A,T,C or G
agtgtgattcgannnctttcgaccggctgcangaattcggcacgaggcctggtgttttatactgatgcccagttctggcaggaggaagaaggagattttgatgaacagacagccgatgactgggatgtggacatgagtgtgtactatgacagagatggtggagacaaggatgcccgagactctgtccaaatgcgtctggaacagagactccgagatggacaggaagatggctctgtgatcgaacgccaggtgggcacctttgagcgccacaccaagggcattgggcggaaggtgatggagcggcagggctgggctgagggccagggcctgggctgcaggtgctcaggggtgcctgaggccctggatagtgatggccaacaccccagatgcaagcgtggattggggtaccatggagagaagctacagccatttgggcaactgaagaggccccgtagaaatggcttggggctcatctccaccatctatgatgagcctctaccccaagaccagacggagtcactgctccgccgccagccacccaccagn

SEQ ID NO: 21719 - DNA, 539 bp, Homo sapiens
  misc_feature (1)...(539): n = A,T,C or G
agagagattcggcggctgtagattcggcacgagcagattaatgctaaatcctgtgggacagcatttagcaacacctaaaaaagactcagtgacctttgaggatgtggctgtgaacttcacccaggaggagtgggctttgctgggtccttcccagaagaatctctacagagatgtgatgtgggaaaccttcaggaacctgatgtctgtagaagtcatatggtagagagagtctgaaggtaaggaagatggtcaatgtgaagagatcttcagccttgttccaaatggtatagtgaagacgacttttactggagtcaaatcatgtgaaagcagtgtgtgtgaagaaggcaatatggatcattcatctcttaattgctgcatcagagctgacactggacacaaatcagatgagtgtcagcaacatagaagccacataagcagtgtgtgaaaaccttcagctattgccactcctttcaaacacatgaaaggcctcacactggaaagaaactccatgtaagaaatgtgganaaccttcatttctg

SEQ ID NO: 21720 - DNA, 480 bp, Homo sapiens
atacgccccgctgcaagcttagacacccgctgcaggaattcggcacgagccagaccatgtcggtgattgggggcttgctcctggtggtggccctgggccctgggggtgtctccatggatgagaagaagaaggagtggtaacagtcacagatccctacctgcctggctaagacccgtggccgtcaaggactggttcggggtggattcaacaaaactgccagcttttatgtatcctcttcccttcccctcccttggtaaaggcacagatgttttgagaactttatttgcagagacacctgagaatcgatggctcagtctgctctggagccacagtctggcgtctgacccttcagtgcaggccagcctggcagctggaagcctcccccacgccgaggctttggagtgaacagcccgcttggctgtggcatctcagtcctatttttgagtttttttgtgggggtacaggagggggccttcaagc

SEQ ID NO: 21721 - DNA, 499 bp, Homo sapiens
  misc_feature (1)...(499): n = A,T,C or G
gagcccnnnnaatcgacgtctgtggacttcggcacgagagctggtgtataatccaggacagaacccaggtctcctgactcctggccttctatgccctctatcctatcatagataacattctccacagcctcacttcattccacctattctctgaaaatattccctgagagagaacagagagatttagataagagaatgaaattccagccttgactttcttctgtgcacctgatgggagggtaatgtctaatgtattatcaataacaataaaaataaagcaaataccatttattgggtgtttattaacttcaaggcacagagccaagaagtacagatgcatatctaggggtattgtgtgtgtatatacattgattcaacaagaaatatttattgagcacttactatgtgccaagcatagctctgggcactgggaatatagcaatgcacaaaagcagacagaaatccctgtcctcatgaccctgcagagccaagacttcca

SEQ ID NO: 21722 - DNA, 526 bp, Homo sapiens
  misc_feature (1)...(526): n = A,T,C or G
agcgatgtnnnnnnaatcgtcggctgtangaattcggcacgatcagctcacgagattctcccaggaatagcacggaggcgtaaagagagacaacgtacagagatagatgaatggaaatgggtaagggaggtgttcattcacatccatctaactgcaaaatacagaagtaagaagtcattgacatgaagcaacgacgaccaagacgttctcagatctgaaggtgaatgatctcagtcagcctggaaatgcacatggtggaaaaataacataaaaaagccataagaccttgaagaacatcaatgtcaaagataaattctaaagtcccagagaaaaaagaatgggaatcaaattgacctcagactatacgtgagaaacacggagagccagaaaactgtgatgttccatcctcagagtttgaaggaaatatttgaaggctgaattttacatccagctaaactatcaaaggcatgcanagtccatgttattcttaggccttcaaggcctcggacattnttctacagaagag

SEQ ID NO: 21723 - DNA, 473 bp, Homo sapiens
catcgacccccattgctccgctctgcaggaattcggcacgagctgtgctgaggagaccaacagtgcagtctgcagagacttcaacatccctggcttcccgactgtgaggttcttcaaggcctttaccaagaacggctcgggagcagtatttccagtggctggtgctgacgtgcagacgctgcgggagaggctcattgacgccctggagtcccatcatgacacgtggcccccagcctgtcccccactggagcctgccaagctggaggagattgatggattctttgcgagaaataacgaagagtacctggctctgatctttgaaaagggaggctcctacctgggtagagaggtggctctggacctgtcccagcacaaaggcgtggcggtgcgcagggtgctgaacacagaggccaatgtggtgagaaagtttggtgtcaccgacttcccctcttgctacctgctgttccggaatg

SEQ ID NO: 21724 - DNA, 472 bp, Homo sapiens
aattgcccgcctgcagcttaatatagcattgagcacactgcacctgacgcccgaattcaaatcctggaaggatggaataaacgcctggagaatatttgggatgagacaccactgtattgtgctccaagcagcctctttgacctaaacttccaggcaggattcttaatgaaaaaagaggtacaggatgaggagaaaaacaagaaatttggcctttctgtgggccatcacttgggcaagtccatcccaactgacaaccagatcaaagctagaaaatgagattccttagcctggatttccttctaacatgttatcacatctgggtatctttgcaggcttccctgacttgctttagtttttaagatttgtgtttgtctttttccacaaggaataaatgagagggaatcgacaaaaaaaaaaaaaaaaaacgcgggggggggcccgggcccaaattccccttatggggaggcgttta

SEQ ID NO: 21725 - DNA, 469 bp, Homo sapiens
  misc_feature (1)...(469): n = A,T,C or G
ggctggnttttnaattgactgctcggcattcgcacgaggaaaaacccacactggtgaaaagccttacaggtgttctcactgtgagagaggcttcactaagaactctgccctcacccgtcatcagacagtacacatgaaagcagtactctcatcacaggaaggaagagatgcgttatgagtgtgtcggtaaactgtcagattaagttcctcaggtcagcatgtatgagctttcttctgctgtggagagatctagccagtccctgactttgcaacagacctactgactactggatcttaagacccatgtctaggaccaggagtcagcataaggacgctgacctctcctggctgtgcctgtgactccagagtcctatcttactgtgacttaaagtttgatggagagaaagctgtaggatccataaattctaccaggaaaccagggtcttccttgtcctagcactgagaatgg

SEQ ID NO: 21726 - DNA, 458 bp, Homo sapiens
ccttgcccgcctgttgcccccgctgcaagaattcggcacgagcctcagtgggctttgccttataggtgccacagggcacagctccatcattgccactggtttttcctaagtcatgcaccaaggacttcagaaagttcttcctccgagtcagtcagtggagccgggaccccagggcagcctcctcgactcctgaagaaaaggcagtgcccgtggctgcctctgtcttcactcgctgttgatgtgaccgccaggcctcctctcgtaccttggacaaaggatacacctgaaccagaatagttttcttaccctcacattgaaatgaggattttgcttaaaacagcacttgccgccagtgggaggaaggaggttttatttattcccacagtttctcctgggccttctggaatgaccatgttttcctgtggcggtgggtgtgtcattgcgcccgccgtcttcca

SEQ ID NO: 21727 - DNA, 508 bp, Homo sapiens
  misc_feature (1)...(508): n = A,T,C or G
nagggattgacgcttatgatcggctgtangaattcggctacgaggagaaaagatcccaagaatctcgagaatggagctcttcagccatcggacttggacagaaataagatgaaagacatcccaaagaggcctttctctcagtgtttatctacaattatttctcctctgtttgcagagttgaaggagaagagccaggcgtgcggagggaacttggggtccattgaagagctgcgaggggccatctacctagcggaggaggcgtgccctggcatctccgacaccatggtggcccagctcgtgcagcggctccagagatactctctaagtggtggaggaacttcatcccactgaaattcctttggcatgtgggggtttggttttccttttttccttcttcatcctcctccttttttaaaagtcaacgagagccttcgctgactccaccgaagaggtgcgccactgngagccaccccagcgccaggcgcccgtccagggacacacacagtcc

SEQ ID NO: 21728 - DNA, 462 bp, Homo sapiens
  misc_feature (1)...(462): n = A,T,C or G
cggcgcccccttttngtttgcctcgcgctgcaggaattcggcacgagtattacctctgaagaacgtactaagcatgacaggcagtttgataacctcaaaccttcaggaggttacataacaggtgatcaagcacgtaattttttcctacaatcaggtctgccggcccctgttttagctgaaatatgggctttatcagacctaaacaaggatgggaagatggatcagcaagagttctccatagctatgaaactcatcaaactgaagcttcaaggccaacagttgcctgtggttctccctcctattatgaagcaaccccctatgttttctccattaatttctgctcgttttggaatgggaagcatgcccaatctgtccattcctcagccattgcctccagctgcacctataacatcattgtcttctgcgacttcagggaccaaccttcctcccttaatgatgccg

SEQ ID NO: 21729 - DNA, 450 bp, Homo sapiens
attgaccgcctgcggattcgtacgagcccttccagtgggaggtgaggccaaatccctgactaaccgtccagattcttaatacctagccaagacatcagtcctcactttattttacgctgtggaaatgaaggcctctttatggaaaagtaattttaagacagatggaaacttcagaatcccaaagacttgagagttctggtgaaacagttcaaggaaatcccagctgagagacagcccagctctcagactttgcaggctttctgccatgttacttaacttgacagcagcccttatgattacctaaatgaccaacccaacttgcttttgtccatgccttaaataacataattaacagagttagaagatcacgaaagaggcctttttgtgtgtgtttcagagttcattataacccagtggaagtggaggtgagcctacctagaggttcacatt

SEQ ID NO: 21730 - DNA, 328 bp, Homo sapiens
gagagattcaccggctgcagaattcggcacgaggcgagacaaagtcctttattagaaaatatatcaaaatcccagccccctgagccaggaccagaagagggagctattccagcataggcagaaaatgcccagggaggggcttccttcaccaaacaacttcccgggaaccataaatagaataaatattcacagaggtccgaggagaagccagatcactcttctctccatggaagagggaggggcttggggtccagccctgctcctactctaggggcagggactcctaggaatcgtcacataaaatcatgacatcaaggattcaccggca

SEQ ID NO: 21731 - DNA, 469 bp, Homo sapiens
  misc_feature (1)...(469): n = A,T,C or G
cattgaccgccataggattccgcacgagcattaactgctaattctgtatttataaagaattttcagatggacatgtacaaatttgaactcaaaccatccccagtccagatacagggcagcgtgtaggtgaccacaccagagcctcagcctcggtccttctcagccgtcgggataggatccaggcatttcttttaaatctcagaggtagcagtaaacttttcagtattgctgttagcaagtgtgtgtttgccaatagatacccattatactaatgtgccaagtaaatgttcattgcacatctgcttccactgtgttcccacgggtgccatgaagtgtgtgaggagcccctcatctggagggatgagtgctgcgttgactactgctatcaggattgtgttgtgtggaatattcatctacataaattntatatgcacagtaatttccctttttatatgtcaaggaactattn

SEQ ID NO: 21732 - DNA, 474 bp, Homo sapiens
  misc_feature (1)...(474): n = A,T,C or G
ntttgaaccgcgctgcaggaatttggctcgcgctgagaatgtaataggggtatattgagtgtgccaacgcccgtgcaagggcaggcttgctttccacccatctgctgacggagccctctcctctcgctacttgcctctgttcacacctgttgtcttggaagaggatggtccctttgtcttaaggctttgtgataaagtcatctccagttaggatctgcacctgtttccttcgtaatagtgcctggcggcctttctgaagttacaggtggttgggagccctctcgcatgcagaacatctggtagattgatctgccaggctgggtggttctactgctttctcaatttctaagaaccttttttttttcttaaagagttctgctgaattatttgacaatatttgtaagtaccatgtttccttggggtggatgctctgttctggtttctggtttcaaatcaaatgcctgtttgggaggg

SEQ ID NO: 21733 - DNA, 478 bp, Homo sapiens
  misc_feature (1)...(478): n = A,T,C or G
catcggaccgccaattgcacccgcctgcaggaattcggcacgagcttccctcttctcatgacaagtcaagactttgtttttgtacaaagcaaaggatgggccgggcgtagtgcctcatgcctgtaaccccaacgctttgggaggctgaggtgggcggatcacttgaggtcaggagttggagaccagcctagccaacatggcgaaaccccatctctaccaaaaaatacaaaaaaaatagccaggcgtggtggcgtgcacctgtagtcccagctacttgggagactgaggcacgagaatcgcttgaacccgggaggcggaagttgcagtgagtgccactgtactccatcctgggcaacagagtcacccatcctgtctcaaaaaaaaaaaaaaaaaactggggggggggccgggcccccatttccccttatagggagcggaataacaattcatgggccggggtttaacaacggcgggacgn

SEQ ID NO: 21734 - DNA, 391 bp, Homo sapiens
agggggccaattgatcggctgtgtactgaggcccgtgcagaggcacaactacagcctcgttcaggccggacaggattcatacgccatcttttctgtgtctcctgagctccctccatccttcccagatattagaggccaaaaaaagacttgcattttttctcagtctgaaggtctcctgctaactaagctgagccccgcgtggtgggaatcagatgtacccatccatttctgatgcactcaccgcctctccccaagtcttgggtctgtttgctattttgcatggtgggatctctggcccctcagggacttgagattatttaagtactagttcctacacgttctggaaaataaaaataactctgggttaaggtttaaaaaaaaaaaaaaaaaa

SEQ ID NO: 21735 - DNA, 436 bp, Homo sapiens
  misc_feature (1)...(436): n = A,T,C or G
aggagccatttgaccgcctgagctangancggctgtangaattcggcacgagccaagtccctggcaatggacaaggtggctcacttctcctacccattcacgtttgaagccttcttcctccatgaggatgaatcttctgatgcactcccggagtggcctgtgctctactgtgaggtcctctcgctggacttctggcagaggtaccgtgtggaaggctatggggctgtggtgctgcctgccactccagcgacaatgacgtggccttggcactgacttcctgacagtctctccatgtgcttcatgctcctctgattggactcagggtgagaagctgtatggcaaaattggctcatagcatatgtgtattgaatgaatcagcattcagtttggaataaaagcatctgtcttttactgtgaaaaaaaaaaaaaaaaaaaa

SEQ ID NO: 21736 - DNA, 488 bp, Homo sapiens
  misc_feature (1)...(488): n = A,T,C or G
agcgccaatgcacgctgagtagacgccgatggagttntgaaaaccaacttttccccttcaggataagaacttccaggttacctaaaaatgcaataaaaatctttatagtctaagcttgttggcatataatttttcatcagggttttcttttattaattgagcacaatactgttttgatttaatttttttccctcaaaccacccagctccttacatagtttttaattatatagctatctgaaagaggtggctaagacatttgctgcacacacttgaactaatgttgggtcagtagcttcgtgttactgccctgatcccagtgtaattcaggtggaaaggtatttttatctcacagggatatgtagctatgtattttactaattgtgaaacactggaaattaatgatgcagacaacttggtgtggtctttgaacagctctctgcagcattttttttttcctgttaccataaattgtattaagtgcttgct

SEQ ID NO: 21737 - DNA, 477 bp, Homo sapiens
  misc_feature (1)...(477): n = A,T,C or G
ngattgatncccctnngnnnnnnnccattgacccgcgctgcaggaattcggcacgagctcctccctgtgtcttgtatgaaaggggccactgtgtgtcttcctccccggcgggagccccacatgtgtgcactgtaggacagcggccccgaggtggaagcctggctggagggctgccctataggtcttctcttcccgcctcccctgccatgcaaccagatgtgttgtgagtgggcagcgtgcccccacgctggagtaactccgcacgcttctgtctttcacggtgggcgctcggggggagcctgaggaaaacccccttaggtacctgtgcgaggctgtggagtgcaggccagagcagggtgtgcgtagcccccagcacccaggttcttctgtcagaccctgtgacctgcgagctgctactactgtaaggagggaaatggatgaatctggctcgttttaaaatcacgttttctgacgaat

SEQ ID NO: 21738 - DNA, 466 bp, Homo sapiens
  misc_feature (1)...(466): n = A,T,C or G
aatgcccgcctgcagaattctgctcgagatcaattcctgtcgaagtgaataccatgcagcttttaacagtatgatgatggaacgcatgaccacagatatcaatgcactgaagcggcagtactctcgaattaaaaagaagcaacagcagcaggttcatcaggtgtacatcagggcagacaaagggccagtgaccagcattctcccgtctcaggtaaacagttctccagttataaaccaccttcttttaggaaagaagatgaaaatgactaacagagctgccaagaatgctgtcatccacatccctggtcacacaggagggaaaatatctcctgtcccctacgaagaccttaagacgaagctcaactccccgtggcgaactcacatccgagtccacaaaaagaacatgccaaggaccaagagtcatccgggctgtggggacaccgtanggctgatagatgagcagaan

SEQ ID NO: 21739 - DNA, 480 bp, Homo sapiens
  misc_feature (1)...(480): n = A,T,C or G
nattgcccncgctntgnngnannnnnnnattgaccccgcgctgcaggaattcggcacgagattgtttacaggcaagccctgctcctgggagggctcctgccaccccacccttcctctgtgtgttatctctgccccacagcagcccctgggcagcaccagtggccactgggctccccccggggttgaaacgggtttcccagaccaggggttcagaggagactatttacccttcatgatctttggcgattctccactggagcggaagggctgtgtgtcaaaagaaggaagccaggctgtgaagggccgtgttgctttcagtgggtgggcagaggtttagaaaggtggttctgaaatggcacctggtactcttgtgggacctggggaatataaggaactctgtgcatgaggtttcaaaaataaaaattgagtccactctccccgtacacaaaaaaaaaaaaaaaagggggggcccggccccca

SEQ ID NO: 21740 - DNA, 465 bp, Homo sapiens
  misc_feature (1)...(465): n = A,T,C or G
attgcccgcctgcagaattcggctcgagcagacatgaggggcttccaggtagagctcagacctgagacttctggtcccctgtctggacatctgtatgaagacggagaagcaccagccaacctctccacaaccctcaccaagttctcatggaacatcctctgatggtccctctcggtgctgggttctggcaggagaaagagaagtcagggaacagaagagctgctctgccaaagtcatacccttcttggagacacagggaactccatctctcattctcactagcaatttgctgtggcaactcaaatgtttttccagatggaacataagcagacgtgatgtgtttgccttccaggtctaacccatgcaaagcctcctgggaacacacctcacgctattttctattccatcaggtggatatggatgatgattaggaactagggtgaggtggagccagaanacacaagg

SEQ ID NO: 21741 - DNA, 463 bp, Homo sapiens
  misc_feature (1)...(463): n = A,T,C or G
nttggacacgcgnttgaagaaaaattttaccccggctgcaggaattcggcacgaggtgttcagccctgtggagttcaacaaggtgtcggtgctgaccggcatcatcaagatcagcctgaagacgctgctggagtgtgtgcggctgcgcacctttgggcgcttcgggctgcagcaggtgcaagtggactgccactttctgcagctctacctgtggcgttttgtggccgacgaagaactcgtgcacttgctgctggacgaagtggtggcctctgctgccctgcgctgcccagaccctgtgcccatggagcccagtgtggttgaggtcatctgcgagcgcggctaggcgcagccgctgccatgcaccggtctgtccctgcaccccatggcacccaggatctggtctcggtggtccttccccgcaggcaggtgtcaggaccggcctaataaacatgtgtggcctcaa

SEQ ID NO: 21742 - DNA, 499 bp, Homo sapiens
  misc_feature (1)...(499): n = A,T,C or G
aggggccattganncccctntttgaccgcctgtggcgccatcatgaacgacaccgtaactatccgcactagaaagttcatgaccaaccgactacttcagaggaaacaaatggtcattgatgtccttcaccccgggaaggcgacagtgcctaagacagaaattcgggaaaaactatccaaaatgtacaagaccacaccggatgtcatctttgtatttggattcagaactcattttggtggtggcaagacaactggctttggcatgatttatgatttcctggattatgcaaagaaaaatgaacccaaacatagacttgcaagacatggcctgtatgagaagaaaaagacctcaagaaagcatcgaaaggaacgcaagaacagaatgaagaaagtcagggggactgcaaaggccaatgttggtgctggcaaaaagtgagctggagattggatcacagccgaaggagtataggtgctgcaatgatgttagctgtggccactgn

SEQ ID NO: 21743 - DNA, 473 bp, Homo sapiens
  misc_feature (1)...(473): n = A,T,C or G
attgaacnccntnnnnaannnnnattgaccccgctgcaggaattcggcacgagatagaatttcgttgtttctctcatttaactttgttcataatttatatttgttcgtatacccattatttaatatttgccttacctatagcactacaaactcactttaggaatggaccgtgcctgtatgtatatgtctatcaccagggcttagcaaaagtgcctggctcatagcatatgttaaataaatactagttaagtaaataagcaaagaatgaaatgcctgcaactctacctagattgacaacttgtggatatctttgcacttcactgctccatctatcccggtccttttgctagcagatgcccaaccaacagtaactgaattggattttaacattaagtattcatttctttctgttgagtgaggaaactattgtgatcaacttgtggccctttcggtttgttcgtgaaagaaaagtn

SEQ ID NO: 21744 - DNA, 496 bp, Homo sapiens
  misc_feature (1)...(496): n = A,T,C or G
tcggtgtaaataaatagggataaaaagggaangaaaaggtttgancgcctgtggaattccgctcgagatcacgttgcacctacacagtcctaagactgaactcataaaacggcatcctatactaatattattgtcaaacactatgatttcttttttgtcttctgtctttgatatctgcacctaaatattcaggtgttactcattcttatgaaatgggtcagattccaaataaaaattgaagttcctcttatcactgaccatgagggctctgcaagattgtcttgggaaagaagatttacattatgagctagggcatggattcttgtcatgtctgtgtgtgcccttgtctacgtccaatgcacacaggatgaaaaactggtcagctcacgtgcccatagcccatcttcacctcacctcaagctaagacaccaagaaactcccagtgttcctgggagaaccaggccagtggaatcctgggcttgcatctaatttggct

SEQ ID NO: 21745 - DNA, 486 bp, Homo sapiens
  misc_feature (1)...(486): n = A,T,C or G
tggaggannnnntttgcccggctgcatgaattcggcacgaggacccaggtgggacttatcagtgagtattggaagacttggggtgatctcttataagccatgggacctcctccctcattcatcttgcaagcaaatcccatttcttgaaaagccttggagaactcgggttggtagacttggacatctctctggcttctgaagagcctgaagctggcctggaccattcctgtccctttgttaccatactgtctctggagtgatggtgtccttacctgccccaccacgcatgctcagtgccttttggtttcaccttgcctcgacttgaccctttcctcccccagcaggagtttcactccctcttggtgtttatcaaatttgccatgacatttcatctgggtggtctgaatattaaagctcttcatttctgggaaaaggcgagatgataaagctggaaaatgactggcaccgcggagggcgggcgcgggc

SEQ ID NO: 21746 - DNA, 485 bp, Homo sapiens
  misc_feature (1)...(485): n = A,T,C or G
ggatgggggnnnnnntgaccgccttaggaattcggcacgaggatattctaaggatttcttcagactacttaataattcgtcaccattaactttaatatccagttttaatctgcactgtaatatcctgctttgagaagaaagaatgcctcataaatcagagaagtacaaaacaaaatgttttggaaggtgatcctggctcctttggctctcataattgttttatagctgaaaataaaaagtcaggaaactggcccggtgcggtggctcatgcctgtaatcccagcactttgggaggctgaggtgggtggatcacctgaagtcaggagttcgagaccagcctggccaacatggcgaaaccctgtctctactaaaaatacaaaaaaaattagctgggtgtggtggcacatgcctgtaatcccagccactgaggaggttgaggcgcaagaatcgcttgaacccggaaggcagaggttgcagtgagccaa

SEQ ID NO: 21747 - DNA, 475 bp, Homo sapiens
cgcccctcgacgcctgggattcttgcgaccttctgaaggagcaccttatcctccccctttgtttatcagggacacatataaccaatcaatacctcagccacctcctcggaaaattaagcgacccaaacgaaaaatgtacagggaagaacccacttcaataatgaatgctattaaactacgacccaggcaagttctgtgtgataaatgtaaaaacagtgttgttgctgaaaaaaaggaaattagaaaaggtagtagtgcaactgactcttctaaatatgaagataaaaaacggagaaatgaaagtgtaactactgtgaacaaaaaactgaaaactgaccataaagtggatgggaaaaaccaaaatgaaagccagaaaagaaatgctgtggttaaggtttcaaatattgctcacagcagaggcagagtagtaaaagtttctgctcaggcaaatacatcaaaagctcagttaagtact

SEQ ID NO: 21748 - DNA, 449 bp, Homo sapiens
  misc_feature (1)...(449): n = A,T,C or G
cgggtccccgattgannccaactgccccgctgcaggaattcggcacgagaaaacattgaatgaagaaaagagaaaagaagaagagtctaaatttgaagaaatgaagaaaaagcatgaaaatcaccctaaagttaatcacccaggaagcaaagatcaactaaaagaggtatgggaagagactgatggattggatcctaatgactttgaccccaagacatttttcaaattacatgatgtcaatagtgatggattcctggatgaacaagaattagaagccctatttactaaagagttggagaaagtatatgaccctaaaaatgaagaggatgatatggtagaaatggaagaagaaaggcttagaatgagggaacatgtaatgaatgaggttgatactaacaaagacagattggtgactctggaggagtttttgaaagccacagaaaaaaaag

SEQ ID NO: 21749 - DNA, 477 bp, Homo sapiens
catcgcaccgcctgcaggaattcggcaccagcaccaattgaatttcagataggagagactccactctcagaacaaaggaagtttactgttcattctcctgatgcttcatctggaacaaattctaatgggataactaatccgtgtatcagaagtccttatatagatggctgctcgccaattaaaaattggtctcctatgagacttcagatgtatagtggtggtactcagtatcggacctcagtgattcagataccttttactcttgagactcaaggtgaagatgaggaagataaagagaatattccttccacagatgtctcatcacccgccatggatgctgctggaatacacctacggcagtttagtaatgaggcttctacccatggtacacatttggttgtgactgccatgtctgttacacaaaatcagtccagtgcttctgagaaagaattagcactgttgcaggatgttgaaagg

SEQ ID NO: 21750 - DNA, 488 bp, Homo sapiens
  misc_feature (1)...(488): n = A,T,C or G
ggggggnnnncaattgaaatcctaactgaggccctcgtgaatncgcacgagctttgatgggtcatgggccatgccataccccctgtggcaatggagtgtgtggatgctcacctgtgccatctgtcctcctgtctgtgccaggaggcacctgagttctctgctgttatcctgccccaagggcctgggccgagcctctacctgaagcaactctgctcttcctgtcagtctcaaagcacaaggaggttcagcccaggaggaagccagctgcaatgtggagacacgtcctcctccccaacccacctcatgccaccgccaaccccctgccccaggagcgggcctgagccacgtcccctaggagcagctggagatggccaaaagagtgagctcaggactactggatcccatgcccaggtgtccagcagacctcaaggcagaagggtcacctaacccaggagtccacagactgatgtgacctcaggttcccacat

SEQ ID NO: 21751 - DNA, 391 bp, Homo sapiens
  misc_feature (1)...(391): n = A,T,C or G
agggcggcaattgacccctcnatagcaccgcctgcaggaattccgcacgagcgcacacgagaacatgcctctcgcaaaggatctccttcatccctctccagaagaggagaagaggaaacacaagaagaaacgcctggtgcagagccccaattcctacttcatggatgtgaaatgcccaggatgctataaaatcaccacggtctttagccatgcacaaacggtagttttgtgtgttggctgctccactgtcctctgccagcctacaggaggaaaagcaaggcttacagaaggatgttccttcaggaggaagcagcactaaaagcactctgagtcaagatgagtgggaaaccatctcaataaacacattttggataaaaaaaaaaaaaaaaaa

SEQ ID NO: 21752 - DNA, 509 bp, Homo sapiens
  misc_feature (1)...(509): n = A,T,C or G
tggtgggaataaaatatggggggaaaaagggaaaaaaaanggtttgannncctncttgacccgcgctgcaggaattcggcacgagccacccccaccttccccagcaaccacttccagctgctctggccaaaatctccgctcggccaggccccgtggctcacacctgtaatcctagcacattgggaggccaaggcaggcacatcacctgagttcaggagttcaagaccagcctggccaacatggtgaaatcccgtctctactaaaaacagaaaattatccgggcgtggtggcacatgactgtaatcccagctactcaggaggctgaggcaggaggatcacttgaacctgggaggcggaggttgcagtgagctgagattgcgccattgcactccagcctgggcaacaagagcaaaattctgcctcaaaaaaaaaaatagtaataatacaaaaattagctgggcgtggtggcacatgccagtaattccatctactcgggaggctgaggcagg

SEQ ID NO: 21753 - DNA, 551 bp, Homo sapiens
  misc_feature (1)...(551): n = A,T,C or G
tccccacgtgaattcctatatcattttggcgtatctgagaacgcgtcatttatctcgctatcgaacaccgccaccaaaattgaccccctgcangaancgatcgtagacgctctgcccntacngggcagncgatgccaatggatgcctttaggagtggtgccgagagcagtgtggtccactctggcctgggtttgcatcattctgcagactctaaagacttcccttttctgccagactacattttgtggggagcctgaggactctggattctttgaggggatcctggatgtgtgtgttcttgttaaagaggctgttatcaggcttaaccataaccctcaagatctgcttgacagtgattaaatccttagctcacatccattcccatctttcgggctccttaggcccaaggatggcatatcgatggtccctgcaagggtcctttttttgtcaccagccaaggcattgataaccaagtagccattttcctcttaaggtttcctctacaaccccaaggactttcatgattatccttatggacaggattggaggcg

SEQ ID NO: 21754 - DNA, 489 bp, Homo sapiens
  misc_feature (1)...(489): n = A,T,C or G
ggggccccaattgaccggctgcangttgcggcaccagtaatgaggtgggaaagccacggcaggcagcgagcagcccaggccagctttctgcatggatggtcagtctcttgccctcaaacactacagcaaacaagctacccctgccagtcctagacaacttgggtacatctggggacctagcagttaggcttgactttgaggagaggctgtgatgtttatgatccctgaataaagctactccttggagaaaaaaaaaaaaaaaaaaaaaaaaaaaaaaaaaaaaaaaaaaaaaaaaaattttggggggggggggggggccccaattccccttttaggggggggtttaaaaatttcgggggcgggttttaaaaacgggggggggggggaaaaannngnnnnnnnnccggnnnngnggntngtgatggnctaccccnggggnnnnnnnnnngggnngcnnngngggnngnccgggggngggcnnnngngccg

SEQ ID NO: 21755 - DNA, 448 bp, Homo sapiens
  misc_feature (1)...(448): n = A,T,C or G
ggcgcggggnannnaattgaccgccattgagatctctcacgaggaacaactctcatcccacaattgctgcagaactcttctctccccatcatgggccacagtgggtctcttaatttgattgtggggttctttttgtggggaggggtggtataacttttcttcagaagacccatgtgggacacctccaaggctggcctcctcataagccctgcctacaccatgttccagtaaacctctccaccaaggaactgtgttcagctgccacaggcctggaggagtttcctggcctgtcacgtgaggtttgatcagtaaaccagtgcacgcttggccacccttgccatttctgctcccagagtctcaggctccccttctgacccagtgtgcgcccttgactgctttctttgctgcccttccagggagctgcccccctgataaggcatgtgcctgt

SEQ ID NO: 21756 - DNA, 461 bp, Homo sapiens
  misc_feature (1)...(461): n = A,T,C or G
attgacccccgctgcaggaattcngtagcagaaataaaggttttattgggcagtttgggtgagtgacaaactgacatgggcccagttcactattccacatatccaagcccctgaggtggcaagagaagctaagcttattaatggggggcaatgggtgagaggtggaaaggacttgaaggcctctgagggttaacaaggctaccgggaccggaaccaacgtcccaggaataagtccaggatggaaaaggcatcatccacggctggaggtcttggtgattctggatcacccctaggactgctatctgcttcgtgtcgggttactgtnnnctctgtgcggccctcactgtacaccacagtacggcgctcctccactatcccatctggtttagagatcttggtcacaaagatgctcttgacataggaattgggctggggctgtagaaccgtgccaagaccctcct

SEQ ID NO: 21757 - DNA, 498 bp, Homo sapiens
  misc_feature (1)...(498): n = A,T,C or G
tcggaatattaanaggggganaaaaggaagaaangggttgatcgcctgtggaattccgcacgagccacatttggctgattatttcaaccgaaactgttatcaggatgatattaacaggtcaaatttgttggggcataaaggtgaagtggcagaagaatttggtataatcatgaaagccctgtggacaggacagtatagatatatcagtccaaaggactttaaaatcaccattgggaagatcaatgaccagtttgcaggatacagtcagcaagattcacaagaattgcttctgttcctaatggatggtctccatgaagatctaaataaagctgataatcggaagagatataaagaagaaaataatgatcatctcgatgactttaaagctgcagaacatgcctggcagaaacacaagcagctcaatgagtctattattgttgcactttttcagggtcaattcaaatctacagtacagtgcctcacatgtcacaaaaagtn

SEQ ID NO: 21758 - DNA, 476 bp, Homo sapiens
  misc_feature (1)...(476): n = A,T,C or G
nattgatgcgctctgngnnnnnnccttttgaccccgctgcangaattcggcacgaggatcaggctttgctactcatccataatgaacttctctggaccaacttgaccgtctactggaaatctgaatgctgttatcactgcttgtttcaggttctggtaaacgttcctcagagtccaaaagcagggaagcctagtgctgcagctgcctctgtcagcacccagcacggatctatcctgcagctgaacgacaccttggaagagaaagaagtttgtaggttggaatacagatttggagaatttggaaactattctctcttggtaaagaacatccataatggagttagtgaaattgcctgtgacctggctgtgaacgaggatccagttgatagtaaccttcctgtgagcattgcattccttattggtcttgctgtcatcattgtgatatcctttctgaggctcttgttgagtttggatgaa

SEQ ID NO: 21759 - DNA, 445 bp, Homo sapiens
attgctttcactgcggaattcggcacgagggaaccagcctatactacagtctgtgggacacaccaggcaaaatgatcttgtagagctgggtgtctgaaggggagaaagctgggccagccctttgccctagctgttccttccctcccaaaccgaactcggtaactctcccattgggacacaagccttccctgtgccctctagcccttctctctcctcaggaatttttggcagccagagtgtttgctaccaagtgaagtctgcctggcacaaatttggactggtgcagggaacagtgcagaggcacctttgggcccctcaagagcctgtcctccatcctgactctggcttatttcctcttcccaacccccaacccccttctgtcagagctgtgtgttccttgtcactcactaattcctccaagctccctactgagcagggagctctc

SEQ ID NO: 21760 - DNA, 499 bp, Homo sapiens
  misc_feature (1)...(499): n = A,T,C or G
aaggaaaaaattagacgccttagcacgcctgcggtggaaatcacggagaagatggtttcagggatggtgaagcatattacaggcagttacaaggtcacctaccacccatatggcccagagggccaagcctacgatgttgacttcaccccacccttccggcgaatcaacatggtagaagagcttgagaaagccctggggatgaagctgccagaaacgaacctctttgaaactgaagaaactcgcaaaattcttgatgatatctgtgtggcgaaagctgctgaatagccccccacagctggctggggcatggtcattgatcgagtcgccatgtttctcacggactccaacaacatcaaggaagtacttctgtttcctgccatgaaacccgaagacaagaaggagaatgtagcaaccactgatacactggaaagcacaacagttggcacttctgtctagaanataataattgcaagttgtataactcatgcgtctttgcatg

SEQ ID NO: 21761 - DNA, 459 bp, Homo sapiens
  misc_feature (1)...(459): n = A,T,C or G
natagancnncatagacccgcgctgcaggaattcggcacgagtgccagctttcaaagcaggctttgtgaaaatgtaatacaaacagcagtgaatgggactcaaatgttgtgcttcctataaacagctccgctctttcagggaaggatggtaacaaactagaaggacaaatatgtacgtatttataacgtattaaaactcttttaagtagcttaaggtattgtgcaatggcctagcctagtagaaatgggggaaaagcattgctgtggaccattgttaaagtgacaggagttgtagggttacccctttgacaagcttccatagtcttcagacacgcacattgatggcatccctacagtcttcttcacttgaactttgtaaaactgcatatggacctgtaatcaacttttgatatttcttaataaaggcgttgaaaatcaaaaaaaaaaaaaaaaaaaaaa

SEQ ID NO: 21762 - DNA, 502 bp, Homo sapiens
  misc_feature (1)...(502): n = A,T,C or G
cgcccgcccattgatcgcccgtcngattgatcgcccttcggaagncggcacgagccagagtacagagcctgctctttcacagatcgttatggctccttcctcccagtcacagccctcaggaagttgattaaaaacctgcaggacaacagttttagatactcattagtgacttcaaagggaaatcaaggaaagaccagtttccatttatgcgaaatctgtggctgtaaatttttttttttacttgaaattaaatttggctctaaagttggcgtagcagcagttgatcagactgaaaaacggtttttagtctctggaaaaagactgattttgctttttttataaagattattagatttattaatttttctgagctcaatggggaaatggcattataaatcattgcgatttatttcacttttaatttgcttttaatctttttgccttttattttgcacatgtatcaaaaggaaaaacattaaagaacacttttttttaagtgagg

SEQ ID NO: 21763 - DNA, 484 bp, Homo sapiens
  misc_feature (1)...(484): n = A,T,C or G
gggaagggaagggggngnnnnnnnttctgatccgcactgcaggacctcggcacgagacaccctgtcaaaggccttaccgcctgcctggagaaacacagtgcctgcccttggcaaatatatgttggtgtatctgaaaaacagctcctggaagctttttctcattcaggctttaggggttaccccatctttccttatgtgtgtaatattggagaatgtacactctcactgaactggggatgtttgacttaaaatgatggacaataagatagtgagcagtaagtgtgctctaggctaggctacgagaggccatgagctcctcatctcttctctgttctgagctctctgatccactgcacttggggcagggggtgcattctctgtgcctctcctgagtctactttctgcatcattggttctcccagctcacttccataatgtcctcctaggctgcattggaattgtgtgtgtctagacccatggccaa

SEQ ID NO: 21764 - DNA, 455 bp, Homo sapiens
  misc_feature (1)...(455): n = A,T,C or G
ggttagggggcccnnaatggannnccnattgacccgcgctgcaggaattcggcacgaggcccttcaggcccacctggcccaggagaaccgtgtggtggccttcttcagcctggctctactgcttgccccactggtggagacgcttattctactggaccggctgctgtaccttcaggaacaggccctttctcccaggtttccatgctgagctcctgcccatcttcagtcctgaactctctcccagaaacctggttctggtggccaccaagatgcccctgggtcaggctctttctgttctggagactgaagacagctgatgcagcctgaggagacatctcagaccccatcatctgaaagtgcccagagagcacagtggcagagtacatctcatccagagaaacagcatcctgcatcctccagagtcctggntccttcagtttcatcccctttctctc

SEQ ID NO: 21765 - DNA, 464 bp, Homo sapiens
  misc_feature (1)...(464): n = A,T,C or G
natgatggcctgcggaattccgattgagcctcgtgtcgtgaaaactacccctaaaagccaaaatgggaaaggaaaagactcatatcaacattgtcgtcattggacacgtagattcgggcaagtccaccactactggccatctgatctataaatgcggtggcatcgacaaaagaaccattgaaaaatttgagaaggaggctgctgagatgggaaagggctccttcaagtatgcctgggtcttggataaactgaaagctgagcgtgaacgtggtatcaccattgatatctccttgtggaaatttgagaccagcaagtactatgtgactatcattgatgccccaggacacagagactttatcaaaaacatgattacagggacatctcaggctgactgtgctgtcctgattgttgctgctggtgttggtgaatttgaagctggtatctccaagaatgggcagacccga

SEQ ID NO: 21766 - DNA, 474 bp, Homo sapiens
  misc_feature (1)...(474): n = A,T,C or G
nattgatnccntccggannnccnaatgattcgcactgcngaattccgcacgaggaagatttcatatttgcccatgtgaaaggaatcgaaaaagaagtgaatgtgtataaatctgaggattcacttggtctcaccattacagataatggtgttggctatgcttttataaagagaattaaagatggtggtgttattgactcagttaaaacaatctgtgttggggatcatattgaatccataaatggagaaaatattgttgggtggcgtcactatgatgttgctaagaagttaaaggaattaaaaaaggaggaactctttactatgaagttaatagaacctaagaaggcatttgaaatagagccgaggtcaaaggctggaaagtcatcaggagaaaaaattggttgtggaagggcaacacttcgcctgagatcaaaaggtcctgccaccgtggaagaaatgccttctgaaaccaaag

SEQ ID NO: 21767 - DNA, 492 bp, Homo sapiens
aggagcaaaaattagatcgcttaggatgcgtccgagaattcttcctaaccttatggagagaaaggactttgagacatggctggataacattgctgttacatttctttctgtgacggacttgcagaaaaatgaaactctggatcacctgattagtctgagtggggcagtccagctcaggcatctctccaataacctagagactctcctcaagcgggacttcctcaaactccttcccctggagctcagtttttatttgttaaaatggctcgatcctcagactttactcacatgctggctcgtctctaaacagtggaataaggtgataagcgcctgcacagaggtggggcagactgcatgtaataatttgggctggcagatagatgattctgttcaggacgctttgcactggaagaagggttatttgaaggctattttgagaatgaagcaactggaggaccatgaagcctttgaaacctcgtcattaattggacc

SEQ ID NO: 21768 - DNA, 505 bp, Homo sapiens
  misc_feature (1)...(505): n = A,T,C or G
tggaaaatataaatggttaattaaaggggaaaaaaaggttggannnccatttcgacccgcctgcaggaattcggcacgagacttccagcccttctggattcagatgaggaacgaatgatcacacactttgaaaggtccaaaatggagtaaggaatgggaagatttgcagttaaagatggctaccatcagggaagagatcagcatctgtgtcagtcttctgtacggctccatgggattaaaggaagcaatgacatcctgatctgttccttgatctttgggcattggagttggcgagaggtgtcagaacaaagagaacatcttactgaaaacaagttcataagatgagaaaaatctacgagcttcttatttacaacactgctgccccctttcctcccagactctgacatggatgttcatgcaacttaagtgtgttgttcctgaactttctgtaatgtttcattttttaaatctgacaaactaaaaagtttaacgtcttctaaaagat

SEQ ID NO: 21769 - DNA, 474 bp, Homo sapiens
  misc_feature (1)...(474): n = A,T,C or G
cgtggntcnnnnaaaggatattcactgaccgatttcgcacgagctctggtctgtgttagggacagaggaaaacttggtgtgcctcctggtgtcacagaactggatcctctgcataccccagcttctccacatgccactgctaggggtaccccagctgctgccactcctgctggagggtgaactggggaccctgcaccctccgggaagccatggagtctgctggaggcaccatatcagcctgcgggactagggtggggagcaaacaggccagcggtggaggtctggacagttcaagtgcgaagcacctgcggcaaggagaaatccttcctcctctgggcctcaggctgcctgtccataaaatggggacatggccagctgacggacaactgagtctccggcccacctaccaccgccagccaggatcccccaaagtgtgcagagggctcagcagagaacagtatgggaccccctcan

SEQ ID NO: 21770 - DNA, 504 bp, Homo sapiens
  misc_feature (1)...(504): n = A,T,C or G
agatggccnnnnnnnttggancgttcgcaccgcctgcaggaattcggcacgagccgaggtcatggtggttcggagagataaggtctcaccatgttgtccagactggacttgaactcctggcttcaagcaatctgcccacctccgcctcccaaagtcctgggatttataggcatgaaccaccgcacctggcctccccaccattttattttctcccgtggctatcacaaccaggaataagagagggagggggacctcagtggtgattttatgctaaggattatggataacaccatccccccattttacaaatgaagaaactggggctcaaaaagcttaattaaatgtctaaggccactgaggcagcaattaanaaaaaaaaaaaaaaaaaaaaaaaaaaaaaaaaaaaaaaaaaaaaaatnnattaaataaaccccccgggggggggggccgcccccccaccccccctaaaggggggcgtgtaaaattgtgcgccgccgggtataa

SEQ ID NO: 21771 - DNA, 497 bp, Homo sapiens
  misc_feature (1)...(497): n = A,T,C or G
catcgcccggnataggaatcggcacgagctggtacatcgtcttcagctgcatccttctctacgtggtctttcagaagctttccgcccggctaagagccttgaggcagaggcagctggaccgagctgcggctgctgtggaacctgatgttgttgttaaacgacaagaagctttagcagctgctcgactgaaaatgcaagaagaactaaatgcgcaagttgaaaagcataaggaaaaactgaaacaacttgaagaagaaaaaaggagacagaagattgaaatgtgggacagcatgcaagaaggaaaaagttacaaaggaaatgcaaagaagccccaggaggaagacagtcctgggccttccacttcatctgtcctgaaacggaaatcggacagaaagcctttgcggggaggaggttataacccgttgtctggtgaaggaggcggagcttgctcctggagacctggacgcagaggcccgtcatctggcggatgaggctaa

SEQ ID NO: 21772 - DNA, 493 bp, Homo sapiens
  misc_feature (1)...(493): n = A,T,C or G
atttgaacgccctgattagacccgcctgcgcgaattcggcacgagagatcacccagcagtccaccaaccagagtcgcaatcccgccaccaccaaccagacggagtttgagcgcgtcttctgagggccggcgcttgccactagggctcttgtgttttttttcttctgctatgtgacttgcatcgtggagacagggcatttgagtttatatctctcatgcatattttatttaatccccaccctgggctctgggagcagcccgctgagtggactggagtggagcattggctgagagaccaggagggcactggagctgtcttgtccttgctggttttctggatggttcccagagggtttccatggggtaggaggatgggctcgcccaccagtgactttttctaagagctcccggcgtggtggaagaggggacaggtccctcacccacccacaatcctattctcgggctgagaaccctgcgtggggacagggctcgcn

SEQ ID NO: 21773 - DNA, 467 bp, Homo sapiens
  misc_feature (1)...(467): n = A,T,C or G
atttgccatctccgccgggctgcaggaattcggcacgagcctgcctcagttggcggaatggcggccacgggagccaatgcagagaaagctgaaagtcacaagtctggagcccggcactgtggtcataacagagcaggcagtggatacctgcttcaaggcagagtttgagcagattgtcctggggaagcgggtcatccggaaaacggaccttaacaagaagctggtgcaggagctgttgctgtgttctgcagagctgagcgagttcaccacagtggtggggaacaccatgtgcaccttggacttctatgaagggcaaggccgtctggatggggctctctgctcctacacggagaaggacaagcaggcgtatctggaggcagcctatgcagccggcgtccgcaatatcgagatggagtcctcggtgtttgccgccatgtgcagcgcctgcggnctccaagcggncgtgg

SEQ ID NO: 21774 - DNA, 470 bp, Homo sapiens
  misc_feature (1)...(470): n = A,T,C or G
nttcgaccatcgaccgcctgcggaattcgtatgaggcttattgattccgtctagctctgggtggggcccgagacctcaatgtcgccctatggtggacacgatgagattgcattggccgttttttctacgaggtgaggaatattaaccaggtaagaatgttaatgaaaagacaaaggtgagagggagtagggagagaaccgtggagaagtgtccgtcattctcacccaggaaagattgctctgatgaattatccatgtctgttatggacatgaggtgagagcggagggatgaatgtgtgttactgattctaattcaatctctattttttagataaaattgtgtcctacagatggcgaaagtggggagtcatttgttcattattcaggtaactagtaagatgtcttgttactttcagtccagggagtcttaaaattgggcactgtgtttgtttgtatggctgtaaagtaata

SEQ ID NO: 21775 - DNA, 486 bp, Homo sapiens
  misc_feature (1)...(486): n = A,T,C or G
ggaggannnnnnntttgcccgcctgcatgaattcggcacgagcccaagtacaacgtgagagataagaaggccctacttaggctcttagatcagcatgaccagcgaggattaggaggaattcttttagaagacatagaagaagcactgcccaattcccagaaagctgtcaaggctttgggggaccagatactatttgtaaatcgtcccgataagaagaaaatacttttcttcaatgataagagctgtcagttttctgtggatgaagaatttcagaaactgtggaggagtgtcactgtagattccatggacgaggagaaaattgaagaatatctgaagcgacagggtatttcttccatgcaggaatctggaccaaagaaagtggcccctattcagagaaggaaaaagcctgcttcacagaaaaagcgacgctttaagactcataacgaacacttggctggagtgctgaaggattactctgacattact

SEQ ID NO: 21776 - DNA, 493 bp, Homo sapiens
aaaaaaaaatttgacgccttaggaattcggtacgagttttagattaaggggtataccctagttttctaaacttcgatgagagttgtgcatttgctgaaggcttattacatgaagagtgacagtctaaattgtttgaaggaaagtaaaatgaacaacaaactagaatcagcaaagaggaccctgacaatatcagaaatgatctgctccttgagatcatagcactgttcctgatttgactccctccaccattatttattctccccacacttttagtttggtagggaaaaaaccccacagtttctgtattttggaacagtgactgtgcagccaaactccctatcgctgaaaggtttctggtggaaaataactcatagatcagaatccagcctccttgaaaaagtaaaggcctaggtagtaacttgctcaacattacactgccagtttttgatagaattaactaccttaatttgttagaattgagactaacacccga

SEQ ID NO: 21777 - DNA, 499 bp, Homo sapiens
  misc_feature (1)...(499): n = A,T,C or G
cattgacccgctttgcnccgcctgcaagaattcggcacgagttccttcttagccatggagagcatttgtgagtaattaatttatatatgaaataatggcttccattttatgcgagtatttgtaactgcatataccagtgcgtgtgcgtgtacctctgtcagcatgaaagtattccagtctttaatttcaaaaacttcaaattagcctcatgaagagaatttttccctgtgaaaagtaagaccacgaaaaaacaaactaaagacatgtgacttattcaatgaaagtgaaaaagaagctctaaaacagtgtcattgattaaaaagaatatctggaatgtagccccactctttgagtgggattcatttcttactgcttatgaactttcaatttagtagtcagaaaccatggatttattttactgcacaatgtgaagtttacattctattaacacttgagtagtctgagttagagactaggtacttctatgctttaccataan

SEQ ID NO: 21778 - DNA, 350 bp, Homo sapiens
atttagacccgcgcttgcaggatttcgccaccgcgctgcaggaattcggcacgagtcgcgatccaaccggcagaaggagtacaaatgcggggacctggtgttcgccaagatgaagggctacccacactggccggcccggattgacgagatgcctgaggctgccgtgaaatcaacagccaacaaataccaagtcttttttttcgggacccacgagacggcattcctgggccccaaagacctctgatgaaaaattgctgactgtagctttggaagtttagctctgagaaccgtagatgatttcagttctaggaaaataaaacccgttgattactaaaaaaaaaaaaaaaaaa

SEQ ID NO: 21779 - DNA, 504 bp, Homo sapiens
  misc_feature (1)...(504): n = A,T,C or G
agcgaggncccctttgaccgcctgcatatgacgccgaggcgatctcggctcactgcaacctctgcctcccgggttcaagcagttctgcctcagcctcccaagtagctgtgactaaaggtgcacgccgccatgcccagctaattttttgtattttagtagagacggggtttcaccgtgttgcccaggctgctctcagaactcctgagctcaggcagtccaccgcctcggcctaccgaagtgctaggattacagacgtaagccaccgagcctggtctagtttgcattttttttctatcagttttataagttaagaaataaaaggaattaatgttaaaaaaaaaaaaaaaaaaaaaaaacctggggggggggcccgggccccaattccccttatagggaggggataacaattcattggccggcgtttaacaacggcgggacgggaaaaaacancctcnctctttttttttttctctcccntnnnttnttttaaaaacaatttttttt

SEQ ID NO: 21780 - DNA, 477 bp, Homo sapiens
cgcggcccttgaattgaatcgcgctgcaggaattcggcacgagcggcagtacggctcggagggccgcttcacgttcacctcccacacgcccggtgaccatcaaatctgtctgcactccaattctaccaggatggctctcttcgctggtggcaaactgcgggtgcatctcgacatccaggttggggagcatgccaacaactaccctgagattgctgcaaaagataagctgacggagctacagctccgcgcccgccagttgcttgatcaggtggaacagattcagaaggagcaggattaccaaaggtatcgtgaagagcgcttccgactgacgagcgagagcaccaaccagagggtcctatggtggtccattgctcagactgtcatcctcatcctcactggcatctggcagatgcgtcacctcaagagcttctttgaggccaagaagctggtgtagtgccctctttgtatgaccctttc

SEQ ID NO: 21781 - DNA, 507 bp, Homo sapiens
  misc_feature (1)...(507): n = A,T,C or G
aaaaaaaaactagacccgcgctgcangantttcgacccgcgctgcaggaattcggcacgagctttgcttcactggaaagcccattctggcatctccccagccccccacatttttttgaatgattactcccacgcccaaaggttggctattccattcattagccatctcttctgtggtttgggaacaggctgctgtcaatcctatcttacaggcacaggagcgcataggaaagggtagatggggatggtccaatccacaactagggggacaggttttggtgaaaaggagctagggaacatgcgcttgatgcaaggtgaaaactgactccagacctgttcttcctgcagattctctttttttaaaaaaaactttggccaggcgtggtggctcacgcctgtaatcctagcactttgggaggccgaggcagcagatcacctgaggtcaggagtttgagaccagcctggccaacatggtgaaacccagtctctactaaaaatacanattagc

SEQ ID NO: 21782 - DNA, 443 bp, Homo sapiens
atagacatttgcaccgcctgcaggaattcggcacgagagaatttgactcttttcgaatatttagattggtgggatgtgctcttcttgctcttggagtcagagcttttgtttgcaaatacttgtgcatatttgctccatttcttactttacaacttgcgtacatgggattatacaaatattttcccaagagtgaaaagaagataaagacaacagtactaacagctgcacttctattgtcgggaattcctgccgaagtgataaatcgatcaatggatacctatagcaaaatgggcgaagtcttcacagatctctgtggctactttttcacttttatcttttgtcatgaactgcttgattattggggctctgaagtaccatgaagcctgtagaactgagaaggagaagcttacaaaaaaaaaaaaatcctcttctatatggcaggg

SEQ ID NO: 21783 - DNA, 398 bp, Homo sapiens
  misc_feature (1)...(398): n = A,T,C or G
gggatgggaggggnnnnnnnnnaattgatcgtctgaggacttcggcacgagcggagacaaagatggctgcgagagtcggcgccttcctcaagaatgcctgggacaaggagccagtgctggtcgtgtccttcgtcgtcgggggcctcgctgtaattctgcccccattgagcccctacttcaagtactccgtcatgatcaacaaggccacgccctacaactacccagtgcccgtccgtgatgatgggaacatgcccgacgtgcccagccacccccaggaccctcagggccccagcctggagtggctgaagaaactgtgagcacctccactgacagaggcggcccctcccacggctcccaataaaaatgtgaaaaccaaaaaaaaaaaaaaaaaaactggg

SEQ ID NO: 21784 - DNA, 491 bp, Homo sapiens
  misc_feature (1)...(491): n = A,T,C or G
cgcccccatagatcgccttcggattagcaccgcatgcaggaattcggcacgagaatattttaagtaccgaacatgctggttttcccacaaaggcacatttttagcataaagctttttgctagtttggtatcatctgcccataaaataagtcaatacttgagctattggaaaaataattgtgtatatttttatttgtttagaaaggttcagttagcattttctccatacgcatactacaattctgtacagccaacccttagtggccagttggatgcatgatttcgcgtttatttccctggaacgtcacgttgatgtgtttttgtcttttcactgcattactggagccatgtagtcaagcatcaagtttcatccacttctcaccattctcctaccaagggggtgagtgtgtgagagttgacggtgaggatgggggaacacggaggatatacatttagcttaattctaaatgtgtatctgcttttaaaaacttn

SEQ ID NO: 21785 - DNA, 494 bp, Homo sapiens
taagaaaaaatttgatcgccttaggaattcgtcacgagcacagacaagggcaacaaccccaagggctacctgccttcacactatgagagggtgcagatgctgctgtcggaccgtttccttggcttcttcatggtccctgcccagtcctcgtggaactacgacttcatgggtgttcggcatgaccccaacatgaaatatgagctacagctggcgaaccccaaagagttctaccaccaggtgcacaggccctctcacttactcaactttgctctcctgcaggagggggaggtttactctgcggatcgggaggacctgtatgcctgaccgttttcctggcttctgcttcagactaccgaggccgaaggctcagcccctccagacaggccgctgacattcagcagattggcctatttccctctgtctgtgcttgtgatggtgacctactgatggcttgtcatcctgaataaaatatagctgtcaatgatgtataaata

SEQ ID NO: 21786 - DNA, 471 bp, Homo sapiens
  misc_feature (1)...(471): n = A,T,C or G
nttgacgcctgagattcgcacgatccagtcttctccaattgctgtcatggcgtcagttcaccagactcattgattttgttatgcttgttaagcaaaggaatgtcacatacctctgtccagctttttatgaaatacatttcgcctattgcgactttttccatttaccctgaagcctagaaagtaggtggaactcacacaaatggcattccagagtctgccatactccgtctcctgcagctgctggataatacagaggaacttcaacttctacagggaacagtggatggccaggctgcagtataactgaagcatgccttggagagagcagacactgtgggggccagggccatctccctttaatgtgttcatgttaaaacctatttgagtgtaagacttgccctttctaacaataaatgctctgtgtttaagttctgcaggtctcctggctggctggctggctctcagtctgtn

SEQ ID NO: 21787 - DNA, 471 bp, Homo sapiens
  misc_feature (1)...(471): n = A,T,C or G
ctcgcttagcancgcgctgcaggaantcggcacgaggagagattcacatggaaaaggaatcccaaacgccattatctccgtagaaggcattaaccatgacatccgaacagggaggagaggctccttctctgcaaactgttcccatgatcctgtcgtgccaacaaaagatcccattccacctgccaggaagcagactttgggacattaggatgaggcgaggctggggttcagacctggcccatgtatccttcattgccaggctccctagcagtgggcctggcataaaagaccaaatatgtaaatgggggaaatgtgtctaaaatgccacaaaatagtagattgctgtgtaatgccataaattgcatttttcccatctagttactgatttctttgctcaataatattttctgaacattcctaccatttgtcactgatcttatagccatgaaccatgaggcttcacactgaatn

SEQ ID NO: 21788 - DNA, 424 bp, Homo sapiens
  misc_feature (1)...(424): n = A,T,C or G
gcacgagcccagcaagtcctctggcaagccggaggacgcaacccccaagaccagcggacagcgccagaaggaatcgtcgaaacagcctgccagcagcgcctcantgcccgagctggtcccctgccattccgggacctctctggagtacacttcggagtccaccaccgagatcacctgcagctggccacaccacaggcccccgtgcctgcagcactactggtgcctgaaacacctggcctgctaggaggctccaataaagctaacccggaccagaanaaaaaaaaataaaaaaaaaaaaaaataaatatcctggggggggggccgggcccccaatcccccttatgggggggggattaaaaattcgggggcgggggttttaaacgggggggggggggggaaannnnnnnnnnnnnnttngncnttt

SEQ ID NO: 21789 - DNA, 485 bp, Homo sapiens
  misc_feature (1)...(485): n = A,T,C or G
cattgaccgccttcggaatagcaccgcctgcaggaattcggcacgagggtagaaggtggccacatatttagctcatcaccgtacgttccctagaaagtagctccattcctttaaaaagatttttatttgacagccttttctgtgtgaaaagaacctgtccaggtgtacttcatttgacacttaaccctttatggggtccatgaacagcaagagaaaaatctttttcattcacctctttttaacttacattttaagctcaggagaacacgtgcaggtttgttatatagataaattcatgtcacagatgactttgccacccgggtactaagcctaatatccaatagatattttttctgatcttattactcctcccatcctctaccctcaagtaggccccagtgtctgttgtttccctctttatatacatacgtgctcatcacttataagtgagaacatgcactatttgagtgtctgcttctgcattn

SEQ ID NO: 21790 - DNA, 473 bp, Homo sapiens
  misc_feature (1)...(473): n = A,T,C or G
nattgcctgcgctgcacgaattcggcacgagctgggtgatgtctgtctgctgccaggatggagcagaggagcgccacacatggaggaaagcccctgtaacgttacctaccttaaactccactcatcaaatctgagaaaagtatccactggtccccagggtttcagtcatgcttttgggggtcattgggtattagagaagtaagtatcttttctgagagaggaggagtcaccccccctactggggattcctctgggctttattcactcccagccctggccctgacctttgtgggcctccctaatgcccagggcatggatggcttcagaggagtttttgaatcgaagcccagggtccttgttgatgtttcttctccgagccacacttggaggaaagttgcangtgggttgggcagggagcnaacatggntctgctttgctggttggcttcctagntaaggctctttataaagagg

SEQ ID NO: 21791 - DNA, 497 bp, Homo sapiens
  misc_feature (1)...(497): n = A,T,C or G
ggggagggaggggnttgnnnnnnaattgcaccgtctgcaggacttcggcacgaggcaaaaccaacgcctggctcggagcagcagcctctgaggtgtccctggccagtgtccttccacctgtccacaagcatggggaacatcttcgccaacctcttcaagggcctttttggcaaaaaagaaatgcgcatcctcatggtgggcctggatgctgcagggaagaccacgatcctctacaagcttaagctgggtgagatcgtgaccaccattcccaccataggcttcaacgtggaaaccgtggagtacaagaacatcagcttcactgtgtgggacgtgggtggccaggacaagatccggcccctgtggcgccactacttccagaacacacaaggcctgatcttcgtggtggacagcaatgacagagagcgtgtgaacgaggcccgtgaggagctcatgaggatgctggccgaggacgaagctccggatgctgtccttcctgt

SEQ ID NO: 21792 - DNA, 441 bp, Homo sapiens
atagaccgctctgaagcattcggcacgagcttaagctacattcctccagcccttagagacccctcctctcctctagggccccccaggctcttctcccttccttccagttccttgtggcttcctcttcccctcttccttctccaagtctgtcattaccacatccctcattagggttgaaccatggacccgtagtagctggagttattggggcccagaagccgcaatatgacatttggggcaacacagtgaacgtggccagccgcatggagagtacaggagtccttggcaaaatccaagtgagggaaccacattggaggcatagggggagggggactaagaatagggccacctccatattccctcgcccccctccaattgtaggtgactgaggagacagcatgggccctacagtccctgggctacacctgctacagccggggt

SEQ ID NO: 21793 - DNA, 484 bp, Homo sapiens
  misc_feature (1)...(484): n = A,T,C or G
attgcccgcctgcangaatttggcacgacgtgagatggaaagcatcccagagctgcctggcttcccttgagggccgaaggaagggcacacacctcgcagagcatggaaacatgttcacatgagccacctttcactcttacccttgctcaggaacaaggggaattttttagagcacccaggatgcttgatccaagagcagatggtagacaagggggagcataaagaggggacccatcacgcactggaagggctcacagagagcaaggacggcctgtgacgacatgccctggtgcttttggttgcaagcaacagaaaccaactctaggtaaattttaaagggagcagaatatacactaataatacgaggcatctcataggatcccaggctaagagctgagccagattagcacagatagagcctgcagtgtgtgttgctgtccctgtctctagttgatgactcaacccttcactttcttgcaccagc

SEQ ID NO: 21794 - DNA, 443 bp, Homo sapiens
  misc_feature (1)...(443): n = A,T,C or G
attagaaacttgccccccctgcaggaattcggcacgaggaaaaatcatcaggtagtttgcccagatttgccagagccctaaataaaatggcaaaacgatctccctgcctgcttctcctccccacccccacttacatgcacaccgtagatcaagaaatgctttttgggcaattagactttatcttctaaatttttgcatagaatggctaaacatgatcttttgcctcactttgtaattcctacaccttccttgtaagcttcaccttttgcttacctaatattttatttaaacatggttttttttgttgttgctggtaaattcctgcatgatgcatcatgtgcaagggaaacttaatatacttttacacccttaacctttataaagtgactagcttttcccttaacataggaatttttaacctggagcccagatttttgagagtn

SEQ ID NO: 21795 - DNA, 468 bp, Homo sapiens
  misc_feature (1)...(468): n = A,T,C or G
gtggaagnaaaattgacctgatccgcgctgcaggaattcggcacgagattggcttctcctgggaatgaagacggccagcagaggtgctaattgtgacaactgagtgggagttgtgaaacaggatttaaagatggggacctcttcatgtcctaccggagtatgttccaggatgtaagagatgctgttgactgggttcattacaagggctcccttaaggaaaagacagttgaaaatcttgagaagtatgtagtcaaagatggaaaactgcctttgcttctgagccggatgaaggaagtagggaaagtatttcttgctaccaacagtgactataaatatacagataaaattatgacttacctgtttgacttcccacatggccccaagcctgggagctcccatcgaccatggcagtcctactttgacttgatcttggtggatgcacggaaaccactcttttttggagaaggc

SEQ ID NO: 21796 - DNA, 466 bp, Homo sapiens
  misc_feature (1)...(466): n = A,T,C or G
agctggtannnnaaatgatttcgtgcgcgaattccgcacgaggaacacccgttctcctgaatgcagtgagtaattgggaatcacaaggaacattctggcactcaactgtgcccatgttagttttcatgagttttccccactctgaagctgtaacccagaaggcacatccattcacatttttaccgcactgtggattcatagtgtggggccctgttattccaataccctccttaaggacatgtgaagcatttggcccagttggctcccagggaacattttaatttaatgtagtgaagaaagaccattctagatcagagctacaagttcactttctgtctctgagaatctccatctagggcagtagttcttatgatgtgtaggctccctcctagggcctactcaatcagagcctgtggggactgggccaggaatatgtattctggcaaaaactcttcaggtcagttct

SEQ ID NO: 21797 - DNA, 493 bp, Homo sapiens
  misc_feature (1)...(493): n = A,T,C or G
catcgccccccctcnnnannatagacccgcgctgcaggaattcggcacgaggtgagatggaaagcatcccagagctgcctggcttcccttgagggccgaaggaagggcacacacctcgcagtgcatggaaacatgttcacatgagccacctttcactcttacccttgctcaggaacaaggggaattttttagagcacccaggatgcttgatccaagagcagatggtagacaagggggagcataaagaggggacccatcaggcactggaagggctcacagagagcaaggacggcctgtgacgacatgccctggtgcttttggttgcaagcaacagaaaccaactctaggtaaattttaaagggagcagaatatacactaataatacgaggcatctcataggatcccaggctaagagctgagccagattagcacagatagagcctgcagtgtgtgttgctgtccctgtctctagttgatgactcaacccttcact

SEQ ID NO: 21798 - DNA, 480 bp, Homo sapiens
  misc_feature (1)...(480): n = A,T,C or G
naagcccgcctgcangatttcggcacgatgaagcccctgtggtttgacgtatatgacgcctttcccccgctgagggagcccgtcttccaaaggcctcgagtgcgatatggcaaagccaaagctcccatccaagacatctggtaccacgaggatcggattagagcgtttgtggagaagtacactgagctacagaaacttggagaaacagatgaagagaagttatttgtggaaacagggaaggctttattggcagaaggtgtcattttaagacgagtaggcgaagcaaggactcaacacggaggtagtcacgtttcccggaaatccgaacacttgagtgtcagaccacagactgcgttggaagaaaacgagactcagaaagaagttccacaggaccagcatttggaggcacctgcagaccagtcgaaaggtctcttgcctccctgaaggacctgtatactgtgtatgctggcattcacactc

SEQ ID NO: 21799 - DNA, 492 bp, Homo sapiens
  misc_feature (1)...(492): n = A,T,C or G
accttagggtcccttgggaaacaaccccaattgacccgcatgcacgaattccgcacgagatttcttttaccattgaccattattatagggacccatgaagtaaatgtcacaatcatcttactagctctctctctctcagcaaaataaaactgtgatgtgtcttctttgtaaaagtttaggtataaaatgctatgcaactttttctttatagtaagagctttattttctttaataatatagcccaacttatatgttttaatctcccttgtccctcagaataagcagaaaatataactgcagctgtatgtcgtagacacaagaattgaaactgtgcagtcagtagagctgaacttagctatgaattaatttaaattaattctaaagtgactctggtttccattttagtctattagctagagggttttggctgttgctttttttaaagntaggtccacacagcgaagggaaaagagtctgtgaaggtgatcagtg

SEQ ID NO: 21800 - DNA, 455 bp, Homo sapiens
  misc_feature (1)...(455): n = A,T,C or G
agtgggcatgactggctgacgtgggcctcgtgcgggtcccgctgtacacccagaaggaccgagtcggaggcttccccaacttcctgagcaacgccttcgtgagcacggctaagtgccagctcctctttgccctcaaggtgctcaacatgatgcccgaggagaagctggttgaggccctggctgcagccaccgagaagcagaagaaggccctggagaagttgctcccggcctcctcttgagggctgcctgagctggtggcaccctcccctgggccggaagactgggaattcctgctaagtgtggcttctagagtgtttgtgtgtaccccgcttctgactgcctagggcgagtgggcatcctgtcatcatctccactgtcccaagcagtcactangtggcggccgggccagctggaacccagcccatcctctcaggcagagcagggtggtccgggca

SEQ ID NO: 21801 - DNA, 485 bp, Homo sapiens
catcgacccgcttgtgcgccgcgctgcaggaattcggcacgagctttctgcgggctgtgaccaagctaggcttcaagattgtctccaaggacctgaccaacagccatttcttcttgtttgatttccaaaagactgggccccctctggtagggcccaaggctcagctttcaggcctgcagcttcagccatgtctctacaagcgcaggtgacctctggatcttccttgaaaggggaggcagatctcaaactccaggctcagaactgtgaagactgtttccagcctggctgtgagccaagacctggttcctggtggaccctgaggacaaagtgtgataaaacctctggctcagacttgctctactgaaggcttcttggttataagatgcataaagtcactggggctagctaaacaataaagagtttattgtgagagaaaaaaaaaaaaaaaaaaaaactcgggggggggcccggcccaatttgcctta

SEQ ID NO: 21802 - DNA, 460 bp, Homo sapiens
  misc_feature (1)...(460): n = A,T,C or G
agcgcncattgaattgacccgcgctgcaggaattcggcacgagctgcaaaggaagattctcatgcacagattgaaaccctctgagatatcaaccccctaggagcatggaggtgatgtgctgtgacacgagtggtggaatgcttcactggagaaggggatgtgtcctgtgctgtccctgtgctcgccacccacactcccctcccagaggaggcacggtgcccagcctgcaaactcaccccagtcacccagccagcggagaatgtcatacaggtgcttctccttcatcatagcatctttggagaaggaggcaattttttccagcaagatgaatctcttcttgccctttggatctctctgctgagatttggcattttcttttaaatcatatcctaattcttcctggaagcggntgatgacacaattgacattgtccaaaatgtctgagagctgggtagaaata

SEQ ID NO: 21803 - DNA, 474 bp, Homo sapiens
  misc_feature (1)...(474): n = A,T,C or G
agggcnnnttttnaatagaatagcagtggcattcggcacgaganaagaatggcccggacattaactggactgatcaacgtgggcagtatagattgccaacagtatcattctttttgtgcccaggaaaacgttcaaagatacctgagataagattttttcccccaaaatcaaataaagcttatcagtatcacagttacaatggttggaatagggatgcttattccctgagaatctggggtctaggatttttacctcaagtatccacagatctaacacctcagactttcagtgaaaaagttctacaagggaaaaatcattgggtgattgatttctatgctccttggtgtggaccttgccagaattttgctccagaatttgagctcttggctaggatgattaaaggaaaagtgaaagctggaaaagtagactgtcaggcttatgctcagacatgccagaaagctgggatcaaggccc

SEQ ID NO: 21804 - DNA, 447 bp, Homo sapiens
attagacccgctctgcaggacttcggcacgagccccgtttcccctcccccttcccttctccggttgccttcccgggccccttacactccacagtcccggtcccgccatgtcccagaaacaagaagaagagaaccctgcggaggagaccggcgaggagaagcaggacacgcaggagaaagaaggtattctgcctgagagagctgaagaggcaaagctaaaggccaaatacccaagcctaggacaaaagcctggaggctccgacttcctcatgaagagactccagaaaggggtatggggcatagtctcttaccctctttctttggagctaaaggaggttcttcgaatgaagtctgtagaggttctactggatccttttctggaggttttgttgttgaacagaagtagaggcgaatttgaaatttgaaaaaaaaaaaaaaaaaaaactcg

SEQ ID NO: 21805 - DNA, 471 bp, Homo sapiens
  misc_feature (1)...(471): n = A,T,C or G
aactggatanacctgagaanttccgtagagacctncggagaaacncnagaagaannctccacatctgctctcttatctcgacatttgcttctatctttggttcgagcttttaaggctgcagagttatataaatgcctttcgaaacgagaaatcttcattgttttaagcgttgcagcatcaagcatcactgggggtccaagttcaaatacatttcgaaggaattcatttgactgcaagtggtactgcatccctgatccaagaacctccttaaaggtgtcataggtgtgtttttttacccagcaatcaatatacatgcgttcaggaccaaatttaatggtttctgttggaaaatcccgttcctccactgccctcaggacatctctgaaaactgaccgctgctttctcttgtccactttggcccggtgtttatttccatctgttgccaaggccctaagcatctgcgtcaaggan

SEQ ID NO: 21806 - DNA, 468 bp, Homo sapiens
  misc_feature (1)...(468): n = A,T,C or G
natttgcccctggctgcacgaattcggcacgagcaggggccaactagggccaggtggaaggggagctgagaagccaacccctagcccaggggtgctgtgggaactgggatccaatttgtagcttcctgcctggcttcagagagcccagcaaccttctaggcctgctttccagacttctgagatagcctgggatgagcaatcctgttacagtacatctggaccttccctacctgggctctggggaggctgtgggcctggagagggaaaaggaggngaggtggtctgcaccacctgggaagatagcacaaggcctaatgaggtcaccctgactccccaccccagcatttcattcataccagataatagctgcattactgccaactgaccttataaccctctgcaccttcaaaaagattcatggnttttaattgctgcttttaataacatttgttaaagttataaaaaaaa

SEQ ID NO: 21807 - DNA, 472 bp, Homo sapiens
  misc_feature (1)...(472): n = A,T,C or G
ntttgacnctctcccccgcgctgcaggaattcggcacgagctggacaaatgacgtctgtctctttgggcctgacgctgcgccatataaagtattattttgggactttacacacttggcctaactatcttgtggatagtgggctgagacaatctggaatagagaacgttcacacttcgctcctttaaagaagcgaccccagatctgcaagggagtagattctgctatcttggcctcacagcccttcctgttgattacaaagcccgtggaagaaaacagaacacaccctcctcagttccgtctaaatgtgtttcttctgcttcaattacaccagttctggggcaaagacactgatgaaacaacacccatacctgaaaagaataaatgtgtgactttcaaatcccctttcgcagtgaaagaaacagcaaacacttaagattcagcatctgttctccagttgcactgaggaatgcn

SEQ ID NO: 21808 - DNA, 502 bp, Homo sapiens
  misc_feature (1)...(502): n = A,T,C or G
ganaaaatttgatngcctnaattgatcgccttaggattcggcacgagcaaaaccccgtctctactaaaaaatacagaaattagctgggtgtggtggcagacagctgtaatctcagctgctcgggaggctgaggcacaagaatcgcttgagccagggaggtggaggttgcagtgagctgagatcacatcattgcactccagcctgggcaacgggcgagactctgtctcaaaaaaaagaaagaaagaaaaggtacatgtatatatttgtcctgcattatgttttttacttgatataaatgtatttttactgtgatagtccaagtgccctggggggcaggtgtgctctatgtggttcttcttccattggagagctggcgtagagatctgcagtgttcacaaggatgttggtttggagatgtctgctgctaggacctggggtgtgtgactcagtccatatgagagggacatctgggtggaggagtaaattcctgtgctctgaaatg

SEQ ID NO: 21809 - DNA, 466 bp, Homo sapiens
  misc_feature (1)...(466): n = A,T,C or G
attgaccctcgctgcacgaattcggcacgaggcagtctgtgcctctgagcagaccgtgagaactcaggggacgagtggctaagagcatggcctctcccagaacccacccagggtggtgtggtgggggcaacaggggccagactcctctagagggagggtggctctggggccctggaaaacgtgagagactgccctgagctggtccagtgggccagcactttataccaactcagcatttaagggaagtatcttagattgcctccatctcaatgtgaatgcaccaggctgagggttccctagcgccttgagtcaaggccacttttcagcccatcgagccctgagttctacttggtgtttgttctctggagctgattgcacttgagctctgtggtgggcaggcgcactttagcctaaagttgtgccccagggcaccccctcctctctgctccttgccagcttcattcan

SEQ ID NO: 21810 - DNA, 466 bp, Homo sapiens
  misc_feature (1)...(466): n = A,T,C or G
nttgggaccgccntgcgagaaaaaactttgccccgcgctgcaggcaaagttgcactctcacagctcaccagcctggagatgaaagatgatttcctccatggactgcagatgctgaaatctctccaaggcacacatgttgtcacgctgcttggctattgtgaggatgacaacactatgcttactgaatatcaccctctaggttccttgagtaacctggaagaaacactaaacctttcaaagtaccaaaatgtgaacacgtggcagcacaggctggagctggccatggactatgtcagcatcattaattacctgcaccacagccctgtgggcacacgggtcatgtgcgactccaacgacctgccgaagacactgtcccagtatctgctaacaagcaacttcagcattttggcaaatgacttggacgccttacccctggtgaaccacagctccgggatgctggtgaagn

SEQ ID NO: 21811 - DNA, 447 bp, Homo sapiens
  misc_feature (1)...(447): n = A,T,C or G
atagactcgtctccgctgcaggattcggcacgagggaacactacgttgacctgaaggaccgtccattctttgccggcctggtgaaatacatgcactcagggccggtagttgccatggtctgggaggggctgaatgtggtgaagacgggccgagtcatgctcggggagaccaaccctgcagactccaagcctgggaccatccgtggagacttctgcatacaagttggcaggaacattatacatggcagtgattctgtggagagtgcagagaaggagatcggcttgtggtttcaccctgaggaactggtagattacacgagctgtgctcagaactggatctatgaatgacaggagggcagaccacattgcttttcacatccatttcccctccttcccatgggcagaggaccaggctgtaggaaatctagttatttacaggaacttcatn

SEQ ID NO: 21812 - DNA, 488 bp, Homo sapiens
gggcgggcacccctttgcccggctgcatagtctgctgctcttgcagcagcctggtcatcatctgcttgtgggagtgggaaatgggtattttagacccaacacaggttctaaatttaaaacaaataataattggaacaaataaaggttcttgtacccagagtgattctacatgggaaaaacaaaccagcttttttcagagagtgaccgaataggaagaagggattcagaaatatgatgtagtagaacatgccctgcaggaagaaaatgttttctctcctgcgtatgttaagaggaaatcagtttaaaatgcctgctaatcaaatgtcgactcagctaaccatatgtccaggttgctgcagagtttctttcaaatctgagtgttgcctgctgaactcggaggggagtttggagaaattttagacagcagctctgtgttctttttttgccgcagccaataagataatagcagaattagccaatcctaaaac

SEQ ID NO: 21813 - DNA, 430 bp, Homo sapiens
  misc_feature (1)...(430): n = A,T,C or G
aggggnnnnnnnnaagatgnnnnnnnnaattgannnnctactgcaccgcctgcacgttttgagattttttagtcaacacataatggaaacttctttcttctaaaagttgccagtgccacttttaagaagtgaatcactatatgtgatgtaaaagttattacactaaacaggataaacttttgactccccttttgttcatttgtggattaagtggtataatacttaattttggcatttgactcttaagattatgtaacctagctactttgggatggtcttagaatatttttctgataacttgttccttttcctgactcctccttgcaaacaaaatgatagttgacactttatcctgatttttttcttctttttggtttatgtctattctaattaaatatgtataaataaagttaaaaaaaaaaaaaaaaaa

SEQ ID NO: 21814 - DNA, 457 bp, Homo sapiens
  misc_feature (1)...(457): n = A,T,C or G
atttgcccggtctgangacttcggcacgagatcagcaacaacagccaacagagcaatgagcagacagacccagagccagaggaaaatgaaacaaagaaagaatcaagtgttcccatgtgccaaggggaactgaggcattgtaagaccggtcactacactttaattcatgaccatagcaaggctgaatttgccctagacttaattctgtactgtggctgtgaaggctgggagccagaatatggcggttttacttcttacattgccaaaggtgaagatgaagagctgctaacagtgaatccagaaagcaattctttggcattggtctacagagacagagagactctgaaatttgtcaagcatattaaccaccgaagcctggaacaaaagaaaaccttcccaaacagaacaggtttctgggacttttcattcatctattatgaatgacagcactgggcan

SEQ ID NO: 21815 - DNA, 514 bp, Homo sapiens
  misc_feature (1)...(514): n = A,T,C or G
gtgcgggannnnaattgatttgactcgcctgcangaattcggcacgaggcattcctcaggccttatctctctggttctttctgctacatttgacaccttgggatgactctcaccttctggaatctctctactaccttggtttcagaagagtgaaccctctggattatcacatgaagctacttcctgtgagcagcccagggatggccagtcacttgtgacctactttcagagctggcagttctgacttctagaacaaactcggaacaagcccatctacagctggttgactgagtttcctttgggctcctggcaccagaaagaattgctcactggaaggatcataggtggcactcatgtctcactggcccactcaggcggagtgcggggactctcgcctataatcccagaattttgagaggccgaggtgggcagctcacttgagcccagattgtcgagaccagcctggcaacatggcgaaacccccgctctacaaaaatacaaaatatggcccggg

SEQ ID NO: 21816 - DNA, 480 bp, Homo sapiens
ctttcgcccgcgctgcaggaattcggtacgagcggaggaggaggatggaggcggtggtgttcgtcttctctctcctcgattgttgcgcgctcatcttcctctcggtctacttcgccagttgcagtggctgacacctgtccccagtactttgggaggccgaggagggagaatcacttgagcccagcggttcgagaccagctctggtaacatagggagacttcctctctacaaaaataaaacgaggaaaaaaaaaagaaacatgtttcaggtctgtgtctgtgtaatacaaagatgactgcagcctacagtaagaaatccagagactgaaggctatagctttagggatctgatatggatcgcagagtattagtataacatcagctgacattttattgagtgcctactttgcatgtggcttacatgttatttcatctaattctctacaacaacttcgtgagtgggtaattccagaattgattg

SEQ ID NO: 21817 - DNA, 465 bp, Homo sapiens
  misc_feature (1)...(465): n = A,T,C or G
ntttgcgcgcctgcagaattcggcacgagacatagtttaacttctcagggaaatagtgcgattggcctagcctgagtcacatgactcccctacgcgcatggccccccaccactccctactgctaacagctgagacaagggacatggtgaaacatctggggaagggaggggagatgactttggaagtgggatatctaataagggtgggttgctgtttaacctgtggaaatggggaaggggtgttcttgacctgagcttctcacctggggatgcccatcagaaccatccagaagccacacctaaccaactagagtcttctaggatggtgcctggatatgtgtattttgagaaagcacaaggggatgattttgcttacaaactgctgttccaagagaaaccgatggcacagaattaccaaatctgacttgattgtagtagaagaggaactcattcactgaacaaatat

SEQ ID NO: 21818 - DNA, 451 bp, Homo sapiens
  misc_feature (1)...(451): n = A,T,C or G
aattgacnctgcgctgcacgaattcggcacgagcaccgctggggaggcacagagctcgccagcgtccctggagtcccctcaggaatggaaagtggagtgcccttgtctggtagcaccatgtgggagggacccagctgggcgcagcgccctgtggccttttagatccagacctccctgccggatgccccgaggcgggaggccggctgtgctgcaggaacccatctccagatgccaaaggacttgaggggcagctgacaatcgctgtgtcccggcagatccgcagctcgaaaaagaacaagccacagaaacgggctcgctcgtgccaggacacagcagtgtctttcaaaaaatcaaaaccagaagttttatcagcagcaggaaggatgtgggactctgtccaagttcaccgtcaccatcaagccactggctgtggaaggagtttgtccaacag

SEQ ID NO: 21819 - DNA, 513 bp, Homo sapiens
  misc_feature (1)...(513): n = A,T,C or G
aggggggnnnnnnattgcctcggctgcacgaattcggcacgaggggacacggactcgacgggaaggggaacttggcatttatggacagatcctcatccttcttgctgtagtcaattacacgcacgttaaccgtgcagccgccctgctgtattttaggcggttgttggcactcctagttgggcccttccctggcccctcacagcagggcctgcctcctgtggacgcttgtgtgctgccctggcaccggccactgtgttttgcataaaggagaggctccaaagatgttggccaaaggaatgaagccttgagagtccaggctttctatttctgagacactctactcaaggacttcccagatgcanagcttcatctttgagcanatacaaatatggagagggaacattaactntctgaagaagagaaggacatcttttcaccttttatattgagtaaacaccatggcctaagttttgtgaaagcactttatacattcactaagcgggaggatacagg

SEQ ID NO: 21820 - DNA, 446 bp, Homo sapiens
  misc_feature (1)...(446): n = A,T,C or G
attgccttgtcccggctgcaggaattcggcacgaggcatgttctcccaggagaaagccatgttcagttcgagcgccaagatcgtgaagcccaatggcgagaagccggacgagttcgagtccggcatctcccaggctcttctggagctggagatgaactcggacctcaaggctcagctcacggagctgaatattacggcagctaaggaaattgaagttggtggtggtcggaaagctatcataatctttgttcccgttcctcaactgaaatctttccagaaaatccaagtccggctagtacgcgaattggagaaaaagttcagtgggaagcatgtcgtctttatcgctcagaggagaattctgcctaagccaactcgaaaaagccgtacaaaaaataagcaaaagcgttccaggagccgtactctgacagctgtgcacgatgccatcn

SEQ ID NO: 21821 - DNA, 495 bp, Homo sapiens
  misc_feature (1)...(495): n = A,T,C or G
cgcatttgcnccggcgctgcaggaattcngtatcccccgcgctgcaggaattcggcacgagcagcagtccacaaagcattttcatttctaatggcccatgggagccaggcccagaaagcaggaatggcttgcttaagacttgcccaagtcccagagcacctcacctcccgaagccaccatccccaccctgtcttccacagccgcctgaaagccacaatgagaatgatgcacactgaggccttgtgtcctttaatcactgcatttcattttgattttggataataaacctgggctcagcctgagcctctgcttctaaaaaaaaaaaaaaaaaaaaaaaaaaaaaaaaaaaaaaaaaaaaaaaaaaaaaaaaaaannncgggggggggggcccggccccccaccccccctaaaggggggggaaaaaaaaatcggggggcggggtttaaaaagggggggggggggggagnnnnnnnnnnnnnnntnnnnnnttnnntt

SEQ ID NO: 21822 - DNA, 482 bp, Homo sapiens
catttcgcccgcgctgcaggaattcggtacgaggaaaagcagctaacatttcttgaggctctaccacatagcaggcactgtcacagagtaatggcattaatccccataataatcctgtgaaggtgatattctcatcccatcttagacatgaggatattggaactcagagaggtggctattgcattgcgcagaacgctacagagcccatgctcttcccagagcagcacccacaaaagcaagcattgattttgtgctcagtgtgtgccaagcactgtgcagagggtacacagttcctgccaggttaacaccctcccttcaggcctcccaaaggcataggcttgcaaagagcagaaggtgtgaaatcacactcttcctctgggcatcctggatccctgaattatccccccccccatgaagtacttcaagggccaagctgcccctttccctcctctccgcccatgaaaatgcctccaaactgagat

SEQ ID NO: 21823 - DNA, 459 bp, Homo sapiens
aatttgacccgctctgcaggaattcggcacgagaaaagcaggcgccgccaccgggcgcatcgtggcggtcattggcgcagtggtggacgtccagtttgatgagggactaccaccaattctaaatgccctggaagtgcaaggcagggagaccagactggttttggaggtggcccagcatttgggtgagagcacagtaaggactattgctatggatggtacagaaggcttggttagaggccagaaagtactggattctggtgcaccaatcaaaattcctgttggtcctgagactttgggcagaatcatgaatgtcattgaagaagctgtggcaaaagctgataagctggctgaagagcattcatcgtgaggggtctttgtcctctgtactggctctctccttgcccctaacccaaaaagcttcatttttctgtgtaggctgcacaagagccttgattgaag

SEQ ID NO: 21824 - DNA, 477 bp, Homo sapiens
  misc_feature (1)...(477): n = A,T,C or G
aggatgtccggnnnttnnnnnnnaactgaccactcctgcacgaattcggcacgagcttctacaacgtgacagagaggtgtcacaccttcactttctctcatgctaccttttgtgggcctgtccggccctacttcagtctgagttactcgggagggaaaagtgcagctcctctgatcatctgccccatgagtgggatagatgggttttctggccatgttgggaatcatggtcattccatggagacctccccttgaggaggtgaattcaggccaaaagggctgttggctgtaatcctacgccaggcacaaggcatcttgttgccttgccacgtcctgtcacagctgggtatccttaccatgttccacgcccttgcagtgggagacaggatgtccatgttctctaccatccttttccttcccatgcagattgtgaaatgtaatgagatgtatcaagatatcctagaaataaaaaccagat

SEQ ID NO: 21825 - DNA, 509 bp, Homo sapiens
  misc_feature (1)...(509): n = A,T,C or G
agcngnannnnnnnattcgctcggctgcaggaattcggcacgagctgaggtcaagccggcggtcaccacagccagaaagatccagacaagaacgttttctttgaaagagttgaaggagaaagcacgccccaacttttcgaatcaggcagaccatccagtcttggctggcactggtttctggccggccctgccagtcaggggagaagagactacagatttgagaaagcaagcagagacagccccagatggcccggactctggggagtacttgctgcatttgatcctctacaactggtgttgctcccgttatgcggacagaagacagccccagggaacaaatgctaggaaatggcagggtgagaaaactgaggcatggagaggttacaatataacttagatctcccagctggcaagtaatggtttaagccaggagcctacacacttnctcctacttnctnctatgggggctggggatctgncgactcctagacatncagctttaagggcct

SEQ ID NO: 21826 - DNA, 476 bp, Homo sapiens
  misc_feature (1)...(476): n = A,T,C or G
nggggnnttttaaactgacatcgcagcgtatgtacccttacacttggtattgaaactgtgggaggtgtcatgaccaaactgattccaaggaacacagtggtgcctaccaagaagtctcagatcttttctacagcttctgataatcaaccaactgttacaatcaaggtctatgaaggtgaaagacccctgacaaaagacaatcatcttctgggtacatttgatctgactggaattcctcctgctcctcgtggggtcccacagattgaagtcacctttgagatagatgtgaatggtattcttcgagtgacagctgaagacaagggtacagggaacaaaaataagatcacaatcaccaatgaccagaatcgcctgacacctgaagaaatcgaaaggatggttaatgatgctgagaagtttgctgaggaagacaaaaagctcaaggagcgcattgatactagaaatgagttngaaagctn

SEQ ID NO: 21827 - DNA, 506 bp, Homo sapiens
  misc_feature (1)...(506): n = A,T,C or G
agagtctcccagtgtgccatacagagtgcttacagattancgtancgagaaaacaaatcgngatgtatatatatatgaatactgtatagccacaaaaaaggagtgaattaatggcattcgcagcaacctggatgagattgtagactattattctaagtgaagtaacccaggtatggaaagccaaacattgcatgttctcactcataattgggagctaagctatgaggacgcaaaggcataagaataatataatggactttggagactgatagaatttggctgtgtccccacccaaatctcatcttgaattcccatatgttgtgggaaggacccagcaggaggtaactgaatcacggggcaggtctttcctgtactgttctcatgatagtatatctcatgagatttgatggttattatatgggagaagttttcctgcacaagctttcattctctgtttgcctgctgccatccacataagatgtgacttgctcttccttgccttccac

SEQ ID NO: 21828 - DNA, 475 bp, Homo sapiens
  misc_feature (1)...(475): n = A,T,C or G
cgcgggagnttttnnaactgantggctgtcgcaattcggcacgagatctaagttaatttaaagttgtttgtgcctttttatttttgtttttaatgctttgatatttcaatgttagcctcaatttctgaacaccataggtagaatgtaaagcttgtctgatcgttcaaagcatgaaatggatacttatatggaaattctgctcagatagaatgacagtccgtcaaaacagattgtttgcaaaggggaggcatcagtgtccttggcaggctgatttctaggtaggaaatgtggtagcctcacttttaatgaacaaatggcctttattaaaaactgagtgactctatatagctgatcagttttttcaccctgaaagcatttgttctactttgatatgactggttttcggacaagttaatttgtgagagtgtgaccaaaagtacatggttgcactttctaggtgaaaataagggatatt

SEQ ID NO: 21829 - DNA, 462 bp, Homo sapiens
  misc_feature (1)...(462): n = A,T,C or G
aatttgccccgctctgcaggaattcggcacgagcccatgtacagctatgtatattcaggggtgttctccgtctggtacccgctgtgggcatctatgtgtgtgtgaacctccccttccccatgccctgcatgacctgtgatgctgcagacaccaccatcctgtgtgcaggtgtgtgttggggggcacggaggggcatgttccatgtcctgttgcaccctccaccctgtgacccatgtactcggttgtaggaagtaaagagaactgagcacaaaanaaaaaaaaaaaaaaaaaaaaaaaaaaaaaaaaaaaaaaaaaaaaaaaaaaannnttggggggggggggcccccccccccttcccccttaaggggggggttttaaaatgccgggggggggttttaaaaaggggggggaggggaagaaaangnnnnnnntgcttggntacaganatttattcgtattgtg

SEQ ID NO: 21830 - DNA, 468 bp, Homo sapiens
  misc_feature (1)...(468): n = A,T,C or G
aggaaaannnnacttgatttgcctgacgctaaaatgtcttccaactggagcaggccttcgttctcagcaagcagaggtaccccagccagccgcgaggagacactgtggacctggccaagaagatcttcctcaaatattaccccggctgggtggccggctcttggtgatagattcgccaccactgggccttgttttccgctaattccagggcagattccagggcccagagctggacagacatcacaggataacccaggcctgggaggaggccccacggcctgctggtggggtctgacctggggggattggagggaaatgacctgccctccaccaccacccaaagtgtgggattaaagtactgttttctttccacttannaaaaaaaaaaaaaaaaaaaaaaaaaaaaaaaaaaaaaccctcaaaatttccgccccggggggggccccggcccccatttccccttttagg

SEQ ID NO: 21831 - DNA, 468 bp, Homo sapiens
  misc_feature (1)...(468): n = A,T,C or G
nttgcccgcctgcagtttacttgattcttaaatgaattttaaagatgccttttgcctcatcccttgcttttaagtattattatagacttttggagactcacgaaacaagcaatccctaaattctcgcccaggaaagtatcttggattaaatggtttttgagaaccttgagagtgtatattctatgaaatggaagaaacaagaactagacagagtcacaaatgctgttgatcacagacaatctctgccatccataaggtaaatgtaatacatctggcgacctgctgagtgtgaacttgcagcaggtgaggaaggaactctgaactctcacaatcttgtttcttcatttcccagagagaaactcggcaaagagaaaaaggacatttccctccaggttatctgaaagaatttcaatgcttacctttaatcatgtgacattgtttatcttggattaaaagaaaagaaaatgg

SEQ ID NO: 21832 - DNA, 479 bp, Homo sapiens
  misc_feature (1)...(479): n = A,T,C or G
gtggcggnnnnnnnnagcctgatgccctcgaaanncctgatgacatatgcactaacncnnaannnttcaaaagggggatttagacagctaaagaggtctccagaaataagctaacagggcgacgaccctccttaggacccagcagtactccaggatgaactaagtaaatctctgtaatatagaaattacacagtaaagtaactggccggtgagattgcaatgttccaggcagctggaattgcatttgcttaacttagtctggtaggacccatatagcaccaggggcagagaagttatttttaagaacatttttaaagtgactgagtttctttttcttaccccaaaggtaatattaaaatgggcagaaatctcacttgcccctaccacagttggtgggaaagtattttaaatggctatactggggatattacctatgactgactgtatacagtatacacattggtgcttctgtccatctg

SEQ ID NO: 21833 - DNA, 464 bp, Homo sapiens
  misc_feature (1)...(464): n = A,T,C or G
catttgcccncttttgccccgcgctgcaggaattcggcacgaggtatcttacaggaacatgaacaaatcaaaaagaaaactgtccgagagcgtttggagcagatcaagaaaacagaactgggtgccaaagcattcaaagatattgatattgaagaccttgaggaattggatccagattttatcatggctaaacaggttgaacaactggagaaagaaaagaaagaacttcaagaacgcctaaagaatcaagaaaagaagattgactattttgaaagagccaaacgtttggaagaaattcctttgataaagagcgcttacgaggaacagagaattaaagacatggatctgtgggagcaacaagaggaagaaagaattactacaatgcagctagaacgtgaaaaggctcttgaacataagaatcgaatgtcacgaatgcttgaagacagagatttattcgtaatgcg

SEQ ID NO: 21834 - DNA, 478 bp, Homo sapiens
ccgcccccatcgcccgtcctgacgaattcggcacgagtgaaagttgaccaaggaacactttttgaactcattctggctgcaaactacttagacatcaaaggtttgcttgatgttacatgcaagactgttgccaatatgatcaaggggaaaactcctgaggagattcgcaagaccttcaatatcaaaaatgactttactgaagaggaggaagcccaggtacgcaaagagaaccagtggtgtgaagagaagtgaaatgttgtgcctgacactgtaacactgtaaggattgttccaaatactagttgcactgctctgtttataattgttaatattagacaaacagtagacaaatgcagcagcaagtcaattgtattagcagaatattgtcctcattgcatgtgtagtttgagcacagatcccaaaccttacggccaagtttcttctagtatgatggaaagtttcttttttctttgctctga

SEQ ID NO: 21835 - DNA, 449 bp, Homo sapiens
atttgacctgcgctgcacgaattcggcacgagcatcttcctaacttggttgagatgtttaacttctctttaagtctcagtacccttatctgcaaagtgggaataatagtacttaccaaaacaagcaataaaagttatcttgagtattaattcatataaagttgcgctgcaacacaaataaagtgctcagtaaatatcagttatgttttttattgccatcattccatcatgatccagtcttaggttccatagtgggtataaagatgacacaggctttgcctttgaggtgggcaaaaaggagctacacttctattgatgactgttatgactaggtatttgcataaccataaccatatttcataacatatttcatccgttctgagatcctattctaacatctctgatatcagtcagcttcttataacattcaggatgccttttgaaaaatat

SEQ ID NO: 21836 - DNA, 492 bp, Homo sapiens
  misc_feature (1)...(492): n = A,T,C or G
tgggaaaataattataaattaanggaaaagggaattgaccgcctgaggcctattagcaacgtcatggtgaaggtggccactcagccggctgacaatccccttgacgttctatcccggaagctccacctggggcccaatgttgggcgtgatgttcctcgcctgtctctgcctggaaaactggtcttcccaagctccactggcagccacttctccatgttgggcatcggagacatcgttatgcctggtctcctactatgctttgtccttcgctatgacaactacaaaaagcaagccagtggggactcctgtggggcccctggacctgccaacatctccgggcgcatgcagaaggtctcctactttcactgcaccctcatcggatactttgtaggcctgctcactgctactggggcgtctcgcattcaccgggccgcccagcccgcccttctctatttggtgccatttactttattgccactcctcacgatggcn

SEQ ID NO: 21837 - DNA, 470 bp, Homo sapiens
  misc_feature (1)...(470): n = A,T,C or G
atggggannnnnnattgacttgcatcgcctgcaagaattcggcacgagggatggtctccatctcctaacctcgtgatccacccacctcggcctcccaaagtgctgggattacaggtgtgagccaccgcctgtaaacctcctctttcatctcacatgacctccaggcccaaccttttcctactgtcataactaatcgtgttttacttctcagcacagaacaatatgtacataataaaaactagcataaatttaataattcaaaaaccaacaagaatcccttttattataaaaataatcactattattgcttaaactattttacacatttgatttttctaagttctacatataagtatatattgtacagaaaagcaccagagacaggagaataccttttaaccaatgtgatcaaaaacactatctgaatggctaaagacaggtagtaaaacagggaaactattaaacatata

SEQ ID NO: 21838 - DNA, 465 bp, Homo sapiens
  misc_feature (1)...(465): n = A,T,C or G
agcgttntnnacctgattgcatgacgctgacctgcaggacgaaaccatgaagagcctgatccttcttgccatcctggccgccttagcggtagtaactttgtgttatgaatcacatgaaagcatggaatcttatgaacttaatcccttcattaacaggagaaatgcaaataccttcatatcccctcagcagagatggagagctaaagtccaagagaggatccgagaacgctctaagcctgtccacgagctcaatagggaagcctgtgatgactacagactttgcgaacgctacgccatggtttatggatacaatgctgcctataatcgctacttcaggaagcgccgagggaccaaatgagactgagggaagaaaaaaaatctctttttttctggaggctggcacctgattttgtatccccctgtagcagcattactgaaatacataggcttatatacaatgcttct

SEQ ID NO: 21839 - DNA, 516 bp, Homo sapiens
  misc_feature (1)...(516): n = A,T,C or G
tggggnncnnaaggtgtnnnnnnttctgannnccactgcccgcctgtacgaattcggcacgaggggaactgtcaaagacgaattaactgacttggatcaatcaaatgtgactgaggaaacacctgaaggtgaagaacatcatccagtggcagacactgaaaataaggagaatgaagttgaagaggtaaaagaggagggtccaaaagagatgactttggatgagtggaaggctattcaaaataaggaccgggcaaaagtagaatttaatatccgaaaaccaaatgaaggtgctgatgggcagtggaagaagggatttgttcttcataaatcaaagagtgaagaggctcatgctgaagattcggttatggaccatcatttccggaagccagcaaatgatataacgtctcagctggagatcaattttggagaccttggccgcccangacgtggcggcaggggaggacgaggtggacnntggcgtggtgggcgcccaaaccgttgcagcaggaccgacaa

SEQ ID NO: 21840 - DNA, 448 bp, Homo sapiens
attagacattttcgtcccgcgctgcaggaattcggcacgagcaatgttcagctatagaagctgataaccacccagagcaataacacttttattttaaacagagactttttctcttaatttctttctggggagtaaaaagaacatgtttcattctttgcataaatacttgactctaagcattgacctttgaaaacgcttgtattaacaatttttattaagaaagtgcactctatataacatcttcttgcattacgatagctcattagccaatacacatgcagctatgtaagccacaacagcagacgtcctatccttttgcttttgtttttaaaggatcaaaacatttcaagggataccatgaagaaaggtgtgaggggaaggggatatgccttggacaatgtcagagttttgatttccatgttttttcaagatccacgcttggtgggcg

SEQ ID NO: 21841 - DNA, 474 bp, Homo sapiens
  misc_feature (1)...(474): n = A,T,C or G
nattgcccggctgcangatgncggcacgagagagagagagagagagagagagagagagagagagagagagagagagagagagagagagagagagagagagagagagagatagagagagagagagagagagagagagagagagagagactctcttctctctctgtgtttatgtgtatagacccggggtctctcttttctctgtgcagaggggtgttttttttttctgcgtcccccgcgcgatatgcgtgtgtctctctctctctcccactctgtgcgcgagcacagggttgttttttgtatggagctctctctgctctctgcgcggggagactcacatatggagaggactctctcttttttacacacgagagagagacatctggaggcgcgtgcgcgcgcacagagcgctgtgtgtgctctctctcacacgcgagagagcgaggggctgtgtgtgggagaacacacactctgtgg

SEQ ID NO: 21842 - DNA, 481 bp, Homo sapiens
  misc_feature (1)...(481): n = A,T,C or G
attcgcaccgccctnangattgacncgcctctgcggaattcggcacgagccaacaccaccccggacctcctcctggccaccacagccaagccatcagtacccagtgctgacagtgagacacccctgacccaggacaggccaggcagtcccagtggctctgaggacaagggcaacccggcgccggagctgagggcctcctttctgccacgtaccttgtctctgcggaactccatcagcaggatcatgtcggaggcaggcagtgggaccctggaggacgagtggcaggccatctcggagattgcctctacttgcaacaccattctggagtcgctgtcccgagagggacagcccatcccagagagtggagaccctaagggaactccaaaatctgatgctgagccagagcctgggaacctctcagagaaggtctctcacttggagtccatgctcaggaagctgcaggaggacctgcagaaggaga

SEQ ID NO: 21843 - DNA, 481 bp, Homo sapiens
  misc_feature (1)...(481): n = A,T,C or G
ttggaancgcctgcagaancttatgcccggctgcagattttttacaggctggtggattatcatagatgcagctgttatttatcccaccatgaaagatttcaaccactcataccatgcctgtggtgttatagcaaccatagccttcctaatgattaatgcagtatcgaatggacaagtccgaggtgatagttacagtgaaggttgtctgggtcaaacaggtgctcgcatttggcttttcgttggtttcatgttggcctttggatctctgattgcatctatgtggattctttttggaggttatgttgctaaagaaaaagacatagtataccctggaattgctgtatttttccagaatgccttcatcttttttggctaagaaagccggagggattccattcggctccttcatttgcaagacgttaagggctccttacccacccccttcctcaaggacttaacttgtgcaagctgactcccagcn

SEQ ID NO: 21844 - DNA, 451 bp, Homo sapiens
aatttcccgtctgcagattcggacggattggcggggccgcttcggcagagtgatgactgatgatgagtccgagagcgtcctctccgactcccatgaagggtcggagctggagctgcctgttatccagctgtgcgggctggtggaggagctcagtttcgaggcaggcgtagatccaaatcccggacaggtatggaccgtggggtaggcctgactgccgaccaaaaacttgagctggtacaaaaagaggttgcggacatgaaggatgacttacgacacacaagggcaaatgcggaacgcgacctgcagcatcacgaggcgatcattgaggaggctgaaattcgatggagtgaagtttcgagagaagtgcatgagtttgaaaaagatattctaaaagccatatccaagaagaaagggagtattttggccactcagaaagtgatgaaatacattg

SEQ ID NO: 21845 - DNA, 534 bp, Homo sapiens
  misc_feature (1)...(534): n = A,T,C or G
aggagattcacggctgggattcgcacgagcagagacgggtttcacatgttggccgggctggtctcgaactcccgacctcaggtgatctgcccgccttgacctcccaaagtgctgggattacaggcgtgagccaccgcgcccggcttaagtgaaagttttaacacttgcttccctacagaatgccaggggctagccctactccacctcccaccggtaaggaggactttactgatagcctgctggtgtgacctgcacgtatatatccagatggcctgaagtaactgaagaatcacagaggaagtgaaatttaaatggcctgttcctgccttaactgatgacattccactacaaaagaagtgaaaatggccggtccttgccttaaccgatgacattaccttgtgaaattcctcctcctggctcatcctggctcanaaagctcccccacggagcaccttgtcacccccactcctgcccgccagagaacaacccccctttgactggaattttcctttacctacccaaatcttataaaac

SEQ ID NO: 21846 - DNA, 502 bp, Homo sapiens
  misc_feature (1)...(502): n = A,T,C or G
cgggaaggaataatataatatattgggggaaanncggattttgaccgcctgatggccctgtcagaattcggnacgaggtcagatgttattgaatagctcgtctcgggcaggggaagcggagagctggggatactacttgggggttttaattctattatcatgtgggctgacattatgactatataatgtagctagagacaatttttatgttgcttatagtaaaggtttaggctgccaattgcaaatcattctaatttggcaggcttatttttgacattggaaagggcagaaagcgatttgccccagtagtgtaataggagttatagaccagaggctgaaacccaaactatataaaaaggaattcagtggagggggctttgtaatctccattaatttgtgttgctacttccaggatcaccaaaaattacatgtaattttacatgttaaacacattgaaacataacctatgtttataaagcataacgggcttcccttccagaag

SEQ ID NO: 21847 - DNA, 505 bp, Homo sapiens
  misc_feature (1)...(505): n = A,T,C or G
tggcagaggcgccctttgaccgcctgcgatagtaccccntagattagaagcacatagaaaccgacctggattactccggtctgaactcagatcacgtaggactttaatcgttgaacaaacgaacctttaatagcggctgcaccatcgggatgtcctgatccaacatcgaggtcgtaaaccctattgttgatatggactctagaataggattgcgctgttatccctagggtaacttgttccgttggtcaagttattggatcaattgagtatagtagttcgctttgactggtgaagtcttagcatgtactgctcggaggttgngttctgctccgaggtcgccccaaccgaaatttttaatgcaggtttggtagtttaggacctgtgggtttggtaggtactggttgcattaataaattaaagctccatagggtcttctcgtcttgctgtgtatgccccagacatgagcaacacgtctggtcaaagcacacttcttaagaaggaattt

SEQ ID NO: 21848 - DNA, 477 bp, Homo sapiens
  misc_feature (1)...(477): n = A,T,C or G
nttttgacccgcgctgcaggaattctggacgagacggagcctcttgcagcttacccgctaaaatgttccgggcccagagcaaaggtttcactagttgtaaacgtggccagtgactgccaactcacagacagaaattacttagggctgaaggaactgcacaaagagtttggaccatcccacttcagcgtgttggcttttccctgcaatcagtttggagaatcggagccccgcccaagcaaggaagtagaatcttttgcaagaaaaaactacggagtaactttccccatcttccacaagattaagattctaggatctgaaggagaacctgcatttagatttcttgttgattcttcaaagaaggaaccaaggtggaatttttggaagtatcttgtcaaccctgagggtcaagttgtgaagttctggaggccagaggagcccattgaagtcatcaggcctgacatagcagctctggttaga

SEQ ID NO: 21849 - DNA, 456 bp, Homo sapiens
agagggccctgacttgcctgacgatttcggacgagccaggtgctcggtccttccgaggaagctaaggctgcgttggggtgaggccctcacttcatccggcgactagcaccgcgtccggcagcgccagccctacactcgcccgcgccatggcctctgtctccgagctcgcctgcatctactcggccctcattctgcacgacgatgaggtgacagtcacggaggataagatcaatgccctcattaaagcagccggtgtaaatgttgagcctttttggcctggcttgtttgcaaaggccctggccaacgtcaacattgggagcctcatctgcaatgtaggggccggtggacctgctccagcagctggtgctgcaccagcaggaggtcctgccccctccactgctgctgctccagctgaggagaagaaagtggaagcaaagaaagatgaatccgaggagt

SEQ ID NO: 21850 - DNA, 469 bp, Homo sapiens
attgaacctcgaccccgcgctgcaggaattcggcacgagataaactgttattgcattataggcccctttgttgggggcagcctgttggtccacacctacttgctcaggcaggtgctctggtctctctcacccctgccccttagagtctaggtgcagcagctccaagcatgggaccaaggaggccagaacctgtcgctggaaaccagggcaaagcagtggctcagggctccttgggtgcatgtgtatcattggagctgcctgtctgcatgtatcctctggcgcgaatgctctctgttggctctgcagtacaatatgtaaccaataaagctccctcgtttccgtatactctgtgcgagtctgtgatgccagttttgtcaatggcatccctgtgtatcatctgtcttctatgcgttggcgcagctctagtatatttatttatttcattgtggaatacttaaaattgggtatt

SEQ ID NO: 21851 - DNA, 441 bp, Homo sapiens
  misc_feature (1)...(441): n = A,T,C or G
nattgaccccccattgacnccgcgctgcaggaattcggcacgagcgaagctgaactacagcgaccatgatgtcatcaaatgggtgcgctacattggccgcagtggcatttatgaaactcgctgctagctgccactaggcagctagcccacctccccagccaccctcctccacaggtccaggtgccgctccctcccccaccacacatcagtgtctcctccctcctgctttgctgccttccctttgcaccagcccgagtctaggtctgggccaagcacattacaagtgggaccggtggagcagcccctgggctccctgggcaggggagttctgaggctcctgctctcccatccacctgtctgtcctggcctaatgccaggctctgagttctgtgaccaaagccaggggggttccctttccttcccacccctgtggccacagct

SEQ ID NO: 21852 - DNA, 461 bp, Homo sapiens
  misc_feature (1)...(461): n = A,T,C or G
cgcgcccattgaccttgantcgcgctgcaggaattcggcacgagattgcaggtctctgtacgggccagtttctctgccttcttccaggatcaggggttagggtgcaagaagccatttagggcagcaaaacaagtgacatgaagggagggtccctgtgtgtgtgtgtgctgatgtttcctgggtgccctggctccttgcagcagggctgggcctgcgagacccaaggctcactgcagcgcgctcctgacccctccctgcaggggctacgttagcagcccagcacatagcttgcctaatggctttcactttctcttttgttttaaatgactcataggtccctgacatttagttgattattttctgctacagacctggtacactctgattttagataaagtaagcctaggtgttgtcagcaggcaggctggggaggccagtgttgtgggcttcctgctgggact

SEQ ID NO: 21853 - DNA, 500 bp, Homo sapiens
  misc_feature (1)...(500): n = A,T,C or G
aggggggannnnntttttgtgcaccgcctgcaggaattcggcacgagaaaaaacatttaatctgcatctgttttagaaaagggggaaatgaagcaacttgtctaaaaatactgctttacaaagcatttcagcctttccccctcagttttgcattgattttttgacaagtctgtagagcctaatagtttccatcaaaggcctagatctcttatttagcatttttttcagctcttctctcagaagttcagctgttgaaacgaaaactgtactttgtaccctcacatacaaagggatcaaatttgacctggtgttattttagccccaaatttatgacattaccccattattaaaatgtaaatgtttctttacccaaactacttctagatattctagtatttgcttctggtggaattaaatgacggtaaaattggctaattatttgaatgaatgaatggatggatgttttgcatgctcaatttctaggtcctttgtctagaaag

SEQ ID NO: 21854 - DNA, 498 bp, Homo sapiens
  misc_feature (1)...(498): n = A,T,C or G
atgggtgntnnnnccttgtgcgccntcatgaattcggcacgagctgcatacgccactttgtgattgatggacacccagtgagcttcagtaaagcagccctggtcagcggcgccgtaagcatcaactcctgtccagcagcctgacatgacagagcacagctgcccaaatacaaagttctttagagcactgaaagaaacacaaagccagccaggaggaacagtaactcttccttcgggtggaagctttcatcgagttgaacaggacttaaacgaatcatcagggaccggatatttcttatttctcatttggattcttaaccttgaatccaaagtgtctgcaatggacaacaattgaaggagtggcaaacttacttgtattgagagcacacgcaattcctactggtgaaattactgtttctggttctaataaaatagaagggattccaaannananaataaaaaaaaaaaattttatttggaaaaaaatttaaatagttgg

SEQ ID NO: 21855 - DNA, 451 bp, Homo sapiens
  misc_feature (1)...(451): n = A,T,C or G
ggggnncccaattgaccnccgctgcagtattcggcacgagaagcatttacataattggaaaaatctggatttctgatgccaaagggttaaagcttcttggatttcatttcattgatatacagccactattttatttttgatcagtggcctttgggccactgttcagggtactgaccatcagtgtcagcattagggttttggtttttgtttcttttgggtatttcttttttggcacatgtgaatcttgttttgtgtaaaatgaaattactttctcttgttctctgatgatgggtttaaaattaaaagagcatccggttttggtatggggatgatccaggattatgttgtgactgatacatattagttacttgtgcttttttttttttttttgggatttttgcaggggcaaaactccaagcaccgggttttatatactaaatcaaaattgggc

SEQ ID NO: 21856 - DNA, 487 bp, Homo sapiens
  misc_feature (1)...(487): n = A,T,C or G
aatttgaaaaccantaaaaaaaattttgacccgcgctgcaggaattcggcacgagctcttcgacaaccttctcgtctactgcaagcggaaatccagggtcaccgggagcaagaagtccaccaagaggaccaaatccatcaacggctccctctacatcttcaggggtcgaatcaacactgaagtcatggaggtggagaatgtggaagatgggacaggtagcccctcccccagccttgcctgagccctgcctgagccctgcctgctccctggcactctctctgtttcatttaaatatatttttttcttttatcatgagatgtaatctacctacagaaaagtgcccagagcatagatgcatgaagcgaacatctgggtggttagcattcaagttaagaaataaaacactgcnccccanaaaaaaaaaaaaaaaaaaaaaaaaaaaaaaaaaaaaaaaaaaaaaattntnntttccccggggggggcccct

SEQ ID NO: 21857 - DNA, 410 bp, Homo sapiens
  misc_feature (1)...(410): n = A,T,C or G
tggggnnagcgggggncctcgactgctgtggcattcggcacgagccaagcttctggatatcaggagctacctggaaaaagtcgccacaggcaagctgcccatcaaccaccagatcatctaccagctgcaggacgtcttcaacctgctgccagatgtcagcctgcaggagttcgtcaaggccttttacctgaagaccaatgaccagatggtggtagtgtacttggcctcgctgatccgttccgtggtcgccctgcacaacctcatcaacaacaagattgccaaccgggatgcatagaagaaagaagggcaggagaaagaagagagcaaaaaggataggaaagaggacacggagaaagataaagataaggaaaagagtgatgtgaagaaagaggagaaaaaaaaaaaaaaaa

SEQ ID NO: 21858 - DNA, 513 bp, Homo sapiens
  misc_feature (1)...(513): n = A,T,C or G
gggcgcaattgacngcctgtgganattgccncngctgcaggaattcggcacgagggcttgcttgctcatgggacacttgcctttggaacccaacattgcaaggaaaccgaggccacaaggagtggcctctgtaggtgttccatttgatggcctccactaggccccagcctacagtcagcatcactgccagatagacaaagcctacagcaggacacagacaagccatcctggctgtgccctttctgaattcttaacccatagaaactgtgaaagataattaatgattattgattgaaaccattaagtttagagtggttttttactaagccataacaataaatacactctcattctccagcactaggcttattcattttaaaaactcttaatcaagttttgggtgaaaaaatggtatcttgttttgattttcatttccttggttactagagttaattttcattccccagcactgggcttactcattntaaaaattcttaataaatttttaggtgg

SEQ ID NO: 21859 - DNA, 504 bp, Homo sapiens
  misc_feature (1)...(504): n = A,T,C or G
ggcgaggcccccatgcccgcctgcgatagacgcccctagagaaatacttgtagaagtgtgcagctataaatgtccacagaggctcagagcctcattgtttttaatagtgaacagttggaaaccaaatagatgtctgtcagtagggatgtggcagaattgtggcatgtttatatgggtatagaaagtatggaggaacatagacccaactgttggtaagagttatctctggatgcacgaataggtaggggttgatgggtacagggtctctactttgcataattttggggccactgttcacatagaacatttgcgatggagtggtgctcctcgattcgtttaatggagagggtttggatgtgcttttgctttttatttaacacatgggtatattacttttctttttctgcacagagcacttattaattnntatagtttttaaattgggctttgccgcttcagtagtcacaggtagctacctgaccgagaagcccgactgggattacn

SEQ ID NO: 21860 - DNA, 480 bp, Homo sapiens
  misc_feature (1)...(480): n = A,T,C or G
cggantcanaattgaccgcgttgaggaactctgcacgagatgacgcctgtcgggatgcaaaagagaagcgctctaaaagccaagatgcagattcacctggaagttctggggcccctgaaaacttgacattcaaggaacgccagcgtcttttttcacaaggtcaagatgtatccaataaagtgaaagcttctcgtaaattaacagaactggagaatgaactgaacacaaagtgaaagaaaatgaggagaacactttgtatttaccccaaaatcttttcagttgtgggtttgtaggtgcgagtttgaagaggaaaagaggaagggggttatatttctaagtgatttacaatttctgtttctaaaattgttgggatttagaaatgtttcaattccaagaaattttattttactttaccatgagattgccatttatgtaatttaaacactgtctagtttcttaattatctaactcacacgaggg

SEQ ID NO: 21861 - DNA, 509 bp, Homo sapiens
ggcgcaccttgacggctgtggaattcggcgcgcctatcggaatatcccacgaggtttgcacaagttattttcatgttacctggagagtgtccagaggctgctctgaggctgaggtgtgttcccccttgcctggttccagctgtcagagggataccatcctagggtctgggaatccaaggccacgagactccttggtttgtggtccgagatcctgtactaaggagggtctggccagaggaacagaccagcttttgcacaatgaagcgcaagggaacaagtggtttgcctggtgtcctacctgtcctgaacctggtcctgggggccattgaaaagttagatctgtgatctctggggtttttgtggctttgttcaatgcttccactctagggcaggcagagcagtctatactctcccaagcctgcttgacctccaagtagagctgatacagagatctgtgaatattgtgatagaaattctttggtattcatacatttcagctgcaagtcagc

SEQ ID NO: 21862 - DNA, 499 bp, Homo sapiens
  misc_feature (1)...(499): n = A,T,C or G
aggggnnaaggagnccggggccngnnnaattgacctactgtccgctctgcggtgtcacgtggagtaccccagatacattttagacatttatcgtcatcatctgctctgagtggaaggccgttcagagaggctagaggttcttattctggctataaattatgtgagtaaaattgtgctaaccagttaaaagtactgtacacccatgctcaatatatagtcctggaaatagcaattgaaacatgtcttctcacaagagaaaatgacagttttaatgatgtatttgatgaatttaaactttaagtcaggtgctgcaaattggaaagaagacttgtggtgttttaagttgctgtggacacttttaagaaacttacaacccatggaacccttgtttatcgccatgcaaattacaatcttgaatgagtgttttttacaaataaagtattagaaaaatgtgtagtaaagatgtcaaagtaaaaaaaaaaaaaaaaaaaactcgagg

SEQ ID NO: 21863 - DNA, 502 bp, Homo sapiens
  misc_feature (1)...(502): n = A,T,C or G
aagcgnnatnnnnaatttgtagcacgtcctgcaggaattcggcacgagaggctactccatgatagtgttaaaaaacaaaatttgctaacaatgtgatataaagactttaaaagttacacattatgtggagccctatctttacaaaagtttcctactgtaaagtgcttttattttcagttttcacttgatagtactcaaccataattaaagttgcataagataattgctttacatttcacatacctatatttatctgagtgctgtctaaaactgttgtgctagccaaagtaatgctatgaaatcatttgcagaattaacccgtgagttaatgttaaatgcactgttattgccatgtgaagaggcatcgactttgataccaccatcatgttcagaccattttatacatttcagtggccttttttttttttaaggaaaaaaaagcgcaaaaccaagtacatagtgacgatggcttttatttggacaaatagcttttatattttct

SEQ ID NO: 21864 - DNA, 499 bp, Homo sapiens
  misc_feature (1)...(499): n = A,T,C or G
agtgcgggtnnnnngggccttgatcggctgtcggaattccgcacgagggcaccggccgcgcagctggaggcggcggagcggaagccttgacttcatctcagctccagagcccgccctctcttcctgcagcctgggaacttcagccggctggagccccaccatggctgcaatccgaaagaagctggtgatcgttggggatggtgcctgtgggaagacctgcctcctcatcgtcttcagcaaggatcagtttccggaggtctacgtccctactgtctttgagaactatattgcggacattgaggtggacggcaagcaggtggagctggctctgtgggacacagcagggcaggaagactatgatcgactgcggcctctctcctacccggacactgatgtcatcctcatgtgcttctccatcgacagccctgacagcctggaaaacattcctgagaagtggaccccagaggtgaagcacttctgccccaacgtgcccatcatc

SEQ ID NO: 21865 - DNA, 389 bp, Homo sapiens
  misc_feature (1)...(389): n = A,T,C or G
agtgcgttnnnnagggattgacgcccctcgaccggctgcangaattcggcacgagctgaacacctgctttccttctgggagtctggaattttggtatgtgccaggcagagactacctttgtgaccagctcccagtaaaaaccccaggcactcagtctctaacaagcttttctggttgacagtgtttcacaagtgctgttacaactggttgctgggagaattaagctcatcctctgtgattccactggcggaggattcttggaagcttgcacttagtttcccctgacttcaccccatgtgtcttttttcctttgctgattttgttttgtatcctttcactgtaataaatcatggccgtgagcagaactgtaaaaaaaaaaaaaaaaaaaa

SEQ ID NO: 21866 - DNA, 476 bp, Homo sapiens
  misc_feature (1)...(476): n = A,T,C or G
cttgaacaaaccctaaaaantttgaccccgcgctgcaggaattcggcacgaggagctgagcaacgtactggccgccatgaggaaagctgctgccaagaaagactgagcccctcccctgccctctccctgaaataaagaacagcttgacagaagccctggctctcctgctgtccgtgggtgggtgtgggtgtgtcgggggcccgcagtcccctgtctggtgcccgctctgagccacaccctctccgggtgctgcctggtcgtgaatcaaaagccgtggcccgcccacccttcccggggcagcaggtgaggaagccgccgtactgcaaatgactttaatcattaaatagcttctatgccaaaaaaaaaaaaaaaaaacccgggggggggccgggaccccaattccccctatggggaggggaattaaaattactggcccggggtttaacaacggcgggacgggaaaaaaacattgnaag

SEQ ID NO: 21867 - DNA, 471 bp, Homo sapiens
  misc_feature (1)...(471): n = A,T,C or G
nttganaatcgacgccttcggaattcggcacgagaatgaccccatgtttaagttggttgctcagctgtacaagattgtgcccaatgtcctcttagagcagggtaaagccaagaatccttggcccaatgtagatgctcacagtggggtgctgctccagtattatggcatgacggagatgaattactacacggtcctgtttggggtgtcacgagcattgggtgtactggcacagctcatctggagccgagccttaggcttccctctagaaaggcccaagtccatgagcacagagggtctgatgaagtttgtggactctaagtcagggtaaaactggagactgggtgaaagtgactaccagaaagtgaggaagcctaaataaaaagtatacttttgtttcagggggcctttaaagacttaagattaaattatatctgaggcactgataatatgtttgaggttaaaatataaatt

SEQ ID NO: 21868 - DNA, 512 bp, Homo sapiens
  misc_feature (1)...(512): n = A,T,C or G
agcgttnnnnnnaattgatcgcctgtacgaattcggcacgagcttgcgcgggttgagggcggtggctcaggctcctggaaaggaccgtccacccctccgcgctggcggtgtggacgcggaactcagcggagaaacgcgattgagtgtgtggattacactatcactggaaaaatacgaattgagaagaaggaaaagactggaagatgcagaccttggttcctgttagtggaaacactgtaaggtcccagaaatggaaaagaaaatgaaataaatcagcagttatgaggcagagcctaagagaactatggcaacatcaggtgactgtcccagaagtgaatcgcagggagaagagcctgctgagtgcagtgaggcgggtctcctgcaggagggagtacagccagaggagtttgtggccatcgcggactacgctgccaccgatgagacccagctcagttttttgagaggagaaaaaattcttatcctgagacaaaccactgcagattggtggtggg

SEQ ID NO: 21869 - DNA, 470 bp, Homo sapiens
ctttgcccccgcgctgcaggaattcggcacgagtacgactccacccactacaaggagacttggaaggctctggaggcactggtggctaaagggctggtgcaggcgctgggcctgtccaacttcaacagtcggcagattgatgacatactcagtgtggcctccgtgcgtccagctgtcttgcaggtggcaggtccagcggaaagtgatctgcatccccaaaagtatcactccttctcgaatccttcagaacatcaaggtgtttgacttcacctttagcccagaagagatgaagcagctaaatgccctgaacaaaaattggagatatattgtgcctatgcttacggtggatgggaagagagtcccaagggatgcagggcatcctctgtacccctttaatgacccgtactgagaccacagcttcttggcctcccttccagctctgcagctaatgaggtcctgccacaacggag

SEQ ID NO: 21870 - DNA, 503 bp, Homo sapiens
  misc_feature (1)...(503): n = A,T,C or G
ngggggattatgatcggcctgtagaattcggccgacattntatagcccacttaccatgcataacagacaagtcccatattttgtcagtagatgcctttttttttccggcttaagccttaagtgccaaatcacaagagaaaaagcagtaacagtttacagaagcaacttagtgccttgtaatctaactttgtcactgtgactacattacctcttcagcgccagagggcacccgtgggcctcccggagcctctgcccatggcggggtggagacccggaaccagcagccccctccactggcgacacaactgcaccttccctcatttcagtctcccgcacacttattcctcctcccctcttcccggnggcacctctccaactgtacccgcccccgccccaccaccccggccccttggaagattgttgccagaccagggttttgggggaaacctgtcttgacattcaaaacctttttcttcccgatctgaacccctgttgactaatct

SEQ ID NO: 21871 - DNA, 473 bp, Homo sapiens
  misc_feature (1)...(473): n = A,T,C or G
nattgancgctttaggacantggcacgagcaaaanaatcagaggaaagtgctgctccaagcagggagagaccaaaagccaagttattgcccagaggagccacagctcttcctctcagaacaccctctggggatctagccattacagagaaggaccctccaggggtgggagtggctggagtggcagctgcccccaagggtaaagagaagaatggtggggcacgacttgggatggctggagttccagaggatggagagcagccgggctggccttctccagccaaggctgcccccgtgctcccaaccactcacaaccacaaagtgccagtccttatctcacccactctgaaacacactccagctgacgtgcagctcattggcacagactctcaggggaataaattcaagctcttatctgagcatcaggtcacatcctctggagacaaggaccgaccccgacgggtaaaaccaaagt

SEQ ID NO: 21872 - DNA, 495 bp, Homo sapiens
tggagaacaacaatttgatcgcctgcggtagacggcacgagagccagcgaagccacgctgctgaacatgctcaacatctcccccttctcctttgggctggtcatccagcaggtgttcgacaatggcagcatctacaaccctgaagtgcttgatatcacagaggaaactctgcattctcgcttcctggaggtatatgctgtcagccttgccccctcttacactgatggttgagagcatgacaaggttcagactgagtccctgtaaccaaggactgtgttttcatctgtctcacaaaaaaaataatgccctttaaataatgaataatagtgatagaaaatgtcatttcttggacaaatgaaaaattgaaattaatgtatataattagatattattagctactcttaagtagcttcatttgttgaaagtttgacaagtgaatgaagttcacatctggaaatcgttgaacatttttcgttcatggaactcaatggctac

SEQ ID NO: 21873 - DNA, 492 bp, Homo sapiens
  misc_feature (1)...(492): n = A,T,C or G
attgcccgcctgcaggtattcggcacgagccacacccggataatttttgtacttttagtagagatagggtttcaccatgttgtccaggctggtcttgaacttctgacctcctgatctgcctgtcttggcctcccaaagtgctgggattaaaggcatgagccactgcgcctggcccacacctgggtaatttttgtatatttaatagagacggagtttcactgtgttggccaggctggtctcacactcctgacctcaggtgatctgcctgcctcggcctcccaaagtgctgggattacagacctgagccactgcacctggcttccattacagatttttactttgaattattttatctaatttgaagctaatatagcatataataaaaattcaggagaaaaaaggttatttttaaatctttnttgagagagtccattctttacctgaaagtaagtgcatantgtagcacagttaanaaaaaaaaaaaaaaactcg

SEQ ID NO: 21874 - DNA, 498 bp, Homo sapiens
  misc_feature (1)...(498): n = A,T,C or G
agcttccaatgatgactgaggccntgcggaanncgcgccgaggngaaactagttcagtagcccagagtggatctgaaagcaaagtggaacctaaaaaatgtgaactgtcaaagaactctgatatcgaacagtcttcagatagcaaagtcaaaaatctctttgcttcctttccaacggaagaatcttcaatcaactacacatttaaaacaccagaaaaggcaaaagagaagaaaaaacctgaagattctccctcagatgatgatgttctcattgtatatgaactaactccaaccgctgagcagaaagcccttgcaaccaaacttaaacttcctccaactttcttctgctacaagaatagaccagattatgttagtgaagaagaggaggatgatgaagatttcgaaacagctgtcaagaaacttaatggaaaactatatttggatggctcagaaaaatgtagacccttggaagaaaatacagcagataatgagaaagaag

SEQ ID NO: 21875 - DNA, 498 bp, Homo sapiens
  misc_feature (1)...(498): n = A,T,C or G
gggatggnnnnnnntttgcncgttagcacgacttcggcacgaggctgataggaccttgatatatataactctctacatttctgaatgtctgaagaaactgcaaaagtgcaattccaaaagccaaggtgagaaagaaatgtatacgctgggaatcactaattttcccattcctggagagcctggttttccacttaacgcaatttatgccaaacctgcaaacaaacaggaagatgaagtgatgagagcctatttacaacagctaaggcaagagactggactgagactttgtgagaaagttttcgaccctcagaatgataaacccagcaagtggtggacttgctttgtgaagagacagttcatgaacaagagtctttcaggacctggacagtgaagggagcccgggcagccaccgtctccagagccctgggcagcattttccagcaagatgtacacaatcttttgcctttaattcgtgaagtttatacagaagaagaagaa

SEQ ID NO: 21876 - DNA, 473 bp, Homo sapiens
catcgaccgccctgtcatgagaacggcacgagtggagttgctcatcatggcttacgcactgaagactgcctgtgccaggaacattattggggtcatcccctacttcccctacagcaagcagagcaagatgaggaagaggggctccattgtgtgcaagctgctagcatccatgctggcgaaagcaggtttaactcacattatcactatggatcttcatcaaaaggaaatacaaggctttttcagctttcctgtggacaaccttagagcctcacctttcctgcttcagtatatccaggaagaaattccaaattacagaaatgcagtcattgtagctaagtctcctgatgctgcaaagagggcccagtcctatgcggagagactgcgtctgggtttggccgtcattcacggtgaagctcagtgcacggaactggacatggacgatggtcgtcactccccgcctatggtcacaaatg

SEQ ID NO: 21877 - DNA, 502 bp, Homo sapiens
  misc_feature (1)...(502): n = A,T,C or G
gtgcganccaaccntttgatcgccntcngttgtatcgcctgcangaattcggcacgagacacattctttacagaagtttatattgttacgttttgaaattctgcatctggtaggtccaaggtagtttgttgttagaagtagcaggatcgccttaataataataatagttttgtagcatgaagcctgagcattgtccaaagtttggaaatgtgaacgctgatagtcacatctgtccatctttccacatttctaggatgctgacagacagcaccaagaagtaattgcaatttatcggacacaccttcttagtgctgcacagggtcacatggatgaagatgttcaggaggctctgctccagatcatacaaatgcggcaggggcttgtgtgctagccgttagcactgactgccagtatctgttttatcttgctggtgctgaacattctttgtgcaactccatggtctttctgggccttactgtgctggtataattaaaataaaatg

SEQ ID NO: 21878 - DNA, 494 bp, Homo sapiens
  misc_feature (1)...(494): n = A,T,C or G
aagaagaaaaaaantttgatcgcctgagtatgacgccgagagggcctcctttctactccattccagcctttttttcctgtcagaatccctcaggaaggacctttatcttctggagtgagtggcagttccactgggttcagtgaaagagtcgcccatggggctctgttccccaggagtcctttgtattttggtgaacaaattcttaccaaagcatgagattcggactgtagaagttcagactgcctcagttcagactgcctcatggggcagtctggaggtcagctggcttctggtgtctctcatcacaccactgcggacgctgtctgtagagcagccttggtgtgggtgactctgaagctggagtgatgggaccccagctatccttgttttttaccgccttgtctggcactgtgaccacgcttcaaggctgcttctgggggtcttggtccctggatgtgccatttccttgcccttctgaccctcacacttcttcn

SEQ ID NO: 21879 - DNA, 471 bp, Homo sapiens
  misc_feature (1)...(471): n = A,T,C or G
nattgaccggttgtagacnttgcacgagcttgcggcatccacgagaccaccttcaactccatcatgaagtgtgacgtggacatccgcaaagacctgtacgccaacacggtgctgtcgggcggcaccaccatgtatccgggcattgccgacaggatgcagaaggagatcaccgccctggcgcccagcaccatgaagatcaagatcatcgcacccccagagcgcaagtactcggtgtggatcggtggctccatcctggcctcactgtccaccttccagcagatgtggattagcaagcaggagtacgacgagtcgggcccctccatcgtccaccgcaaatgcttctaaacggactcagcagatgcgtagcatttgctgcatgggttaattgagaatagaaatttgcccctggcaaatgcacacacctcatgctagcctcacgaaactggaataagccttcgaaaagaaattgtc

SEQ ID NO: 21880 - DNA, 514 bp, Homo sapiens
  misc_feature (1)...(514): n = A,T,C or G
gagtgggnnnnntttcgacgatcggatcgactgtcggaattcggcacgagtggagacccacctggcattgcctccagcagcccttctcccacaccccagctgaggaaggctccattcagtaccacacagtgccccacccacccgtcaccctggggcccaggcacacgtccatcacatgcccgtccacatgcatggctggacatatgcaagacctgagagtcctacccgtcatgggcgaggtctggaggccggtccagctgtcccagggccacgcacagcagcctggaagaagagctggcctcaggacaggtgttcatgttgtccagagtccattcccagaactctctgtgcttggccagccaggataggggtgcccacaggtcctgccgtcagaggctcaggatggccaagtgaggcttacctctgggctccgtgggacaggcctctccgaacagccacatccanggtggctgctgcagcaaaggctggagtggctgctataccactgttcacc

SEQ ID NO: 21881 - DNA, 470 bp, Homo sapiens
  misc_feature (1)...(470): n = A,T,C or G
aatgcaccggctgcaggaattcggcacgagcacgtctcctcctcgaagccatgtgctgcggtcactcaggcctctgcagaagccaagggaagacagtggtttgtggacgagagggctgtgagcatcctggcaggtgccccaggatgccacgcctggaagggccggcttctgcctggggtgcatttcccccgcagtgcataccggacttgtcacacggacctcgggctagttaaggtgtgcaaagatctctagagtttagtccttactgtctcactcgttctgttacccagggctctgcagcacctcacctgagacctccactccacatctgcatcactcatggaacactcatgtctggagtcccctcctccagccgctggcaacaacagcttcagtccatgggtaatccgttcatagaaattgtgtttgctaacaaggtgccctttagccagatgctaggctgtctgcgn

SEQ ID NO: 21882 - DNA, 476 bp, Homo sapiens
cattgacccgcgctgaggtgcaagtatggggaatatctcccccttttccctcatagcctctagggagggagagtgacttcattctccatttgaagagattcttctggtgatgtttacttaaaaagtgatccccctcaacaacggatacagcgtgcttattattgggcatttagcctcaaaagcatgtagtaccaagcacttgtatttccgtatattttgtttcgcgggggagtgagggggaagaacacggatgaaaatgtcagtttttgaagggtccatgcacatccctgacacctcacaccttatctaagtctgaagctggggagaaaggggttcatttagacttcatacatttccagtacgactttagtatctctccagagccataatttctcagtccgaattaattccccctccctaggtgcctgtaggctatggtacttcttcctcattggtttctaggtaaacttcactac

SEQ ID NO: 21883 - DNA, 488 bp, Homo sapiens
  misc_feature (1)...(488): n = A,T,C or G
natatgccccgcgctgcaggaatncngatttaccccgcgctgcaggaattcggcacgagcagggccttacagccccgagaaatttcagccctcgcctcttaaggtaagtagaaaacataggagattgtccggagcccctcaccccaaatattttgccatacgtaccaggtatactgccctggaaggagaggctgtgtgcccccaaattcttcgtgagaagtgtgaggggatgggggaagatgcaccaaaggcaagcagagccgaggctcccagggaggagagccacgtggctgacctgcacacacacacgcagtggcctgggtgttgtggtgtaaaatgggcactgctgttggatttgggggccacagctaaggctgggtttactgtgagccgaggaaaagaagtgaatggcctgagatgtgtaaagggcttgaataggcaccgctgatccattcccaccttcagggacaaagaggctctggagggtt

SEQ ID NO: 21884 - DNA, 498 bp, Homo sapiens
  misc_feature (1)...(498): n = A,T,C or G
gtgagaacanacctttgattccntcggttgatcgccntgccgaattcgccacgagcttttttcttttttttggcctttctcagattagtcaaaaattctatagaatgactcacttcgaatactaagacacaggaggtttagcctgctttcttaccaaattcatgttacccagacttgtgttctcttgcgtcccttggactgcctgttgattgatggaaagtgtctgcactgacacttttcgtcagtagtctgtagtttcgtggcctcttttgattataactggggtcaccaagaaggtttacttaattaaataccgcatttctaagagaagatactttgtgtaagaaaagatgccacatttagtggtttaacttttgtaacttcacttgatagtttttaagcaattagaatggagttagggaaagaacatatcatactgaacaaatgtcattctagtttagatagcatttctaagataactgatactaatacttgttt

SEQ ID NO: 21885 - DNA, 494 bp, Homo sapiens
  misc_feature (1)...(494): n = A,T,C or G
tggagcanacaantttgatcgccttcggtagaccgcctagctattttctttcttttggcctttctcagattagccaaaaattctatagaatgactcacttcgaatactaagacacaggaggtttagcctgctttcttaccaaattcatgttacccagacttgtgttctcttgcgtcccttggactgcctgttgattgatggaaagtgtctgcactgacacttttcgtcagtagtctgtagtttcgtggcctcttttgattataactggggtcaccaagaaggtttacttaattaaataccgcatttctaagagaagatactttgtgtaagaaaagatgccacatttagtggtttaacttttgtaacttcacttgatagtttttaagcaattagaatggagttagggaaagaacatatcatactgaacaaatgtcattctagtttagatagcatttctaagataactgatactaatacttgttttcttccctata

SEQ ID NO: 21886 - DNA, 478 bp, Homo sapiens
  misc_feature (1)...(478): n = A,T,C or G
aggtgcncattgaaatgattcgcgctgcaggaattcggcacgaggcagtatgagagttgtaacggcccgactggtgagtgagggggagcaggggattccaacggcttgcgctgtctttgtgcaccagccggtgggcggtcacgtctgggactggctggggtaggagagggcggtccccagtgcagttgggtgaactaccgttgcacactggagtttctggggtctttgcttggaactgacctagctcgtggcagggggaactcggctagcggccccacagcccatgctgactcaaaacaactgagttgtacgacgttcatcgccgtgttatccttgagtaaagaatgaactctggaagcccagccagggacaatgcaccttcacagagattctgcactaatctgagtgaaggtctaaggtttggaatctccccctcatggagagaagctttgtatggctgtcatgcttagacagtgan

SEQ ID NO: 21887 - DNA, 474 bp, Homo sapiens
agcgggaatgactgcgctgacgtgggcctcgtgcgggtcccgctgtacacccagaaggaccgagtcggaggcttccccaacttcctgagcaacgccttcgtgagcacggctaagtgccagctcctctttgccctcaaggtgctcaacatgatgcccgaggagaagctggttgaggccctggctgcagccaccgagaagcagaagaaggccctggagaagttgctcccggcctcctcttgagggctgcctgagctggtggcaccctcccctgggccggaagactgggaattcctgctaagtgtggcttctagagtgtttgtgtgtaccccgcttctgactgcctagggcgagtgggcatcctgtcatcatctccactgtcccaagcagtcactaggtggcggccgggccagctggaacccagcccatcctctcatgcagagcagggtggtccgggcacactgggcctgcctctcc

SEQ ID NO: 21888 - DNA, 486 bp, Homo sapiens
  misc_feature (1)...(486): n = A,T,C or G
nattgcccggctgtatgaactcgtcgcgaggaacgaccagctgtctgaagatagatcgccatcatgaacgacaccgtaactatccgcactagaaagttcatgaccaaccgactacttcagaggaaacaaatggtcattgatgtccttcaccccgggaaggcgacagtgcctaagacagaaattcgggaaaaactagccaaaatgtacaagaccacaccggatgtcatctttgtatttggattcagaactcattttggtggtggcaagacaactggctttggcatgatttatgattccctggattatgcaaagaaaaatgaacccaaacatagacttgcaagacatggcctgtatgagaagaaaaagacctcaagaaagcaacgaaaggaacgcaagaacagaatgaagaaagtcagggggactgcaaaggccaatgttggtgctggcaaaaagtgagctggagattggatcacagcccgaggaggt

SEQ ID NO: 21889 - DNA, 491 bp, Homo sapiens
  misc_feature (1)...(491): n = A,T,C or G
gagcgggggnnnnngnntttgatcgcctgcagaattcggcattaggaagcagtcagttgatgggcagngggtgtgcatcagtgatgtcaacaagggccagggctccgtatcagcatcagtgacagagggccagcagaacgagcagtgacaagacaggtggggcctggctccccacccgccagctccaggactgccccttcctgggccaactaaccaaacaactgggaagagcccccaactccaacaggattattttcccaggaggagttacagatgcagccacagattgatcatctgccttaacgtgatcggagatgctttgtaatctactgtccagctgaaagcactcatgttacgaggaagaaactacaagtgatgttcaaatctattttgggtcatttttatgtacctttgggttcaggcattatttggggggtttggttccaaaggaactaaataaagtcatattgcttataaaaaaaaaaaaaaaa

SEQ ID NO: 21890 - DNA, 493 bp, Homo sapiens
  misc_feature (1)...(493): n = A,T,C or G
aggtgtncccnagggcggccnggatagannncctaatcgaccgcctgtcggaattcggcacgagcaccaatgtcagtgtgaaactgatcctcatgaacccagagggccggaaggaaagccaagaactcatagtgcagacagatgaagacctcccaggtgctgttcccactgaatccatacaaggaagtacctttgaagagaagatatttcttcagtggagagaaccaactcaaacatatggtgtaatcactttatatgagatcacctacaaagcagtcagttcctttgacccagaaatagatttatccaatcagagtggaagagtttcaaagctgggaaatgaaacccattttctgttttttggactgtatccggggaccacatactcctttaccatccgagctagcacagctaagggttttgggcctccagcaacaaaccagttcaccaccaaaatatcagcaccctctatgccagcttatgaacttgagac

SEQ ID NO: 21891 - DNA, 512 bp, Homo sapiens
  misc_feature (1)...(512): n = A,T,C or G
agaaaaaaaaaatttgcccgcctgtcggattcggtacgagccaaaaggaggagaagtcaaaggaatagaagggtaggcaacactttgaagcccttctcgcgtgtcctgactccaaaggaaatggctcctactgaacagatgtgactgaagatttttttaatttagttcataaagtgatgctacaacagaataatcaccatgacaactggcccacacctcagagactgattctgatctcccaggaattctgaaggaccctctatccttgacaacaatcatttgcagccaggtagcaacggcggtagtcagaggagctatgatagaccacacccaagcaaggctgccctcaaataacatctcaagatcttagttcttatgcattccatcagtcagaagtgaagaagaggtggagaatctggattggggaccagganatcacttgtattttgttagccaatanattcctagccagtgttgaatganaaaaaaaaaaaaaaaaactcgaggggggg

SEQ ID NO: 21892 - DNA, 525 bp, Homo sapiens
  misc_feature (1)...(525): n = A,T,C or G
ggggtanntaggggaaaaannttagcccgcgtgtagacccgcgctgcaggaattcggcacgaggtaaatttgacagacaaggcctccgcttgagtgcctcagggatggtctggactctggggatgaatgtgtaatcacattagcgtgatgagttaaagggccccatatttttaaatcctcaggcagagctgcattagagaagatgctgttcgagatcagacttatgataaacaggctcatggaaacagcctttgctatcctcattcctggtatagaatgtaagattctgattgtcattctgacatgccccaggaaaggtctctgctcaaacccaagatgagctttaaacctgaggtggaatgccgttctctaagtatctgttctttggctctaacatataccaggaatgagaacagcactctgggtgtgttctcactctcctttaatcctgataagaaaacattntaagtatctccagatccatctatataatttgcaagacgcagtgcaacatgaaatgcatat

SEQ ID NO: 21893 - DNA, 490 bp, Homo sapiens
  misc_feature (1)...(490): n = A,T,C or G
atagcccgcctgcagaattggcacgacggttgtgggcacttctacagcaaggaccatatcatattcatctttgcatccctggcacagtgcatgagacataagtacttaataaatgcagttgaatggataatgattagtgttatttatggattagaaaaagcatgtttctatttaagtaagctgtaaaaagtattattgaatatttactgtaaatatatgttcacataaaaaaataacttggagggtctttgtgtccctggcatattatcatcttcatggaaagaatccactgtggtttctgtagagtgattggaaaaatggattattttgaggattgaagaaagtgttctttctgcgttgtcactttgttcaacagtaaaactttattctcagtgttcctactctgcattggttacatttttgacaggtttttttaatcacctacaatctgtaaagaatgtatatattcttttcagcatctcagtttgan

SEQ ID NO: 21894 - DNA, 489 bp, Homo sapiens
  misc_feature (1)...(489): n = A,T,C or G
gatgggcccccaattgatcgcctgcaggtattcggcacgagcgacaacgccaccatccgtgtcaccaacttgtcagaggacacgcgtgagaccgacctgcaggagctcttccggcctttcggctccatctcccgcatctacctggctaaggacaagaccactggccaatccaagggcttcgccttcatcagcttccaccgccgcgaggatgctgcgcgtgccattgccggggtgtccggctttggctacgaccacctcatcctcaacgtcgagtgggccaagccgtccaccaactaagccagctgccaccgtgtactcggtccgggacccttggcgacagaagacagcctccgagagcgcgggctccaagggcaataaagcagctccactctcaaaaaaaaaaaaaaaaaaaaaaaaaaaanctttccggggccaggggggggcgccgggccccaattcccccttaagggggggggtttaaaattccgg

SEQ ID NO: 21895 - DNA, 505 bp, Homo sapiens
  misc_feature (1)...(505): n = A,T,C or G
ngagcgtnnnnnaaattgaagactgagcgccatgccgaattcgccacgagaagaanaaaaagagaaagtctatcctctatgctactggcctgtttgtacaaagataaaatcattctaatttgtccagaatgactatcaaagatgatcaaatccccagggcctggtgtaacgttccaaatcatagcacaaatacagcttgaccttccttacagtccagaaaggacattctccctgagaaatgcccttggttgctgaggacagctctgtcctgtagtgacagagtgactgcctggctgtggctcttgggttcacagaatccctaatcctccaagcccctaagaggcagggcagggatgctacccacaatatatgcagaaccccagatggagcctgtgggagagagaggaaattaccgtcttcactgtaggcaaaggagaatggctgtgattagccatatatgcctataagaaggagcagagccatactgtccttgtgggttgggaga

SEQ ID NO: 21896 - DNA, 499 bp, Homo sapiens
  misc_feature (1)...(499): n = A,T,C or G
cttcgcccgccctgcnnatagacccgcgctgncaggaaagagcccatttcttagctgctgaaatcagtgctctttcacttcttcagagaagcagggatggtacctacccggcaggtaggttagatgtgggtggtgcatgttaatttcccttagaagttccaagccctgtttcctgcgtaaaggtggtatgtccagttcagagatgtgtataatgagcatggcttgttaagatcaggaggcccacttggatttatagtatagcccttcctccactcccaccagacttgctcatttttcgagtttttaactagactacactctattgagtttaattntgtcctctaggatttatttctgttgtccaaannnnnnnnnnnnnnnnnnnnnnnnccttgggggggggcccgggccccaattcccccttatggggggggaataaaattccctggcccgcgtttaaaacggggggaatggaaaaaaaacccccnccnccnnnccn

SEQ ID NO: 21897 - DNA, 483 bp, Homo sapiens
  misc_feature (1)...(483): n = A,T,C or G
cgtgcggtnaattgaaaatcgatcgccatgctgaattcgccacgagaagaccttcctggctcctcgcctacaggaaacaaatgaaaggcgcttgcatgtcatgcaagctctttcaccatcgtgcccctgcccacctccttagcttcatctcccattgttccccatgatagaacctagtttttgccacatcttgaatatgttatgcccatttaaactttgagacctccatgtgccctacacatcgtgcctccttggtacttccctcactggctgcctggtaactagtaaactcctagttacactataggatttagcatgcggggccacctgcagttttcctaagcacagattgtctttcctgctctgcttctctagccctgtgttcattcttccactgcaagaatgttgttaaataaggcactgngattggtgtgctgtatcccccctagactgtgagttccttgagggcagggaccaattctt

SEQ ID NO: 21898 - DNA, 477 bp, Homo sapiens
  misc_feature (1)...(477): n = A,T,C or G
nattgaaagtttgtggaccttacgaaagagcacgagtggccatataagagaggagccacctgcagtgcctgccccaataatgacaagtgtttggacaatctctgtgttaaccgacagcgagaccaagtcaaacgttactactctgttgtatatccaggctggcccatatatccacgtaacagatacacttctctctttctcattgttaattcagtaattctaatactgtctgttataattaccattttggtacagcacaagtaccctaatttagttcttttggactaatacaattcaggaaagaaaaaacccaaaaaccaacctcattcacatatggctttttttttaaccaataacaattaggtgtacttctattttaaaacatttcagaaaaaaatatatgttatagcaatactcttactcaaaagaagaaatttcctaactctatcagataaactcatctttagtataaataag

SEQ ID NO: 21899 - DNA, 471 bp, Homo sapiens
  misc_feature (1)...(471): n = A,T,C or G
nattgaagctttacgactgtggagagaccacgagtgaccatgtccggagaaccatcctctagccagctcgtcttggcaagtgtcgtccaacccagtgctagctgatagaaccttctgcaacgatgggaatgttctgtacctggataaccccctggcacagatgactactgggtactggaaatgtggccacaaggaaccaaatttttcattgtgtttcatcgtaatttaaattcacatggccctgggtggccagtagcgctcacattggacaaaacagctctatcgtcatcatctgtgctctaccggttttcttggtggctaatttgtaaactggttttggcttcatgcctgcgtaagaactgcaagcactagtagtttatgcctggttttacattttgtgcctgtcgaagtgacattataagaaaagacactatatggtcttnnnaaaaaaaaaaaaanaaaaaaaaaaaa

SEQ ID NO: 21900 - DNA, 504 bp, Homo sapiens
  misc_feature (1)...(504): n = A,T,C or G
cgggcgcggccnccccaaattcgacggctgtagatagaccggctgtaggaattcggcacgagaaactgtctgtcatgagacagtaggttaagagcacagactcaggtgctaggctacatggtttgaatcttgctcagtcatttatcatttctgtggtcatctctttgtgcctagctcccctctataaaatgaggataacaataaaacctgtcttacagtgttgttttgatgattaaatgagtttatacacataaaacagaacagtacccagcagaaaagagccttatgaggatttagatattattacttgaaccttcatattattgttactttgaaggaagagtctttggagtatgagtatattgaggatttgtctttaaagcctactaaaaatttctcaaagtgaaggaaatagcatatatgtgttttatacatactctttgattccactagtaaattacaaaatacattcaaaattaagctataggtttagaggcacatatg

SEQ ID NO: 21901 - DNA, 490 bp, Homo sapiens
atttgacccgcgctgcaggaattcggcatgagccaagatccatgagcttaaacaggccaaagtgagcacagtcatggataccgttggccggaggcttcgggactccctgggccgaactgtggacctggggctgacaggcaaccatggagttgtgcaccctagtcttgcggacagagccaacaagtttgaggagaacacctactgcttcggccggaccgtggagacactgctgctccgctttggcaagaccatcatggaggagcagctggtactgaagcgggtggccaacatcctcatcaacctgtatggcatgacggccgtgctgtcgcgggccagccgctccatccgcattgggctccgcaaccacgaccacgaggttctcttggccaacaccttctgcgtggaagcttacttgcagaatctcttcagcctctctcagctggacaagtatgctccagaaaacctagatgagcagattaagaaagtgtcg

SEQ ID NO: 21902 - DNA, 497 bp, Homo sapiens
  misc_feature (1)...(497): n = A,T,C or G
ccccccccccaattgcaccgctctgcaggaattcggcacgagcaggggtggaagcccctgccactgccactacccgctccagagctttaaggaaaatgaagtgagacccctccccttaggcctggggagccatagggctggcttctctgtgggtgcgtggacgtggggttgggagctgggaatctattttttgtattatgttttgagctactgtagttttggcgtggcactattgtaatggaaataaaatacttgtacggagaanaaaaaaaaaaaaaaaaaaaaaaaaaaaaaaaaaaaaaaaaaaaaaaaaaaaaaannnnnnnnntttgggggggggggccccgcccccatttttctttttggggggggtttaaaaaatttcgggggcggtttttaaaaaggggggaggggggaacaaannnnnnnnnnnnnnnnnnntnnncntgttccttgtgcgggggggcggctcgtctgtgggggggttgttcgcggcc

SEQ ID NO: 21903 - DNA, 482 bp, Homo sapiens
catccgccggctgcaagtagacggcacgagcacagtccctggacagtgatccagacagctggccgccccccaagggatctgtcaccttcagcgagacctatttcctccccacccccagaaacctcttgtgttcttgcctaggcccaggtgttcctggcagccaaatcgagtctctcattttctcttgtggaccagttagttttgcccataacgcagtattctgagtttgcaactgtctctctgatgtgtgccttttgttcaacacagtaacccctgcattctgctctgctctaatacactacctggagaaagtcttttccttattttcaataaatgtcagacattattgagaaaaaaaaaaaaaaaaaaaaaaaaaaaaaaaaaaaatttttgggggggggcccggcccccaattcccctttagggggggggataaaaaattccggggccggggtttaaaaaccgcggaaaggggaaaaaag

SEQ ID NO: 21904 - DNA, 495 bp, Homo sapiens
  misc_feature (1)...(495): n = A,T,C or G
cgcggcgccaattgacggctgtaatagaccggctgtaagaattcggcacgaggtggcaggctggctgggtaccggctgtcgctgacccaggagaagctgcctgtctacatcagcctgggctgcagcgcgctgccgccgcggggccggcagccatggccaaggacatcctgggtgaagcagggctacactttgatgaactgaacaagctgagggtgttggacccagaggttacccagcagaccatagagctgaaggaagagtgcaaagactttgtggacaaaattggccagtttcagaaaatagttggtggtttaattgagcttgttgatcaacttgcaaaagaagcagaaaatgaaaagatgaaggccatcggtgctcggaacttgctcaaatctatagcaaagcagagagaagctcaacagcagcaacttcaagccctaatagcagaaaagaaaatgcagctagaaaggtatcgggttgaatatgaagctttgn

SEQ ID NO: 21905 - DNA, 476 bp, Homo sapiens
  misc_feature (1)...(476): n = A,T,C or G
nattgaanaatcgcaccgcctgcangaattcggcacgagatcaccaagagctttgccaggatccacgagaccaacctgaagaaacagggcctgctgactatgaccttcgctgacccggctgactacaacaagattcaccctgtggacaagctgaccatttagggcctgaaggacttcacccctggcaagcccctgaagtgcatcatcaagcaccccaacgggacccaagagaccatcctcctgaaccacaccttaaacgagacgcagattgagtggttacgcgctggcagtgccctcaacagaatgaaggaactgcaacagtgagggcagtgcctacccgccccgccgatggcgtctagttcagatacacgtgtgccatcagtggatccgatccgtgcagccatggctttctattgcaagatggagtgaccagacatgctttgtgctgcccgcttagcccacggagtgactggcgt

SEQ ID NO: 21906 - DNA, 468 bp, Homo sapiens
  misc_feature (1)...(468): n = A,T,C or G
gggttgggnnggnggaaactggcgccatgagaacntgcgaggctcgggggacaaagaaggcgacattgactacagcaccgtgctcctcggcatgctggtgacgcaggacgtgcagctcgggctcttcatggccgtcatgccgactctcatacaggcgggcgccagtgcatcttctagagtgtactccttctacttataaagagaagtagaactgtcaaaacagcctcaggcaggttcttcaggagctattctagaacaagccatcatcatcataggagacgacagctctgtgccggttattctagaacaagccatcgtcatcatagcagacgacagctctgtgcctgttattctagaacaagccatcgtcatcataggagacgacagctctgtgcctgttattctagaacaagccatcgtcatcgtaggagacgacagctctgtgccggttattctagaacaagccat

SEQ ID NO: 21907 - DNA, 514 bp, Homo sapiens
  misc_feature (1)...(514): n = A,T,C or G
gggggnnnnnnnnaaggagggcccnnagggggnnnnnttatganngcccttctgatccgcctgcaggaattcggcacgagctgcacgctcattactaccctccgctcctgcgctctgccactgtccggaaattcatggttggctacgaaatgcttgctcaagctcagagggacctcacccctgagcaggctgcagagagactaaaggcacttcctgaggttcattaccacctggggcagaaggacagggagacagcaaccatcgcctgaccacgccgaccacagggccttgaatccttttttgttttcaacagtcttgctgaattaagcagaaagggccttgaatcctggcctggaatttgggcagatatagcattaataaaactgtgcatctcaaaaaaaaaaaaaaaaaaccttcaccaaagcgggggctttggcactttaaaatccctttcaggaaaccaggggggacctgcccccatccaggccaggggaggcgccaacaggtggagtgt

SEQ ID NO: 21908 - DNA, 460 bp, Homo sapiens
  misc_feature (1)...(460): n = A,T,C or G
attggaccccgtctgccccgcgctgcaggaattcggcacgagctgcaacctaccctctctctgcctcagccttacacccaagcagtaggtctgtgctctccctgtctctaggtcgctgagagaggtgcttttcttcataaaacctttggggtttggatttccccaggaagatggagaatggaatactcactcttgggtctaatctttccccttgacccagaacttcctccccacaaaaatgcctttaaaaaccttcctgagacttaagcattctgccccacttactaactgccagttctccagcactgaggtggggcagataacggggcatatttaagggggcatctttgtgtaaaagatgcatggagtcaggagaaaaccaccttcataaactgctctgtgcaaagaggaataaaacattttttcccccnnnnannnnnnnnaaaaaaaaaaaacctgg

SEQ ID NO: 21909 - DNA, 448 bp, Homo sapiens
  misc_feature (1)...(448): n = A,T,C or G
ntgtgcccctcgctgcaggaattcggcacgaggagagagagagagagagagagagagagagcacctgaggtcagaagttcaagaccagcctggtcaacatggtgaaacccgggagacggtggttgccgtgagcctatatcaccgcactgctgagcgagactccatctcaaaaaaaaaaaaaaaacttctcaggactttttcgtagaagggctgtcataatactgcctgatgtattttatgtaatgaatggcacactgcaaaaagcggggacttagctgaaaaaattaatcgcgcactcattcagcaaaggtttcagggcctgctgtgtggagacacggttccaagcactgctgcagtagcagggaggaaacagaacggacctcaaacgctgtcccagcaaggactccagtctctgccttgtggatgtgtaactggcacgtgatgtacc

SEQ ID NO: 21910 - DNA, 462 bp, Homo sapiens
  misc_feature (1)...(462): n = A,T,C or G
ctttgaccatcgatccgcgctgcagggngatcaccattatgcagaatccacgccagtacaagatcccagactggttcttgaacagacagaaggatgtaaaggatggaaaatacagccaggtcctagccaatggtctggacaacaagctccgtgaagacctggagcgactgaagaagattcgggcccatagagggctgcgtcacttctggggccttcgtgtccgaggccagcacaccaagaccactggccgccgtggccgcaccgtgggtgtgtccaagaagaaataagtctgtaggccttgtctgttaactcgtgccgaattcggcacgaggtgccgctgcccccaagggtaccagctggactcgagtcagctggactgtgtggacgtggatgaatgccaggactccccctgtgcccaggagtgtgtcaacacccctgggggcttccgctgcgaatgctggg

SEQ ID NO: 21911 - DNA, 474 bp, Homo sapiens
  misc_feature (1)...(474): n = A,T,C or G
atttgaacaccantnannaaatttgcaccgcgctgcaggcgcggaggccaggagctgcgcaaggaggcggaggaggaaactgaggcatgaaaaatgcctcacagaagagggttagggacacctccaggagcagagggagtttcaaccccaccacctcctcacccgggaagttggatctgcctccactccacagaatgtgagagcacccagccctgacagcattaaggagccccttcctgcattcctagagaagtacggatacctcaatgaacaggtccccaaagctcccacctccactcgattcagcgatgccatcagagcgtttcagtgggtgtcccagctacctgtcagcggcgtgttggaccgcgccaccctgcgccagatgactcgtccccgctgcggggttacagataccaacagttatgcggcctgggctgagaggatcagtgacttgtttgctagacaccggaccaa

SEQ ID NO: 21912 - DNA, 470 bp, Homo sapiens
  misc_feature (1)...(470): n = A,T,C or G
natttgaaccgctctgcagcaattcggcacgagccctaggatagtctcataaaggggaggctgggccagcctgctgctgtctgcttcaggaccacgcagagagtgaggctgggggatctcacaccttactccaccgggcacatcccaacctgcactggggcccacccgagcgcttgttctggtctcaaccgctcccttggcagctgcagcccccatgcagaagaggctcccaggcccaagctctgtgtgacccagagaaataaagatgcctcagtgtggcccanannaaaaaaaaaaaaaaaaaaaaaaaaaaaaaaaaaaaaaaaaaaaaaaaaantccgggggggggggccccccccccctccccccttaaggggggggtaaaaaaattccgggggcggggtttaaaaacggggggggggggagaccnnnncnnnnntnnnggnngnngtttggtttctctggccccg

SEQ ID NO: 21913 - DNA, 482 bp, Homo sapiens
catccgccggcctgaggtagtcggcacgagagctgctggtggagagactcgggatgactcctgctcagattcaggccttgctcaggaaaggggaaaagtttggtcgaggagtgatagcgggactcgttgacattggggaaactttgcaatgccccgaagacttaactcccgatgaggttgtggaactagaaaatcaagctgcactgaccaacctgaagcagaagtacctgactgtgatttcaaaccccaggtggttactggagcccatacctaggaaaggaggcaaggatgtattccaggtagacatcccagagcacctgatccctttggggcatgaagtgtgacaagtgtgggctcctgaaaggaatgttccagagaaaccagctaaatcatggcaccttcaatttgccatcgtgacgcagacctgtataaattaggttaaagatgaatttccactgctttccttgtgtgatgcctcctta

SEQ ID NO: 21914 - DNA, 515 bp, Homo sapiens
  misc_feature (1)...(515): n = A,T,C or G
cgggggccnnnnnnnngnnnnnatatgctcgcctgagtaattcgacgagctgcggctgggctggaggtgaggcgaaagaagggcatcctctgatgggagtggaccggagtccgctaaagcgaagcattccagggtcaaggatgcattccaggaaagttctataaaaatataccatcaactccaacctgatatttgacctagccatggaaaacctcattggctcctcactggatcagaccataaaaatgatccaggaatgaaaatctaagataaattcccaccacttcaagatgttcttatacaagtcaacagtctagcagatcagccagtctctttcatcatcaagcagacatactcaagaaagaggaatagtgaagtgaaatatacagaagcatgttcaagttcatctgttgaatctggaattgtgaatagtgacaatattgagaaaaatactgactccaatctgcaaacttcaacttcatttgagccacatttcaaaaagaaaaaagtangtg

SEQ ID NO: 21915 - DNA, 473 bp, Homo sapiens
  misc_feature (1)...(473): n = A,T,C or G
cgcccctggcccgcctgcagaaatttgcccgcgctgcaggaattcggcacgaggaaaccattaagccccaatagctacaaggagggtggttaatctgctatatcaaactccttccctgaaaccagcaaacaccgggaaacattttggctcattataatccggtgaacaatgcagtcaggcctgttataaccgctgagcagccacactcgcacctcctgggtgctgtagtctgtgttggtacaggcttctgcatgcctggtaaagtccagccaaggctggtcaaggcaacatctccacacagaaaatctgcaccagttatgtaagctaaaaagctgtgtgaacccaggtgtcccggaaaggggctgcaggacacagcaaaatgccagcagcatgccggacccctcccttccatcctcctctccaaagaagagaggtcaggaaaaacactggctgggacgctagaanggtcatgt

SEQ ID NO: 21916 - DNA, 503 bp, Homo sapiens
  misc_feature (1)...(503): n = A,T,C or G
aggggnnnnnnaaggagggcccnaggggccccctactgaccgcctgtggaattccctcgagctcttctgcatggtttattttccctctatccttttatttaatgctcttttgtgagataagtttcaccacataatgtgtgagcattttttcctgttaactttatattacaaaatccgttctaccataacaatacagaggaactagctgtgttactgcaccagtgttataggtaacttcagtatattatgaacaaatcaaagaatgtttacttcctgcaaactggtgaattatagaaagcaatccagatgtggtttactctgccacagtctaatgtcattcacttcatttgatggggtcacttgttagctgtcactaataatggaattaatgggaaacacttgataaatgaaactgtaccgttaaatacaatagctgagttttccccagtgtattgtgaaattgacacacactaatacaagatggattatcaggatgtatctaa

SEQ ID NO: 21917 - DNA, 477 bp, Homo sapiens
  misc_feature (1)...(477): n = A,T,C or G
atttgccctcgctgcacgaattcggcacgagcacagctgggcaggaagattatgatcgcctgaggcccctctcctacccagataccgatgttatactgatgtgtttttccatcgacagccctgatagtttagaaaacatcccagaaaagtggaccccagaagtcaagcatttctgtcccaacgtgcccatcatcctggttgggaataagaaggatcttcggaatgatgagcacacaaggcgggagctagccaagatgaagcaggagccggtgaaacctgaagaaggcagagatatggcaaacaggattggcgcttttgggtacatggagtgttcagcaaagaccaaagatggagtgagagaggtttttgaaatggctacgagagctgctctgcaagctagacgtgggaagaaaaaatctgggtgccttgtcttgtgaaaccttgctgcaagcacagcccttatgcggntaattttgg

SEQ ID NO: 21918 - DNA, 467 bp, Homo sapiens
  misc_feature (1)...(467): n = A,T,C or G
nctagatncccttgcggaattccctggagctcatccagcgttacctccgctactttcaccctagtccgagccaccgcttcgctagcctgggttcctgtgaggaccttctcaccagcctgggttcctgtgaggaccttctcaccggactcgctgctcccgcctttgctctcaaaccatccatttacccaagacgatggtttagcccctggaggctgttgcctggaggtgtcccatgatttcatcccttcccttagctaccacctgtgttcactctgccgtatatagtctctctctcccccctttccttattttgccttgtttcccaagcttaagataaccctccccacccacacccccatggagctagggctgcccactattttcactaaactcatagctcaaatatcatctccggcaccccccaccacaacccatttcaaatagtcaccctgtgtcacatcgtcctg

SEQ ID NO: 21919 - DNA, 462 bp, Homo sapiens
attggaccccttttgccccgcgctgcaggaattcggcacgaggaaacccagagccagaaaactcagaaggtgattaaagaaaatttggcaaaggctgaacaagcatgcctaaataccgactggcagattcagtctttacataaacaaaaatgtgatgatctacaacgaaacaaatgttaccaggaagtagccaaactccttagggaaaacagaaggaaagaaatagagataataaatgcaatggtggaggaggaagccaagaagtggaaggaagctgaaggaaaagagttccgtttgagatcagcaaagaaagcttctgctctttcagatgcgtctagaaagtggtttttaaagcaagagataaatgcggctgtagaacatgctgaaaatccatgtcataaagaagaacccaggttccaaaatgaacaggactcaagctgtttgcctagaacctcacaatta

SEQ ID NO: 21920 - DNA, 458 bp, Homo sapiens
aattgaccccgctctgcaggaattcggcacgagtgtctctctctctctctgtgtctctcgatagaggggacactatggatgagtgactgggaagcctcccatgccaaggaggtgggaggtgccctggaaatagctgcctcatgccacttaggccatgactggatttaatgtcagtggtgtgccacagtgcagaggctatacaactgaaaggggctaccaaggctgggaaaaaaatgcaattgttgctgtgagtgactttgaaagactctggtgccttgtggtgcccttctgaaattcaaacagtaatgcacaagtgtctgcattagaatttacggagtctaaaattcatgtttttaaaagagcttgcctacagatggattccacacttgaaattgtgccctgcgagttgcatagctggaagttcaatgctcagtcctaccttggctaccattaaacat

SEQ ID NO: 21921 - DNA, 472 bp, Homo sapiens
  misc_feature (1)...(472): n = A,T,C or G
ntttgacncgttgtccccgcgctgcaggaattcggcacgaggttaattttccattaaaaatgttgtttcaaaggaaggtcatctcttatagtctctcccaagcccatggcccaaggctcatgcagaattaaaataggactctgtactcaacttccacactgctacactgatcataaagaattttgccccattcctgtggaccaaagtatgaaaaaatcttgtatactactagcatataaagctcaaataattatatttattcctctgtataattaactttattctctttggtttgaaggaaaaaagaaggggcatggctggagcagaatgggaatgagaacgcagaaaaacaaccaacaaaatgataacagcaaagccgatggccagctggtctcgagtgaaaagaaggcgaacatgaatctgaaagacctttccaagattagggggagaaagagaggcaaacctggaaccc

SEQ ID NO: 21922 - DNA, 359 bp, Homo sapiens
  misc_feature (1)...(359): n = A,T,C or G
nattgacccgtggtgcaggctctcggcacgagcacagcaggctgaggatgacctgctactgcaggatttcagccgcaatcttttggacaagtcctccgcgctcttgttcggaaacgcgttcatcgggtttgccatccccatctgcttatactgccgaatatggcatatggatcttattcagtctgctgttttgtatagtgtgatgaccctagtaagcacatatttgagagcctttgcatacaacaatgagacttatgttctcaagcacaaaggtccacagaagagggaggatgctgattccaaagaagtgactcgaagactttctgtagctgattatagaaagatgcctcgctaggtga

SEQ ID NO: 21923 - DNA, 473 bp, Homo sapiens
catttgccccgcgctgcaggaattcggtacgaggagaattacccgaaaaacaaccacactgcttcgatcctggacaggatgcaggcagattttaagtgctgtggggctgctaactacacagattgggagaaaatcccttccatgtcgaagaaccgagtccccgactcctgctgcattaatgttactgtgggctgtgggattaatttcaacgagaaggcgatccataaggagggctgtgtggagaagattgggggctggctgaggaaaaatgtgctggtggtagctgcagcagcccttggaattgcttttgtcgaggttttgggaattgtctttgcctgctgcctcgtgaagagtatcagaagtggctacgaggtgatgtaggggtctggtctcctcagcctcctcatctgggggagtggaatagtatcctccaggtttttcaattaaacggattattttttcagaccgaaaaa

SEQ ID NO: 21924 - DNA, 471 bp, Homo sapiens
  misc_feature (1)...(471): n = A,T,C or G
ntttgacccgttgtgcacgcactgcaggaattcggcacgagttcacttcctgtctctcacggcagggaggaaacttagcattccttggagacctaaagggatgcggtgagcttaagaattttcaagagcttatcaatgagtcagcccttgttcatccctgtgcagatgtgtgatggtattgtgggggacctttactgggcactctgccaaataactagagtggcacttgtgctttagtccatttgactatccctttcaccctgtcatttcatctaccagaggaaggaaaaataataataataagacatcgtaaagtgagagaagccccttataggtctttcaactctcgcatttatttagatgcaattgaagcccccagggaataccagatcaatttaaagcttcaaatcaaacagttacaaggtttaagtcaatattttggtagatgacagtcaataaaatgtagattag

SEQ ID NO: 21925 - DNA, 495 bp, Homo sapiens
  misc_feature (1)...(495): n = A,T,C or G
attganngccctnngnnnantgacccggctgcagctcgcagggctggtggaggagatgcacgctgcctatgggaagcctgtcttcctcattggccacagcctcggctgtctacacttgctctatttcctgctgcgccagccccaggcctggaaggaccgctttattgatggcttcatctctcttggggctccctggggtggctccatcaagcccatgctggtcttggcctcaggtgacaaccagggcatccccatcatgtccagcatcaagctgaaagaggagcagcgcataaccaccacctccccctggatgtttccctctcgcatggcgtggcctgaggaccacgtgttcatttccacacccagcttcaactacacaggccgtgacttccaacgcttctttgcagacctgcactttgaggaaggctggtacatgtggctgcagtcacgtgacctcctggcaggactcccagcacctggtgtggaagtatactg

SEQ ID NO: 21926 - DNA, 484 bp, Homo sapiens
  misc_feature (1)...(484): n = A,T,C or G
tggancaacaccacgcaaaaaaaaaatttgacccgcgctgcaggaattcggcacgagctattgctgtgtgacaaattaccccaaatttagcagtttaaaaaacaatacccatagcagttctgtagctcatgagtctggcacagtgtggctggattctctgctcaaggtcttaaaggctgaaataagggttggcaggacaacattccttcatggaggctctggggaagaatctgcttctaagttcattcaggttgttggcggaattcagttctttgctggctctcagctggaggcccctctctcacctcaaggctgcctgcattccttcttatgtggtcccctccagcttcaaaccagccttcctgctctttctcatgcttcatatctctctcccgtcctcctgttttaggggcatatgattagctcaagcccacagatatattttaaggttgattgtgcgatagaacataattgcaggagtacc

SEQ ID NO: 21927 - DNA, 463 bp, Homo sapiens
  misc_feature (1)...(463): n = A,T,C or G
ggggagnnnnncctgaactgatgactatntgagcacgcgcagaaactcagagcaactaaacatttgcccaaatgactccaactgtaggtgtcagacaaaagaaaagaaaaggacttttatgtactttgggggattttcaacaaggcatttttttttaaactatagccccaaagaagggaaacaaactggtaaattcggttctagttatgccccactttgaccgggggtggggtctggaagcaggcttttgtgccctggtgcaaagcacctagtgtaagggtagggttcagtcattgctctgcctacaagcgtgtttttggtgaggaactctggctcccattgccactcataaccctgtcttacatctacagagtggataaggaagatgaaactcagtgtcatataccaaactgaatccaaaggtggcaaataagaccacttccagtccacaggcttgttgtan

SEQ ID NO: 21928 - DNA, 465 bp, Homo sapiens
cttgcccgcctgtagaattccgtcgagagcaacggcgaacagtttgtgtttgagaaaggcgagtacgcccactgggactggtggaccatcagccagaggacagactcagcaacctgaggcccatcaaaggggacagccaagagcacaagatcatcctctatgaaaaccccaacttcaccgggaagaagatggaaatcatagatgacgatgtacccagcttccacgcccatggctaccaggagaaggtgtcatctgtgtgggtgcggagtggcacgtgggttggctactagtaccctggctaccgtgggctgcagtacctgctggagaagggagactacaaggacagcagcaactttggggcccgtcaccctcaggtacagtccgtgcgctgcatccacgacatgcaggggcaccaatgtggtgccttccacccctccaactagtgcccaccccaccatgcctcct

SEQ ID NO: 21929 - DNA, 512 bp, Homo sapiens
  misc_feature (1)...(512): n = A,T,C or G
tcggtatattatatatattannnnntataaaanggggngaaaaagggctggaanaacaaatttgacccggctgcaggaattcggcacgagtgacacacaagatggagagagtggtggtgatgaccagtttcccgagcaggcagagctgtcagggccagaggggatggacgaactgatctccactccttcggttgaggacaagtctgaagagccaccaggcacagagctccagagggacacagaggcctcccaccttgctcccaatcacaccaccttccctaagatccacagccgcagattcagggattactgcagccagatgcttagtaaagaagtggatgcttgtgttaccgacctactcaaagaactggtccgtttccaagaccgtatgtaccagaaagatccagtcaaggccaagactaaacgtcgacttgtgttggggttgagggaggttctcaaacacctgaagctctnnnnnnnnnnnnnnnnnnnnnnnnnnnaaaaaccggggg

SEQ ID NO: 21930 - DNA, 404 bp, Homo sapiens
  misc_feature (1)...(404): n = A,T,C or G
cgagcaacggtgcatgtggatgtcaacagaaggaccacaatggtgtgagaggccttgtgggcatgcagagactggcagcagaaagtcccaagaggagaggactcagaggcttcttccttccaaggaggaggaggaggaggacattccacatctgggcttccagtggtggctcccggacctgccttgggggcagcaggagaggttgggagaggtcaccctgatgaagaacaatgccatgatctgctgctgccagaggacatctccgcccatccactcattttccacctgtacacattggctcattcattcgatggatatttcgggtgcatctactttatgccaggctctatgctangagctggggatactgtggagaaaaagtcggatatggtctcgctctcatc

SEQ ID NO: 21931 - DNA, 459 bp, Homo sapiens
  misc_feature (1)...(459): n = A,T,C or G
atttcccccggttgcangacttcggcacgagcccagccttctgtccgtgttgtgcgcagggtacacgaggaatctccctgccctggcacagccctcagagcacatggcgcaggttccaagctgcccctgccctgccacagcccccagagcacatggcgcggattccgaaccactcctggaagcctagaggccagaggagggaggagagcaggaccagcagctggcccagaccccgcttcttcccacaccgcttccacttttctccctcttcactgagtcatcttgaaagggctcagcagcagtaactgtgggacaggggctcttccgtttgaaaaattaaaaaaggcttggttaaggcaccaatgacatggccgggcacagtggttcatatctaaaattccagcatattgggaggccaaggcgggtggataacctgaggtcaggagttcaagaccagcc

SEQ ID NO: 21932 - DNA, 455 bp, Homo sapiens
atttcccggtttgcccggctgcagaattcggcacgaggtctgtggtacctgtgtacgccagggatgctctgacaaccacgtgtcgtccacggacgggggcatggacatggtgacagtggtcctgttgatgtcaccgatgatgctgagcgcctccttcagcgcgtggtgcatgtgcagcatctcgtcgtgctgctgtgcctgctctgccaactcctccatcagtgtgttctggttcccacatgagtacatattggccagcggctccgagatgatgaactccggggtctgagagtgggcaaacagggaagaaggctgggacctggtgcctgtgccgacctggctgccttgctgggcccttctgggactgtgcgctggacttggagccccttggagtatggcttttcacacgggcttctataccgctgcgactggaagatccacctgccgactggctt

SEQ ID NO: 21933 - DNA, 457 bp, Homo sapiens
atttgccccggtctgacgagatttggcacgaggtctttggtacctgtgttcgtcagggatgctctgacaaccaggtgtcgtccacgggcgggggcatgggcatggtgacagtggtcctgttgatgtcaccgatgatgctgagcgcctccttcagcgcgtggtgcatgtgcagcatctcgtcgtgctgctgtgcctgctctgccaactcctccatcagtgtgttctggttcccacatgagtacatattggccagcggctccgagatgatgaactccggggtctgagagtgggcaaacagggaagaaggttgggacctggtgcctgtgccgccctggctgccttgctgggcccttctgggactgtgcgctggacttggagccccttggagtatggcttttcacacgggcttctataccgcttcgactggaagatccacctcccgactggcttttctcac

SEQ ID NO: 21934 - DNA, 477 bp, Homo sapiens
  misc_feature (1)...(477): n = A,T,C or G
cgcccccctttgcccgcgnctgagnaaatttccccccgctgcaggaattcggcacgagggcagaagcagctggtgggaaatacagaagcacagtcagcaaaagcaaagacccctcggggctgctcatctctgtgatcagcagcactcactgagaaaggcgtcttgtttcctggactttggggtgtaaggccttggagtccggagattcctgtcacgagttgcagatttgtgttttcacactctggatactttcaaccacctgtgcgtggccacagccacaaatacaagaatctgcagtgagctggtaggaggactgggtttgaaggcacacatcggttttcaattttttgccctgcctccgcattctggtccattccttaaaaaacagaaccaaaccaatttcaaattatccttcatgcactggacctctgcacctcccaaaaaattannggtgggntggagtgggagcggtggatn

SEQ ID NO: 21935 - DNA, 490 bp, Homo sapiens
  misc_feature (1)...(490): n = A,T,C or G
ngggggggattgacctccaccggctgcaggaattcggcacgagtattgagtctgtggccgacttcggttccggtctctgcagcagccgtgatcgcttagtggagtgcttagggtagttggccaggatgccgaatatcaaaatcttcagcggcagctcccaccaggacttatctcagaaaattgctgaccgcctgggcctggagctaggcaaggtggtgactaagaaattcagcaaccaggagacctgtgtggaaattggtgaaagtgtacgtggagaggatgtctacattgttcagagtggttgtggcgaaatcaatgacaatttaatggagcttttgatcatgattaatgcctgcaagattgcttcagccagccgggttactgcagtcatcccatgcttcccttatgcccggcaggataagaaagataagagccgggcgccaatctcagccaagcttgttgcaaatatgctatctgtagcaggtgcaaa

SEQ ID NO: 21936 - DNA, 505 bp, Homo sapiens
  misc_feature (1)...(505): n = A,T,C or G
agagcggannnnnatttcccggctgtggaattcggcacgagcaagaacccgcatgggaattggagatgaggctgtgtctgggccctggagctgggatgacattgagtttgagctgctgacctgggatgaggaaggagattttggagatccctggtccagaattccatttaccttctgggccagataccaccagaatgcccgctccagattccctcagacctttgccggtcccattattggtcctggtggtacagccagtgccaacttcgctgccaactttggtgccattggtttcttctgggttgagtgagatgttggatattgctatcaatcgcagtagtctttcccctgtgtgaagctgaagcctcagattccttctaaacacagctatctagagagccacatcctgttgactgaaagtggcatgcaagataaatttatttgctgttccttgtctactgcttttttttccccttgtggtgctgcaagttttggtatcagaaat

SEQ ID NO: 21937 - DNA, 462 bp, Homo sapiens
atttgccccgggtttgccgagctctgcaggaattcggcacgaggcaagtgacactgcccatctctaagataagaacctggaaaggggactctgttggccattggaaattgcagaataatgtctcaggtgacatttagtgatgtggctatagacttctctcatgaagagtgggcatgcctagattctgctcagagggacttatacaaggatgtgatggtccagaattatgagaacctggtctctgtaggtaaggatatcaccccttccactccaataggggacacctttcttttgccaccctgaattgctggagattctcctaagtaaatggctgaatttctgtaccatgctcccgaggaaatgtgcagctctgttgtgccctgcctaaagcttatctttccatttcagtgaacacccttcatccattcctggggtccctcttgtgatggcctctcataatag

SEQ ID NO: 21938 - DNA, 513 bp, Homo sapiens
  misc_feature (1)...(513): n = A,T,C or G
agagagatgnnnntttggccgccctttcgcancggctgcaggaattcggcacgagcatacgtgaacaaatttggggctacatggaatcacaaaatttagctgactttccccgacctgttcatcacaggatacccaactttaagggcgcttctcatgctgccgagcaactcccacgcttgcaggcgttcaaaacggccaggaccattaaagtaaatcctgatgccccccagaaaagtgctcgcttcttcgtccttgaaagcaaaaaaacattgttggttccaacaccacgactgagaacgggattgtttaataagatcacaccaccccctggggcaactaaagacatcttgagaaaatgtgccacctctcaggtgccaccagagcgactggggagacaggatagaatttccaaaacatgctccattggaaattgcctcaccagttctaattgggcagtgcctgcccccgtggaccctgcgagatgatgagaacacagggtttccttgagtgcag

SEQ ID NO: 21939 - DNA, 465 bp, Homo sapiens
  misc_feature (1)...(465): n = A,T,C or G
ctagacccgcctgttagaattcgcacgaggaanatccttcacccgtgaactggcgcttgctgaaacctccgggtgctgaaacctgcggctgcagaaacaggagcttcctgcataccttggagtggcctgaagatctgcagagaaggcggaggcgggcgccttcgacgcgttcttggtttttcttggctctgccagtgcggttggcccaggtttgggtccatctccgtgtctttccatttctgagtttcagtgtgaaaggagagtacccaacaatgtggtcattcatgagttgagactgccctgaactgaggttctttgtgtctctgtgttaaatcggaatgtttaacaagtaggagtttggaagactccattcctggtgacagtcaggtatgggaccagtcctttataacgtttagtaatgactgccagttgactntgtaaagtgctgtgtcctcataacgttgn

SEQ ID NO: 21940 - DNA, 485 bp, Homo sapiens
  misc_feature (1)...(485): n = A,T,C or G
cggggccnggnnattgacnnccattgacccgcgctgcaggaattcggcacgagattttaaactgtatgtatacattagcgcattcatgcctttctaaacgcatttcaaatgtcaaccaggaaggcacaccactgtattagttttatactgccgctgtaaaatttaccacaaacttagtgacttaacacaaatttattgcaattctgtaggctggaagtctgactatgggtctcactggactagaatcaaggctggcaggctgccttccttcctggaggttctaggggagactctgtctcctgctccttcaggctgctggcagaatccacatcctttcggtggcagggccaaggtccccactttcttgctgactgtaaactaaggccacttccagcttgtagaggctgcctacattccttggctcttggccccctcctccatcttcagagctagcaggttcagtctgtgtcacgaaccatttctcn

SEQ ID NO: 21941 - DNA, 488 bp, Homo sapiens
  misc_feature (1)...(488): n = A,T,C or G
ggatgccggnnnnnnnnnnncctagaaatcgatgcgcgctgcacgaattccgcacgagctcaaggcagcagtcatttcagtccacctgatgatataggatctgcagaatctaactgtaactacaaagatggggcatatgaaaactgtcagctgtaacctacaatgctgtaacccagtacctacaaaatcagctcgctctcagaaaaggaacctgtttcttagaagaagtaacatttttgccaaaagatgactggggttttccgtttgttaatattaagcacatcagaacgtgaattgccaaagtcttcattagaaggcagcatttttcctctctgatacttttcagtcattttccttagagctttattaaattatgcatgctaagatttaaaggagccccagataaacatgatggggaaaagcactgaactaagagtcccatggtttctcttctggtcacagttcttccattggttggatctgatact

SEQ ID NO: 21942 - DNA, 451 bp, Homo sapiens
  misc_feature (1)...(451): n = A,T,C or G
atagaaattctccccggctgcaggaattcggcacgagctgtgaggttgttcggctatgtccaagtgtcgtttactaatgtacccctgctgtttgcttttggtaatgtgatgttgatgttctccccctacccacaaccatgcccttgagggtagcagggcagcagcataccaaagagatgtgctgcaggactccggaggcagcctgggtgggtgagccatggggcagttgacctgggtcttgaaagagtcgggagtgacaagctcagagagcatgaactgatgctggcatgaaggattccaggaagatcatggagacctggctggtagctgtaacagagatggtggagtccaaggaaacagcctgtctctggtgaatgggactttctttggtggacacttggcaccagctctgagagcccttcccctgtgtcctgccaccatgtgggtcagn

SEQ ID NO: 21943 - DNA, 434 bp, Homo sapiens
  misc_feature (1)...(434): n = A,T,C or G
agagagggnnnnnntttcgccggccgttccancggctgcaggaattcggcacgaggaacagctcatccccaacttggctatgaaggaggttattgacgcattcatctctgagaatggctgggtggaggactactgaggttccctgccctacctggcgtcctggtccaggggagccctgggcagaagcccccggcccctatacatagtttatgttcctggccaccccgaccgcttcccccaagttctgctgttggactctggactgtttcccctctcagcatcgcttttgctgggccgtgatcgtccccctttgtgggctggaaaagcaggtgagggtgggctgggctgaggccattgccgccactatctgtgtaataaaatccgtgagcaccgaggtgggcgtgctggtgtgtgaaaaaaaaaaaaaaaaaaaa

SEQ ID NO: 21944 - DNA, 479 bp, Homo sapiens
  misc_feature (1)...(479): n = A,T,C or G
atagaaagccattaaaaantttgaccccgctgcaggaattcggcacgagaggagatgctgagccgcatcgagaagcagctcaagcgccgctttgccattggctcccaggtgtctgagcacagcatcatcaaggacttcaccaagcagaaatacccggagcacgccatccacaaggtgctgcagctcatgctgcggcgcggcgagatccagcatcgcatgcagcgcaaggttctctaccgcctcaagtgagtcgcgccgcctcactggactcatggactcgcccacgcctcgcccctcctgccgctgcctgccattgacaatgttgctgggacctctgcctccccactgcagccctcgaacttcccaggcaccctcctttctgccccagaggaaggagctgtagtgtcctgctgcctctgggcgcccgcctctagcgcggttctgggaagtgtgcttttggcatccgttaataataaagn

SEQ ID NO: 21945 - DNA, 505 bp, Homo sapiens
  misc_feature (1)...(505): n = A,T,C or G
agagggggnnnnnaattcccggctgctagattcggcacgagcagcaacaagctgaggattcagctcataaaacaggtttggtgtcttggtgatctcacataaccaagaagctaccccgtggggaaccacatccccctggatgccctccagccttggtttgggctggagtcagggcctgtatacagtattttgaatttgtatgccactggtttgcattgctggtcaagaactctagtgctttgcatagccctggtttagaaacatgttatagcagatcttggtatagagcaaactagaagaaccagcaatcattccactgtgctgccaaggtacacctcagtactccccttcccaacagaagtggtatgaggctagctctttgcaaaagcattcaagtttggcttctgatgtgactcacaatttaggaaccagatgctcgatcacataagctctgaaaatctgaggaacattgtangaaaggtttgttaagcatctcttaagtgcc

SEQ ID NO: 21946 - DNA, 479 bp, Homo sapiens
  misc_feature (1)...(479): n = A,T,C or G
cgcccccttgcaacggctgcagaattcgtacgagctggcatggatgccctgctgcggngcctgtcctggggtgcctgaatgtgcagtaggctggcctggagccaggtgctgcctgcagtgagctgagggtggtgctgggaacaggtgacacccctgagcactgcccaggtgctagggtagcagccttgcaatcttccttagagatgcgggaagcaggggctggggagggccctcggctgaggtcagccagggagcagcccatgtctgggtgccagatcttaccctctttggcactgctggtgaccaagaagctgcaagcatggcatgtgggtggacactgtatagtggggcatgtgggtgtcaggagggtggtgggacccagcttggggtgttcaaagtgggtggcgacaggggtggcaggccgcattctatgccctgggaaggacaacaagaagcaaaagagaaaacgtctcacgcct

SEQ ID NO: 21947 - DNA, 491 bp, Homo sapiens
  misc_feature (1)...(491): n = A,T,C or G
agacacacttagatcggccttangaaaantttgatncgcctgcangaattcggcacgagctgcaaagcagccctgggcgggagcggcaacatctccacgtcacccttttggagccgccgacattcagaggggcaggacacgggaacgcgcgctgtcttgctttacggcgcgggtgcgcgagtttgcggcagcgtgacgccctcaagttttggcgggaaaagcgctgcatttggattcctgcagtggtgggcaaaggacagtccgccgaggtgctcggtggagtcatggcagtgccctttgtggaagactgggacttggtgcaaaccctgggagaaggtgcctatggagaagttcaacttgctgtgaatagagtaactgaagaagcagtcgcagtgaagattgtagatatgaagcgtgccgtagactgtccagaaaatattaagaaagagatctgtatcaataaaatgctaaatcatgaaaatgtagtaaan

SEQ ID NO: 21948 - DNA, 472 bp, Homo sapiens
  misc_feature (1)...(472): n = A,T,C or G
nattgaccgcgctggaggaactctgcacgaggaatcacanaaagcagatgctcagcaatcaggcctcatggaggaaagctaatctcacctgcaaaattgcaatcgacaatctagagaaagcagaacttcttcagggaggagatctcttaaggcaaaggaaaaccaccaaagagagcctggcccagacatccagtaccatcactgagagcctcatggggatcagcaggatgatggcccagcaggtccagcagagcgaggaggccatgcagtctctagtcacttcttcacgaacgatcctggatgcaaatgaagaatttaagtccatgtcgggcaccatccagctgggccggaagcttatcacaaaatacaatcgccgggagctgacggacaagcttctcatcttccttgcgctagccctgtttcttgctacggtcctctatattgtgaaaaagcggctctttccatttttgtg

SEQ ID NO: 21949 - DNA, 473 bp, Homo sapiens
  misc_feature (1)...(473): n = A,T,C or G
atttgacccgcgctgcaggaatttcggcacgacgtgatccgcccacctagacctcccaagtgccgggattacaggcgtgagccaccgagcccggcccagtttaaaatattttctaatttcctttgtgatttcttccttgttacatgggttatttagaagtgtattaggctccatgtatttgaggatttcccaagtctttttctgttgttgatttctaatttaatttcattatttcatttttttttttatttaccaaggcttgttttatgtcccagaatggtgtcttttagtggatgttccatgttcacttgagtagaatgtgtagtctgctgtcattgggtggaatgttctgtaaatgtcagccaagttaagttggttggtagtgatggtaaggtttgcttgttctgtcagttaccaaaagaggagttttgaattattcaactaaattgtagatttgttcctcccccgcaccn

SEQ ID NO: 21950 - DNA, 478 bp, Homo sapiens
  misc_feature (1)...(478): n = A,T,C or G
acgcgccccattgcccatcgtacccgcctgcaggaattcggcacgagtttaaacccctacacctgcgttaatgtgttaggctggactggctccagcctctcccctctagcctctcagcaacctccacagttaggccctcctggagacccctcctggctgcctcaggccatctcctgtacatccctcctcctcccctcacccagcttgttctttctccccacccccatcttccttatttttcttcttttctttgcaacctcaaaacataaaccctcaagctcatttccgcagcctgatgtgcagtcttcctctctgtcttgtgtctctcctctcacccatgcctccgtgggggacagaaggctacaccgtgtggctctggcagcccctcactccacacagtgtaggcatgtgctgttctatcacacatggacactaagagatcttgtcaagtagacagagactaagaggacctatgtgn

SEQ ID NO: 21951 - DNA, 503 bp, Homo sapiens
  misc_feature (1)...(503): n = A,T,C or G
ggtggtgcaaatcgcggctgtnganatcgaccggctgcggaattcggcacgagtgcagcatatttttcttaccaaaggagtcttcagccctataaaaggattcctctatagtgtatttctctagtgtatttagtgtgtcgtcaaaattttgatttatacagagctttcaagaacacacaatgcaaagtgagcgcagcatagctgttaacaaacatacaacttttttctagggctttaagggtggtcatttttttcaagttctctcaagtgtcccaaatcagggtagcaatcttgttgccacatgtgcagcaaacaaagtggaagtatagatcttcttctcccttagggaggctcttgaaggagcaggaggtacagtactgggtagcagtctggccctcctgtcgtctggttggtgttggggcctccagccagggccctctaggggaaccaagcctctgctctcacctgtgggttcttgcccatcagggtaattgtattgagag

SEQ ID NO: 21952 - DNA, 429 bp, Homo sapiens
  misc_feature (1)...(429): n = A,T,C or G
nggtgggaattgacctctgtggcttgttgttgtccatcctgcagcaaagactttggtagacattgccaaatcccaagatgctgaggtgggtgatggcaccacctcagtgaccttgctggctgcagagtttctgaagcaggtgaaaccctatgtggaggaaggtttacacccccagatcatcattcgagctttccgcacagccacccagctggcagttaacaagatcaaagagattgctgtgaccgtgaagaaggcagataaagtggagcagaggaagctgctggaaaagtgtgccatgaccgctctgagctccaagctgatctcccagcagaaagctttctttgctaagatggtggtggatgcagtgatgatgctcgatgatttgctgcagcttaaaatgattggaatcaagaaggtacagggtggagc

SEQ ID NO: 21953 - DNA, 468 bp, Homo sapiens
  misc_feature (1)...(468): n = A,T,C or G
agtggggnnnnnnccttgaactgactgaccnattgcagcacgcgctttactccaaccctctcctgcctgctttcctgagatgtcctggtcttccttggtgccagaagagggcactaccacaggaccctctcaagcttctcaggcaacagcttgaggtccctgaggggagtggcaagccctaatgcaactcaccctcatcctggtgcttacgtggcagagggtgggcagcaggggacagggatgggatggcaaaaccaccaactgcccttggtggcaggtgggtggagatgggatgcgtgccaacctcagatgccaactcaggtcatcaaggccaaggaccagtggcgaaagtgagtcttggggtaccttatgccttggctagtctgcgttcctctccctgcatgctgtgtatcctaactccctacaacagcccctcaaataaatcacatctagtgactggtaaaaaaa

SEQ ID NO: 21954 - DNA, 474 bp, Homo sapiens
catttgccccgcgctgcaggttcagaatgaaaatgggtcaagcttgaaaaaacaacgtacatggatcctactggtaaaactagaacttgggaatcagtgaaacgtacaaccaggaaagagcagactgcggatggtgtcgcggtcatccccgtgctgcagagaacacttcactatgagtgtatcgttctggtgaaacagttccgaccaccaatggggggctactgcatagagttccctgcaggtctcatagatgatggtgaaaccccagaagcagctgctctccgggagcttgaagaagaaactggctacaaaggggacattgccgaatgttctccagcggtctgtatggacccaggcttgtcaaactgtactatacacatcgtgacagtcaccattaacggagatgatgccgaaaacgcaaggccgaagccaaagccaggggatggagagtttgttgaagtcatttctttaccc

SEQ ID NO: 21955 - DNA, 479 bp, Homo sapiens
  misc_feature (1)...(479): n = A,T,C or G
attagaccgcgctgcggnncncaatgtgcccccgctgcaggaattcggcacgagtggacaccagccgtgtgcagcctatcaagctggccagggtcaccaaggtcctgggcaggaccggttctcagggacagtgcacgcaggtgcgcgtggaattcatggacgacacgagccgatccatcatccgcaatgtaaaaggccccgtgcgcgagggcgacgtgctcacccttttggagtcagagcgagaagcccggaggttgcgctgagcttggctgctcgctgggtcttggatgtcgggttcgaccacttggccgatgggaatggtctgtcacagtctgctccttttttttgtccgccacacgtaactgagatgctcctttaaataaagcgtttgtgtttcaagttnnnnnaaaaaaaaaaaaaaaaaaaaaaaaaaaaaaaaactttggggggggggccgggccccaaattccccttaaagg

SEQ ID NO: 21956 - DNA, 435 bp, Homo sapiens
  misc_feature (1)...(435): n = A,T,C or G
agggnnccatcgcccggctgcaggaattcggcacgaggcgagctgagccctggccgccgcccaatgggccgcgagtttgggaatctgacgcggatgcggcatgtgatcagctacagcttgtcaccgttcgagcagcgcgcctatccgcacgtcttcactaaaggaatccccaatgttctgcgccgcattcgggagtctttctttcgcgtggtgccgcagtttgtagtgttttatcttatctacacatgggggactgaagagttcgagagatccaagaggaagaatccagctgcctatgaaaatgacaaatgagcaacgcatccggatgacggttccctgtctctgaaagacctttctctggaagaggagtctgcattgtagtgtctcaaagacacaataaacttcctatggtctgcaaaaaaaaaaaaaaaaaaa

SEQ ID NO: 21957 - DNA, 479 bp, Homo sapiens
  misc_feature (1)...(479): n = A,T,C or G
atagaccaccaagaaaaantttgacccccgctgcaggaattcggcacgagccacggccacgaggcaggccaactccctcaagccgcttcccggcgaagctgcccgtgccttgggagtgcggactgagaacgggaagaacaagggaaattgatgaaagtggtggacttgaaatttcccgttcatctcccaaagctttcaacccattcgacgcaaagaagtgacactttcttaatgcagcagaggggaagcttaggtttatgttgaggattctgttcctggaattgtgtgagctaggaatggaggaggggagactttcaatggttaaggctccatttctcattttcccaacttttatatgattgtctatgggcagtttgaatttctggttttcaatttattttttaatgattaattcgtattaaggcaacaagacagtacaacaaataatctctagagaggtccactttgttgctgaagtn

SEQ ID NO: 21958 - DNA, 479 bp, Homo sapiens
ggtggggattgacctctgtggacttcggacgaggaacctgcggctgaaacacaccgaggagatcaccacgatgcggaatgattttgagaggcaagttcgagaaattgaggccaagtatgataagaagatgaagatgctgagggacgaactcgacttgcggagaaagactgagctccacgaagtggaggagaggaagaatggccagatccacacgctgatgcagcgccacgaggaggccttcaccgacattaagaactactacaacgacatcaccctcaacaacctggccctcatcaactccctcaaggagcagatggaggacatgcggaagaaggaggaccacctggagagggagatggcagaggtgtctgggcagaacaagcgcctggcagaccctctccagaaggctcgggaggagatgagcgagatgcagaaacagctcgcaaactacgagagggaaagcagatcctgctttgcac

SEQ ID NO: 21959 - DNA, 479 bp, Homo sapiens
  misc_feature (1)...(479): n = A,T,C or G
ggggccnnnnnnnnnnnccatganctcctgacgttttctagtggaggaagaacaaactttttaataagcaatgctgaaataaatgaacagttatatgcaaaaaaagagtatcaagcaaaccctaacaccttatacagaaattactttaaaatgtaaaatggatctaaatgtaaaacataaaattctaggatttttagaagaaaatacaggaaaagtctttgtaaccttgggtttgtaagaaagttcttagataggacaccaaggcagtccctaaaagaaaaaattgataaattggacttcataaaaataaaacatttttgctctgtgaatgacactgctaaaagaatgaaaagacacaggccatagaaaaggagaaaatattagctaatcacatatgtgacaaaggacttgtatataagatatataaacaactctgaaaacaataacaactcaattttaaaataagagagcagaagact

SEQ ID NO: 21960 - DNA, 472 bp, Homo sapiens
  misc_feature (1)...(472): n = A,T,C or G
nttgaccgcctgcagaattttgacgacgcttggaccacacaaagtcttactgatttcaggtaaaaacaataattgaagatgtccagcaaaacagcaagcaccaacaatatagcccaggcaaggagaactgtgcagcagttaagattagaagcctccattgaaagaataaaggtttcgaaggcatcagcggacctcatgtcctactgtgaggaacatgccaggagtgaccctttgctgataggaataccaacttcagaaaaccctttcaaggataaaaaaacttgcatcatcttatagtggaatagagaaacagctcctcgcctcttcccaacaacgcaaattatgagcagctccttgaagagatttaccttcagcttatttggtaaccactgctaataactaaaatgttctcagcttggaataatggactctgaagtctctattttccaagttgtcctttctcttataatac

SEQ ID NO: 21961 - DNA, 484 bp, Homo sapiens
  misc_feature (1)...(484): n = A,T,C or G
cggcggggnattgangctcgatcgccctcggaattcggcacgagtattcccctggtagcctacttccttacccccgaatattggtaagatcgatcaatggcttcaggacatgggttctcttctcctgtgatcattcaagtgctcactgcatgaagactggcttgtctcagtgtttcaacctcaccagggctgtctcttggtccacacctcgctccctgttagtgccgtatgacagcccccatcaaatgaccttggccaagtcacggtttctctgtggtcaaggttggttggctgattggtggaaagtagggtggaccaaaggaggccacgtgagcagtcagcaccagttctgcaccagcagcgcctccgtcctagtgggtgttcctgtttctcctggccctgggtgggctagggcctgattcgggaagatgcctttgcagggaggggaggataagtgggatctaccaattgattctggcaaaac

SEQ ID NO: 21962 - DNA, 542 bp, Homo sapiens
  misc_feature (1)...(542): n = A,T,C or G
agaggtattcgacggctgtggttnttccatggngtcaaaaggtacctaagtatatgattgcgagtggaaaaataggggacagaaatcaggtattggcagtttttccattttcatttgtgtgtgaatttttaatataaatgcggagacgtaaagcattaatgcaagttaaaatgtttcagtgaacaagtttcagcggttcaactttataataattataaataaacctgttaaatttttctggacaatgccagcatttggatttttttaaaacaagtaaatttcttattgatggcaactaaatggtgtttgtagcatttttatcatacagtagattccatccattcactatacttttctaactgagttgtcctacatgcaagtacatgtttttaatgttgtctgtcttctgtgctgttcctgtaagctcgtgccgaattcggcacgagcagccttctgactgggtcggaggcctgcgggcccgaagcctctgtccctcctgttcttgtccggcgctgcttagcccctccgcgtagtcatcatgg

SEQ ID NO: 21963 - DNA, 472 bp, Homo sapiens
  misc_feature (1)...(472): n = A,T,C or G
aggcggnttnnaactgacagtanggctcggacagagcacgtgcttacataccagggagcagtacgtggtccgagctagagtcaacaccaaggcccagggggaatggagtgaagatctcactgcttggacccttagtgacattcttcctcctcaaccagaaaacatcaagatttccaacattacacactcctcggctgtgatttcttggacaatattggatggctattctatttcttctattactatccgttacaaggttcaaggcaagaatgaagaccagcacgttgatgtgaagataaagaatgccaccatcactcagtatcagctcaagggcctagagcctgaaacagcataccaggtggacatttttgcagagaacaacatagggtcaagcaacccagccttttctcatgaactggtgaccctcccagaatctcaagcaccagcggacctcggaggggggaagatgctg

SEQ ID NO: 21964 - DNA, 476 bp, Homo sapiens
  misc_feature (1)...(476): n = A,T,C or G
ggtgggcctgacgtcggtggcaattccggatccaaatgtggcgtttttctaagaatgaaaattatatgtaagcttttaagcatcatgaagaacaatttatgttcacattaagatacgttctaaagggggatggccaaggggtgacatcttaattcctaaactaccttagctgcatagtggaagaggagagcatgaagcaaagaattccaggaaacccaagaggctgagaattcttttgtctaccatagaattattatccagactggaatttttgtttgttagaacacccttcagttgcaatatgctaatcccactttacaaagaatataaaagctatattttgaagacttgagttatttcagaaaaaactacagccctttttgtcttacctgccttttactttcgtgtggatatgtgaagcattgggtcgggaactagctgtagaacacaactaaaaactcatgtcttttttcacn

SEQ ID NO: 21965 - DNA, 464 bp, Homo sapiens
  misc_feature (1)...(464): n = A,T,C or G
atgtgccctctctgccgcactgcaggaattcggcacgagcagcagaattttctccccgtcttccccttcctgccattttccctcccttgaaaggttgacactggacaaccttggggcagctgagccctggccgcctcctggctggaaccatgagaaggaagctcagtacttcccacagtgtccctgttgataactgtttttattaactgaattgtttttttcatggaccaaacttttttttgtactgtccccttattgatgttacccagttttaataaaagaatcttctgactccaagcatatatataccaagagaaaaaatttttggggggggggccgggccccaattcccccttaagggggggggtttaaaattccccgggccgggttttaaaaccgcgggaagggtggagaccccnnnntnntgtgnnnnntttgcgtccccttgcggtgggagacgaggc

SEQ ID NO: 21966 - DNA, 511 bp, Homo sapiens
  misc_feature (1)...(511): n = A,T,C or G
aggagtccccnaggtggnnnnnaattganncctactgatcgctttcggaattcgccacgagggacaatgaacatgggattagtcccaagtttgtagcttggaacggtagcatttttgcctgcgtgatccttgtcagctattcacagaaggaaatcttccgaaactccgtctttcatttcagccggtgaggctgttatccttctctgtcaattagcattcatgtggttttcgctctttccagctctgtcactcttgttttcatttaaatattgccccactctgtgtttattgccttgccatttctctagcatatcaggtttaattatgggctcagtaataatgaggaactagcttccctcaggcaactaattacttttgtcttttttggtcggattgtaccaaattattttgcattgaatgggaatgtttttgcagtgaatccagatatagttgtattggtttggaaaaacatttaaatatatttattcatatgaacatgtgtgattaaaca

SEQ ID NO: 21967 - DNA, 485 bp, Homo sapiens
  misc_feature (1)...(485): n = A,T,C or G
agtgccgggnnngnnnnnntttgacactcatgcgcgctgtcgaattcagcacgagccaacatagatggaccaaacgctaaatctgttcagagagagcaaagcttacactcctttcatacgcttttctgtaggcgatgttttagatatgactgcttcctacatccttttcatgcaacacccaacacttataagcggaagaacacagaaacagctctagacaacaaaccttgtggaccacagtgttaccagcatttggagggagcaaaggagtttgctgctgctctcaccgctgagcggataaagaccccaccaaaacgtccaggaggccgcagaagaggacggcttcccaataacagtagcaggcccagcacccccaccattaatgtgctggaatcaaaggatacagacagtgatagggaagcagggactgaaacggggggagagaacaatgataaagaagaagaagagaagaaagatgaaacttg

SEQ ID NO: 21968 - DNA, 504 bp, Homo sapiens
agaaaccctggcacgcctgtggatatggcacgacctgatgacacctcttaatagcattgcaattgtattgaatcacataatgattcataagtaactagggaaccaactgattttgctaagcagtcttccccttataacaccacaggcccttctgacacacaaaaaaatgaaagttaatcctgggtacagcatacagttttacatttaaacgcacagtcttacgtggacaaatgcaagcacaagcctaaagcaaggtcaagcagatggcaaaaccgaatttgcctgcaaagaaatctatttaactgaatcagcccataatatttgaggcacgaggttactgtgattgataggaaagataaaaatgatgtctgtttttgtagacgaataaccatcaacatgacaacaaaattcattggggtctaccagcgtgcattccatttcccactgaccatgcaggtgcacgtcgcggaaatactggtttaactactagtgtgtactgcctca

SEQ ID NO: 21969 - DNA, 481 bp, Homo sapiens
  misc_feature (1)...(481): n = A,T,C or G
cggggtnattgaaactgacggtcgtggcannnnncncnnnagnattaacatacaattttattgatgatacacaaattaaatcaatgaaaatgacagattggagtttactcatgatgaattggttcactgtcacttatgcagaagaaatagcaaaatatttcaatctaggcagcgagataaaaagcaacaaacatgttttcagaacaagtagtgatattcatttatccatcttaaacctaaagaccaactcagttaaatatcagcattgatgatacaatatgatattcattattcaaaactggcagctgaaaggattcctttaccatataaacaaggtggagaaaatgaatagtttacaatgtgtgttgcttctaaattacaaaatcaaggtgttattcctggctctttgggaacatatgttcagcaagtttggccatgaattttccaacttttactttcaccaaaaaatcatggtgacttt

SEQ ID NO: 21970 - DNA, 481 bp, Homo sapiens
  misc_feature (1)...(481): n = A,T,C or G
aggtggggnattgacgcttganngacntcggcacgagccgcggcgccggcactgcagctggggctgagaagccaggacggcccgagaactgacagacggagtgacagacggactgaccatggccgaccagccaaaacccatcagcccgctcaagaacctgctggccggcggctttggcggcgtgtgcctggtgttcgtcggtcaccctctggacacggtcaaggtccgactgcagacacagccaccgagtttgcctggacaacctcccatgtactctgggacctttgactgtttccggaagactctttttagagagggcatcacggggctatatcggggaatggctgcccctatcatcggggtcactcccatgtttgccgtgtgcttctttgggtttggtttggggaagaaactacaacagaaacacccagaagatgtgctcagctatccccagctttttgcagctgggatgttatctggc

SEQ ID NO: 21971 - DNA, 479 bp, Homo sapiens
  misc_feature (1)...(479): n = A,T,C or G
cgggctannttttggcccgttgaggaactctgcacgagtgaagagataccgcagggagccagtggctgctggaaggatgacctccagaaggaactgagtgatatatggtgatgcccagcctgcagtctgacccctgaccctcctctgaacccgttcccccaacgggatctggcagtgaccaccagaacctggagcccacctgagtccagacttccctcaccccctaggactcaccccaccacggcccccaaccttagctgtactgctgtctacaccctgagcagtgtggagtctcccagcgcccccagctccttgtcttcttgcaggtctgctgtgcacgtgctgcagaactccatagacagcctcactttgtgctcgggggcctgtcccaaggcctcgagcctaagaggccacaaggggcaccagtgcctgagccctccactcccctcctgggactctgactccgactctgaccaggn

SEQ ID NO: 21972 - DNA, 497 bp, Homo sapiens
  misc_feature (1)...(497): n = A,T,C or G
cgcggtggcattgacggctgtggaaatcgaccgccattgaatacggcacgagtgcngcctttgtctccttcagaggtgctctgatcttaactacagcttggcattagaagtagttgtttatatccccatgtgcagcaaagtctttttcctgagatcatatcacatgtgccaagttatatgccaagccatggttctcaagctgaaggtacagcaccctgggcccttacttgttctgaaaggggtgggggtggtggttttggacatactgttagactttctgagccacaactgaggtagctatggcttatcgtattttgacttcacaggtgaatctccgctgtcagccaggaatagccaggaatagctaaaatagctccttaagctgtaacatttctcttttccaaccccagcaaaggattggtctagtggtaacaacaaacctcatagaagtagtacacctattattctggagatacttgcttctatagatttattaa

SEQ ID NO: 21973 - DNA, 473 bp, Homo sapiens
  misc_feature (1)...(473): n = A,T,C or G
aggcggnttttttactgatcgattagctaaggacttggcacgagaacagatgcagcattttgctgctaccttacaagcttctcttctgtcaggactccagaggctggaaagggaccgggactggaaagggaccaggactgaacagactggttacaaagactccaaacaatttcatgccctgtgctgttacagaggagaacaaaatgctttcagcaaggatttgaaaactcttccgtccctgcaggaaaggattgatgctgatagaagagcctggacagatgtaatgagaactaaagaaaacagatggctggagatgacatttatccagggtcactttgtcaggccctaggacttaaatcgaagttgaacttttttttttttttacccaaataaatagggaaagggaggagggaaagggaggacaggnaaagaaaataccatgcataaatgggttactgaatttttatatctga

SEQ ID NO: 21974 - DNA, 481 bp, Homo sapiens
  misc_feature (1)...(481): n = A,T,C or G
aggggggntttgancctcgagcgnccttaggaattcggcacgagctctagccaagtctaactttatttagacgctgtagatggacaagcttgattgttggaaccaaaatgggaacattaaacaaacatcacagccctcactaataacattgctgtcaagtgtagattccccccttcaaaaaaagcttgtgaccattttgtatggcttgtctggaaacttctgtaaatcttatgttttagtaaaatattttttgttattctactttgcctttgtacagtttattttactgtgtttatttcattttcccaatttgacaatcgtattttaaaattgaaactgatggaacattctttcttggtcttcaccatctgacaaattgaatggcaagaggtggattttgccagtttcttttcactgatgcagatttgtgttaagatagtactgaatggagtatttataaactggccctgagcatgcataa

SEQ ID NO: 21975 - DNA, 510 bp, Homo sapiens
  misc_feature (1)...(510): n = A,T,C or G
agcggnnnnnnntttcgatcgcccggctgcaggaattcggcacgagacaagcccagacatcttcagtcctttggtgattaaatgcacattagcaaatctatgtcttgtcctgattcactgtcataaagcatgagcagaggctagaagtatcatctggattgttgtgaaacgtttaaaagcagtggcccctccctgcttttattcatttcccccatcctggtttaagtataaagcactgtgaatgaaggtagttgtcaggttagctgcaggggtgtgggtgtttttattttattttattttattttatttttgaggggggaggtagtttaattttatgggctcctttcccccttttttggtgatctaattgcattggttaaaagcagctaaccaggtctttagaatatgctctagccaagtctaactttatttagacgctgtagatggacaagcttgattgttggaaccaaaatgggaacattaaacaaacatcacagccctcactaatat

SEQ ID NO: 21976 - DNA, 474 bp, Homo sapiens
gtgggcccaattgaccatcgatccgcgctgcaggaattcggcacgaggaccaatgccagccagagtcctgcgggggtgggcccggccctccctggatctcctccctcctcccaggggttcagatgtggtggggtagggccctggaagtctcccaggtcttccctccctcctctgatggatggcttgcagggcagcccctggtaaccagcccagtcaggccccagccccgtttcttaagaaacttttagggaccctgcagctctggagtgggtggagggagggagctacgggcaggaggaagaattttgtagagctgccagcgctctcccaggttcacccacccaggcttcaccagccctgtgcgggctctgggggcagaggtggcagaaatggtgctgggcactagtgttccaggcagccctgggctaaacaaaagcttgaacttgccacttcagcggggagatgagaggcagg

SEQ ID NO: 21977 - DNA, 463 bp, Homo sapiens
cttggacccccctgtatgccccgcgctgcaggattcggcacgaggagggcagcttctcgcaggtgtccaccatggccctacacatcgcccaggctgacgctgaggacagcccgccaagcctgcagcgccacagcctggccgccaggtattacaactgggtgtcctttcccgggtgcctggccagaggggctgagacccgtggttcctccaggatgaagacatttgaggaattccccatgaccccaacgacctacaaaggctctgtggggcatgtgaccctcaccctgggatggaatggacgccttgtttctggctcagcttcccagggacaggtgttaggacaaccagacagacagtgggatggtgctggcctcggaggagtttgagcagatagagagcaggcatagacaagaaagcggcttcaggtagctgaagcagagagagagaaggcagcatacgtcag

SEQ ID NO: 21978 - DNA, 480 bp, Homo sapiens
ggtggggccttgccgtctgcaggactcggcacgagcagtcctggcgctggatgctgctgctgttccagcttcctaggtgtggaaactgaaggaccaagagattaaacagtggtgcaaaagtggtaagaattcagcattctcctcgacaagtggacgagcatctactgtgctttcacagcggctatcactattgccagcagcaagactgtcagctcggcgccctcgtctggttggatgggaaactgcagttgctaagggagctgggaatctctgaggacaaatgggaattctcactgatttctaggactaccctggggcagagatggagtttcatcacgttgcctgggctggtctcgaaatcctggactcaagtgatctgctggcctcagcctccctaactgctgggactagaggcctgagcgaccacccctggctgtaaacattttcttagctcaaggattgctgaatttgtatccattt

SEQ ID NO: 21979 - DNA, 489 bp, Homo sapiens
  misc_feature (1)...(489): n = A,T,C or G
gggtgtgccggggnnnnnnnnnaatttgccccgcgctgcaggaattcggcacgaggaagatggcggacattcagactgagcgtgcctaccaaaagcagccgaccatctttcaaaacaagaagagggtcctgctgggagaaactggcaaggagaagctcccgcggtactacaagaacatcggtctgggcttcaagacacccaaggaggctattgagggcacctacattgacaagaaatgccccttcactggtaatgtgtccattcgagggcggatcctctctggcgtggtgaccaagatgaagatgcagaggaccattgtcatccgccgagactatctgcactacatccgcaagtacaaccgcttcgagaagcgccacaagaacatgtctgtacacctgtccccctgcttcaaggacgtccagatcggtgacatcgtcacagtgggcgagtgccggcctctgagcaagacagtgcgcttcaacgtgctca

SEQ ID NO: 21980 - DNA, 479 bp, Homo sapiens
  misc_feature (1)...(479): n = A,T,C or G
nattgaacgactgaaggcactgcaggagagctgtacgagaagatgaagacgatgtgctactggtgccactggctgatccggcggtgtgggtatctgaggcagacgatgagccactgcttacctgaggggacctgggggctctactgaggcctctcccctgggggctctactcataggggcacaaccttttagaggtgggtcagcctcccctccaccacttccttccctgtccctggatttcagggacttggtgggcctcccgttgaccctatgtagctgctataaagttaagtgtccctcaggcagggagagggctcacagagtctcctctgtacgtggccatggccagacaccccagtcccttcaccaccacctgctccccacgccaccaccatttgggtggctgtttttaaaaagtaaagttcttagaggataaaaaaaaaaaaaaaaaaaaaaaaactggggggcccgcgacccac

SEQ ID NO: 21981 - DNA, 485 bp, Homo sapiens
  misc_feature (1)...(485): n = A,T,C or G
attgatccccctcggaannnattgatcgcctgtcagattcggcacgagccgctgagggcctgctgcaggaggcgctagacaaggatagtggctacccggagacgctggtcaacctcatcgtcctgtcccagcacctgggcaagccccctgaggtgacaaaccgatacctgtcccagctgaaggatgcccacaggtcccatcccttcatcaaggagtaccaggccaaggagaacgactttgacaggctggtgctacagtacgctcccagcgcctgaggctggcccagagctgtcaggaccatgaagccaggacagaggccaggagccagccctgcagccctccccacccggcatccacctgcatcccctctgggggcaggagcccacccccagcacccccatctgttaataaatatctcaactccnnnnnaaaaaaaaaaaaaaaaaaaaaaaaaaaaaaannccttgggggggggcccgcgcccn

SEQ ID NO: 21982 - DNA, 504 bp, Homo sapiens
  misc_feature (1)...(504): n = A,T,C or G
gagcggggnnnnccttgacggcgtggaancgncacagnttggcccgcctgcaggaattcggcacgaggaaactggaggcagtgttaaatgtggccctgagggtgccaagcatcatgctgttggatgtcctgtacagatgggatgtcagctcctttttccagcagatccaaagaagtagccttagtaataaccctcttttccagtataagtatttggctcttaatatgcattatgtagggtatatcttaagtgtggtgctgctaacattgcccaggcagcatctggttcagctttatctatattttttgactgctctgctcctctatgctggacatcaaatttccagggactatgttcggagtgaactggagtttgcctatgagggaccaatgtatttagaacctctctctatgaatcggcttaccacagccttaataggtcaagtggtggttgtactttatgctcctgtgtcatgaaaacaaagcagatttggctgttttcagc

SEQ ID NO: 21983 - DNA, 500 bp, Homo sapiens
  misc_feature (1)...(500): n = A,T,C or G
gggtacccnagggtnnnnnttatgacgccatggaagcgtccgagccncttgagtgtcaataaggaaggcataaaatgtagagatggagttaggtgatgccacgctgggattcactggtggcctatcttacatatgatttcgaaggcagacatgaggaaggccttagtcacattttagagccagccaaattcacatgggctgtgtggccccctgattctagcccattttcctgattctctggcttgtcaatcaagagtatcctccaaatctcttgactttccttttttcagaggtgtaggtttccaaagatgtccccagaagctccacattcaagttctatctacagtttggtttttctttaagtattgtaatgtacataccagagagataatgcagactgtcatgggtggggaatgttctctgatgctcaactcccctagtctgcagattgagttggtaggaggtgtgatttgtttacatgcacctttngtcctgctggn

SEQ ID NO: 21984 - DNA, 508 bp, Homo sapiens
  misc_feature (1)...(508): n = A,T,C or G
tgatgcggtnnnnnnnnttttcgacgcccgtcngaattcggcacgagggttggcgcgcatgccagtagttactgtaaaagacgtgaaccagcaggagttcgtcagagctctggcagccttcctcaaaaagtccgggaagctgaaagtccccgaatgggtggataccgtcaagctggccaagcacaaagagcttgctccctacgatgagaactggttctacacgcgagctgcttccacagcgcggcacctgtacctccggggtggcgctggggttggctccatgaccaagatctatgggggacgtcagagaaacggcgtcatgcccagccacttcagccgaggctccaagagtgtggcccgccgggtcctccaagccctggaggggctgaaaatggtggaaaaggaccaagatggcggccgcaaactgacacctcatggacaaagagatctggacagaatcgccggacaggtggcagctgccaacaagaagcattagaacaaaccatgc

SEQ ID NO: 21985 - DNA, 511 bp, Homo sapiens
  misc_feature (1)...(511): n = A,T,C or G
ggggnnttcnnaaggtgnnnnnnnttttgannccattgaccgccttcggaattcggcacgagggcagcctcagactcgatgaaacgactacaaagtgccatgacagaaggtggtgtggttctacgggaacctcagagaatctatgaataaatggaagcattaattgttttgaacatgtaaatataaatctgtcagccactacagccatcaaaagagagcatctggaagaacagccagcttggaagttttacagcaataatgttgcagtggaatattatttgtagttaaggtcatcctcctcccctttctgtttttttaaatcaagaactacgttctgcccctctcttgggcttcagaagcatctaagaaaagcagtcatcaattataattaactttcaaagggcaagtcagaagttgtttataaattacaaaataaaggcatattatgaactcttaaaaaaaaaaaaaaaaaaaaaaactcgggggggggccggtacccaatccgccttta

SEQ ID NO: 21986 - DNA, 469 bp, Homo sapiens
  misc_feature (1)...(469): n = A,T,C or G
gcgccccatagacatcgtcnccgctgcaggaattcggcacgagaagaaatgttatgatcacgaaggtggtttttccagagcaaggcttagcagttttactgtggatgtgctgacccctgtgatttccccgaatgtgggaatcttgattacataatttgtggcagtggggaactgtgtctgtgtttttccctgggttgttgtcgttttaaaagtggattttgtttgctgtggaagcatatacaaggcgttagtataaactaataaacaggtctttgttcccatctgtaacttactttcaaagtaaagattttgccaggtagtggttggttctcacgcttgtaatctcagtagtctgtgagatgcattgataactttatgttaataccgctcgagctctggagtttgatgtcagtgtggtcaaatatggtggacccgtctctactaatctcttaacttttttttttgttct

SEQ ID NO: 21987 - DNA, 482 bp, Homo sapiens
  misc_feature (1)...(482): n = A,T,C or G
attgatcccctntnnnnnannnnnnnnattgacccgcgctgcaggaattcggcacgagctgtaacgtatgcatgtaataaaggattcaccatgattggagagcactctatttattgtactgtgaataatgatgaaggagagtggagtggcccaccacctgaatgcagaggaaaatctctaacttccaaggacccaccaacagttcagaaacctaccacagtaaatgtttcaactacagaagtctcaccaacttctcagaaaaccaccacaaaaaccaccacaccaaatgctcaagcaacacggagtacacctgtttccaggacaaccaagcattttcatgagacaaccccaaataaaggaagtggaaccacttcaggtactacccgtcttctatctgggcacacgtgtttcacgttgacaggtttgcttgggacgctagtaaccatgggcttgctgacttagccaaagaagagttaagaaga

SEQ ID NO: 21988 - DNA, 477 bp, Homo sapiens
  misc_feature (1)...(477): n = A,T,C or G
attgaccgcctgagngaaannnnnatagcccccgctgcacgaattcggcacgaggagaagagcaagctgaggacgccaaagaatcttgtttgggatctgcagatagcaacaagaatctttaataaccagagacaacacaggaagatactgggcttaggtcttgacttccatatgcttgcaaattctgctgggaaagaaaacagaagaggaaaatggaaattgcatgaacaacagagagatggtatttccagacaagggaataaattcccggaagcaactggccaaggaatgaaaatcctggagaacagagtggaagaaacgcgtattccacatttcctgttgattttctttcctccctaaacactgacctcccgcagtcttcactagcaggtgaggtcacctgtagaggtcatgctgcggagtcccgagtccctgattatattcaagacgtggagctctctttttcccgtcctgctt

SEQ ID NO: 21989 - DNA, 470 bp, Homo sapiens
  misc_feature (1)...(470): n = A,T,C or G
actggcacttcggcctgcggagagacgacgagcggagatggaaatatcctggctcttgcagtggatgcatctcgggcaagatgtacagtgggagaaatcacagatgccctgaaaaaggtatttggtgaacataaagcgaatgatcgaatggtgagtggagcatatcgccaggaatttggagaaagtaaagagataacatctgctatcaagagggttcataaattcatggaacgtgaaggtcgcagacctcgtcttcttgtagcaaaaatgggacaagatggccatgacagaggagcaaaagttattgctacaggatttgctgatcttggttttgatgtggacataggccctcttttccagactcctcgtgaagtggcccagcangctgtggatgcggatgtgcatgctgtgggcataagcaccctcgctgctggcataaaaccctagttcctgaactcatcanagaactt

SEQ ID NO: 21990 - DNA, 461 bp, Homo sapiens
cctatgccccgcgctgtatgaattcggcacgaggagagagagagagagagagagagagagagagagagagagactcgtgccgaatccggcacgagagcggtttttgtttccaagaagccaaaagtgtttagaatgtgcttcccattttgcaccaccctttaaacacttttcgtgaagaaattttgcacagtagtttaaatcttttgttaatgctcctccgaagtttttcagggggtaaaagtaacatcagtggagggtattattttaaataaattttaattgagaatttggtgcattttcagcaaattttaaaacatttttaggttttacagagattttaacctttacacaacagatctttaaaaaacaggtgaatacgagtgagtttaacaaagacacatttagaatagatctgagtgtgagaactacagaactgtgtcagaaataacacatactacctt

SEQ ID NO: 21991 - DNA, 450 bp, Homo sapiens
  misc_feature (1)...(450): n = A,T,C or G
ggcgcggaannnnnaatgacccgcctgtagaatccggcacgagcagacatccctaagaacttttacaaattattataaatttgtcacacctaggtcagcgattaaaatagtgttttgcaaatggaattttaattaactcaaaatgaattaagagtgcattttaaaaatcacaagtgagactttgatgttttggccccccagccaaaacttaatggtcataaatgaattttatctacaaaatctctttaaatttggctggttgccttgtcatatgtaatttcactattttccaaggaaatatataggaagcaattatgaaactgagaatagttttatatagaattcttttatttactgataatgcattaacatttttattgaaatgcaatggaatatgtgccaaaacacgtgaaaagcttacataaagaaaggcatcagttgtcgtttgga

SEQ ID NO: 21992 - DNA, 465 bp, Homo sapiens
  misc_feature (1)...(465): n = A,T,C or G
ctcagcccccgncttagcccccgcgctgcaggaattcggcacgagaaatcattatattgatggggtacaaaatatacaaaaaagccgagactactgaattaaaaatatacattttttcaggcacagatggaacatttacaaccacatactatgccatagagcaaatctcaaacaaatgccagaggatacatatgtattcattttttacaactgctacaacaaattaccacaaacttagtggtggaaaacaacccaaatgtattatgttacagctctacaggtcagaagtctaaaacaggcctcaccaggctacaatcactgatggcaggtacagctgcccctggaggctgaaaggtcaaatccatctccttagcccttgcaggttctagaagccgcccacatactgaggatcatggccttcttcttccaacttcaaagtcagcaacatcttgatgcttctcatgc

SEQ ID NO: 21993 - DNA, 565 bp, Homo sapiens
  misc_feature (1)...(565): n = A,T,C or G
tcttgcatcggctctcgcgtcactgatcgtgacggtgtctcttcgtttgctgcggatgtctcactcctccncntcagtgggaggcgnnggnnnnnntttgtttggactgccctgcggtaanncgcacgaggccatgcgtccggccgccgcggctatgttcgtgtccgacttccgcacagagttctacgaggaggtccagagccagagggtccttctcttcgtggcctcggacgtggatgctctgtgggcgtgcaagatccttcaagccttgttccagtgtgaccacgtgcaatatacgctggttccagtttctgggtggcaagaacttgaaactgcatttcttgagcataaagaacagtttcattattttattctcataaactgtggagctaatgtagacctattggatattcttcaacctgatgaagacactatattctttgtgtgtgacacccataggccagtcaatgtcgtcaatgtatacaacgatacccagatcaaattactcattaaacaagatgatgaccttgaagttcccgcctatgaagacatcttcagggatgaa

SEQ ID NO: 21994 - DNA, 476 bp, Homo sapiens
  misc_feature (1)...(476): n = A,T,C or G
cgctggtgnnnnanaccgatcttcgatgcgcgatttcggacgagaaaaaaaaggtcttggtgaggtgccgccatttcatctgtcctcattctctgcgcctttcgcagagcttccagcagcggtatgttgggccagagcatccggaggttcacaacctctgtggtccgtaggagccactatgaggagggccctgggaagaatttgccattttcagtggaaaacaagtggtcgttactagctaagatgtgtttgtactttggatctgcatttgctacacccttccttgtagtaagacaccaactgcttaaaacataaggatgtttcagttcctccatttaacagatatgaagagcattttaagaggtgcagcctctggaagtggatcaaactagaactcatatgccatactagatatgtttgtcaataaacttatgacgtgaaaaaaaaaaaaaaaaaaaaaaaaacctagggggggg

SEQ ID NO: 21995 - DNA, 460 bp, Homo sapiens
  misc_feature (1)...(460): n = A,T,C or G
ntctggtctcctgccgtgccattctaattntcctgctgcaccccataccccaacacccctcacgaacattgatataagcagtattaacacagtataaagaatgttcaccttgcatatgtcatttcaggcacatggattcaggagaagcacagttgagtggaagaaatggtagacttgtgaggcttgccccaggccttgtgtacacgcaataagtggtgagccatgggtctctccgtcagcgcctccctccccgccaccacttcaggccaacaatttaaggtgctgagttgtaaggctcctccattgtcagtacagggctcgcctttgtagccctgatcactagcagtacacttttcaagacaactgagtatttttgtatgcctttgccttccctttgtccatgaaacatgaagagttgtttatggttcttgacttctctgagcagagtgtctgcatctct

SEQ ID NO: 21996 - DNA, 480 bp, Homo sapiens
  misc_feature (1)...(480): n = A,T,C or G
agcggcncattgaaattgacccgcgctgcaggaattcggcacgagctgcaaaggaagattctcatgcacagattgaaaccctctgagatatcaaccccctaggagcatggaggtgatgtgctgtgacacgagtggtggaatgcttcactggagaaggggatgtgtcctgtgctgtccctgtgctcgccacccacactcccctcccagaggaggcacggtgcccagcctgcaaactcaccccagtcacccagccagcggagaatgtcatacaggtgcttctccttcatcatagcatctttggagaaggaggcaattttttccagcaagatgaatctcttcttgccctttggatctctctgctgagatttggcattttcttttaaatcatatcctaattcttcctggaagcggntgatgacacaattgacattgtccaaaatgtctgagagctgggtagaaatatcctatagagaagcagca

SEQ ID NO: 21997 - DNA, 494 bp, Homo sapiens
  misc_feature (1)...(494): n = A,T,C or G
nctagacccgcgctgcaggaatttggcacgacgttgtaccagactttggataaggtctgcccagaacgagtagtaattgctcttgctgttctactaggcacatcaatgttatagtattgatctaaatggaagagaaaacatttttttagttaaaaagaaaacaatgcccaaactaaaaaataacttatgttgactattatgctcaaagacaatgtttatcattttaatagagatgtttttactaattaatttgaactttataacaaaaagaaaaacaattgcctagacttttcagcttttttgatgtttcaaaagattgacatttcaccatctttttgtaaaatcaggttcagctctcctttatgaagtaaacattaaagagtaaccaagtttgaaaaataatttacttggggttattccttttaaaaaatacatgccaatgtcattcatattatgaaattacaggcagaataacttagatttctgggcatttc

SEQ ID NO: 21998 - DNA, 515 bp, Homo sapiens
  misc_feature (1)...(515): n = A,T,C or G
agcggnnnnnnnnnattccactcggctgcagtctcagtcactggatgcacaaaatcactgtgtaacattggctcacttggtgagcatagggttgactgataaaatgtttaattcccttgctagcttgtgagaagaatgagttgatgacatgctccataccagtggctagatggagtattaaggtggagcagaaaagaagtgagaacatcttgattcccctttcttttacttgatggtgtttatgaacatgccgtagtgcctttatggccagtttgagtcctgcctactttgacttttacgttcccattcctgtgttaccaccttcctcccgatttgttcacctattttgtgctttaaatctcaataaaatacttactgagggagaaaaaaaaaaaaaaaaaaaaaaaaaaaaaaaaaaaaaaaaaaatttctgggggggggggccggccccccattcccccttagggggggggtaaaaaattcggggggcggggttttaaaaccggggggggggg

SEQ ID NO: 21999 - DNA, 488 bp, Homo sapiens
  misc_feature (1)...(488): n = A,T,C or G
tggaggtncccnnnaggagnnnnnnccttgacccgcgctgttagaattccgctcgaggcgctccggagcgctggctctgctggcgctgagaaatggaccaattttgacaagatatagtgctgcagcgtgcctgatgggatatattcaggcatggcgtgcgaactttgtaagacgatctctgtggcaaggctagaaaagcacaagaatttgttcttaaattataggaatctgcaccattttccattggagttactgaaagatgagggactgcagtacttggagagactctatatgaaaaggaactccctgacatccttgccagaaaaccttgctcagaagcttccaaaccttgtggaactatacctgcactcaaataacatagttgtgggtccggaagccattgggtctcttgtaaaactccaatgtctggatcttagtgacaatgccttagaaattaggtgcccagaaattggtcgtctgagagcttt

SEQ ID NO: 22000 - DNA, 491 bp, Homo sapiens
  misc_feature (1)...(491): n = A,T,C or G
nacgggattgatttccatcgcctgcaggaattcggcacgagtctgggcatcgttcccagtgtccctcacactaaaacggcgtagatggcaaccccccacccccaccccgctgctcaactcttgtgtttgttgttctgtttgccccatttatctgttgctgtttttgtgttgtcttcccctgctccgcattttgtaaaatggcccctgggggagtgtttttgctggatctgctccctctcgctctctcactccactactttttggaacaaagtgatggcagaatgcggtggtggcgggggtcttttgtactgttggattaataaaatgattttaaaatcccaaaaaaaaaaaaaaataaaaaatctctgggggggcccggcgccccattgccccttttggggggcttattaacatttccctgccacgggtttaaaaaagctgtaggtggggggaaannancnntnnntntntgcccaagcttccctgcgcan

SEQ ID NO: 22001 - DNA, 481 bp, Homo sapiens
  misc_feature (1)...(481): n = A,T,C or G
ggagtcgccnnaagagnnnnncatgatncccctgtggaattccgtacgagtatagccaatcccacggccatgctgctgtcggcttccaacatgctgcggcatcttaatcttgagtatcactccagcatgatcgcagatgcggtgaagaaggtgatcaaagttggcaaggtgcggactcgagacatgggcggctacagcaccacaaccgacttcatcaagtctgtcatcggtcacctgcagactaaagggagctagagccctttatttcttccaaccttgcaaggaccacactccccatacccttcagtgcagtgtaccagggaagagaccttgtgcctctaagcagtggaccatggtcaccttgctgggtagagcctaagttgtccttgggccggcttccttaggggacagactgttgggtggtgatggggattgttaggatggagcccangccacatggatgatgatgattctcccccac

SEQ ID NO: 22002 - DNA, 482 bp, Homo sapiens
  misc_feature (1)...(482): n = A,T,C or G
cgggcnggnaattgannccattgaccagcgctgcaagaattcggcacgagccaggctggtctcaaaccccagacctcaggtgatccacccacgtcggcctcccaaagtgctgggattacaggcgtgagccactgcacccggcctctgtttactttttgtacaacggtgatagcagctcttaagtatatccatttgactggatcataaatcagtacactgccagtgagacagtggtatatgcttatttgtaagagaacaacaaatgatatataaaatactagttctagggctaagttcactattaatctaatttaatttgtgactaaacactctggatagacaaaaaagtattctttgatatgacatgttgcaaaagtcacctgtagctatgactatagttgagtgttcttaatagcaaagataactattcaaatttttaaagttcttatttaggctatttgatgataaagggatgtacctgg

SEQ ID NO: 22003 - DNA, 282 bp, Homo sapiens
  misc_feature (1)...(282): n = A,T,C or G
cggagngccatggannccccntanactgagccctgctggaagaattcggcacgagcccatctccccaatattgcccattattaattaacctctttctttggttggaaccctggcagttctgctcccttcctaggatctgcccctgcattgtagcttgcttaacggagcacttctcctttttccaaaggtctacattctagggtgtgggctgagttcttctgtaaagagatgaacgcaatgccaataaaattgaacaagaacaatgaaaaaaaaaaaaaaaaa

SEQ ID NO: 22004 - DNA, 474 bp, Homo sapiens
  misc_feature (1)...(474): n = A,T,C or G
nattgacttgcatgcacgaattccgcacgagaaattgtctaccttttcttcctcacctgttccatttatgtaaagttgagattagagggaaagcattttctatatcaattgtgtttaaacctttcaagaaggttatttagctagcttagtgttgaactaaattttttttaaacaaggcaaggtctaatgctgttttgagattctgaaattaatgaaaatacttatttcagaaatgcatttaatgctttttttcttgtgacagttacgcaaatcagcttgaattccatatgtccctgagttatttttatcataaagccacaaatgtattataacaaggcaaattgtaatatatataatcctgaactcatgaccatgtctcagnttattttttttttcttggattgaaaagtactgaaattcaatgtgacattaaaatgcaaattttcctatttatttgagtagaaaatcacttan

SEQ ID NO: 22005 - DNA, 460 bp, Homo sapiens
  misc_feature (1)...(460): n = A,T,C or G
naatagactcgcgctgcggaattccgcacgaganaatgagatctcaaattatatgaaatggatttttaaatactgtgtttgcatacattgacctataaagaagattaaatatttaggtgaataattccctgctgcagtatttgtacacttcagactacctcttaggaaaagcttaacttagtattgcaaaattccctttctcttttttttttttaaaaaatggggtctcgcactgttgcccaggctgaagtgcaggggcatgattgtaactcactgcatcctcgaactcctgggttaaagcaatcctcctgcttccatctgctgagtaggtaggactacagccatgcaccaacaaaccgggctaattctttttcattaatatagtaagaatcttgctgtgtggtcaagctggactccaactcccggactcaagtaatcctcccaccttagtctcctgcat

SEQ ID NO: 22006 - DNA, 471 bp, Homo sapiens
  misc_feature (1)...(471): n = A,T,C or G
natttgaccgccttgtangacttctgcacgagttcaggtgagcgccgatggccggctgatcataagggaggaggcagacggcaacaagatggaggaagaggaaggtgccaaaggcgaagatgaagagatggctgacccaatggaagatgtgatcatcaggaataaaaagcaccagaagctcaagcaccagaaagaggctgaggaggaggagctggagataccccctcagtaccaagctggaggctctggcattcatcgccctgtggccaagaaggctatgcctggggctgaatacaaggccaagaaagcaaaaggtgatgtgaagaagaaaggccggccggatccctatgcctacatccccctcaacagaagcaagctcaaccgcaggaagaagatgaagctgcagggacagttcaaaggcctggtgaaggctgcccngcgaggttcccangtgggacacaaaaaccgcan

SEQ ID NO: 22007 - DNA, 487 bp, Homo sapiens
  misc_feature (1)...(487): n = A,T,C or G
agctggtnnnaactgatactcatcggcatgcgcaancgcgacgaggaaaccttggtcccgttaacttactagtcacattgaccaatgttttatagaaatgcctataattttgagactaatagtagctatccattagcattccaaaagttttgtgctttttaaaatttgttttggtaattatcacatttttttctcttaccttcctttaaatggccacagtgtgtactgctggaatgttccatccaaaagatgtagcttcagaagcacagtgattgccccagggtccatgagatattgttcgtattatgaagttggagtgctgtctactgaaattatactcttaaataaatatgtatgtagtgtgtaatattttctaataaattcttttgataaaaaaaaaaaaaaaaaactcgctcgagccgaattcggcacgagcctgttccaacctttatttttgaaactgttttagagcactttgtctttctca

SEQ ID NO: 22008 - DNA, 499 bp, Homo sapiens
  misc_feature (1)...(499): n = A,T,C or G
ngagcgtnnnnaaattgaggactgaggaacatgccacgaggntctctggaggctgagtgccgtttgcggtgccctaggaggccgagctgttgcttcgaactccagtggtcagacctgctcatatctcagcatttcttcaggaccgacctatcccagaatggtgtggagtgcagcacatacacttgtcaccgagccaccattctggctccaaggctgcatctctccactggactagcgagagggttgtcagtgttatgctcctgggtctgcttccggctgcttatttgaatccttgctctgcgatggactattccctggctgcagccctcactcttcatggtcactggggccttggacaagttgttactgactatgttcatggggatgccttgcagaaagctgccaaggcagggcttttggcactttcagctttaacctttgctgggctttgctatttcaactatcacgatgtgggcatctgcaaagctgttgccatgct

SEQ ID NO: 22009 - DNA, 490 bp, Homo sapiens
  misc_feature (1)...(490): n = A,T,C or G
nggagtncccnnnnaggaggnnntttctgatncccctttctgctcacggctgcaggcggcacgagcttcctcaagagatactgctttaacaatagcagcagacaaaggtcactacaaattttgtgaactcctgattcataggggagcccacattgatgttcgtaacaaaaagggaaatacgccactttggctggcatccaatggaggtcattttgatgttgtgcagttgctagtgcaagcaggtgctgatgtggatgcagcagataaccggaaaatcacacctcttatgtcagcatttcgcaagggtcatgtaaaagttgttcaatatttggtaaaggaagtaaatcagttcccttctgatatagaatgcatgagatacatagcaacaattacagataaggaactgttgaaaaaatgtcatcaatgtgtcgaaaccattgtgaaggctaaagaccagcaagctgcagaagcaaataagaatgcgagtatt

SEQ ID NO: 22010 - DNA, 270 bp, Homo sapiens
  misc_feature (1)...(270): n = A,T,C or G
nttgatngatggacggcctcggtgaagccgggagccgtgaacacgggtgtgcagactcaccctaaagggcggcccaggccccacgctagaaggctggcgagaccgaaggcagcatgtgaggcctctcctgggagtgggggttgtgtttcccacagtggcctcatctgcgcccccgctcatgtgagcccgaaggcaggagccgggaggcactcctcccaaacactccactcagaccataaagcactcctgtttcactctgaaaaaaaaaaa

SEQ ID NO: 22011 - DNA, 481 bp, Homo sapiens
  misc_feature (1)...(481): n = A,T,C or G
ntttgacccccttnagaatttgccncgcgctgcaggaattcggcacgagtacagatggtgcattggttcagcatcaggagtgggatgggaaggaaagcacaataacaagaaaattgaaagatgggaaattagtggtggagtgtgtcatgaacaatgtcacctgtactcggatctatgaaaaagtagaataaaaattccatcatcactttggacaggagttaattaagagaatgaccaagctcagttcaatgagcaaatctccatactgtttctttcttttttttttcattactgcgttcaattatctttatcataaacattttacatgcagctatttcaaagtgtgttggattaattaggatcatccctttggttaataaataaatgtgtttgtgctataaaaaaaaaaaaaaaaaaaaaccctgggggggccccgggcccaattcccccttaaggggaggggtttaaaaaacctggcccg

SEQ ID NO: 22012 - DNA, 458 bp, Homo sapiens
  misc_feature (1)...(458): n = A,T,C or G
ntctganccctttgcggacactggnacgagaggaaatcaaataataaattttctgggatagagaaaatttatggactcttagtctagtaccaacaatctaagaacccaaacccccaaacagtccttctaggacaaccatccctagtcagctctcaaaaaatggtgaatctacctctgagctgcaacaagctggcttcacagtgtagtggaaagaggatgggctttactgaatcctggcttgggtgcaaccacagatggagaactaaccagccccagcttcagacctggattcaaatcccactctggcacttacttgctgagtgaccttgggaaaattacttaattcatttgagtccctcgtctgtaaaaagaggatcataatgactaatttgtaggaatgctggaaagattaaacaaagcgatgtctatacatgcctcatgcagtaatccttaacaaa

SEQ ID NO: 22013 - DNA, 483 bp, Homo sapiens
  misc_feature (1)...(483): n = A,T,C or G
attggacngccttaggaanntttcgcaccggctgtangaattcggcacgagagtgcagggaatgtgggaagttttttcgccacaactccagtctttttaaacatcgaaggattcacactggagaaatgcagtgattgtgtgaaatcctttagccagcgtttcaacctcattcaacaccagaaagttcacagtggaaaaaatcttgaaggtaacagatggaaatccgttagccacacctccagtctcattcaacactggacagtttacaatgtggacaatgtagtgaatatggaaaaaggtttcagccaaaggcctaaccctattcaacaccagaaagtttagaatggagaaaggccttatggtgacaggttatgtactgtctctgaatcaatatgacctcacttaaaacagaaactctgaggatggcctttatgagggagctggcaattgaacatcattcatctaaatatgcacactggaggc

SEQ ID NO: 22014 - DNA, 488 bp, Homo sapiens
  misc_feature (1)...(488): n = A,T,C or G
ntttgcaccgcgttgcaggattttgccccgcgctgcttgaattcggcacgagctgcagtttgagacaggagacctggcactggatgcagaaacagttcaccttgaagaacctcttactttaccctggagcccatccagtctcccaacttgtattaaagacagaggcagaagtttggtggtggtggtgttggggtatggtttattaatattcaccataccttccgatccagcagtttggtgcccagagaggcatcatggtggcttccctgcgcccaggaagccatatacacagatgcccattgtagcattgtttgtgatagtgaacaactggaagctgcttaactgtccatcaccaggagactggctaaataaaattagaatatatttataaaaaaaaaaaaaaaaagggggggcccagatcgcaaataaccctataccgatttgtattagcattttttggtcggttgattacattccctcagatttgn

SEQ ID NO: 22015 - DNA, 493 bp, Homo sapiens
  misc_feature (1)...(493): n = A,T,C or G
acggggattgatttccactcgcctgcaggaattcggcacgaggacaaaggtgaaaagacaactcaatggggaatggagagtttttcaacagatgattttaaaacaactgaacatccatatgcaaaaaaataaacctacctaaatttcacagcttatacaaaaattaacctaaaatggatcacggatctaaatgtagaactaaatttataaaatttttagaagaaaaaaatccataggccgggcacggtggctcatgcctgtaatcccagcacttcagaggctgaggcgggcagatccgttgaggtcagttcaagaccagcctagcctatgtggtgaaatcccaactctactaaaaataaaaaataaaaaaaaaatgggctgggagtggtggtgcacacctgtagtcccagctacttgggagactgaagcacaagaatcacttgaacccagcaggcagaggttgcagtgagtggagattgtgccactgcacccn

SEQ ID NO: 22016 - DNA, 458 bp, Homo sapiens
  misc_feature (1)...(458): n = A,T,C or G
nattganngcttgangaccctgcagaattcggacgagccccagcagctgtggccaagagacgcagaaactgccttgtccacgggccccgcctcagactccaacactcacaagagagcagaggagccccaagtcttggggaccacagaagatgccatgtgctccacgatgtcggcccccacctgcctggcccacttgcctccctgcttcctgctgctggcactggtccttgtcccctcagatgcctctgggcagagcagcaggaatgactggcaggtgctacagcccgagggccccatgctggtggcagaaggtgagacacttctactgaggtgtatggtggtcggctcctgcactgatggtatgataaaatgggtgaaggtttgcagtgatctgttacagcggccacgggaagctgaaacagcaggaaagcatggaggtggttctccactaacctgag

SEQ ID NO: 22017 - DNA, 489 bp, Homo sapiens
  misc_feature (1)...(489): n = A,T,C or G
gcgggaattganttcctgtggcattcggcacgaganaatagcctggaaaactgcggcagcaaggaaatccttaccagcttccattacgatgcacaaagggagcctggatttgcagaagtgtaacatgtctccagttgtgaaaattgaacaagtgtttgctcttcagaatgctacaggggatgggaaatttatcgatcaatttgtttattcaacaaagggaattggtaacaaaacagaaataagtgtcagggggcaagacaggcttataatttctacaccaaaccagagaaatgaaaagccaacgcagagtgtatcatctcctgaagcaacatctggttctacaggctcagtagaaaagaagcaacagagaagatcaattagaactcgttctgaatcagagaaatccactgaggttgtgccaaagaagaagatcaaaaaggagcaggttgaaacagttcctcaggctaccgtgaagaattgatacagaaa

SEQ ID NO: 22018 - DNA, 458 bp, Homo sapiens
  misc_feature (1)...(458): n = A,T,C or G
ntttgaccgtcttgaggactctggcacgaggccaagtggaggaagaagcgaatgcgcaggctgaagcgcaaaagaagaaagatgaggcagaggtccaagtaaaccgctagcttgatgcaccgtggaggccacaggagcagaaacatggaatgccagacgctggggatgctggtacaagttgtgggactgcatgctactgtctagagcttgtctcaatggatctagaacttcatcgccctctgatcgccgatcacctctgagacccaccttgctcataaacaaaatgcccatgttggtcctctgccctggacctgtgacattctggactatttctgtgtttatttgtggccgagtgtaacaaccatataataaatcacctcttccgctgttttagctgaagaattaaaaaaaaaaaaaaaaaaactcgcgggacaagggggggcccgtgacccaattcc

SEQ ID NO: 22019 - DNA, 506 bp, Homo sapiens
  misc_feature (1)...(506): n = A,T,C or G
nggggncaacttgatcggctgcggtattcggcacgaggaggcccagggtggagacctaagcgggtataagaccaggtggcctgctccttttctgggccctagcacaggtgggtaacccccacccaacccagctcctgctgctgtcccagtcttgggctggggcctggaaagaggaagaggctgcctggggctgggccagcccgctgtgcactttgaccccagttccttgccagcacggctgctaacagactgccacttgagtgcgccttgcaggcactcccagagcagccatggaaggagctggccctcacaccatccacctccacactgcctcctggccagctgcccaccccagtgccaggtgggagagggagcagaacagccagccccttccaggtggcagtcggaagggtttttgtttttgtttctgttgccatttgtgtaaatactagtctttttggaaaaaaaataatgtaaagatgttttgtataaactctgaanaaaaa

SEQ ID NO: 22020 - DNA, 463 bp, Homo sapiens
  misc_feature (1)...(463): n = A,T,C or G
cttagaccgcccttaggattccgcacgaggtggagagagcacacttangaatcctgggatgttaggtgtaaagaaagctcctggagccagtgattctcaagtttgtcccagaacccttttttctaagccccatataaaaggtagattaaaaaaacaaagtagcatgagtgaaattgagagagggacaggtaatgccttccagcccctaacttctaacaatctggaagcacaacgtgaaaatcacgtagcccaaccctatcattttcatattatgaaactgagtccaggtaagtgaatctgtccaaggtcacccagcaaggtatcagtagccctgagggtaaggactctgataaggctcgggagggtcctggaaagcctgaggcggcaggaagagtgtgcagagttgagcgtgtctggaaggctgatccactgctgggcccacatcaaagcccccatggggagg

SEQ ID NO: 22021 - DNA, 477 bp, Homo sapiens
  misc_feature (1)...(477): n = A,T,C or G
nttttcgaacggctgcangaattcttcgcgagcgtggggggcctggacgcagtggcctcccgaatctcccaggaccctaatatcgcccgaggatgctgggaggaacgctgagccgacctctccgttaggctgaagattgcacaaaccatgctaatggccagcatggatggagggagcgtgtgagatgtgtggggcagcgtgctgcatctcagccaactccaggagccagttgatgtgatggactaccttaattgatttttgaatgttgagccagccttatgcatgtgggataaacccctgttgatcatggacatttttaaattctaggtatagagcaataaaagaagaattcaagcaaagggatcaggaagaggattgctactaagaggcagagaaaccaatgaagccttttgccatctcacactggaaagacaaaaagtcatagaggcttgatttttataaggaaagagaagtgag

SEQ ID NO: 22022 - DNA, 470 bp, Homo sapiens
ccttcgcccgccccgtagccccgccgtgcaggaattccgcacgagaagaaccttctccaaggctaagcgcaagcgaagtgtgaagattagcaacgtggctttggattctatgcattggcaaaatgactgtgtccagatcatagcaagtgtcagtgatttaaaaagcatggatgaatttcttctgaaaaaggtgaatgacctagataatgaagacagcaagaaggatacactagtggatgttgtatttaaaaaagccctgaaggaatttcggcagaatatcttcagcttttattcatctgcattggcgatggatgatgggaaaagcatacggtataaagacctctatgcactatttgaacagattctggaaaagacgatgaggcttgagcagcgtgattcactgggtgaatctccagtgagagtttgggtcaacacttttaaagtgtttttagatgaatatatgaatgaat

SEQ ID NO: 22023 - DNA, 387 bp, Homo sapiens
cttgcccgcctgtggaattcggcacgagcgaccagcagccaccccgcctgcttcatccacatcaagagggtccggtgaggctgcagcagtggttaaggagtaacaccttcttgtattaaggaattttaaactaaataaaatgtatgttggagatactgttacccattctaagaaaacttttcattctgcagttccttcaacaaatatttttgagcaactcctaagggccagccattgtaggtgatgggcattagcagtggtcaagagagactgtaatttggatgtattgttttcagacctaaacacaggttaacaaagatgaaaatacaaccaaataaactggcacagtataaacacaaaaaaaaaaaaaaaaaaactcgcggcaca

SEQ ID NO: 22024 - DNA, 483 bp, Homo sapiens
  misc_feature (1)...(483): n = A,T,C or G
attagaccggccttagngaanttttgcaccggctgtangaattcggcacgagtgtaaatggaacaacaacaacaaaaaaaactacgatcttactgactttgcctaaatacacaagcagctgatgtactattaatgagaacgaaatacacattaggaaaatggagccatttcaatctagtggtttgggcaagatggggaagagaaggggaaacattctagtttctggattacattattatgcccctcctgaaaaggtggttgtcatttgcatttatttaaagcaggtaatatgcaggaatgtaactgaggattatcttcaggcaatcagcaagatatcctcctcatggtccctttagctctcaaaagcaatgaaatcctcctgttctcatttttactgctgtggttgtgctgctgaacaatactatcttctcaaattccatgccacaaattcagcaataactttttggattgaatttaacaact

SEQ ID NO: 22025 - DNA, 481 bp, Homo sapiens
  misc_feature (1)...(481): n = A,T,C or G
nngggcgactgacgcctgttgacacggctgcaagaattcggcacgaggccatctcaattgtgctttgtatcagtcagtgctggagaaatcttgaatagcttatgtacaaaactttttaaattttatattattttgaaactttgctttgggtttgtggcaccctggccaccccatctggctgtgacagcctctgcagtccgtgggctggcagcttgttgatcttttaagattacttccctacccatgcgccattatctggtaaggtttctaggaggtctgttaggtgtacatcctgcagcttattggcttaaaatgtactctccttttatgtgggctctttggggccgattgggagaaagagaaatcaatagtgcaactgttttgatactgaatattgacaagtgtctttntgaaataaagaaccagtccctccaaaaaaaaaaaaaaaaaaaaacctcgggggggggcccgggccccaatc

SEQ ID NO: 22026 - DNA, 496 bp, Homo sapiens
  misc_feature (1)...(496): n = A,T,C or G
agagttnccggggttgnnnnaaatgagngccattgagntcctgcgagaanaccgcacgagccagcatcgaggttccactgtcctaggagagagaggagatgggaagacagggaaaggaaagctacaggaggccacaagcccaccaggtcttcatgtcaagagagggagtaacatgtcttctcattgcccacggacccaacctctgtccaggagcccctcatcatcacagtttaacacaagctcccctgctgcagccaaattgatctcccagtcttgtccttacccattccaagtgctatgccagccactgttcatacaagttttaaggcctgcaccctgctctaagagactgttccaacggctctggacctcagaggtcacttgaccaccattgtctcaaagctgcccactttgtgtgtgtcacatgctgcctgagtcacatgtacatcttattactgcctctagatttgtaagctcctggaaggcggataacatn

SEQ ID NO: 22027 - DNA, 470 bp, Homo sapiens
  misc_feature (1)...(470): n = A,T,C or G
nttggcacctctgccccgcgctgcaggaattcggcacaagcttgaaaccggacaatatgcttatttctaatgagggtcatattaaactgacggattttggcctttcaaaagttactttgaatagagatattaatatgatggatatccttacaacaccatcaatggcaaaacctagacaagattattcaagaaccccaggacaagtgttatcgcttatcagctcgttgggatttaacacaccaattgcagaaaaaaatcaagaccctgcaaacatcctttcagcctgtctgtctgaaacatcacagctttctcaaggactcgtatgccctatgtctgtagatcaaaaggacactacgccttattctagcaaattactaaaatcatgtcttgaaacagttgcctccaacccaggaatgccttgtgagtgtctaacttctaatttactccagtctaggaaaaggctggccaca

SEQ ID NO: 22028 - DNA, 468 bp, Homo sapiens
cctcgcccgcccgtagcacccgctgcaggaattcggcacgagcgcgggccagtttctatctcctcatccagggcttgcgggcgaggcctgttttaagtctccagtaaccgagcggaggcccggcaggcgcgacccgggctgcgtacgtcagagctgcctccgaagtggtaaaatgtgctgcgagaagtggagccgcgtggcggaaatgtttctcttcattgaggagcgggaggattgtaagatactgtgcctttgctccagggcatttgtggaggatcgaaaattgtacaatttgggattaaaaggctattacatcagagacagtggcaacaattcaggagaccaggcgacagaagaagaggaaggtggttattcctgtggtactgcagaatcacatgacagcaaaggcataggcctggatgaaagtgaacttgattctgaggctgaactcatgagaagtatgggatt

SEQ ID NO: 22029 - DNA, 470 bp, Homo sapiens
  misc_feature (1)...(470): n = A,T,C or G
cgggggctatcgcccgtctgcggcattcggcacgaggagaagcagagcttggagcttggagcttggaacctggatcctcccgtacccgcactcccacttcccaggcaccctggagcctgccactactggagaggtctccaaatgacatcccaaggacctacctctgtcctctgtgagcacaaacagagatgcagggtgcctagggctcagaggaccagacgggggcaggacccagcctgcctagttccctgtcgtttgttcccttgctgtggccattgctgccatctcctccactgcttgaaggcctcaccccatgccctctgccactcccatagtgctctgtaaatattatcaggaggaaaaggcctctcacagtgcgtgttgctgtgtacaaaggaatttccatcaataaaagctgatctcttanaaaaaaaaaaaaaaaaaaaaaaaaaaattcgagggggggcccg

SEQ ID NO: 22030 - DNA, 469 bp, Homo sapiens
  misc_feature (1)...(469): n = A,T,C or G
nttgggacctctccgccgggctgcaggaattcggcacgagtgggcaccgagccggagccggatgcagtaggactggactcgggccatatccgtggtgccgtcaacatgcctttcatggacttcctgactgaggatggcttcgagaagggcccagaagagctccgtgctctgttccagaccaagaaggtggatctctcgcagcctctcattgccacgtgccgcaagggagtcaccgcctgccacgtggccttggctgcctacctctgcggcaagcctgatgtggccgtgtacgatggctcctggtccgagtggtttcgccgggcccccccagagagccgtgtgtcccagggaaagtctgagaaggcctgagccgtgacctcttctgcttactgtaactgcggccggtttagtgaccccatgacttacagccggttcttacctcttaggtgaaggagatgacatgtttttn

SEQ ID NO: 22031 - DNA, 466 bp, Homo sapiens
  misc_feature (1)...(466): n = A,T,C or G
ggggccnnaattgcccgcctgatgattcggcacgagagaggacaagacttctgctcaggtttccctggctgctggacacaagtttgatcgggacgtggaactcctgatttactacaatgaggtgcatacccccagcgtggttttggagatggggatgcctaacatgaagccaggtcatttgatgggagatccatctgcaatggtgagtttctatccaaatatcccagaagatcaaccatcaaatacctgtggagagtttatctttctcatggaccgctcgggaagtatgcagagccccatgagtagccaggatacatctcagctgcgaatacaggcagccaaggaaacactgattttgctgctgaagagtttacctataggctgttatttcaacatctatggatttggctcttcctatgaggcatgctttccggagagtgtgaagtacactcagcaaacaatggag

SEQ ID NO: 22032 - DNA, 499 bp, Homo sapiens
  misc_feature (1)...(499): n = A,T,C or G
gttattnaaggaggnnnnnattgaaaccctgatagcctcggaaacgcccgagaggatcanggggaagcgcttacctcgaaaaacttctggtgctacacgtgtgtgtgttgtggtctgtgcctttgcagcgggggaaactgaggccctaagagacggtgtctcaacatgtggtatttggacggctgccatcagagacataatagggggatctctggcggccacttggataaacatggcctctggagccctgcttcagacctacacagccagacttggaacagagcccaaggaactgccattttataccccggggcaggggtgagccccagaagtgcgaggcccattgttcacggggtgaagccacccgtccaaagccaaggaacctcctggacaaagacatgttttccctgtccgacccactgtgcgtcatgtatacccaagggatggagaacaagcagtggcgggagtntgggcgcaccgaagtcatcgacaacacgcn

SEQ ID NO: 22033 - DNA, 491 bp, Homo sapiens
  misc_feature (1)...(491): n = A,T,C or G
ggggnnnnnnnaagggagnnnnnnttaganncccntgcttgaccgcgctgcaggaattcggcacgagaagaaatggcaggatgaggatggcaagaagcagctggagaaggacttcagcagcatgaagaagtactgccaagtcatccgtgtcattgcccacacccagatgcgcctgcttcctctgcgccagaagaaggcccacctgatggagatccaggtgaacggaggcactgtggccgagaagctggactgggcccgcgagaggcttgagcagcaggtacctgtgaaccaagtgtttgggcaggatgagatgatcgacgtcatcggggtgaccaagggcaaaggctacaaaggggtcaccagtcgttggcacaccaagaagctgccccgcaagacccaccgaggcctgcgcaaggtggcctgtattggggcatggcatcctgctcgtgtagccttctctgtggcacgcgctgggcagaaaggctaccatc

SEQ ID NO: 22034 - DNA, 463 bp, Homo sapiens
  misc_feature (1)...(463): n = A,T,C or G
ntttcacccggctgcaggaattcggcacgagctgcgcccttaccttccccagcgtcccagactctggcagttctggaatggaagggttctggctgccccaacctgctgaagggcagaagtggagggtggggggcgctgacaatggactcagggccatgcctgcccccctcatctcattcaaaccccaccctagtttccctgaaggaacattccttagtctcaagggctagcatccctgacgagccaggccgggccgaatcccctccctgtcaaagctgtcacttcgcgtgccctcgctgcttctgtgtgtggtgagcagaaccggagctggggggcgtggacagcccggtgcccctgccacctccctgacccgtctaatatataaatatacagaagtgctatggctatgccctggaggctgcttcttatgtatgggttttttttaatgagatcccttcattcg

SEQ ID NO: 22035 - DNA, 516 bp, Homo sapiens
  misc_feature (1)...(516): n = A,T,C or G
cgcccccccccccgcccccccccccatagccccgccttgaggaattccgcacgagggaattcagtctgccaattaccaaaactgaaaacaggtcctgcataatgacattttggtcaacaacagactcattataggaaggtggtcccataagattataatggaactgaaaaattcctatcgcatagtgacatcctagctatcttaacatcatagcacaatgcattactcatgtgtttatgttgatgctggtgttaacctattgtgctgccagtagtataaaagtatagcatgtcctgtttagatttcttccaagcatactttcctttctttcctgttctaaagcctttttaaataaacttccattcctgctctggaggaaaaaaagtatagtacaattatgtacatagtacttgataaacatttgatttaaacttggggnnnnnnnnnnnncnnnnnnnnnanaaaaanatcttgggggggggcccgggcccaattcccccttaaggggggcgttta

SEQ ID NO: 22036 - DNA, 507 bp, Homo sapiens
  misc_feature (1)...(507): n = A,T,C or G
agaggncccaggggnnnnnttatgatgccataggacgcctgaggctgcggcgaatatctccatgtctttggaggatgtcagctggccgctttcagggcagagtcgggtgggcgttggtgccaccttacgaaggagagcgatgcgtgggtctggccagagctctggagccaatgccgggctgcctgagagcagaggaaatgcatggcccatgtgcatttctgagtattttaaactcgttcaggccctgcagccttcatgatgatgtagcttgcagagaagagcaggagcagaattagccctttcttcaggccatcttgcctcaaagggtacacatgtttggcggttaagatgaaactaacccttatgtttcatcctggccccatgatgtacacatcttagccatgtagtggccttggggggccacagagatttcctttgaggagcatggtagagccacagccatggctgaagcagtggcaccgaggggacaggactgcangcaccang

SEQ ID NO: 22037 - DNA, 513 bp, Homo sapiens
  misc_feature (1)...(513): n = A,T,C or G
ggagggcccnnagggtgnnnnnttactgatcgccatgaggaatgcctcacgagccgcagcgtcgtgtggttcgccaaggggctgcgcgagtacaccaagagtggctatgaatctgcatgtaaagactttgtccctcatgacttggaggtccagattcctggaagagtctttttggtcactggaggaaacagcggcattggcaaagcaactgcccttgaaatcgccaagcgagaacatttttctgcacattgtggacttgtctgatcccaagcaaatctggaaatttgttgaaaatttcaagcaggaacataaactccatgttctgatcaataatgcaggttgcatggtcaataaaagagagctcacagaagatggacttgaaaaaaactttgctgccaatactctgggtggtacattctcacgaccggcctgatccctgtgctggagaaagaacacgacccccgagtgataaccgtctcctcaggaggaatgttggtcagaaactgaacaccc

SEQ ID NO: 22038 - DNA, 463 bp, Homo sapiens
  misc_feature (1)...(463): n = A,T,C or G
nttggccctctcccccgcgctgcaggaattcggcacgagcggcacgagcactcttctctgggacttgtgggcctcagggcttggggcaggcatgggactggcccaggcacacaggtcccggggcatcaggagaaaggctgggtcttgggaccttgtcctccccagttggcctactgttacacattaaaacgatttgcccagctcaaaaaaaaaaaaaaaaaactggggggggggccgggaccccatttccccttatagggagccgtataacaatccatgggccgccgtttaacaacgtcgggactggggaaannnnnnnnnnnnnttnnnnnnnnnntnnttnnnnntnnnnngnnnnnnnnttttnntttntgntnttnnntttttnttnnttnnnnnnnnnnnttttnnttnnntttttttnnttttnntnttttnnntnntttttttttttntttggggg

SEQ ID NO: 22039 - DNA, 483 bp, Homo sapiens
  misc_feature (1)...(483): n = A,T,C or G
cgggacannnnattgaccccgcttgagcngcgctgcaggaattcggcacgagcatctctataatcaagatagcctcattgcttgtgttctgccataccacgagacaagaatatttgtgcgagtcatacagcttctaggaattaataattcaaagcacagatggttctggttgttgccagttaagcaatctggagtgccgttagctaaaggaactttgattacccactgctacaaagatcttggattcatggatttcatttgcagtttggtgacaaaatctgtgaaggtttttgctgagtacccgggcagctcagctcagttgagggtgctcttggctttctatgcttctaccatagtgtcggcgctggtagctgcagaggacgtatcagacaatatcatcggcaaactattttcctatatccaaaagggattgaaatcatctttaccagattacagagctggcacctacatgataatatggca

SEQ ID NO: 22040 - DNA, 473 bp, Homo sapiens
  misc_feature (1)...(473): n = A,T,C or G
nattgaccgacttgaggactntggcacgaggcaccgcggcccgtggaaggtgctgtccgaacgatcgggataggagcggtccctgcgcttgctgctgggaagtggtacaatcatgtttgaaattaagaagatctgttgcatcggtgcaggctatgttggaggacccacatgtagtgtcattgctcatatgtgtcctgaaatcagggtaacggctgttgatgtcaatgaatcaagaatcaatgcgtggaattctcctacacttcctatttatgagccaggactaaaagaagtggtagaatcctgtcgaggaaaaaatctttttttttctaccaaaattgatgatgccatcaaagaagctgatcttgtatttatttctgtgctgtccaaccctgagtttctggcagagggaacagccatcaaggacctaaagaacccagacagagtactgattggaggggatgaaactccagagg

SEQ ID NO: 22041 - DNA, 482 bp, Homo sapiens
atttgacccgcgctgcatgaattcggcacgaggttgatatggttcctggcaagcccatgtgtgttgagagcttctcagactatccacctttgggtcgctttgctgttcgtgatatgagacagacagttgcggtgggtgtcatcaaagcagtggacaagaaggctgctggagctggcaaggtcaccaagtctgcccagaaagctcagaaggctaaatgaatattatccctaatacctgccaccccactcttaatcagtggtggaagaacggtctcagaactgtttgtttcaattggccatttaagtttagtagtaaaagactggttaatgataacaatgcatcgtaaaaccttcagaaggaaaggagaatgttttgtggaccactttggttttcttttttgcgtgtggcagttataagttattagtttttaaaatcagtactttttaatggaaacaacttgaccaaaaatttgtcacagaatt

SEQ ID NO: 22042 - DNA, 509 bp, Homo sapiens
  misc_feature (1)...(509): n = A,T,C or G
aggggaattgancggctgtattgcaccggctgtaggaattcgacatgaagcatatctgtaccgtcgacatggagggggggcccaggacccggatcgccctatatggactcgtttttcaagagggtggccggcgggtcacaacggatggactcgtacatcagcacccggagctggcagacaagaatgtgcccaaccttcatgtcatgaaggccatgcagtctctcaagtcccgaggctacgtgaaggaacagtttgcctggagacatttctactggtaccttaccaatgagggtatccagtatctccgtgaatccttcatctgcccccggagattgtgcctgccaccctacgccgtagccgtccagagactggcaggcctcggcctaaaggtctggagggtgagcgacctgcgagactcacaagaggggaagctgacagagatacctacagacggagtgctgtgccacctggtgccgacaagaaagccgaggctggggctgggtcagcan

SEQ ID NO: 22043 - DNA, 511 bp, Homo sapiens
  misc_feature (1)...(511): n = A,T,C or G
ggggnnnnngggggcnnnnatagatcgccatacgcacgcctgcggttcggttcctgaccagatgtggcaccctaacatctacgagacggaggacgtgtgtatctccatcctccacccgccggtggacgacccccagagcggggagctgccctcagagaggtggaaccccacgcagaacgtcaggaccattctcctgagtgtgatctccctcctgaacgagcccaacaccttctcgcccgcaaacgtggacgcctccgtgatgtacaggaagtggaaagagagcaaggggaaggatcgggagtacacagacatcatccggaagcaggtcctggggaccaaggtggacgcggagcgtgacggcgtgaaggtgcccaccacgctggccgagtactgcgtgaagaccaaggcgccggcgcccgacgagggctcagacctcttctacgacgactactacnangacggcgaggtggaggaggaggccgacagctgcttcggggacgatgaggatgac

SEQ ID NO: 22044 - DNA, 475 bp, Homo sapiens
  misc_feature (1)...(475): n = A,T,C or G
nattgacnaatcgaccgcctgtagaattcgcacgagctacacaagaccctgagactgacctgcaggacgaaaccatgaagagcctgatccttcttgccatcctggccgccttaacggtagtaactttgtgttatgaatcacatgaaagcatggaatcttatgaacttaatcccttcattaacaggagacatgcaaataccttcatatcccctcagcagagatggagagctaaagtccaagagaggatccgagaacgctctaagcctgtccacgagctcaatagggaagcctgtgatgactacagactttgcgaacgctacgccatggtttatggatacaatgctgcctataatcgctacttcaggaagcgccgaggggccaaatgagactgagggaagaaaaaaaaatctctttttttctggaggctggcacctgattttgtatccccctgtagcagcattactgaaatacatag

SEQ ID NO: 22045 - DNA, 478 bp, Homo sapiens
  misc_feature (1)...(478): n = A,T,C or G
ggcccccccncaatgagcccccnctgattgaccccgcgctgcaggaattcggcacgagcgaggtcgcacgcgtgagacttctccgccgcctccgccgcagacgccgccgcgatgcgctacgtcgcctcctacctgctggctgccctagggggcaactcctcccccagcgccaaggacatcaagaagatcttggacagcgtgggtatcgaggcggacgacgaccggctcaacaaggttatcagtgagctgaatggaaaaaacattgaagacgtcattgcccagggtattggcaagcttgccagtgtacctgctggtggggctgtagccgtctctgctgccccaggctctgcagcccctgctgctggttctgcccctgctgcagcagaggagaagaaagatgagaagaaggaggagtctgaagagtcagatgatgacatgggatttggcctttttgattaaattcctgctcccctgcaan

SEQ ID NO: 22046 - DNA, 509 bp, Homo sapiens
  misc_feature (1)...(509): n = A,T,C or G
ccccccccccccccccccctagcncgccttagcatgcctgcagaatacgaacgagctcgtctacacctgcaaggtctgcgggactaggtcctccaagcgcatctccaagctggcctatcaccaaggcgtggtcattgtgacctgccccggctgccagaaccaccatatcatcgctgacaacctgggctggttctcggacctgaatgggaagagaaatatcgaagagatcctgacggccagaggcgagcaggtgcaccgtgtggcgggcgagggggccctggaactggttctggaggctgcaggggcccccacatccactgcagctccggaagcgggtgaggatgagggtccccccagccctggcaagacggagccgagctgactcctgcgctccccggcactgtgggacttcggccttccagaaggaggttttggccctgggcctctctggacgtggcctgttttctatcaataaacagacattacttccaaaaaaaaaaaaaaaaaaa

SEQ ID NO: 22047 - DNA, 451 bp, Homo sapiens
  misc_feature (1)...(451): n = A,T,C or G
agctggccctgtatcgcntgcgtgacgaacgagtgagaggcgggtgggtgttagttcagagggttatgggagggctctggcgtcctggatggaggtgcgttcctttctgtggctggcgctggatccaccctgggtctccaaccagggctgctgatagggtagagccgtttcttatgccacagtggagtgggacaggaggtgccgagagaggactgaggtggcttgtgacatggaagcgctgcagccttcgagcccggcatacagcattgcagccgccgcggcggcctaagagctcgaaccctttcacacgcgcgcaggatgaggagcggcggcggcagaacaagacgaccctcacttacgtggccgctgtcgccgtgggcatgctgggggcgtcctacgctgccgtacccctttatcggctctattgccagactactggacttggaggatc

SEQ ID NO: 22048 - DNA, 457 bp, Homo sapiens
agagggaattgaattgactcgctctgcaggaattcggcacgagaagctgtagaacaaatgtttggggttaccattgaaaatctaatgtctgcaatatttttctcctcacaacttggaaacgttcccagttcattttcagtcctgttgtgagcacagttctgaagggtttattattgtcaaaataagttttgttttgttttgtttatgttgggtttttaatgttgtctcttgacccttaatgctcaggttcttgtgggagttaatcagccacatccaacgttaccttgagggggaagaagagggtgatgctcagaagctaaacaagacaggggccacatgaccctctattgattatccccaagtagaaagtcctgtggttttatgtttaatggtaatagttgatcatatatggcataattttctatcagcttcctactcagtcactataaacacagag

SEQ ID NO: 22049 - DNA, 441 bp, Homo sapiens
  misc_feature (1)...(441): n = A,T,C or G
agatgggacttgcattgcgctgacgaattcggcacgagggggcccccacacctagactcagtaaggaagtcgggttggaccttaacatctgcattggacaactccaccccttccttggccttgcccctgcccgcctacactcctacgtgtccagggcttgggccgtgacttangcagaggagtgcagaggagggtctggcaggggctgctcaggccgcctagctgcccctttgccaggttaataaagcactgacttgtttctcanaaaaaaaaaaaaaaaaaaaaaaaaaaaaaaccctgggggggggcccgggccccaattcccccttaagggggggggtttaaaattccggggccggggttttaacaccggggggggatgaaaaaaacnnnnnnnnnnnnnnnnnnnnnnncnnnnnnnnnnnnnnnnnnnnnnnnncn

SEQ ID NO: 22050 - DNA, 470 bp, Homo sapiens
  misc_feature (1)...(470): n = A,T,C or G
cttgcccggctgcggtatgcggcacgagtggtgctcaacctgctgcagatccagaggaatgtcactctcttccccgaggaggtgatcgccaccatcttttcctccgcctggagggtccctccctgctgcgggacagcagctgctgttgttggcctactgtacccctgtatcgacagtcacctcggagaaccccacaaatttaagagagaatgggccagtgtcatgcgctgcatagcagtttttgttggcattaaccacgccagtgctaaattggattttgccaataatgtccagctgtccttgactttagcagccctatctttgggcctttggtggacatttgatcgttccagaagtggccttgggctggggatcaccatagcttttctagctacgctgatcacgcagtttctcgtgtataatggtgtctatcagtatacatccccagagttcctctatattcgntcttg

SEQ ID NO: 22051 - DNA, 474 bp, Homo sapiens
  misc_feature (1)...(474): n = A,T,C or G
cgggaatttcctgaaggactgagagcactccgaagcacaggagaccggctggagcgcccgccccgcggcctcgcctctcctccgagcagccagcgcctctggacgcgatgaggaccttggcttgcctgctgctcctcggctgcggatacctcgcccatgttctggccgaggaagccgagatcccccgcgaggtgatcgagaggctggcccgcagtcagatacacagcatccgggacctccagcgactcctggagatagactccgtagggagtgaggattctttggacaccagcctgagagctcacggggtccacgccactaagcatgtgcccgagaagcggtccctgcccattcggaggaagagaagcatcgaggaagctgtccccgctgtctgcaagaccacgacggtcatttacgagattcctcggagtcaggtcgaccccacgttcgccaacttgctgatctggcccccgn

SEQ ID NO: 22052 - DNA, 451 bp, Homo sapiens
tgaggcatttgcattgactccgctgcggctatacccggctaatttttgtatttgtagtagagacaggggtttcaccatattggccaggctggtctcgaactcctgacctcgtgatccacctgccttgacctcccaaagtgctaggataacaggcgtgagccaccgcaccctgccaagttattttaaaatgtaccattattattgactatagtcacctggctgtgttatcaaatagtatgtcttattcattctttctttgtgtgagtgtgtgtgtgtgtgcgtgcgtgtgtgtgtgtgtgtacctgacacaaaagctgataatatctgtgtgtgagactatagataatctccacagcctatcaagagatgtatacacaatgttatctaagtgagaacatgtgtgagctttctgacacacaagatctgacaccgctcaaaaaaaaagaaacaa

SEQ ID NO: 22053 - DNA, 470 bp, Homo sapiens
  misc_feature (1)...(470): n = A,T,C or G
nttttgccctctgccccgcgctgcaggaattcggcacgagagctcgtgaagtgccggctgcagaccatgtatgagatggagacatcagggaagatagccaagagccagaatacagtgtggtctgtcatcaaaagtattcttaggaaagatggccccttggggttctaccatggactctcaagcactttacttcgagaagtaccaggctatttcttcttcttcggtggctatgaactgagccggtccttttttgcatcagggagatcaaaagatgaattaggccctgtacctttgatgttaagtggtggagttggggggatttgcctctggcttgcggtatacccagtggattgtatcaaatccagaattcaagttctttccatgtctggaaaacaggcaggatttatcagaacctttttaaatgttgtgaaaaatgaaggaataacggccttatattctggactgaaacn

SEQ ID NO: 22054 - DNA, 472 bp, Homo sapiens
  misc_feature (1)...(472): n = A,T,C or G
cggtgcncaattgaccgtctgtggacattcggcacgagcaaatcttccctcccctcccttgtgctcacttgactttgccccctttgcatgtagcagaggcctcggttcccagcttgtttccattgcttccccagatcaggacctgggggcctacagttctgccaggaagtgcctggccaaacagaggcagaggatgctgcaagagagaaaagctgcaaaagaggccgccgctgccacctcctgaggcagctgtgggtgcccctgctgtgtggctctgtatgactgttgctgaaatataaagccctgctacctgaaccttatgaatggataaaaaggagctaaactctggggggggcccttgcccccaatgctcttttatggagagggaatgcaaatgacttgccctggtttatatcagatggagcggggaaaaaactcncngcattaancgaatgctatgcacccagagagg

SEQ ID NO: 22055 - DNA, 501 bp, Homo sapiens
  misc_feature (1)...(501): n = A,T,C or G
agacgccangnnanntttaaaaattggatggactgcagaaccctgcacgagcagcagtncggccagtgaccggaggcggcggcggcgagcggttccttgtgggctagaagaatcctgcaaaaatgtctctctatccatctctcgaagacttgaaggtagacaaagtaattcaggctcaaactgctttttctgcaaaccctgccaatccagcaattttgtcagaagcttctgctcctatccctcacgatggaaatctctatcccagactgtatccagagctctctcaatacatggggctgagtttaaatgaagaagaaatacgtgcaaatgtggccgtggtttctggtgcaccacttcaggggttggtagcaagaccttccagtataaactatatggtggctcctgtaactggtaatgatgttggaattcgtagagcagaaattaagcaagggattcgtgaagtcattttgtgtaaggatcaagatggaaaaattggactca

SEQ ID NO: 22056 - DNA, 360 bp, Homo sapiens
cctcgacccgcgctgcaggaattcgacacgcgctgcggctagagtgggctaggccctggctttgcccgtcagatttgaacgaatgtgtgtcccttgagcccaaggagagcggcaggaggggtgggaccaggctgggaggacagagccagcagctgccatgccctcctgctccccccaccccagccctagccctttagcctttcaccctgtgctctggaaaggctaccaaatactggccaaggtcaggaggagcaaaaatgagccagcaccagcgccttggctttgtgttagcatttcctcctgaagtgttctgttggcaataaaatgcactttgactgttaaaaaaaaaaaaaaaaaaaa

SEQ ID NO: 22057 - DNA, 441 bp, Homo sapiens
atcgccccccaattgatccgcgctgcaggaattcggcacgaggacaaacattacaaatataaagagggttgtaatacctttacttgccctatataatgtacagattttacactagaagaaaactctaaaggaattactcaaacttgtttggcatcagagaatttatgttgaaggaaaccgtacaaatgtaataagtgtggaaaaacatttgttcagaaactacagcttacaaaacaccacacagtttataataaaaaatatttttgcagatggaatacatatgtaaaaatatttagtcaaaattaagtctttgtaaactttagaaaattcacggtagggagaactaaggcactggcacttaagacgttacactaaatcagaatgttctgtaaagaaagtaatccaaagctaaaactgttggataatttatttgtatataag

SEQ ID NO: 22058 - DNA, 459 bp, Homo sapiens
ctcgacatcgatcgctctgcggaattcggcacgagcccgccacatgggccgcgttcgcaccaaaaccgtgaagaaggcggcccgggtcatcatagaaaagtactacacgcgcctgggcaacgacttccacacgaacaagcgcgtgtgcgaggagatcgccattatccccagcaaaaagctccgcaacaagatagcaggttatgtcacgcatctgatgaagcgaattcagagaggcccagtaagaggtatctccatcaagctgcaggaggaggagagagaaaggagagacaattatgttcctgaggtctcagccttggatcaggagattattgaagtagatcctgacactaaggaaatgctgaagcttttggacttcggcagtctgtccaaccttcaggtcactcagcctacagttgggatgaatttcaaaacgcctcggggacctgtttgaattttttt

SEQ ID NO: 22059 - DNA, 474 bp, Homo sapiens
  misc_feature (1)...(474): n = A,T,C or G
ngggggcttgccctcctgcangaattcggcacgagccgacgctgtggttgctgtaaggggtcctccctgcgccacacggccgtcgccatggtgaagctgagcaaagaggccaagcagagactacagcagctcttcaaggggagccagtttgccattcgctggggctttatccctcttgtgatttacctgggatttaagaggggtgcagatcccggaatgcctgaaccaactgttttgagcctactttggggataaaggattatttggtcttctggatttggaggcaatcagcggacagcatggaagatgtgtgctctggctcggataagagatgggacatcattcagtcactagttggatggcacaaggctcttcacagacgcatctgtagcagagtggaacttgtactaacttatgatagaatgtatcagaataaatgtttttaacagtgaaaaaaaaaaaaaaaaaactcga

SEQ ID NO: 22060 - DNA, 432 bp, Homo sapiens
attgcccgccttaggtgacaacaggctgagaaccattaagctacaaaatttctaaaattttctccaggttctcagttgctaaattctctcttgaacatttttggggataaaaaactggcagagaaaaagaagaaagtacacctttttacattatgaaacacctatgttcaccttatccatggagttatgccagtgacctaatgcctattaagttcttccatgttccaaaggtctttctgtacttgaaaactcataggtgagtcaggtccttcactgatagcttatagctaaaaaccacttgggagaggggctgtccaggtcttatgtcaaaactttgtcccatacgctgttagtgttagaaatggagccgtcagcaaatagaatctggtggttcatttaattacttttcaatatgccattaccagaaatttt

SEQ ID NO: 22061 - DNA, 465 bp, Homo sapiens
  misc_feature (1)...(465): n = A,T,C or G
cttagcaccgcctgtaggaattcggcacgagcgactgggcgcaagccctcaggaaggatgaaggggaggcctggctgagctgtcatcccccaaggaaaccatctttgtatggcagcctgacttgtcaaggaattggcctagatggcatcccagaggttacagcttcagaaggatttactgtgaatgaaataaacaagaaaagcattcatatttcatgtccaaaggaaaatgcatcttctaagtttttggcaccatatactactttttccagaattcatacaaagagtataacatgcctggacatttccagcagaggaggtcttggtgtgtcttctagtactgacgggaccatgaaaatctggcaggcttccaatggagaactcangagagtattggaaggacatgtgtttgatgtgaattgttgcaggtttttcccatcaagccttgtggtcctgagtgggggaa

SEQ ID NO: 22062 - DNA, 455 bp, Homo sapiens
  misc_feature (1)...(455): n = A,T,C or G
atttgcccgcgctgcggaattcggtacgagccaacatgaagtttaatccctttgtgacttccgaccgaagcaagaatcgcaaaaggcatttcaatgcaccttcccacattcgaaggaagattatgtcttcccctctttccaaagagctgagacagaagtacaacgtgcgatccatgcccatccgaaaggatgatgaagttcaggttgtacgtggacactataaaggtcagcaaattggcaaagtagtccaggtttacaggaagaaatatgttatctacattgaacgggtgcagcgggaaaaggctaatggcacaactgtccacgtaggcattcaccccagcaaggtggttatcactaggctaaaactggacaaagaccgcaaaaagatcctcgaacggaaagccanatctcgccaagtaggaaaggaaaagggcaaatacaaggaagataccatt

SEQ ID NO: 22063 - DNA, 433 bp, Homo sapiens
attgaccgcattgaggaactctcacgagcggaggtgtagtttgacgcggtgtgttacgtgggggagagaataaaactccagcgagatccgggccgtgaacgaaagcagtgacggaggagcttgtaccaccggtaactaaatgaccatggaatctggagccgagaaccagcagagtggagatgcagctgtaacagaagctgaaaaccaacaaatgacagttcaagcccagccacagattgccacattagcccaggtatctatgccagcagctcatgcaacatcatctgctcccaccgtaactctagtacagctgcccaatgggcagacagttcaagtccatggagtcattcaggcggcccagccatcagttattcagtctccacaagtccaaacagttcagatttcaactattgcagaaagtgaagattcacag

SEQ ID NO: 22064 - DNA, 452 bp, Homo sapiens
  misc_feature (1)...(452): n = A,T,C or G
gggggtccannaattgacnnccnatagaccccgcgctgcaggaattcggcacgagcccggctggcctctcgcatggcggatgacatgctgaagagaggcatctttgtcatcgggttcagctaccccgtggtccccaagggcaaggcccggatccgggtacagatctcagcagtgcatagcgaggaagacattgaccgctgcgtggaggccttcgtggaagtggggcgactgcacggggcactgccctgagctctgggtaaggacgacaagagccaaggtccgcctgctgccacagggtcaaaggaggttttcgatcagcccagaccagaggctctgagccctgaaccaaagtcccagagctgggctgggacgtgacctgtgctgagggctgtgagaatgtgaaacaacagtgtgaaaattggctgtgaaaaataaaaaaaaaaaattggagg

SEQ ID NO: 22065 - DNA, 472 bp, Homo sapiens
  misc_feature (1)...(472): n = A,T,C or G
cctagaccaacccttttganttgcgtcgcggactnccgcacgagaagattctaagtagttctctgacagaaatgaacatttctgttgcatccctacttgtcactggctttcttaaacacagaaatattggtttccatagtctttatggctttttggaggatctctaagattggtcccatagccttgacaatttgttccaacaaatctgctgctgactttgcgggatttttggaatcctcagtttttagtacatcctgcagttttttcaaggtgtctatcatagtggttttggaagaacctggaggacttctggttctctcagatgtggtgacatctgattgctctttggtgtcttctgtatagaagtcacttaattgaagattcatgatggggaatttcatcaagtgtgaaagagaagattccagactcccaaggatgttactgctgtttagcacagagatgatgactgccg

SEQ ID NO: 22066 - DNA, 476 bp, Homo sapiens
  misc_feature (1)...(476): n = A,T,C or G
cttcganncgcctgtttggatncgccttgaagcgccgagcgatgggcatatctcgggacggtggcacatgcgccgtataaccgtatgcaggagatagccctaccacaataggcggagtttgagtaggggcggactggtagccaacaccaagattggcccccgccgcatccacacagtccgtgtgcggggaggtaacaagaaataccgtgccctgaggttggacgtggggaatttctcctggggctcagagtgttgtactcgtaaaacaaggatcatcgatgttgtctacaatgcatctaataacgagctggttcgtaccaagaccctggtgaagaattgcatcgtgctcatcgacagcacaccgtaccgacagtggtacgagtcccactatgcgctgcccctgggccgcaagaagggagccaagctgactcctgaggaagaagagattttaaacaaaaaacgatctaaaaaaattc

SEQ ID NO: 22067 - DNA, 475 bp, Homo sapiens
  misc_feature (1)...(475): n = A,T,C or G
cggggccattgcccgtcctgangatcagaacaaacccctgtattttgctgatcggctgtatgactccatgaagggcacggggacgcgagataaagacctgatcaaaatcatggtctcccgcactgaagtggacatgttgaaaattaggtctgaattcaagagaaagtacagcaagaccctgtactattatatccagcaagacactaagggcgactaccagaaagcgctgctgtacctgtgtggaggagatgactgaagcccgacacggcctgagcgtccagaaatggtgctcaccatgcttccagctaacaggtctagaaaaccagcttgcgaataacagtccccgtggccatccctgtgagggtgacgatagcattacccccaacctcattttagttgcctaagcattgcctggccttcctgtctagactctcctgtaagccaaagaaatgaacattccaaggagttggaagtg

SEQ ID NO: 22068 - DNA, 495 bp, Homo sapiens
  misc_feature (1)...(495): n = A,T,C or G
aggccnannnncagagccngnnnattgactatgaccgccctgcaggaattccgcacgagaaaaaatgtgattttttagttcagtgacctgttttatagaattttatatttaaataaaggaaatttagattggtccttttcaaaattcaaaaaaaaaagcaacatcttcatagatgaatgaaacccttgtataagtaatacttcagtaataattatgtatgttatggcttaaaagcaagtttcagtgaaggtcacctggcctggttgtgtgcacaatgtcatgtctgtgattgccttcttacaacaaagatgggagctgagtgctaaagtaggtgcagaagtggtaggtcagctacaaatttgaggacaagataccaaggcaaaccctaaattggggtagagggaaaagggttcaacaaaggctgaactggattcttaaccaagaaacaaataataccaatggtggtgcaccactgtaccccaggttctagtcatg

SEQ ID NO: 22069 - DNA, 487 bp, Homo sapiens
  misc_feature (1)...(487): n = A,T,C or G
agcgggtnnaattgacttcgtgcggcttcagccgntcctggtttcttttctcctgcttctcagctacgactctctttaattcttcaagcttctctcttatttcaataaatcccaggtgcagtttacccccaaaatgatcagccagtcgtctgtcattatcatgaagtcctaaataggcagagcagacttcacagactcgaagtttctgctgctgaaaactggaagctggcatagaattccgataaacttcctctgcttctcttttctttgcccgtgctttctctacttcatccattactttctgggattcctccacattcccttcagctcctagttgttccaccttggctaacaatttaccaatttcttcatttaactcatgaacacgttctgcctttgctgctacttcagcactaatctcttcttgagtttctgctaatcttttcttggccacttctgttctacgatcacaatctgcaatgaatga

SEQ ID NO: 22070 - DNA, 490 bp, Homo sapiens
  misc_feature (1)...(490): n = A,T,C or G
attgcccgcctgcagaaatcgcacgcgctctgctcacccggctctcaggagcgctgctctctccatctgatcgccctccatcctccccattccctccggttccgggctctcccttcgctccaagcctcangccaccggcttggatggacgctccgaggctacccgtgcgtccaggggtcttgcttccgaagttggtcctgctctttgtctacgcagatgattgccttgctcagtgtggcaaagattgcaaatcttactgctgtgatggaaccacgccctactgttgctcctactacgcttatattgggaatatcctctcatgctgctgtcccaggtagaggtgcgagtataacttggagaatgtgaagtcaaactgattctgtgattctttggtcatctggctcctagcttagctcttgattcactaactatatcatggagtgtgctgtgtgccctctttctcactccatagctacctccaccctgcacc

SEQ ID NO: 22071 - DNA, 350 bp, Homo sapiens
  misc_feature (1)...(350): n = A,T,C or G
nccttgacntttcgctgacgaattcggcacgaggaaggcagtgaccaaggaggaatttcagggtgaatggactgctcccgctcctgagttcactgctactcagcctgaggttgcagactggtctgaaggtgtacaggtgccctctgtgcctattcagcaattccctactgaagactggagcgctcagcctgccacggaagactggtctgcagctcccactgctcaggccactgaatgggtaggagcaaccactgactggtcttaagctgttcttgcataggctcttaagcagcatggaaaaatggttgatggaaaataaacatcagtttctaaaaaaaaaaaaaaaaaaa

SEQ ID NO: 22072 - DNA, 500 bp, Homo sapiens
  misc_feature (1)...(500): n = A,T,C or G
aggggntannnnnncagngcccnnnnnaattgangatcgaccgctctgcggaattccgcacgagaaaaataaaagatcaaacttcaaaattcaaagtatgctttctacggaacattagcgcttgtgcactagggtgaagtggaaaatcctcagtggaaccattgtaagtcggggaccacctgctttgtcttttcttgtaaaagccaggagcagaaatagattcattttcccaacctgctgcacaggagttaaagttaaaaggctgttggaaaagagactttctttttttttagtttgttttctaaagaaccaaagaaacactgaaacgccaatgtttaactagtctactgatcaccttttctgaacaaaagcttcattttgcctgtgcagttgttttctttgtgatagatttgaaccagaaccaaggcagtgtcaaggtttccattctttaccaatatttaagtataaaagattcaaggagctgggcgcggtggctcacc

SEQ ID NO: 22073 - DNA, 479 bp, Homo sapiens
cctcgattttcccccgcgctgcaggaattcggcacgaggacaaagaaaagaaggaacaatggtcgtgccaaaaagggccgcggccacgtgcagcctattcgctgcactaactgtgcccgatgcgtgcccaaggacaaggccattaagaaattcgtcattcgaaacatagtggaggccgcagcagtcagggacatttctgaagcgagcgtcttcgatgcctatgtgcttcccaagctgtatgtgaagctacattactgtgtgagttgtgcaattcacagcaaagtagtcaggaatcgatctcgtgaagcccgcaaggaccgaacacccccaccccgatttagacctgcgggtgctgccccacgtcccccaccaaagcccatgtaaggagctgagttcttaaagactgaagacaggctattctctggagaaaaataaaatggaaattgtacttaaaaaaaaaaaaaaaaaaactcgggggg

SEQ ID NO: 22074 - DNA, 494 bp, Homo sapiens
  misc_feature (1)...(494): n = A,T,C or G
aggggacgntgncgnnnnnnnnnaattgancactggaggacttccgcacgagcagaaatgtgactcagcagatcaacgaacgcaagcgacgtttagagaatattgacaagattgctcagtggcaggcttctgtcctagactgggagggcgaggacatcctagacaggagctcggagctgatctacactggggagatggcctggatctaccagccctacggccgcaaccagcagcgggtcttcttcctgtttgaccaccagatggtcctctgcaagaaggacctaatccggagagacatcctgtactacaaaggccgcattgacatggataaatatgaggtagctgacattgaggatggcagagatgatgacttcaatgtcagcatgaagaatgcctttaagcttcacaacaaggagactgaggagatacatctgctctttgccaagaagctggaggaaaaaatacgctggctcacggctttcagagaagagagg

SEQ ID NO: 22075 - DNA, 485 bp, Homo sapiens
  misc_feature (1)...(485): n = A,T,C or G
nattgancgccnttcggngannnnccnnnattgacgccgcgctgcaggaattcggcacgagcgagctcaccatagtctaatagaaaacaaccgacaccgaatagttcaagcactgcttattacagttttactgggtctctattttaccctcctacaagcctcagagtacttcgagtctcccttcaccatttccgacggcatctacgggtcaacattttttgtagccacaggcttccacggacttcacgtcattattggctcaactttcctcactatctgcttcatccgccaactaatatttcactttacatccaaacatcactttggcttccaagccgccgcctgatactggcattttgtagatgtggattgactatttctgtatgtctccatctattgatgaggggcttaaaaaaaaaaaaaaaaaaattcaggggggggccccggccccaattccccctagagggcggggtttacaattggcg

SEQ ID NO: 22076 - DNA, 466 bp, Homo sapiens
attgaccctcgctgcacgaattcggcacgaggtgggtggctccaatggtaggaggactgagaattcaaccattagatctggcagtgtggatgtcatttgtgaccttgatgagagccatttcagtaggaatgagagcgaagacctggagtaaattcagagagaatgggaggagagaagaggagtcagtgagtatagacttgtgctgtcccttatagcagccactagccacgtgtaggtatttaaatttaaattaatgaaataaaaccaaagtgctgggattacaggcgtgagccaccacacccggcctggatatactttttttttttttaaaaattgaattattcctttcaaaattagggctgggagaccatggttttaaataaagcaaaggaaatggttatgtgccccttctgttaatttgggctgagatatggggatggggtcatggactaatttgaggttcacc

SEQ ID NO: 22077 - DNA, 485 bp, Homo sapiens
  misc_feature (1)...(485): n = A,T,C or G
cattgagcggctgtaggtatgacgcccgagtacactcagacgctcacagngacactgtgctggccagttttgaggatcagaggaagaaaggctttctctgtgacattactttaatcgtggagaatgtacatttccgggcccacaaagccttacttgctgccagtagtgaatacttctcaatgatgtttgcagaagagggggaaatcggccaatccatttatatgctggaaggcatggttgcagacacctttggtatcctgctggaatttatctacacaggttatctccatgccagtgagaaaagtacagaacaaatcctggctactgctcagttcttaaaagtctatgacctggtaaaggcttacacagacttccaaaataatcatagctccccaaagccaacaactttgaacactgctggtgccccagtggttgttatctctaataagaaaaacgatcctccaaagcggaaacggggaagaccn

SEQ ID NO: 22078 - DNA, 469 bp, Homo sapiens
  misc_feature (1)...(469): n = A,T,C or G
natcgcccggtctgangacttcggcacgagtactgctgctacacaagaccctgagactgacctgcaggacgaaaccatgaagagcctgatccttcttgccatcctggccgccttagcggtagtaactttgtgttatgaatcacatgaaagcatggaatcttatgaacttaatcccttcattaacaggagaaatgcaaataccttcatatcccctcagcagagatggagagctaaagtccaagagaggatccgagaacgctctaagcctgtccacgagctcaatagggaagcctgtgatgactacagactttgcgaacgctacgccatggtttatggatacaatgctgcctataatcgctacttcaggaagcgccgagggaccaaatgagactgagggaagaaaaaaaatctctttttttctggaggctggcacctgattttgtatccccctgtagcagcattactgaaa

SEQ ID NO: 22079 - DNA, 459 bp, Homo sapiens
atggcccgcctgcagattcggatgagaaacctgcggggcaccattgaaatcctgagtgatgtgcagctgatcaagactggagacaaagtgggagccagcgaagccacgctgctgaacatgctcaacatctcccccttctcctttgggctggtcatccagcaggtgttcgacaatggcagcatctacaaccctgaagtgcttgatatcacagaggaaactctgcattctcgcttcctggagggtgtccgcaatgttgccagtgtctgtctgcagattggctacccaactgttgcatcagtaccccattctatcatcaacgggtacaaacgagtcctggccttgtctgtggagacggattacaccttcccacttgctgaaaaggtcaaggccttcttggctgatccatctgcctttgtggctgctgcccctgtggctgctgccaccacagctgctcctgct

SEQ ID NO: 22080 - DNA, 467 bp, Homo sapiens
attgaccattgaccgcctgcacgaattcggcacgagctccttccttccagttctgagattcttaaatgagagctggctgtcttctagaggtaagacctggaatggagtccagttggtactttttcactccctcttagaatctcttatgaaaaaatgatcagagagaaaagtggggttttgtttccccacctaataatatatcctacaaccagccaaatgcacttttgtgaaaatggggtgtgaggagtggttctgcagcttgagtcctctggttttaagtagtttgtttctacttgtttaaagaatcttctggtctgaccacttaaagtaaaaactacatgatttattttcgggcaattatgtttagctttcatcattatactccaacagacccgtctgaaggggtatttttttttaacaataatggttgtaacattttgttgtgtcaattagagggtcacttgttt

SEQ ID NO: 22081 - DNA, 491 bp, Homo sapiens
  misc_feature (1)...(491): n = A,T,C or G
gcgggtgnnaattgacattcgtgagcaattcggcacgagcttgatcctgcccttgctgcacttgggcttcctggagcaaacttgaactctcagtctcttgctgcagatcagttgctgaagcttatgagtactgttgatcccaagttgaatcatgtagctgctggtctcgtttcaccaagtctgaaatcggatacctctagtaaagaaatagaggaagctatgaaaagagtacgagaagcacagtccctaatttctgctgctatagaaccagataagaaagaagaaaaaagaaggcattcaagatcaagatcacgttctaggaggaggaggactccctcatcttctagacacaggcggtcaagaagcagatcgagacggcggtcacattctaagtctaggagtcggcgacgatccaaaagcccaaggcggagaagatctcattccagagaaagaggtagaaggtcaaggagcacatcataaacaagagacaa

SEQ ID NO: 22082 - DNA, 464 bp, Homo sapiens
  misc_feature (1)...(464): n = A,T,C or G
gcccccattcgcncgcgctgcaggatatcggcacgcgaagaanagaaggaacaatggtcgtgccaaaaagggccgcggccacgtgcagcctattcgctgcactaactgtgcccgatgcgtgcccaaggacaaggccattaagaaattcgtcattcgaaacatagtggaggccgcagcagtcagggacatttctgaagcgagcgtcttcgatgcctatgtgcttcccaagctgtatgtgaagctacattactgtgtgagttgtgcaattcacagcaaagtagtcaggaatcgatctcgtgaagcccgcaaggaccgaacacccccaccccgatttagacctgcgggtgctgccccacgtcccccaccaaagcccatgtaaggagctgagttcttaaagactgaagacaggctattctctggagaaaaataaaatggaaattgtacttaaaaaaaaaaaaaaaaaa

SEQ ID NO: 22083 - DNA, 476 bp, Homo sapiens
  misc_feature (1)...(476): n = A,T,C or G
nggttcgccccgcctgcaggaatnngnctcgaccccgcgctgcaggcgcagccggagtggggccgcgagatcttattcagggcttctcagcctgaacccccaaccagattaatttctccacagctggaattccaagtgcttggggataatgatacctctgacctttcttccttttgggaagtacttgagtgtgcagctgcatgaggcctcagcaggagagagattttaggtccaagaagctataccagtaggacaaggcaggaaaatactacactttcaggatcaagcccctctgactctcatttggaaactggatgtttgctaagcacctgcttcttaaggatgccgagggatttaatgatactcccagaaacctggagagattaatggggcctatggagaagtgctctgaactcagtgttgggacttgaataaaattaaccattgtcatgttttcagaacaactaagctgtttt

SEQ ID NO: 22084 - DNA, 466 bp, Homo sapiens
  misc_feature (1)...(466): n = A,T,C or G
aactagccccgcctgcangaattcggctcgagagaaaccagactgtgatgactgggagagcgggctgaatgcaatggagtgtgcattacatttggaaaaaaatgtgaatcagtcactactggaactgcacaaactggccactgacaaaaatgacccccatttgtgtgacttcattgagacacattacctgaatgagcaggtgaaagccatcaaagaattgggtgaccacgtgaccaacttgcgcaagatgggagcgcccgaatctggcttggcggaatatctctttgacaagcacaccctgggagacagtgataatgaaagctaagcctcgggctaatttccccatagccgtggggtgacttacctggtcaccaatgcagtgcatgcatgttgaggcttcctttaccttttctataagttgtaccaaaacatccacttaagttctttgatttgtaccattccttca

SEQ ID NO: 22085 - DNA, 506 bp, Homo sapiens
  misc_feature (1)...(506): n = A,T,C or G
cgccccattcgaccgccctgcnngaaatttgacaccgcgctgcaggaattcggcacgagtgagggttcaacccccactccctggcctctcttacagaacacacgaggagatgccacagagcatcgtggaggccacctctaggcttaagaccttcaacttgatcccggctgttggggagcaaagagcccaggcccctagagtgcgcatgtgcaggctccgctgttagaatcacagcggttcaaatccggcatctggtcgctgagtggcctcaggcagtgaccacgctcccggacccaaccttcagcttgcccaaagcaataatctttcctaaagaagtgcttggctggggatggtggctcacgcttgtaatcccagtactttgggaggccaaggcagtctgggcaatatagtgaggctcccatctgtactaaaaataaaaaagttaggcgtggcgatgtgcacctgtagtcccagctactcgggggctgagccaggcggatagcttg

SEQ ID NO: 22086 - DNA, 493 bp, Homo sapiens
cgcccattgaccgcctgcagaaattcgaacgccgtaagggcatacgtccgagggaggcatccgggcctctctgtataatgctgtcacaattgaagacgttcagaagctggccgccttcatgaaaaaatttttggagatgcatcagctatgaacacatcctaaccaggatatactctgttcttgaacaacatacaaagtttaaagtaacttggggatggctacaaaaagttaacacagtatttttctcaaatgaacatgtttattgcagattcttcttttttgaaagaacaacagcaaaacatccacaactctgtaaagctggtgggacctaatgtcaccttaattctgacttgaactggaagcattttaagaaatcttgttgcttttctaacaaattcccgcgtattttgcctttgctgctactttttctagttagatttcaaacttgcctgtggacttaataatgcaagttgcgattaattatttctggagt

SEQ ID NO: 22087 - DNA, 470 bp, Homo sapiens
attcgcaccgccattgaccgccatgcacgaattcggcacgaggggtatatgagtttactaggggctgccacatggccatcctggcggacaaggccaatggcatcatggctgcctggcgggaggaaagccacctgaaccgtcacttcatctcaaacaagccgtccaaggtgctgtcccccgagtacctctgggacgacaggaagccccagccacccagcctgaagctgatccgcttttctacactggacaaggatatcagctgcctgaggagctgaccacggagctgggggttgccatggatggggacccaaagacctgcagccaccagtgcttcactagcgtgcagaccagccctgtcccgcctccctgtcagtcaggcgaattcaaccggaaaagggacgtggaaaggccactgtgaactgcagagggctgtgcacacagtagcacacaggatctcacagtaacgcggg

SEQ ID NO: 22088 - DNA, 479 bp, Homo sapiens
gaacttgcaccgcgcctgcaggaattcacgtgtgcgccgcgctgcaggaattcggcacgagagagcaggcactgcagaggtaggcagctgctaaaacaggatactttctacagctccaggggtctgagttggacactcttcatttccctcggacatcccctgtagattgccacaccaccaatcatcacattctcaaaggcattcaaagcagaaagctgggaacaaggaagggcggagagtttctattcaggagcctccctcttactacagaagaaaaaaacctgccttttatgggttcttttgtcttgtttttcatgaatgacttcatttgagaaagtcctcaggccaagaaatggaggtgctggcagttggagatcaggctgtccatagcacactgatgtggcacaggcaaggaatatggctgacgcaccaaattgctgctactgctgtctaacaggcatgtgaagccttatgtgttc

SEQ ID NO: 22089 - DNA, 475 bp, Homo sapiens
  misc_feature (1)...(475): n = A,T,C or G
agggcnnnnnnnnatcgccctgctgcggcagacgaacgaggaacacagaagctgtagctgaacacaggctggctggtgggcttcctaggccagcccagcttgtatgggttctggctacaccagagcaccaagagcccacttgcctgggatggccccacactgtcactcagctgttctttgatcatttttttctagattgatgctcctttctcccatgcattgagctcccatctagcttcagcagggcagaacccttctccagatgtgtgtaacttatgtctgagtatctgggagtagttgaagaacagataattccttccaaacatcaagccttgggattcttggagcaagcagaaagccagtaacttcgctctgttagaggtggaggattgtcctatggttccccccatttcctgatttgatttttagatggattaaatagtctcctgtttttaanaaaaaaaaaaaaaaaaaa

SEQ ID NO: 22090 - DNA, 448 bp, Homo sapiens
  misc_feature (1)...(448): n = A,T,C or G
ggagggtnnnnnaattgaccgccttgaggttcagccccacataatgattatggctatttgctgtcatttctgggctagggctcctttctaacaacctagactggaataaggccctgtcagcatggctccctttatcccagttttccgtctgggaacagtacctctgcccctgattcccaatgtgccatagttttattaactccattaaagaagcctgtatgtgttttggttagttacagttattttacaataatggtgggtaatggccccacctctgttatgagataatgttctaatcaatgtctctgcctttgtatcttttctgagggctttgtctgttctcttcattctaatgaaaggtgtattctagtgctgggtgcatatcatccaggataatattctgcccaactccatcctctggtactagatcccttaccagtcacatttg

SEQ ID NO: 22091 - DNA, 452 bp, Homo sapiens
  misc_feature (1)...(452): n = A,T,C or G
ntttgaccctgcctgcacgattcggcacgagtgccgacgcactggaggtcatccccatggccctctctgaaaacagtggcatgaatcccatccagactatgaccgaagtccgagccagacaggtgaaggagatgaaccctgctcttggcatcgactgtttgcacaaggggacaaatgatatgaagcaacagcatgtcatagaaaccttgattggcaaaaagcaacagatatctcttgcaacacaaatggttagaatgattttgaagattgatgacattcgtaagcctggagaatctgaagaatgaagacattgagaaaactatgtagcaagatccacttctgtgattaagtaaatggatgtctcgtgatgcgtctacagttatttattgttacatccttttccagacactgtagatgctataataaaaatagctgtttggtaaccatagttt

SEQ ID NO: 22092 - DNA, 471 bp, Homo sapiens
agctcgcccgcctgcaggaattcgcttgcccccgctgcaggaattcggcacgagaaactcctacaggagaaaagttgtatgaatgtggaaactttagaaattgaaggaatttttcagttccaagtgcatcccttattctataggaaataaactggagacaaatctcatttaagagatgcagcaaagtgttcactaagagcggttatcttgccagacataagaagatgaatggtagagcaacctgaaggatttagaaattacatataaatctttgcagctatgctatttgtaaacaggattatataggagagcaaataaacataagtatgcatttcttagagcagtagcttgcagtttcagttgagttctacttagaaattctttttagctagtgggcatgtgaagatatttagtcacccagaggagccagtaaatgttataatggtaaaaattaaagctgcaaaagaaata

SEQ ID NO: 22093 - DNA, 484 bp, Homo sapiens
  misc_feature (1)...(484): n = A,T,C or G
nattgcccgcctgcangcgagggtagaacgtaagaagcacttttgaatttgtggggtagaacttcaacaataagtcagttctagtggctgtcgcctggggactagtgagaaagctactcttctccctcttccctctttctccccatggccccactgcagaattaaagaaggaagaagggaaggcggaggagtctataagaaggaatcatgatttctatttagcagattggatgggcaggtggagaatgcctgggggtagaaatgttagatcttgcaacatcagatccttggaataaagaagcctctctgtgctgcctgctgtgtcctgggttcttgccttgggggactcggggagcgaggaagagagctcttcctcctggataacatcttggattctgtaccattccactggcccttcccaccagacattntanatggtcctcggtggccccttccctgcccttgccttcctgctcattgggan

SEQ ID NO: 22094 - DNA, 495 bp, Homo sapiens
  misc_feature (1)...(495): n = A,T,C or G
ccttccgccngcgntggnggnantttagacnccgcgctgcaggaattcggcacgagaacaaaaccaaagctgattggaaacaattaattgtgggtgtctgagggggaaggtcgcagctttgggcagctttgagaagcggtacaagagttctgtgcctgtgtgtccagccctggagccagccagtgcatttattttaagctcttagaagcaactccttggcccaggaatgcgtgacccctgagatgggtccacgcatctctctacacttccttctctccgtgggatactggactcgtgcctctgcgcccattctcttctcacgcatatccatgagctttaatttcactttctgatcacggtacgtccataaagccagtattacacttanatgaagtattcttttttggtaatcgtttttttagaaggtaaacaaatttaataaagctaccaataatgttganaaaaaaaaaaaaaaaaacctcagggggggccccg

SEQ ID NO: 22095 - DNA, 479 bp, Homo sapiens
  misc_feature (1)...(479): n = A,T,C or G
nttgaccgccctcggaannnatcgcaccgcctgcacgaattcgccacgagcaggaaaacaaactgcaattatcgaagttgtgagtcagctttgggcttttttaaacattaaacaggtagcagatcaaccttatgttcaacagacattcagccttttacttccactgttgggatttttcattcaaactctagatcctaaactgatacttcaggcagtaactttgcagacctcgctacttaaattagagcttcctgactatgttcgtttggcaatgttggattttgtatcttctttaggaaaactttttatacctgaagctatccaggacagaattctgcccaacctgtcctgtatgtttgccttactgctagctgacaggagttggctgctagaacaacataccttggaggcgtttactcagttcgctgagggaacaaatcatgaagagatagttccacagtgtctcagttctgaagaan

SEQ ID NO: 22096 - DNA, 525 bp, Homo sapiens
  misc_feature (1)...(525): n = A,T,C or G
gagcgnnnnnnnnaggatggacggctgtagaannnattcgcccggctgcaggaattcggcacgagctggctcttagcactgaccgaccattgccatttctggcctcgctaggcccaggagaggagggaggcaagccagtcgggtttcctggagcaatgggtgtgccagccctcagcatgactctgccaagcatccagaccacaaatgcaggaatttggctgaggagcagctttaggtatggattgatgactaagtcaagctacttcctgagcttctctcagatttccaagagccagagatgaattgtgctgcatcttgccccaattcttaggatttcttttcctccgccactgcagtgattgttagaggtagttttcttgaattaatattaaatcacagttccagcccttgttattcttgtccttagtcctccagggggagcatgggttgcagggcaacagtacagtcgcgcttacgacctggctagaacacaaggtcagatgataaacagaagcacaggaactc

SEQ ID NO: 22097 - DNA, 477 bp, Homo sapiens
  misc_feature (1)...(477): n = A,T,C or G
gcggcctnnnattgaacgctttgaggaactcggcacgagggcgatggaaccagcggagcagccgagcgagttagtgtcagccgagggccgaaaccggaaggcggtgctgtgccagcgttgcggctcccgggtgctgcagccagggaccgctctcttctctcgccgacagcttttccttccctccatgagaaagaagccagctctgtctgacggcagcaatcctgacggcgatctcctccaggaacactggctggttgaggacatgttcatttttgagaatgtgggcttcaccaaggacgtgggcaacatcaagtttctggtctgcgcagactgtgaaattggaccaattggctggcattggctagatgacaagaacagtttctatgtggccttggaacgaagttcccatgagtaactgaggggaggggtactcagctccatctncaagagataacctactccccacaaaaaaaaaan

SEQ ID NO: 22098 - DNA, 508 bp, Homo sapiens
  misc_feature (1)...(508): n = A,T,C or G
agcgggtnnaattgaattcgatggcgtacgaacncggcacgagcactgcgcagaccagacttcgctcgtactcgtgcgcctcgcttcgcttttcctccgcaaccatgtctgacaaacccgatatggctgagatcgagaaattcgataagtcgaaactgaagaagacagagacgcaagagaaaaatccactgccttccaaagaaacgattgaacaggagaagcaagcaggcgaatcgtaatgaggcgtgcgccgccaatatgcactgtacattccacaagcattgccttcttattttacttcttttagctgtttaactttgtaagatgcaaagaggttggatcaagtttaaatgactgtgctgcccctttcacatcaaagaactactgacaacgaaggccgcgcctgcctttcccatctgtctatctatctggctggcagggaaggaaagaacttgcatgttggtgaaggaagaagtggggtggaagacgtggggtgggacgacagtgt

SEQ ID NO: 22099 - DNA, 465 bp, Homo sapiens
  misc_feature (1)...(465): n = A,T,C or G
gactcgcccgcctgcangaattcggctcgagaatgcttctgtgtgagaaggcagcacggctgaggaagctcactttgcatcagggagcacaaggaccaggccgtacagacactccgcctcccagcacttgatcagagattgtgtttatcctacagaaacagatgacatgtgttgggcatcactccccacggtcctgggtagaagagtccttcacttggcagggctttttcaaccaatgaataaggcaaattatatataagttaataatgccatttcgaaccgagacagatggcagctaaatgaagtttaattaaagaatgagtgctggggccctttttattgggtactgcatctacttcgaccacaaaagacgaagtgaccccaacttcaagaacaggctttgtgatggaagaaagaaacagaagcttgccaaggagagagctgggctttccaagttacctgacc

SEQ ID NO: 22100 - DNA, 484 bp, Homo sapiens
  misc_feature (1)...(484): n = A,T,C or G
natagaccccgctgcggaatttggcacgacccgctccaagtttaaagttctgaaggcattatatttaaaggcctatgttgcccatgccacaagtatgggtgagccaccacactgtccattttatgatacgttggatcagcttctccgaaatcagatagtgactgacccagacaacttaatggaggatgctgcttgggccaagcactgtgatcagaacttagtggcctctgacgccccaggggaagagggaaccggcattctaaaatcaaaaaggactcacgcagctgatcatcagcctatcttgaaaacagttaaggcatcagatgaggattgtcagctaagaatcagtgaccggatacgagaaaccagtgaccttgaggactcctgggatgaatcctcgggtgcagggtgctctcaagggacccccagctacagcagcttccacagccttttcagaggtgcagttgctccctgtcagagcagn

SEQ ID NO: 22101 - DNA, 494 bp, Homo sapiens
  misc_feature (1)...(494): n = A,T,C or G
atagaccgcctgtggaattcggtacgagaacaggggtgtcccattctcgaaaattttcaaagtgcagcattttggagtatagagactttttacagagaggaggtggagcctgccttttcaacaggccaacaaagctatttgagcccacggaatgtggaaatggatacgtggaagctggggaggagtgtgattgtggttttcatgtggaatgctatggattatgctgtaagaaatgttccctctccaacggggctcactgcagcgacgggccctgctgtaacaatacctcatgtctttttcagccacgagggtatgaatgccgggatgctgtgaacgagtgcgatattactgaatattgtactggagactctggtcagtgcccaccanatcttcataagcaagacggatatgcatgcaatcaaaatcatggccgctgctacaatggcgagtgcaagaccagagacaaccagtgtcagtacatctggggacanagg

SEQ ID NO: 22102 - DNA, 505 bp, Homo sapiens
  misc_feature (1)...(505): n = A,T,C or G
gtnnnnnnnnnnaaggatgnnccnnaggagngccncctganngcctactgatcgcctgtcagattccgcacgagcgacaccgtaactatccgcactagaaagttcatgaccaaccgactacttcagaggaaacaaatggtcattgatgtccttcaccccgggaaggcgacagtgcctaagacagaaattcgggaaaaactagccaaaatgtacaagaccacaccggatgtcatctttgtatttggattcagaactcattttggtggtggcaagacaactggctttggcatgatttatgattccctggattatgcaaagaaaaatgaacccaaacatagacttgcaagacatggcctgtatgagaagaaaaagacctcaagaaagcaacgaaaggaacgcaagaacagaatgaagaaagtcagggggactgcaaaggccaatgttggtgctggcaaaaagccgaaggagtaaaggtgctgcaatgatgttagctgtggccactgtg

SEQ ID NO: 22103 - DNA, 502 bp, Homo sapiens
  misc_feature (1)...(502): n = A,T,C or G
attagacaaaccctttttgacccgcgctgcaggaattcggcacgagtactagtcaaaattggtgataatttctcattttcttgatatagatacttcataaacctcaatataaatactctcaaaatggttgtatggattttatttaagtatggtagcatggttaataaaagtaaaaactgttttactcacattttttgtaaattaggattacatatagaatgccacaatttctctaggtttattcaattttcaaattattcctcattttattttaaagcattaaatagaaaagctaattggttaaattttgttatataaatcagagtcatatattctgggatttgtgttactatgcatacttttctaggatgtcaccaaattagttggttaaaatgtttttagattactgatttatattaagatgacccacactgcaattagattatgcctagtgggaagattatataaaaagcagaattaagctgggcacatgtgcttgtan

SEQ ID NO: 22104 - DNA, 477 bp, Homo sapiens
  misc_feature (1)...(477): n = A,T,C or G
atttgacccgccctnaagtttgcccccgctgcaggaattcggcacgagcttctgcccactttcctgggtgttgggggggcccgctgacaacagtcacaaatccagcgacctaggaaaaaaattgctactatagaacgaaaaattatctttacaggactgaactttacgcccatctaaactcttctgccttagctatcactaatgatattcctctctggattttgtggtgagaagggcactatgagttccttaatttaaggaaaaaatgtaaacttaatcaatgtaatcaatgccatgcaaaattcattgcaagtcaagggggatgggagagatgcaatgccatacggtgatacggacctttaagaaagtacaatctttcctgaaattcaaacactatcatacttcaaaaggtcaaaacccattccggaatttggcttttttaagactttttctctcctgctcactggcagctgtgtg

SEQ ID NO: 22105 - DNA, 477 bp, Homo sapiens
  misc_feature (1)...(477): n = A,T,C or G
aatgatcgccctcggaannnattgaccgcctgcaggaattccgacgagctgaagagcagtgagagtgagggcgaaattcacacctgtcttaaaaatgcataccctctgcaaaaagttgggttttcctttaatgtaatcggcactagcgactcagtttcactgtgaggcccccgggcgattgtgaaggtaccaggcgatggtgttgctggcccagggcagcttctgcagcagtgcagggagggctggccaggattgtttagcctgtgcctgtttcctcacgttttgtgtgttgacagagcatgatctaaacattttatcagtttctttttcatttacgtaaattaggcagtagggaaatctcagctaactaaggtctttaaattttatttggatgaacaaaaaatgtaatcagagggaagggaactcattttcctcgagggtcagaggcaggaatcagaaaggctttctagggggtgg

SEQ ID NO: 22106 - DNA, 491 bp, Homo sapiens
  misc_feature (1)...(491): n = A,T,C or G
catcgcccnccntnnnnnnnatttgccccgctgcaggaattcggcacgagccacagtccagatatgtagcggttctgtaaaccttaagggtgctgtgaaatgcagagcttatatccacagcagtaaacccaaagttaaagatgctgtgcaggcagtaaagagggatatattgaacacagttgctgatcgttgtgaaatgctatttgaggatctgcttttgaatgaaattccagaaaaaaaagattctgaaaaagagttccacgtcctcccttatcgagtctttgttccccttcctggatccactgtaatgttgtgtgattataaatttgacgatgagtcagctgaagaaatcagggaccattttatggagatgttggatcacacaattcaaatagaagatttggaaattgcagaggaaacaaacacagcttgtatgagttcttctatgaatagtcaagcttcattggacaacacagatgatgaacaaccan

SEQ ID NO: 22107 - DNA, 474 bp, Homo sapiens
  misc_feature (1)...(474): n = A,T,C or G
ttgaacgcaatagaattgacccgcctgcaggaattccgcacgagttgggctctgtggagagctttagccttgcacggcggcgctgggaggcattgcctgccatgcccactgcccgctgctcctgctctagtctgcaggctgggccccggctgtttgttattgggggtgtggcccanggccccagtcaagccgtggaggcactgtgtctgcgtgatggggtctgaaggcttggtgggagctgtccactggagcagctcattgccagaggcagctatttctatggctccttttgctgctgaggacactcactgtggctctgtgggatgagagaggcatgggggtgagcacttgaaacactgccttggggccttgggttaggggagcctttgtctttagtgcaagacacacatatgcttacacctacctttatcaccatttcgtcatgaaacatgccttagctcatcccttggctgg

SEQ ID NO: 22108 - DNA, 495 bp, Homo sapiens
  misc_feature (1)...(495): n = A,T,C or G
nttagatacccctgcaggaattctgcacgaggcctgtggtatattctaactgggctccatttgatataataaatatttcaagtcacaataccactgaagttcagaaacacattcctctctgtgcgcttactctcaagtaatcctaattttcatttcactggaaaaaggtattttgaagactgtggaaaggaaggctatgggtttgtttgtgaaaaaatgcaagatacttctggacacagtgtacatacatctgatatgtatccaatgcccaataccttagaatatggaaacagaacttacaatataattaatgcaaatatgacttggtatgcagcaataaaaacctgcctgatgcacatagcacaactgatcagcatcacagaccagtatcaccagtccttcctcactgttgtgctcaaccggctaggatatgcccactggatcgtactgttcaccacagataatgggcttaattctgactgggctgatggcacn

SEQ ID NO: 22109 - DNA, 473 bp, Homo sapiens
  misc_feature (1)...(473): n = A,T,C or G
attgatcgccttaggaattcgtcgcgagctcatatctgcagagaacccattgatcaccttgtgccctcttttggggcagcctgttgaaactgaagcacagtctgaccactcacgataaagcagatttttctctgcctctgccacaaggtttcagagtagtgtagtccaagtagagggtggggcacccttttctcgccgcaagaagcccattcctatggaagtctagcaaagcaatacgactcagcccagcactctctgccccaggactcatggctctgctgtgccttccatcctgggctcccttctctcctgtgaccttaagaactttgtctggtggctttgctggaacattgtcactgttttcactgtcatgcagggagcccagcactgtggccaggatggcagagacttccttgtcatcatggagaagtgccagcaggggactgggaaaagcactctacccagacctcacn

SEQ ID NO: 22110 - DNA, 483 bp, Homo sapiens
  misc_feature (1)...(483): n = A,T,C or G
natagacncgcctgcaggaatttggcacgacgggacggcctcgcttcctcgccgcgggctccgctgcagtccagcaaggccaggatgaaaaagctcccgaagaagagccagaatgagaagtaccggctgaagtacctgcggctgcgcaaagcggccaaggccacggtgtttgtgagtctgacccacgttcagccggtcccctcctggagactccctcacaaaatctttccccaagctgttcccccttcccagtgtgacagtattaatacagtgttggcttttccgtatacgttactacttgttagccttgtgtccttggacaaattacgtaatttctctgtgtcctcatctgtaaatgagctagtaactgtcttgcagaataatgaatattanatgagtaaagaanagtgcttgggtgcgaaaagacataccaatanatttagtcatcggtgtactggaggactctanganatgtgtttgatt

SEQ ID NO: 22111 - DNA, 480 bp, Homo sapiens
  misc_feature (1)...(480): n = A,T,C or G
aatgatcagcctcggaannactgaccgccttgcaggaaaggcgctagctaaaatcttgcttctactgtgggccgaactcacgaggagccctatagctaagcccttgggcttgacagctctacttttgacctctaactaccactgtgccaatgagtgccgagtgccaagatcagctgtgacactcggaccctatgtcaaagtcacaacaccaccactgagtgccacatgaccattcacatacacagtagatacagagaactcaaagcagcaaagacacacacacatgaataaacagctgttggttgaactcttgctctctgcatacaaaacactgtgacattaccatttgaactagcatttccataagttaacatttaaaggaaccagccagtcccattcacccttcccctttcacctgggtataagacaaatgaaatcgtgggtgaccacagcagcaaaaatggtctgacaatgatatgn

SEQ ID NO: 22112 - DNA, 488 bp, Homo sapiens
  misc_feature (1)...(488): n = A,T,C or G
natttgcnccgcgctgcaggaatttggcacgcgacaagccacaccccctcctctgagctctgaatatgggacccagtgccaggagctggaagacaaggtgtttctgccaaacggggacctccatccagagaaaaggaagaaggtgcagggtgggccaagaggcaagtgaaggttggcctgagtctgggccggaaactcacaggatgtttctcctctgctgggagctgtagtttcttatcaaaatagatattgttccaccatccccctccttggcccttcaagtgggctgaagcccttggaaagtgacataggaagtccccagatcttgcccttctcactccagaggctagtggtcacagacagctgggaatggcagccacagagggtcccctctgggagaaacagcttcaccccagcctcagggccctgggccatcactgcagtggccctgggaggtgaggaagaagctggctagaggagggggctcn

SEQ ID NO: 22113 - DNA, 497 bp, Homo sapiens
  misc_feature (1)...(497): n = A,T,C or G
gggcgtnacanaattgacggctgtangatttcggcaccagatctggaccattccttaagtttttcctcaccgacagtaccatcatgccttgagtgttcttttctcccaagtgctattccttaaacacgagagtttaccagttgcctaataatgcaataaaaaatgctttgagatagctaactgcccataaaacaaactcaaattgcttataaagtttcttcccatgttcccatttgatgaaaagtcttacatcacatataactgggaagcaggggtccctcctcaattttcagacattttgaaaggatgacagttctgtttgttagatgagtaaacctctatattcataagttctaaaatccttcattatgagggattcaaagtatttataaaaacactgccctctaaaaatttcctcagatctgaagtatggtcttggtcctgaatatacagtgttatcctatgtttaaaagggtgatccagacatgagacgcaac

SEQ ID NO: 22114 - DNA, 477 bp, Homo sapiens
agcggggaattgccttctgtagacttcggcacgagaaacctcgtgttcaatgactaagaagatggggtcctggagcaagacagaaaacactaagggcatggtggtataaggtttgggacatgcaggccaaggaaggatggaaagaggacaggaaactgggggtacctagaacaacccctctctgaaaagcttgagccaaaacagtcccaaagacaacaagacccctctcccagcctccacagaatggaagatctaaaggttctcttgagatgatccagctagtatggaagatctaaaggttctcttgagatgatccagctagtgtcctattctcctgcagtccctgttcctaggtttcctcaacgaagtttgacaaaaatctaaaccaacatagccaacgaacttgccttgttacacaagagtggctaaaatagcatctcaaataattcttcagttcactgtaaaaatttttcccat

SEQ ID NO: 22115 - DNA, 470 bp, Homo sapiens
  misc_feature (1)...(470): n = A,T,C or G
natgatngccccttgatncgcgctgcagganncggcacgaggtcgctgctgccggtgcaggggaaccccagtccccggacgaattgctcccgaaaggcgacgcggagaagcctgaggaggagctggaggaggacgacgatgaggagctagatgagaccctgtcggagagactatggggcctgacggagatgtttccggagagggtccggtccgcggccggagccacttttgatctttccctctttgtggctcagaaaatgtacaggttttccagggcagccttgtggattgggaccacttcctttatgatcctggttcttcccgttgtctttgagacggagaagttgcaaatggagcaacagcagcaactgcagcagcggcagatacttctaggacctaacacagggctctcaggaggaatgccaggggctctaccctcacttcctggaaagatctagattgttattgct

SEQ ID NO: 22116 - DNA, 505 bp, Homo sapiens
  misc_feature (1)...(505): n = A,T,C or G
ngcgcgggnnnnntnaaaattgatnaatcgacgaccntacgaattcggcacgagattccgagccttggtgtctggcggtttccgagcgttggtgtctggcggtttccgagcgttggtgtctggcggtttccgaccgttggtgtctggcggtttccgaccgttggtgtctggcacgcgccaccctctcttgctttggttgcgccatgccgatgtaccagacaagaagacaagaaaatgatttgaggacagcttcaatcgcggtgtgaagaagaaagcagcaaaacgaccactgaaaacaacgccggtggcaaaatatccaaagaaagggtcccaagcggtacatcgtcatagccggaaacagtcagagccaccagccaatgatcttttcaatgctgcgaaagctgccaaaagtgacatgcagcaccgagaagtccgcgtgaagtgcgtgaaggctctgaaagggctgtacggtaaccgggacctgaccgcacgcctggagctcttn

SEQ ID NO: 22117 - DNA, 467 bp, Homo sapiens
  misc_feature (1)...(467): n = A,T,C or G
aaattgaacgcccgtggacttgccgttggnctttttgtctgcagtgaatgttcaacagtttgcccaggaactgggggatcatatatgtcttagtggacaggggtctgaagtacactggaatttactgagaaacttgtttgtaaaactatagttaataattattgcattttcttacaaaaatatattttggaaaattgtatactgtcaattaaagtgtttttgtgtanaaaaaaacaaaaactagacgaaaaaaaaaaaaaaaaaaactcccgggggggggcccgggccccaaatcccccttatgggggggtgtttaaaaatccggggcccgggttttaaaaaggggggagggggaaaaaaactttttttttttacttatttattccactacggggcacgcacatgccctctaaaggaacgttggtgtctaagtccaggggtccgacaatcataaaattcatttttct

SEQ ID NO: 22118 - DNA, 471 bp, Homo sapiens
  misc_feature (1)...(471): n = A,T,C or G
nttttgaacggccgtatgaaccctgcacgagagttcttgtttgtggattgctgtgatcgtcacttgacaatgcagatcttcgtgaagactctgactggtaagaccatcaccctcgaggttgagcccagtgacaccatcgagaatgtcaaggcaaagatccaagataaggaaggcatccctcctgaccagcagaggctgatctttgctggaaaacagctggaagatgggcgcaccctgtctgactacaacaatccagaaagagtccactctgcacttggtcctgcgcttgagggggggtgtctaaatttccccttttaaggtttcaacaaatttcattgcactttcctttcaataaagatgttgcattcccaaaaaaacggcacgagtcgagtttttttttttttttttttttttttacagatgtttaagcttgattattaaaggcccgcgtgttttaaggaaacaaaaatt

SEQ ID NO: 22119 - DNA, 432 bp, Homo sapiens
  misc_feature (1)...(432): n = A,T,C or G
aaattgatcgcccctaggatnccgccgagntccttggcttttcagcttgggaaagaggcggcagtggaggaaggcatggaatgcccacagtggtcagttcaaagaacaaacgtgcaattaaaaaactgtagtcagccaggcacggtggttcacacctgtaatcccagcactttgaaaggccaaggcgggcagattgcttgagctaaggagttcgagaccagcctgagcaacatgatgaaaccccgtctctacaaaaagtacaaaaattagccaggcgtggtggtatgccctggtagtcccagctgctcgggaggctgaggcaggaggatcacctgattctaagaattcgagactgcagtgagccgtgatcttgccactgtagtccaggctgggctacggagagaccctgcctccaaaaaaaaaaaaaaaaaa

SEQ ID NO: 22120 - DNA, 478 bp, Homo sapiens
  misc_feature (1)...(478): n = A,T,C or G
nnnaaaattgatcgctnatagaaatccgctacgagcaacatagtgagaccctgtctctataaaaactaaaaataggctgggcgcagtggctcattcctgtaattccaacactttgggaggctgaggggggaggatcacttaagtccaggagtttgagaccagcctgggcaacatggtgagacccctgtgtctacaaaaataaaaataaaaaacttagctgggtgtggtggtgcatgcttgtgtcccagctacttgggaggcaaagtgggaggattgcttgagcctgagagattgaggcttcagtgcagtttgagccactgcacacactccagcctgggtgacagtgagaccctgtcttaaaaaaataagagtatgacatgagcatgtgagagcaaaagaaaacaaggaagtctgcgaccatgaagcgaatgcttagtctctgatatcacaggcttaaagaaaatgataaagacctaaa

SEQ ID NO: 22121 - DNA, 489 bp, Homo sapiens
  misc_feature (1)...(489): n = A,T,C or G
aggaattaaaaaaannttgatcggcctcgcgaancggtgatagacgcctcgaccgggcctcctgggagcggggtgtcaggtaccgtggcgcctcctcgcgttggttttgctggttctcggcccccgaagcggagcgacggagacacagctgtggaagcatctggatccgctgcccaggtccccgagcttcccggaacccgaggccgcaggacactgaaggctgccattcccgagtaagtgagtgcagtaaagaccggtaaggcccacgcagaagaaacactgaggaaagaagacacttccaaagtaacaaatgggaggaagcagccaacgcccgaggacaacatggcaagaaggagcctttggattccggactgggatggaaagagagttgattgaatcccggaatttggaaaccccagatacggagggcggacggtacaaccggagctgtcaggtggatttccaaggctttgcattggctgtacctgg

SEQ ID NO: 22122 - DNA, 503 bp, Homo sapiens
  misc_feature (1)...(503): n = A,T,C or G
gagccnngnnnnattgaagatcgatcgccatcggaattcggcacgagggagatagttgctaagttgctaggaacatgtggtgggactttcatattctgaaaaatgttctatattctcatttttctaaaagaaagaaaaaaggaaacccgatttatttctcctgaatctttttaagtttgtgtcgttccttaagcagaactaagctcagtatgtgaccttacccgctaggtggttaatttatccatgctggcagaggcactcaggtacttggtaagcaaatttctaaaactccaagttgctgcagcttggcattcttcttattctagaggtctctctggaaaagatggagaaaatgaacaggacatggggctcctggaaagaaagggcccgggaagttcaaggaagaataaagttgaaattttaatttgcattttttttgtctagataagaatagcgtgaatagatcctcttttattcgtaaataatcgtgcatctgtgggttn

SEQ ID NO: 22123 - DNA, 464 bp, Homo sapiens
cttgaccgcgctgcagaattcagaccagcagaagttctgatttttcctagcgagctggaggaaagtgatttgccttcaaggaaactggggagtcagaaaattgggaactcatatcaacatggcaaacctattgaaaacagtggtgactggctgctcgtgtcctctacttagcaatttggggtcctgtaagggtctacgtgtgaagaaggattttttacgaacattttatactcaccaagaactgtggcgtaaagcgcctgtaaaaccaggaattccatataagcaactgactgttggagtccccaaagagatattccaaaatgagaagcgagtggcattgtctcctgctggtgttcagaacttggtcaagcagggttttaatgttgtcgtggaatcgggtgcgggcgaagcttccaagttctcagatgatcactatagagtggcaggtgcccaaatccaagggg

SEQ ID NO: 22124 - DNA, 468 bp, Homo sapiens
  misc_feature (1)...(468): n = A,T,C or G
tattgagngcccgtggaanncgtccgagaaaacccacagaaacaagacctccaagacggccaggcactggggcacacgccggtaacacatcaccgtgggagctgagacggaaggatcgcctgagcccaggatggtgaaaccaccctgggcaacacagtgagaccccgtatctacaaaaaaatacacattatccaggcatggcggcatgcgcctggggtcccaagtactcgggaggtagaggagagaaaaatcacttgagcccagataggtcaaggctacagggagctgatatcgcatcactgcactccagctggggagaaacggcgagactctaccttaaaaataaataaatagatacataatttctaagtgagactttagagagcactcgacctaactccatctaatatacacaacttctacgcgcaatataaatataattagaagacaaactacattctcagagat

SEQ ID NO: 22125 - DNA, 488 bp, Homo sapiens
  misc_feature (1)...(488): n = A,T,C or G
cttgcacccctgcggaatctgcacccggtacagcgtccgactttggactttcccgggtactggaagatgatcccgaggcagcctacaccacaaggggaggaaaaattccaatcagatggactgccccagaagcaatagctttccgaaagtttacttctgccagtgatgtctggagttatggaatagtaatgtgggaagttgtgtcttatggagagagaccctactgggagatgaccaatcaagatgtgattaaagcggtagaggaaggctatcgtctgccaagccccatggattgtcctgctgctctctatcagttaatgctggattgctggcagaaagagcgaaatagcacgcccaagtttgatgaaatagtcaacatgttggacaagctgatacgtaacccaagtagtctgaagacgctggttaatgcatcctgcacagtatctaatttattggcagaacatagcccactaggatctggagcctan

SEQ ID NO: 22126 - DNA, 478 bp, Homo sapiens
ccgcccccatcgcctttcgacccggctgcaggaattcggcacgagaacaggagttgtgttctctgtcgctgctaaattattcttcacttgagtgaagcaaatatttagcttccaaataaagtatattttgttctgaactggcagtttaagaggagataccgtagtctagattgtctttgaggtagaatatatgatggaccacatagtttaagattacaaggtactttccctcttctctcaggccatgcatttgaataaagtgcctcccttagcctgagctcctaaagacctcttgtacttggttgcaaactcagatctctagtctagtctagtctagtctagtctagtcatgtgtgactgtgtactgagataccactagcccagtttgctgggtctctatgttttggaagttgggggtttaataatatttaatgtctttttaggatcataaacataaataggtttgttgatattcagg

SEQ ID NO: 22127 - DNA, 463 bp, Homo sapiens
cttagccccgcgccgtttgccccgcgctgcaggaattcggcacgagccttgttgatgaagaggaggccgaaagcccagcaataatcgtaattgacaagaggcattacaaggagctgcaacaaaagcaacgactaccaagtgtccagcactcacgaggggccagcaactatgctacgcacctcactggccgtcttttgagaaccctgtctacagatgggaaaactgaggcacactgaagtgaggccacatggctggcgaaagcaggcaccatttcctttgcatctacagctcgggtgcacacaagcttgacatgcgttgtcgctactccttgtggcttcccagggaaggcttttgacccctctccaccccatcacagatgaataaacaggctcagctggcttaaagggcaaaaaaaaaaaaaaaaaaaaaaaacctggggggggcccgggcccccattccccct

SEQ ID NO: 22128 - DNA, 504 bp, Homo sapiens
  misc_feature (1)...(504): n = A,T,C or G
cgcgggacanngtgnaagactgggatggattgaccgactgtgcgagaggaacacnaacaggaattggcaacaagctcatttcactggtgggtttgctgaagcattatcacaagacagtcataatgactgatgagtgctcttcatgtgtgaatcatggccatacaccgttagacagggatgaactgactttgagggcgtgcatgtatatgattaacggatggaagtgcaggactccaagatttacttccttccctttccagcagaattacctgagacgagtaaaatctactggtggagtcactccattattcttatctgtggagatctagatcttgatttgaaagcttctgagaaaatcttcagctcagacttgagggtcaactttaccagctgaaggatctgcatttactgctcaaccacatctaatttgatgtcctctgcagatttaaaatgtgtgccttcttttccgtcaccaagtcatccctgggttactactgaacatcn

SEQ ID NO: 22129 - DNA, 486 bp, Homo sapiens
  misc_feature (1)...(486): n = A,T,C or G
gtgggtgaaanancttgcccgcctgcaggaattcggcacgagatccctatcagcctggttcgtgggagggctcttcctaaagggacccccatctctaagtcactctgaaagggagttgtggagaggagacgcctccagactctcagaagttttgaggactgaactgggtcactcgggatctgtgttcgaatcctccccacccctttctttgtggagtttcctaacctgctgctgaagcacaatgttttggtgctttcttttctcatttgttaaaggcagtgtccaaaagccattccagatgccaagaccaggggcttatttctagggaaggtaggtcggtttccatgtttccctcccgttatttttattttttactttttgcctgagacaagccgagtatgaggtggtttgatttaagaaaaatcaatgaaattgtttactactggtttaaaataaaaccgtaaactctgaaaaaaaaaaaaaaaa

SEQ ID NO: 22130 - DNA, 498 bp, Homo sapiens
  misc_feature (1)...(498): n = A,T,C or G
ngggcctgcgctgtgcagaatcgcggaggcttcccagtccctggttggaatggaaccggcggtgaggatgagaggcgctgaagaccagaagacccagggcgtgaacggggcgtgtcatccctggagtttcagtagaatttcaggcctgtctgcttgagcagcagaggaggagtttctgtgtgcctgtgagagactgtgtgtgtgtgtgtgtgtgtgtgtgtgtgtgatgaatgaacagggttgtgtacgtgtgtgtgcgttagacaaatgaacagtgttgtgtacctgtgtgaattgtcactgtgactccaggctctaggctctgcagattcctcagccctatcgcctcacagacacttgggatgtgcagcaggtaaaagagagaagccagattcatggaggcgtgaaggatcccagcaagaaaacacagacttgatcttgagacgagatttttgaaattggttgcggcctcaaggcaggctctgagaagactcgata

SEQ ID NO: 22131 - DNA, 507 bp, Homo sapiens
  misc_feature (1)...(507): n = A,T,C or G
tggtggnnnnnnnttttgatcgacctcctgtcagaaccgcaccagcagacaacgacatacaggcagattttgtcgcttttacttgcgttgtgcaagcattaacatgcatgtctttcagaatctacacctacgcataaccttacctcatactaggaaaattatgagaacggggaaatttttggttacataacagtaaggttcacacacaagcagtacatgttctgtttcattatgctcgatagaaggcttttttttcacttataaggcctgattggtcctacccagcttaacggggcgggggttttttgtttgttcagacagtctgttcttttgtaaacatttttagttggaaaaacagcatctgcattttccccatcctctacgttttagagaggaatcttgtttttgtgtgcaacataagagaattatgaaaactaatagccaaaaaacctttgagattgcattaaagagaagggataaaggaccagcaataataccttgtaagtt

SEQ ID NO: 22132 - DNA, 453 bp, Homo sapiens
  misc_feature (1)...(453): n = A,T,C or G
nattganttttcgcccccgctgcaggaattcggcacgagcagatgtctttttcgtcaattcactgtggaaggggtattatgaatatttagggaaaagacatcccgccactctaactgttgactggttcaatgcaacaagcagtaaggtgaatgccaccttcagcgaagcctcgccagtggagctgaagttgacaggcatttacaagaaggaggaggcccacttactcctgaaagcttttcaaattaaaggccaggcagatatttttgtaagcaagttcgaaaatgacaactggggactagatggttatgtgtcatctggacttgaaagaggaggatttacttttcaaggtgacattcatggaaaagactttggaaaatttaagctagaaaggcaagatcctttaaacccagatcaagactcttccagtcattaccacggcaccagcagtggct

SEQ ID NO: 22133 - DNA, 454 bp, Homo sapiens
  misc_feature (1)...(454): n = A,T,C or G
aatgatnatcatcgncactgccgaattcggnacgaggatatatagtggttgtaccaaacggatgaagatttctcgaaaaaggctaaacgctgatggaaggagttacagatctgaggacaaagttcttaccattgagattaaaaaagggtggaaagaaggcaccaaaattacttttccaagagaaggagatgaaacaccaaatagtattccagcagacattgtttttatcattaaagacaaagatcatccaaaatttaaaagggatggatcaaatataatttatactgctaaaattagtttacgagaggcattgtgtggctgctcaattaatgtaccaacactggatggaagaaacatacctatgtcagtaaatgatattgtgaaacccggaatgaggagaagaattattggatatgggctgccatttccaaaaaatcctgaccaacgtggtgac

SEQ ID NO: 22134 - DNA, 500 bp, Homo sapiens
  misc_feature (1)...(500): n = A,T,C or G
agagccaggggtcctgncaactgagacngcagcntagcagcgaagctgccgcgngnccctggatgtcaaccacttcgccccggacgagctgacggtcaagaccaaggatggcgtggtggagatcaccggcaagcacgaggagcggcaggacgagcatggctacatctcccggtgcttcacgcggaaatacacgctgccccccggtgtggaccccacccaagtttcctcctccctgtcccctgagggcacactgaccgtggaggcccccatgcccaagctagccacgcagtccaacgagatcaccatcccagtcaccttcgagtcgcgggcccagcttgggggcccagaagctgcaaaatccgatgagactgccgccaagtaaagccttagcccggatgcccacccctgctgccgccactggctgtgcctcccccgccacctgtgtgttcttttgatacatttatcttctgtttttctcaaataaagttcaaagcaaccaa

SEQ ID NO: 22135 - DNA, 504 bp, Homo sapiens
  misc_feature (1)...(504): n = A,T,C or G
gagctcnnnnnnnattgacaatcgatcggctgtggaattcggcacgaggttcattgccactaagcctcctcatccagaatggatcatgagctgcagtgaactttccttctgcctctcacatcctcgagtgcaggacttgcctctggacgagagcaacatggttattcccagtgacacggacttcctggacacgtgggaggccatggaggacctggtgatcaccgggctggtgaagaacatcggggtgtcaaacttcaaccatgaacagcttgagaggcttttgaataagcctgggttgaggttcaagccactaaccaaccagattgagtgccacccatatcttactcagaagaatctgatcagtttttgccaatccagagatgtgtccgtgactgcttaccgtcctcttggtggctcgtgtgagggggttgacctgatagacaaccctgtgatcaagaggaatgcaaaggagcacggcaagtctcctgctcagattttgatccn

SEQ ID NO: 22136 - DNA, 493 bp, Homo sapiens
  misc_feature (1)...(493): n = A,T,C or G
cgccccccaggaattttgatgccctngaaaancctgatagccntgctgagcagaactacttncagatcttctccgaggagaaggacccgctctggcaggacccctgttaggacaaacgtcacattgacatctggtccaaggagaagacgtgtgaccgcttcccaaagctcctcatcatcggcccccagaaaacaggcaccactgccctctacctgttcctgggcatgcaccctgacctaagcagcaactaccccagctctgagacctttgaggagatccagttttttaatggccacaactatcacaaaggcatcgactggtacatggagttcttccccatcccttccaacaccacctccgacttctactttgagaaaagcgccaactactttgattcagaagtggcgccccggcgggcagcagccctcttgcccaaagccaaggtcctgaccatcctcatcaaccccgcggaccgggcctattcctggtaccn

SEQ ID NO: 22137 - DNA, 309 bp, Homo sapiens
  misc_feature (1)...(309): n = A,T,C or G
acctacnnnnactncttcaccgattacatgaaatcaatcacagggaaacttgaagaacagacaccagactaagtactaccttttatgacaagtgctgcagaacacatcaagcacatccttgctaatttcaaaaactaccaattctttattgttgaaaacatgaatccacatcgcatggttgctctattggactaccgtgaggatggtgtgaccccatatatgactttctttaaggatggattacaactggaaaaatgttaacacacgtgccaattattttggatctatcacctgccatcataactggcc

SEQ ID NO: 22138 - DNA, 471 bp, Homo sapiens
  misc_feature (1)...(471): n = A,T,C or G
nactgaagcccatttgaacgcctgcaggaattcggcacgagatgaaatgggggttggtgtgtgctggattggctgatatggccagacctgcagaaaaacttagcacagctcaatctgctgttttgatggctacagggtttatttggtcaagatactcacttgtaattattccaaaaaattggagtctgtttgctgttaatttctttgtgggggcagcaggagcctctcagctttttcgtatttggagatataaccaagaactaaaagctaaagcacacaaataaaagagttcctgatcacctgaacaatctagatgtggacaaaaccattgggacctagtttattatttggttattgataaagcaaagctaactgtgtgtttagaaggcactgtaactggtagctagttcttgattcaatagaaaaatgcagcaaacttttaataacagtctctctacatgacttaaggag

SEQ ID NO: 22139 - DNA, 483 bp, Homo sapiens
gcgtccccattgcacttcttaggcattcggcacgagcaaccaagaagagccaggtattctctactgccgctgatggtcaaacgcaagtggaaattaaagtgtgtcagggtgaaagagagatggctggagacaacaaactccttggacagtttactttgattggaattccaccagcccctcgtggagttcctcagattgaagttacatttgacattgatgccaatgggatagtacatgtttctgctaaagataaaggcacaggacgtgagcagcagattgtaatccagtcttctggtggattaagcaaagatgatattgaaaatatggttaaaaatgcagagaaatatgctgaagaagaccggcgaaagaaggaacgagttgaagcagttaatatggctgaaggaatcattcacgacacagaaaccaagatggaagaattcaaggaccaattacctgctgatgagtgcaacaagctgaaagaag

SEQ ID NO: 22140 - DNA, 510 bp, Homo sapiens
  misc_feature (1)...(510): n = A,T,C or G
gagatgaactcgccggctgttgaattcggcacgagggaccctgcagccgcagagatgttgatgcctaagaagaaccggattgccatttatgaactcctttttaaggagggagtcatggtggccaagaaggatgtccacatgcctaagcacccggagctggcagacaagaatgtgcccaaccttcatgtcatgaaggccatgcagtctctcaagtcccgaggctacgtgaaggaacagtttgcctggagacatttctactggtaccttaccaatgagggtatccagtatctccgtgattaccttcatctgcccccggagattgtgcctgccaccctacgccgtagccgtccagagactggcaggcctcggcctaaaggtctggagggtgagcgacctgcgagactcacaagaggggaagctgacagagatacctacnagacggagtgctgtgccacctggtgccgacaagaaagccgaggctggggctgggtcagcaacccgaattcagtt

SEQ ID NO: 22141 - DNA, 481 bp, Homo sapiens
  misc_feature (1)...(481): n = A,T,C or G
aagggggnnttttgaatacatcgccttcggaattcggcacgagggaaagtcagcatttgagtgtagagaaaaaaagaggatcatacagatgtcatcaaattataggctttaatacaggttgctttttttaatccaaaaggaaaagcacttatcctatcagaatgtctaccatgttttatagtaataatttgtgtaaaaaattgaatttttgaatagttttttgtattttttgtgatgaaaaactcataacataaaatttaccatattaactgtttctaaagaatacagttcagccatgtgaagtacatttacactgttgtgaaacagatctccagaactttttcatcttgcaaaactgaaactccatacccattaaacaactcccctttttgttttctcctcagtggaatagaattttgactccatataaatcaagaaacacctanattctttagttgtttgtgtttgcaagatctaaagt

SEQ ID NO: 22142 - DNA, 462 bp, Homo sapiens
  misc_feature (1)...(462): n = A,T,C or G
gagcggggnnncctgcaccgatgactatctgcagacgcgactggctcagcaagtggaggtttcaatgtatttttcagttggctcatcagccagcattggtgaatattcagtttaggggaacagttctagggagtgagacatttttgggagcagaggaaaactctgctgatgttcggtcctggcaaacattgagttattttgagctgtgaaggcagtcgtctctgttacacagtggcagctcttgagttatgcactgtgaagaatgagaagggaaaagcaaaaattatccttgtgaaatatctgctgattgtgccctactctttgcacctgacttttcctagttgtcctggtgctaacacaggagctacaccttgatcctctcctggcatgaaaataaaacaaaggttttcgttgttgttgttccattgcccatttcccccatgttgtctttcccttggctgn

SEQ ID NO: 22143 - DNA, 456 bp, Homo sapiens
  misc_feature (1)...(456): n = A,T,C or G
agagtnaacatgaattctcntgacgaattcggcacgagcgccgcttgtgctgcagccatgtctctagtgatccctgaaaagttccagcatattttgcgagtactcaacaccaacatcgatgggcggcggaaaatagcctttgccatcactgccattaagggtgtgggccgaagatatgctcatgtggtgttgaggaaagcagacattgacctcaccaagagggcgggagaactcactgaggatgaggtggaacgtgtgatcaccattatgcagaatccacgccagtacaagatcccagactggttcttgaacagacagaaggatgtaaaggatggaaaatacagccaggtcctatccaatggtctggacaacaagctccgtgaagacctggagcgactgaagaagattcgggcccatagagggctgcgtcacttctggggccttcgtgtccgaggc

SEQ ID NO: 22144 - DNA, 424 bp, Homo sapiens
  misc_feature (1)...(424): n = A,T,C or G
nttgatgccttggaancgtcgaagtcgatatgctgngaaattaaaacctctttgtacctgagacatctagattcacctcaggaggcctgaaggaaatgtgtaacttgtgggaaagaactagacaaccatttaggaattctctagatatactcagcctaacccagtggcttaacacaaggagattggctttgatctttttttcttgtggcatcttccagcaagttagaagtctcatgggataagactgcagttcccctggttcaatagctggaacagtgattttaaatgtccctttttctggatcccttgtaaacatgaaatcattccatggatggctgccttataattttgtctctttccactttaattgtgaatggttaaaaaaatgctgttttctgatattaaatttttattagtgcaaaaa

SEQ ID NO: 22145 - DNA, 491 bp, Homo sapiens
  misc_feature (1)...(491): n = A,T,C or G
nnttttgattgacanntcagnaaaattncgtaaagccccttcggaaannctcacatganacaaacactaagcgatatcctgacaatataagtgaagctgcttatttttgttttcaggcaatttgttgaagcttgcggtcaagccttatcggtaaacgaacgtctgattaaagaagaccagctcgagtatcaggaagaaatgaaagccaactacagggaaatggcgaaggagctttctgaaatcatgcatgagcagatctgccccctggaggagaagacgagcgtcttaccgaattcccttcacatcttcaacgccatcagtgggactccaacaagcacaatggttcacgggatgaccagctcgtcttcggtcgtgtgattacatctcatggcccgtgtgtggggacttgctttgtcatttgcaaactcaggatgctttccaaagccaatcactggggagaccgagcacagggaggaccaaggggaaggggg

SEQ ID NO: 22146 - DNA, 424 bp, Homo sapiens
  misc_feature (1)...(424): n = A,T,C or G
nggcgaactgancgctgttgaattcggcacgagcagcanagcagaatcgggagcagtggagcagaaatgtgcaagcaccctgatctcactcccagctctgaccaaatacagaattttagagaacatctgaagacatcagactgcactgcgtatacatgttgaattcttcatttttgccatctttaactgtcatcactggggcacggaagtcctgttccagaagtaccaggctgtagatttgataagctagatgcagtagaccgaaaccatccaaaacctgtttagcttcttcctccattggagtttattgggacaaacaggagagccagccattgtctccagtacttgcctcattctcatcatccaaactgaacatttgtatcccaagcagaaataaagagaatatgttctttttaaaaaaaaa

SEQ ID NO: 22147 - DNA, 475 bp, Homo sapiens
cgcgggcgggatggaaatagaaactagaggcatacgcacgagctgaaatacgttttctaggtagagatagattgtgtaagggtacagttatgaggataacagaaacgtggcagattatttaaaatcatcctgaaagtggtgctttatctgatgaaagtgattgtaatccataggaaaatgtttcaacgtgcgcaagagttgcggtggcgggcagaggactaccacaaatgcaaagctttttcagatcaccccctctgcaagaaagcctctttgcaactgggtcagaatggcggcagcggagcatcgacattcttcaggattgccctgctggccctacctcacagctgaaactttaaaaaacaggatgggcctgcagccacctcctccaactcagcaacattctataactgataactccctgagcctcaagacacctcccgaatgtcttcttattccctttccaccctctcctctt

SEQ ID NO: 22148 - DNA, 497 bp, Homo sapiens
  misc_feature (1)...(497): n = A,T,C or G
acgcgcccctttgaccgcttgatcgcntgtcggaattcggcacgagccgcagccatgagtatgctcaggcttcagaagaggctcgcctctagtgtcctccgctgtggcaagaagaaggtctggttagaccccaatgagaccaatgaaatcgccaatgccaactcccgtcagcagatccggaagctcatcaaagatgggctgatcatccgcaagcctgtgacggtccattcccgggctcgatgccggaaaaacaccttggcccgccggaagggcaggcacatgggcataggtaagcggaagggtacagccaatgcccgaatgccagagaaggtcacatggatgaggagaatgaggattttgcgccggctgctcagaagataccgtgaatctaagaagatcgatcgccacatgtatcacagcctgtacctgaaggtgaaggggaatgtgttcaaaacaagcggattctcatggaacacatnctacagctgaaggcagag

SEQ ID NO: 22149 - DNA, 509 bp, Homo sapiens
  misc_feature (1)...(509): n = A,T,C or G
ngtgatttactgacgcgtgttgaattcggcacgagatctctcgggacaactggcacaagcgccgcaaaaccgggggcaagagaaagccctaccacaagaagcggaagtatgagttggggcgcccagctgccaacaccaagattggcccccgccgcatccacacagtccgtgtgcggggaggtaacaagaaataccgtgccctgaggttggacgtggggaatttctcctggggctcagagtgttgtactcgtaaaacaaggatcatcgatgttgtctacaatgcatctaataacgagctggttcgtaccaagaccctggtgaagaattgcatcgtgctcatcgacagcacaccgtaccgacagtggtacgagtcccactatgcgctgcccctgggccgcaagaagggagccaagctgactcctgaggaagaagagattttaaacaaaaaacgatctaaaaaaattcagaagaaatatgatgaaaggaaaaagaatgccaaaatcagcagg

SEQ ID NO: 22150 - DNA, 372 bp, Homo sapiens
  misc_feature (1)...(372): n = A,T,C or G
cccgcncattttcccggctgcggtcgtctttctccctttagcagtgacagcagtagtgccccacggacccaggatgcaggcattgcctcagggcctgggaactgacccagctggtcctgaaggagtagccaaatggctgcactggccgattctggtctccagaggaccttggtgtttgctctcccttgacccaccccagtgagtgccaaagggcagccccaacatgtgcacccctgcatttcctgtcatgccacagactggcccttgagggcagcctgctgtactggccatgctgggccagccccacctggagctcagtaaaaactgctgtttgattaaaagctggtatctgtgaaaaaaaaaaaaaaaaaa

SEQ ID NO: 22151 - DNA, 475 bp, Homo sapiens
  misc_feature (1)...(475): n = A,T,C or G
nattgatcgcctgttgaattcggcacgagcgctcttgctgctcccctgaggtgaactgaagccagcagccccgcatcatgtcaaagctcggccgggccgcccggggcctcaggaagcccgagagaggcgtttccatcaaccagttttgcaaggagttcaatgagaggacaaaggacatcaaggaaggcattcctctgcctaccaagattttagtgaagcctgacaggacatttgaaattaagattggacagcccactgtttcctacttcctgaaggcagcagctgggattgaaaagggggcccggcaaacagggaaagaggtggcaggcctggtgaccttgaagcatgtgtatgagattgcccgcatcaaagctcaggatgaggcatttgccctgcaggatgtacccctgtcgtctgttgtccgctccatcatcgggtctgcccgttctctgggcattcgcgtggtgaaggaccn

SEQ ID NO: 22152 - DNA, 523 bp, Homo sapiens
  misc_feature (1)...(523): n = A,T,C or G
agggtnnnnnnnnaggggntttgtacgccctnngnntttcgcccgcctgcaggaattcggcacgagcttgccctcattctggtaaaccaacaaccttcagcgtgaacatcatagccatcatgagcatgtcacagtgctgcagagattttgtttatggccagttttggggcctgtctatggccagatttgggggcctgttcccaacataatccccataatccccatgtatcaagggagagaccaggcagaggtaaatgaatcatgggggtgatttcccccatgctgttctcatgatagtgagtgagttctcacaagatttgagctaatggttttctaagtgtttggtagtttctcctgcattcattctccctctggccacattttgaagaaagtgtcttgcttccccttcgccttctgccatgattggtaagttccctgaggcttcctcagccatgtggaactgtgagtcaattaaacctctttcctttataaaaaaaaaaaaaaaaaaaaaaaacctcggggg

SEQ ID NO: 22153 - DNA, 404 bp, Homo sapiens
  misc_feature (1)...(404): n = A,T,C or G
ggcgggcnaattgaccttganccgcgctgcaggaattcggcacgagcagagctgagccacagggcatgtctgaggtcagccccgagcaaaatggaatagggactcagggtgggtcaggtaactggaaagcgggcactgtgcacgcagcccttgaggggagccagggtgggtggggatcccccactgtgtgcagaaggcagcagccttggaagcagggtgtgctcctcggtgtggtcgctcgataccagaaaatgactctaaaaactgaagagtgtttgagtttcattcacacaaaacatggacatcatctgtgaggctctgtcccagagagacagggccatccctcatgtctgttattgggttgtagataaacaaaagtataaatcaaaaaaaaaaaaaaaaaa

SEQ ID NO: 22154 - DNA, 499 bp, Homo sapiens
  misc_feature (1)...(499): n = A,T,C or G
tggcgggagaanaaaattttgaccgcgnttgcagattgacgcgccctgcagaattccgcacgaggaagactcacacactgcgagaaaccatatgaatgtaaacagtgtgggaagttcttcagttgtaagtcaaacctcattgtccatgagaaaactcacaaggtagaaaccatgggaattcagtaagtaatgtggctttttttgtaaaaaaatgttaagtcatagtaaaccctgtagatgatgttgcttgcaagcgtaatatccaacagtttaaggtactataccacatggtgacctactgtttgccagcctgtaaaacacacacacacacacacacacacacacacaaatattattagacaaattagatgacaaaaatcattaagaagtccaaactttttttttattactagcttcagcagaccaaaacttcctctgtcaaggtgttataaacatttaaaaacacattttccatttccatacatatctttttggtcan

SEQ ID NO: 22155 - DNA, 470 bp, Homo sapiens
  misc_feature (1)...(470): n = A,T,C or G
ggaacttcgcccccgntgnnagaaannttttcccccgcgctgcaggaattcggcacgaggcgccgctccggctgcaccgcgctcgctccgagtttcaggctcgtgctaagctagcgccgtcgtcgtctcccttcagtcgccatcatgattatctaccgggacctcatcagccacgatgagatgttctccgacatctacaagatccgggagatcgcggacgggttgtgcctggaggtggaggggaagatggtcagtaggacagaaggtaacattgatgactcgctcattggtggaaatgcctccgctgaaggccccgagggcgaaggtaccgaaagcacagtaatcactggtgtcgatattgtcatgaaccatcacctgcaggaaacaagtttcacaaaagaagcctacaagaagtacatcaaagattacatgaaatcaatcaaagggaaacttgaagaacagagaccagn

SEQ ID NO: 22156 - DNA, 452 bp, Homo sapiens
  misc_feature (1)...(452): n = A,T,C or G
agtgggacatgactgcctgacgatttcgcacgagcccccaagcccttccttaagcctgtgggtctaagaacatccagagcatattagcacatcactccaagcaacaacctccgccagaagaaagcaaatgctgttttacttcaaatgatggatgctgcaatcatatgatatttgctaagctgccaaacatgtttatttagcagatactgtatggaattttctgaacacctctttaacgtatgaggaaggttgtactgctacggatgcaattcaattcttccttttttattactatttcaaacacacacacatatatatatatattaaacttagatgataatcaaaatcaaaaagtcaacgtaaaaactggtttcttggtttggttgggtcttatttgagttagtttgtttctcagtttctcgtatggattctttggggtactttggtagccn

SEQ ID NO: 22157 - DNA, 473 bp, Homo sapiens
  misc_feature (1)...(473): n = A,T,C or G
cttgancggccatgcgaagctgtcgagcttctgacagccggtgcgcctgcccgggaacatcctcctggactcaatcatggcttggggtctggtcgccagcaacctgaatctcaaacctggagagtgccttcgagtgcgaggcgaggtggctcctgacgctaagagcttcgtgctgaacctgggcaaagacagcaacaacctgtgcctgcacttcaaccctcgcttcaacgcccacggcgacgccaacaccatcgtgtgcaacagcaaggacggcggggcctgggggaccgagcagcgggaggctgtctttcccttccagcctggaagtgttgcagaggtgtgcatcaccttcgaccaggccaacctgaccgtcaagctgccagatggatacgaattcaagttccccaaccgcctcaacctggaggccatcaactacatggcagctgatggtgacttcaagatcaaatgtgtgg

SEQ ID NO: 22158 - DNA, 477 bp, Homo sapiens
  misc_feature (1)...(477): n = A,T,C or G
nttgaccgccttagatttgaccgcgctgcggaattccgcacgagcaagaacagcattactgattcccaaatggatgatgttgaagttgtttatacaattgacattcagaaatatattccatgctatcagctttttagcttttataattcttcaggcgaagtaaatgagcaagcactgaagaaaatattatcaaatgtcaaaaagaatgtggtaggttggtacaaattccgtcgtcattcagatcagatcatgacgtttagagagaggctgcttcacaaaaacttgcaggagcatttttcaaaccaagaccttgtttttctgctattaacaccaagtataataacagaaagctgctctactcatcgactggaacattccttatataaacctcaaaaaggactttttcacagggtacctttagtggttgccaatctgggcatgtctgaacaactgggttataaaactgtatcaggttcn

SEQ ID NO: 22159 - DNA, 476 bp, Homo sapiens
  misc_feature (1)...(476): n = A,T,C or G
ntttganccgcgctgcaggcttagtatatcactttaaaaacttggattaaccactcaatgtccactttctttgacttacagtataaccatgtagccaattgtggcccactaaaatctacagaagttaatgtgggtcaccattttggtcagaagcatacattcctgtcagacaactagttgtctgacagaaatgttaggcttcatgtatgttaccccagtactgttagaaacatttgtactaggttataagatctttctgtgacaggtaacaaatttggggaagacagcacaatcttcttgaatgtagctcttgggaatgcattattacatccatttctgtaacataataatatgttgcatgcagttatattttctatttagtctgtatattttgttcttcatagtctgttttttctagcatgcttgatttaggagagaataaagggctatataataataaatccagatttccggan

SEQ ID NO: 22160 - DNA, 376 bp, Homo sapiens
  misc_feature (1)...(376): n = A,T,C or G
atggaaacctttnngaannnnnattgcccccgctgcaggaattcggcacgagatggctgtcatgcttagacagtgattcctgcaacttgaccttcaggctgggagaggtggagagccatgcctgttctccttccttgctatggaatttgctgacacaatatcttccgcctggtgctgggcatatcctaagaacttacaactttcctgtattatcctgtgtgagcagctgtcaccttattgggggaaaaatgcctgaaaattagggggcacttcaagtagatagcttctatttcctatatttgtcttatatacaagtatttgcttttatcaaaataattccaataaagcattttaaagtaaaaaaaaaaaaaaaaaa

SEQ ID NO: 22161 - DNA, 411 bp, Homo sapiens
aatagaaattttgccccgcgctgcaggaattcggcacgaggggaaatcgtgcgtgacattaaggagaagctgtgctacgtcgccctggacttcgagcaagagatggccacggctgcttccagctcctccctggagaagagctacgagctgcctgacggccaggtcatcaccattggcaatgagcggttccgctgccctgaggcactcttccagccttccttcctgggcatggagtcctgtggcatccacgaaactaccttcaactccatcatgaagtgtgacgtggacatccgcaaagacctgtacgccaacacagtgctgtctggcggcaccaccatgtaccctggcattgccgacaggatgcaaaaggagatcactgccctggcacccagcacaatgaagatcaagatc

SEQ ID NO: 22162 - DNA, 447 bp, Homo sapiens
aattgacttcgctgcaggaattcggcacgagggaaaggaggtactgtagatgccctccaaatccttggttatggaatatttggctcatcccagtacactcggcttggctgttggagttgcttgtggcatgtgcctgggctggagccttcgagtatgctttgggatgctccccaaaagcaagacgagcaagacacacacagatactgaaagtgaagcaagcatcttgggagacagcggggagtacaagatgattcttgtggttcgaaatgacttaaagatgggaaaagggaaagtggctgcccagtgctctcatgctgctgtttcagcctacaagcagattcaaagaagaaatcctgaaatgctcaaacaatgggaatactgtggccagcccaaggtggtggtcaaagctcctgatgaagaaaccctgattgcattattggcccatgc

SEQ ID NO: 22163 - DNA, 481 bp, Homo sapiens
  misc_feature (1)...(481): n = A,T,C or G
ngaccgcccatttcccggctgcggattctgcacgagctagaccaccctgccttgtatccccaggctgtgggatactcaggaaggggtgaatggtgtagtcaacagactgaggggaaatcaaagcttttagagacatttgcaggatgaacagatgttcaaacgttcctttatttggtctccagacagacgcagaggcctcccttttatcccagtaatcggtgcattatgctttaatttgcaaatgacattaaaaatattaaccgggagaaaaaaaaaaaaaacacaaaaaaaaaaaaaaaaaaaaaanaccctggggggggggccgggccccccattcccccttagggggggggtattaaaattccgggggcggggtttaacaggggggggggggggggaaaggggnccccnnnnnngcnggnnggcttnttcgntttttgtgggggctttttnntnnntggnggnttgtgctgttcttttc

SEQ ID NO: 22164 - DNA, 476 bp, Homo sapiens
ccgggcccaattgacgtctgcagacttcggcacgagccggattggagggagcacagatacaggcaaacatatcaaggagaatgactattatactccaactggggagttccgtgtggaccgtgaaggttctccagtgctgctcaactgtctcatgtacaagatgtgttactatcgctttggacaggtttacacagaagccaagcgtcctccaggctttgaccgtgtccgaaatgctgagattgggaataaagactttgagcttgatgtcctggaggaagcatataccacagaacattggcttgtcaggatatacaaggtaaaggacctggataatcgaggcttgtcaaggacataaatggtcacgtccagctctgatatgcttcgcactgagcacatcacatttaggacgttgaagattttttttttttttttttttttaatatgcagtttggaagaacaaaactggatggcatcaa

SEQ ID NO: 22165 - DNA, 507 bp, Homo sapiens
  misc_feature (1)...(507): n = A,T,C or G
tggtcggggcnncncnggnncnnccnnnaatgcaacgcattgcgacgcctgcaggaattctgcacgagcacagcttttattttacttcaaaggttacctcagatcagcctgggaaggtgaggggaatgaagcaaatgctgttaaagggtcatgggagagaaaaggtatctgtgggaagagaataatctcttttgacttcgtgtgctgcctcacggggatgatgtacccaggaaagccaaaagaaaaactaataaggggctggctcattacctcaaggagtataaagaggccatacacgatatgaatttcagcaatgaggacatgataagagaatttgacaatatggctaaggtgcaggatgagaagagaaaaagcaaacagaaattgggggcgtttttgtggatgcaaagaaatttacaggaccccttctaccctagaggtccaagggaattcaggggtggctgcagggccccacgaagggacattgaagacattccttatgtgtag

SEQ ID NO: 22166 - DNA, 406 bp, Homo sapiens
  misc_feature (1)...(406): n = A,T,C or G
cgcgcnccnattgaccttgatccgcgctgcagtgcgctaganaatgacaaaacaattaaactgtggaagagtgactgctaagtccctttgctcctgcccgcgagagactgtcgggaagttgacccggattggcaagaaacagggtgtcttggaggtggtcccccagatctgcgcctgggggtcaggacagggcctgatttgagcctcctctctgaagatgatttggccgagcggaaggtgtggaccaccggaaagttcttaaaagttgctggtgacatttcttgccaattctaacactgtctagggaagagttcctagtctattgtgttcaaacagagtcaacaaaagtttttaattttttattacagaagggtgaagttcaatttaaaaaaaaaaaaaaaaaaaa

SEQ ID NO: 22167 - DNA, 479 bp, Homo sapiens
  misc_feature (1)...(479): n = A,T,C or G
ccgcgcccctttgantttccaccgcctgcaggaattcggcacgaggagaagcattcaagttaaggcaaaaggcccaacgcagagcagcacactgaggtcacacctgtgagatgtggaagagaattcctgagcgtggagcgatggggttaggtgccaggatgattgcccattttgcttctgtcagactcttgactaaggatttctggttgcattttattacataaaagccagggaggttatatcacggtgagaaagcttccctgacgctgcctcctgtagcgcagcccaaccaagcctgtggaggtaccatatgactgtaggcctctggggacacaggagctgcatctgcttctcaaggccagggacacagccatttctgccagcatctgttgatcantgagtgagtgagtgggcaggtagagcangagccagtgaagagcangccctggatgggtggggatgcaccatgtccccaggct

SEQ ID NO: 22168 - DNA, 501 bp, Homo sapiens
cgccattgcccgcctgcggaattcggcacgagctgcctacggaggtggcagccatctccttctcggcatcatggccgccctcagaccccttgtgaagcccaagatcgtcaaaaagagaaccaagaagttcatccggcaccagtcagaccgatatgtcaaaattaagcgtaactggcggaaacccagaggcattgacaacagggttcgtagaagattcaagggccagatcttgatgcccaacattggttatggaagcaacaaaaaaacaaagcacatgctgcccagtggcttccggaagttcctggtccacaacgtcaaggagctggaagtgctgctgatgtgcaacaaatcttactgtgccgagatcgctcacaatgtttcctccaagaaccgcaaagccatcgtggaaagagctgcccaactggccatcagagtcaccaaccccaatgccaggcttggcagtgaagagaatgagtaggcagctcatgtgcacgttttctg

SEQ ID NO: 22169 - DNA, 495 bp, Homo sapiens
  misc_feature (1)...(495): n = A,T,C or G
aggagaatcgacncctttcgaccggctgcaggaattcggcacgagtattagcatttcattagtacttcacatgcttttgatgtactcttgagattgctttaaattttgtattgaaacaacaatacattttgcactgtagtaatgggagcactaactcttacaacagttagtgaatcgttttaaagaatcagttcagtgtagacattttgaaaagattgtttcctgtgctttacgatagcttagtgcaatgtgcacttctgttttacttgccattttcctgctctgttttctctgtgacatgaagcaacagaaactgagatcaaagttaagattatatcctgtttgtagtatcagatatttttctgtgtacaattataggattgtaatctaaactggaatttttaggcagtaagtcaccacaaaatgttttagataagacacaataaaattattataaataaaagcttaatgtttgtaaaaaaaaaaaaaaaaaaa

SEQ ID NO: 22170 - DNA, 470 bp, Homo sapiens
  misc_feature (1)...(470): n = A,T,C or G
nattgcccgcttgtatgactttgcacgagctgcagcaaggagcatcagaccctagactggagattgggacataagcaggcttgtgcacaaccagatcatctggaccatataattccagaccacaacttcctttttccagaatttgaaattgtcatagaaacagaagatgagattatgcctgaggttgtggaaaaggaagattactcagagattatagggagcatgggtgaagcacttgaggaagaactggattccatggcaaaacatgaatccagggaagataaaatttttcagaagtttaaaactcagatagcccttgaaccagaacagattcttagatatggcagaggtattgcccccatctggatttctggtgaaaatattcctcaagaaaaggatattccagattgcccctgtggtgccaagagaatattggaattccagttttcagacacggtctattgactgac

SEQ ID NO: 22171 - DNA, 512 bp, Homo sapiens
  misc_feature (1)...(512): n = A,T,C or G
aggatctaaccagggcccccccaattgacgccattgattccatcagccngccgaacagatatgcagctgtggaggaaacaccttgagagaaacaaaccaccattgcctgactggctcttatcagcgttaatagcatctcaacttcctcagatcagttctatcactggcactacagaatccttctctttcttaaggcactttgcattgtagaaagttcctggatgttcatatctacagttcgaaggggaggagggatttaaactggtcctgtacatagaaggcttgtttgacagacgagaaaaattagccaaggaagattgttgtttaaattcatttgaaaccacaaggggactttttagttgcatgtgtaacacattcattgaattattatcactgttttcttgggacaacatcaagcctaaatactgaacaatatgaagattcttttcttggcctttctgcggattatgtcatatataataattatcagaatcattctacttggcttaaaa

SEQ ID NO: 22172 - DNA, 467 bp, Homo sapiens
  misc_feature (1)...(467): n = A,T,C or G
nattgaacgcctgcggaattccgattgggccccgtgcgcgaccggaggcagnttccgttactatggcaatgacggcagggactacaacaacctttcctatgagcaaccatacccgggaaagagtgactgtagccaagctcacattggagaatttttatagcaacctaattttacagcatgaagagagagaaaccaggcagaagaaattagaagtggccatggaagaagaaggattagcagatgaagagaaaaagttacgtcgatcacaacacgctcgcaaagaaacagagttcttacggctcaaaaggaccagacttggcttggatgactttgagtctctgaaagttataggaagaggagcttttggagaggtgcggttggtccagaagaaagatacaggccatatctatgcaatgaagatattgagaaagtctgatatgcttgaaaaagagcaggtggcccatatn

SEQ ID NO: 22173 - DNA, 468 bp, Homo sapiens
gggttcactgtatcgtgagcattcggacgagcgctgctgctgcttctgccgttgctgccagccagttcccaggtccgttcgacagaacggatattccccctgagctgccacctgccgactttttgcgccagccccaacccccactaaatgatctgatttcgtcacctgactgcaatgaggtagatttcattgaagctctcttgaaaggctcctgtgtgagcccagatgaagactgggtgtgcaacttgaggctgatcgacgacattttggaacagcatgctgctgctcaaaatgccacagcccacaattctgggcaagtcacccaggatgctggggcactttaaatctgagcaggatgcccatagaaacccccatggtgacatcactctaggaagtggtgtcgatccatacccgcagttgtctaccgttacaatttgagtggtgttgtcagcccatgcttatccctct

SEQ ID NO: 22174 - DNA, 512 bp, Homo sapiens
  misc_feature (1)...(512): n = A,T,C or G
tgaannnnnnnaaggnnaggggnnnnnaggggccnnnnnattgaccggcttcggattgcgtacgagcacctgctgcgatctcctcatctgtctcttcctgggcgccaacgccgtgtggtacggagctgttggagactctgcctacagcacggggcgtgtgtccaggctgaacccgctgagcgtcgacacagtcgctgttggcctggtgtccagcgtggttgtctatcccgtctacctggccatcctctttctcttccggatgtcccggagcaaggtggctgggagcccgagccccacacctgccgggcagcaggtgctggacgtcgacagctgcctggactcatccgtgctggacagctccttcctcacgttctcaggcctccacgctgaggtgagggctctactgggggtcctgccgccttggcgcagcttggactcaagaccctgtgcacctctcagcaggcctttgctggacagatgaagagtgacttggttctggatgattctaagag

SEQ ID NO: 22175 - DNA, 464 bp, Homo sapiens
  misc_feature (1)...(464): n = A,T,C or G
natggaccgctctgcggaatnccgattgtgaacatggcccctccccctgccaggagctttggacctaatccaagcatccctttgcccagaaagaagatgggggaggaggcagtaataaaaagattgaagtattttgctggaataagttcaaattcttctgaactcaaactgaggaatttcacctgtaaacctgagtcgtacagaaagctgcctggtatatccaaaagctttttattcctcctgctcatattgtgattctgcctttggggacttttcttaaaccttcagttatgatttttttttcatacacttattggaactctgcttgatttttgcctcttccagtcttcctgacactttaattaccaacctgttacctactttgactttttgcatttaaaacagacactggcatggatatagntttacttttaaactgtgtacataactgaaaatgtgctatn

SEQ ID NO: 22176 - DNA, 497 bp, Homo sapiens
ccccccccatcgatcggctgtaggattgaggcacgatctgaggcatgagaatcgcttgaaccggggaggcagaggttgcagtgagccgagatctcaccactgtactccagcctgggcgacggagtgagactccctctcaaaaaaagaaaaaagccccagcatgtagcaaaagcatttcttggtgagtgtgggggctggtgattcccaccttcaccctgtcatggtctcagggaacagcctgcttcccaccagcagcttgacacccacagtgtgctctggctgctgggagcccatctctcggagaaaccctgtccacccaaccccgagagccctagcgtgcagtcagcgtcagcacggcgctcccagatgagggccggactgcctccccttaagcagctgtgttggaggtactgcccagaccgctgcaggtccctggggatctgcatttctaacaggctcctgcccccaagactgctctggtggaaaatccagcctgg

SEQ ID NO: 22177 - DNA, 538 bp, Homo sapiens
  misc_feature (1)...(538): n = A,T,C or G
ggagatttgcccttcccggctgcacggaaaaagtggtaaacctgngccattcttgctgtctggatccagagacaagactattaagatgtgggatgtcagtactggcatgtgccttatgaccctcgtgggtcatgataactgggtacgtggagttctgttccattctggggggaagtttattttgagttgtgctgatgacaagaccctacgcgtatgggattacaagaacaagcgatgcatgaagaccctcaatgcgcatgaacactttgttacctccttggatttccacaagacggcaccctatgtcgtcactggcagcgtagatcaaacagtaaaagtgtgggagtgccgttgattgtgtctccttcggcccctcctccctcttttcctctggatgcactctgatgataccatggttaccccattgagctctgtttaaataaatattgtcctttcatgtaaattattctggatgtagattgagcttattaaatgttacacacaaagtaaaaaaaaaaaaaaaaaaactcgagggggg

SEQ ID NO: 22178 - DNA, 476 bp, Homo sapiens
  misc_feature (1)...(476): n = A,T,C or G
gcggcccccaattgacaatcgcncggctgcaggaattcggcacgagctgaagcaagttcggtggacgccggcggcgccctgatctaaagaaacgactcagggactgcggcgcttgcacgtcaacgggaggtgtgagcccaaagaaatgggacgtcggtcatcagatactgaagaagaaagcagaagcaagagaaaaaagaaacaccgtagacggtcctcctcgagcagttcttcagatagtagaacatacagccgaaagaaaggaggaaggaaatcaagatcaaagtcaagatcttggtccagagatcttcagcctcgttcacattcttatgatagaagacgcaggcatcgatcaagcagtagctcttcttatggctnccgaaggagaacaaggccaagctccttcaggggtcgagggaaatcttttaggtttcaggggttgggccaaaaaccaaccgaaaggattcttgtgactt

SEQ ID NO: 22179 - DNA, 501 bp, Homo sapiens
  misc_feature (1)...(501): n = A,T,C or G
agacgggccatttgaaacccctnaattgatcgccntgccgaattcggcacgagcaaggggccacgatgtggctgggagtcctgctgacccttctgctctgttcaagccttgagggtcaagaaaactctttcacaatcaacagtgttgacatgaagagcctgccggactggacggtgcaaaatgggaagaacctgaccctgcagtgcttcgcggatgtcagcaccacctctcacgtcaagcctcagcaccagatgctgttctataaggatgacgtgctgttttacaacatctcctccatgaagagcacagagagttattttattcctgaagtccggatctatgactcacggacatataaatgtactgtgattgtgaacaacaaagagaaaaccactgcagagtaccagctgttggtggaaggagtgcccagtcccagggtgacactggacaagaaagaggccatccaaggtgggatcgtgagggtcaactgttctgtcccag

SEQ ID NO: 22180 - DNA, 447 bp, Homo sapiens
aattgatttgcgctgcaggcgcacggcaaggaagtggtactgctggactttgctgcagctggaggggagctcggctggctcacacacccgtatggcaaagggtgggacctgatgcagaacatcatgaatgacatgccgatctacatgtactccgtgtgcaacgtgatgtctggcgaccaggacaactggctccgcaccaactgggtgtaccgaggagaggctgagcgtatcttcattgagctcaagtttactgtacgtgactgcaacagcttccctggtggcgccagctcctgcaaggagactttcaacctctactatgccgagtcggacctggactacggcaccaacttccagaagcgcctgttcaccaagattgacaccattgcgcccgatgagatcaccgtcagcagcgacttcgaggcacgccacgtgaagctgaacgtggag

SEQ ID NO: 22181 - DNA, 499 bp, Homo sapiens
aagaaaaaaaatttgatcgcctttgcaccccctgcaggaattcggcacgagattccctgttgactgcgtcgcgatgtgtggcgactgtgtggagaaggaatatcccaaccggggtaatacctgcctggagaatggatctttcttactgaactttacaggctgtgcagtgtgcagtaagcgggattttatgctgatcacaaacaaatccttgaaagaagaagatggagaagaaatagttacctatgatcatttgtgtaagaattgtcatcatgtaatagccagacatgagtatacattcagtatcatggatgaatttcaggagtataccatgctgtgtctgttatgcggcaaagccgaagatactatcagtattctccctgatgacccccgacaaatgactctcttattctaaggatccttctacagatctgttataactatattgtggtgcgttacaatacaacaagcctgatgagttggcttatttcattcatactgg

SEQ ID NO: 22182 - DNA, 481 bp, Homo sapiens
aattcgccggctgcattaattcggcacgaggaaaggcagttcaccccagttcatttggcttagaacaggacagtaccaggccttgaggtccccagctcagcctcttacctcttgtgagctttagtttctcatcaaacggggacagttgttgaagggattgaaggaaattgtgtacctaaaggagttcagtaaatgatccaagatcttctggactccagatcctactcatctctcacagggctgagagtgcacctgagacagagaaacacaagttcttatgcacctaatgattgctcacaggattataattcgatcccgagcttcaggaaggagttcgcttcatgagaggtggtgtgtgagcagaggttggagacagatcccctgggacagtagctccagctgtgtgtgtggaaaagccagcccaagatactttaaggtttcttttttttaaatgaaaaaaaaaaaaaaaaaaactcggggg

SEQ ID NO: 22183 - DNA, 483 bp, Homo sapiens
  misc_feature (1)...(483): n = A,T,C or G
aatccgccggctgcatagcccggctgcaggaattcggcacgagattaaggctactatggagtatcctctgtgtccacacctgaggtggatgtggtccctaattgtatatggctgagcttctctaagctgctgcctatctgagagggcctcaccatatctttttccttggattggcatgggagggtcaggcaggaataatgggattatattggctgtttctatgactcatgccccccactcccactaaactgtgacattcctgagggcagggactatgtctaactcattgttgtatccgcagcacctaacatactgccctgcgtgtagcgagagtttaatatatgtttgttgaataaagaaaagaaaaagaagctcggggggggccccgccccccaatccccctttttggggagggcattgcaatccaatgcccggagtgtcacaactttgggacctgggggaaacnnngatgaaaccctctct

SEQ ID NO: 22184 - DNA, 478 bp, Homo sapiens
  misc_feature (1)...(478): n = A,T,C or G
agggggcnaattcccgtctgcangacttcggcacgagcttaaatgtaaaaaacacctcagtacagcagagacagacacgaagggcgggcgggagggctgcatgcaggggcgtgcattggctgctgccgcttttgtaattgaattgttttaaacctcaaacaaacaggactgccgctgtcactcaggccctccagagccactggctgcgaaggttggacctccggctggaatctcctaaagcccctgtggctgagctcactgcagcggtgcggcaggggcccctgagcagtgatagtggacattgagccacttgccatcccgacggtgccagacccgggtctcttctgactggctggtgcgaggccgaccctgcccgtcgatgtactgggtgaggcggatgtangcgatgcacgctgcgtcctccccaatcancgtgacgtgtgggtttaggatggtggtatggataagctttgctgtc

SEQ ID NO: 22185 - DNA, 460 bp, Homo sapiens
  misc_feature (1)...(460): n = A,T,C or G
nttttgccccgcgctgtatgaattcggcacgagcagagatgagcaccggctgcggcagcagcagcgggccctggaagagcagcacagcctgctccacgcacacagtgagcagctgcaggccctctatgagcagaagacacgtgagctgcaggagctggcccgcaagctgcaggagctggccgatgcctcagaaaacctccttaccgagaacacgtggctcaagatcctggtggcgaccatggagaggaaactggagggcagggatggagctgaaagcctggcggcccagagagaggtccaccccaagcagcctgagccctcagccaccccccagctccctggcagctcccctccacctgccaatgtcagcgccacactggtgtctgaaaggaataaggagaacaggacagactaactttttaaatgatatgaagaaatcagaggtgaaaattgtacattg

SEQ ID NO: 22186 - DNA, 463 bp, Homo sapiens
tagagaaacggaaaaatttgattgccctccgctgcaagaattcggcacgagtgggattacaggcgtgagccaccgcacctggctgaaatgtcttcattgttggtgtcttctgaccccatagtatatgtaaataattcatcatatgtgggtgagctgttggtagctaagccaaagaaacaaactgcagccagacacagtggcttatgcctgtaatcccaacactttgggagactgaggcaggaggattgcttgagcccaggagtttgagacccgcccaagcaagatggtgagaccctctctataaaaaaattaggtgggtgtggtgatgtgtgcctgtactcccagctacttgggaggctgagatggaaagatcccttgagcccaggagttcgaggttgcagtgagctgctatcccaagtagtgagagagcagggtgagagagcaggaccgtgtctctaaaaag

SEQ ID NO: 22187 - DNA, 492 bp, Homo sapiens
  misc_feature (1)...(492): n = A,T,C or G
ngcgtgtatgaatctntcggcatcacaagaacggcgagggcgccggaggcccaggactggcgtcactgctctgtggcctctgcgtcctagaggcctatcctctgtggcgctgttaccagcaggtattggagatccacaggtaagatgccaggaccccctagaagcctagaaatgggactgttgacatttagggatgtggccatagaattctctctggaggagtggcaacacctggacattgcacagcagaatttatatagaaatgtgatgttagagaactacagaaacctggccttcctgggtattgctgtctctaagccagacctgatcacctgtctggaacaagggaaagagccctggaatatgaagcgacatgagatggtggatgaacccccaggtatgtgtcctcattttgctcaagacctttggccagagcagggcatggaagattcttttcaaaaagcaatactgagaagatatggaatatatggt

SEQ ID NO: 22188 - DNA, 485 bp, Homo sapiens
aagaaaaaaaaatttcgcccgcctgcatgaattcggcacgaggcagagcagaggaggcccgggaagctctggactcatagcggttcagcacggccacgacacggccacttccagacagagcccctggctgctgggtagggaccgcagcacctcaaagaaccctttctggggtcacttctggcaccctctgcaaacctcaagggggagcgtgaggctgggggctgtccatcagggtccaggcacctcctgaaggaacctctcaaagccagccgatcaccggctccagacccacgctgtcagacatctctgtggccaccagaccactgccactctcacgggtgtgatgacatgggacctgcctactggtagtcttctgccttcgtggaattctgcaacttccttcctgcctcggccacagcatgtcagccaagcacctgtcagggtccctccctggcaggacgatgtttagaagctcaacaccgtgc

SEQ ID NO: 22189 - DNA, 462 bp, Homo sapiens
  misc_feature (1)...(462): n = A,T,C or G
cctagccccagcgcngtatgcccagcgctgcaagaattcggcacgaggtgaggttggccacacattccttcctgtggacttgacattttggaagaactctttgccacataatgagttcattttagttttatgctcccattgaaaaattttccactatttttataagctgttaatttcttgagtactttataacatgtctgtagcttggataaaccaagtaagtattttttttttgtctttagcgaagtttagactgtgaatatgatgacacagattcttttttatggaggctttgcttgttttaaatttttgcatgacttttcatctttttatgtgagtttcctgtagtttgatccgaaggaaaagagtatagtagcctgagaatcaggagatgggagttttagtcgtaggccttatgataattaccccgcggtggtgtgtagaaaagtatgtaaatttgct

SEQ ID NO: 22190 - DNA, 488 bp, Homo sapiens
  misc_feature (1)...(488): n = A,T,C or G
nacgtactgcactcgatgctttcaggaanaccgccgagagtagccgcaggcctaggaatggcgctcttagctctgcttataggctgtagaggcttatgcatttgtcaacaagtagaacctcagtttgctgactgaagtgttttattagtattttactctagtggcgtaattgtaatgtagaacagttgtgtggtagtgtgaaccgtatgaacctaagtagtttggaagaaaaagtagggtttttgtatactagcttttgtatttgaattaattatcattccagctttttatatactatatttcatttatgaagaaattgattttcttttgggagtcacttttaatctgtaattttaaaatacaagtctgaatatttatagttgattcttaactgtgcataaacctagatataccattataccttttatacctaagaagggcatgctaataattaccactgtcatagaggcaaaggtgttgatttatgg

SEQ ID NO: 22191 - DNA, 486 bp, Homo sapiens
agaaaaaaaattagcacgcctgtttgacccgcctgcaggaattcggcacgagccagcactgaaaactgaggagcgcaaggctaagcctgctccttcaaaaacccaggccagacctgttggagtcaaaatccccacttgtaagatcactcttaaggaaaccttcctgacgtcaccagaggagctctatagagtgtttaccacccaagagctggtgcaggcctttacccatgctcctgcaacattagaagcagacagaggtggaaagttccacatggtagatggcaacgtctctggggaatttactgatctggtccctgagaaacatattgtgatgaagtggaggtttaaatcttggccagagggacactttgccaccatcaccttgaccttcatcgacaagaacggagagactgagctgtgcatggaaggtcgaggcatccctgctcctgaggaagagcggacacgacagggctggcagcggtactt

SEQ ID NO: 22192 - DNA, 472 bp, Homo sapiens
ctcattcgcctcgcgctgcacgaattcggcacgagagaatgaccactttattctgcattaatgcactgtctgaggcctgtggtcaggaaataactactaagcaaatgctgcccatcgtattaaaaatggcaggagaccaagtagcaaatgttcgcttcaatgtggccaaatctctacaaaagattggaccaattctagataccaatgctttacagggagaagtgaagccagtactacagaagttaggtcaagatgaagacatggatgtcaaatactttgcacaggaagctataagtgttcttgcattggcataatgaggagcaggagggaaaaggcctttactagattcttgtcacaaatttctagtcaatgtgttcttaactgggtggagaaagaatggaaaaccttcaagatctcatccaagcaaatggcaacaacttagaagaaatcatttagtgacttaattctttct

SEQ ID NO: 22193 - DNA, 460 bp, Homo sapiens
  misc_feature (1)...(460): n = A,T,C or G
cctttgcnccgcgctgtatgaattcggcacgaggagagcaggtcctccagggccccagcaaatgccaggcctgtttactaatgacagcaaaggtccaccatcacttatcaggaatgagagcattcgctttcagcctgccctgccagcctcacagggctgcggcatgaacccctgtagggttagtttatgagtgcgtagggaagtgctccccagaaagcaggagaaacacggatggccagatacacgtttgagcctctgacaactacagtcactgtgtactaactagtggtgaggttggcaatttgtaaaaattactcattaaagagggagacagagccaggctccgtggctcatgtctataatcccagcactttgggaggccaaggtgggaggactgctcgaggtcaggagtttaagaccagcctggacaacatagcaagacccccgtctctacaaaaan

SEQ ID NO: 22194 - DNA, 442 bp, Homo sapiens
actgcccgcctgcggaattcggctcgagaaccgatcctggcttctggttcaagggattatactcttaaattatttgattattccaaaccatcagcaaaaagagccttcaaatacattcaggaagctgaaatgttacgttccatctcttttcatccttctggagactttatacttgtcggaactcagcatcctactcttcgcctttatgatatcaacacctttcaatgttttgtctcttgcaatcctcaagatcaacacaccgatgctatatgttccgttaattacaattctagtgccaatatgtacgtaactggaagcaaggacggctgcatcaaattatgggatggtgtttcaaatcgatgcatcacaacttttgagaaagcacatgacggtgctgaagtttgttctgccattttttccaaaaattctaaatacattctct

SEQ ID NO: 22195 - DNA, 473 bp, Homo sapiens
  misc_feature (1)...(473): n = A,T,C or G
aatcgaccccctnattgacccgcgctgcagaattccgcacgagaatggctcccgcaaagaagggtggcgagaagaaaaagggccgttctgccatcaacgaagtggtaacccgagaatacaccatcaacattcacaagcgcatccatggagtgggcttcaagaagcgtgcacctcgggcactcaaagagattcggaaatttgccatgaaggagatgggaactccagatgtgcgcattgacaccaggctcaacaaagctgtctgggccaaaggaataaggaatgtgccataccgaatccgtgtgcggctgtccagaaaacgtaatgaggatgaagattcaccaaataagctatatactttggttacctatgtacctgttaccactttcaaaaatctacagacagtcaatgtggatgagaactaatcgctgatcgtcagatcaaataaagttataaaattgccaaaaaaaaaaaag

SEQ ID NO: 22196 - DNA, 460 bp, Homo sapiens
  misc_feature (1)...(460): n = A,T,C or G
aactgatgcgttcggaanctcgacgacctttttgatccttcgatgtcggctcttcctatcattgtgaagcagaattcaccaagcgttggattgttcacccactaatagggaacgtgagctgggttagaccgtcgtgagacaggttagttttaccctactgatgatgtgttgttgccatggtaatcctgctcagtacgagaggaaccgcaggttcagacatttggtgtatgtgcttggctgaggagccaatggggcgaagctaccatctgtgggattatgactgaacgcctctaagtcagaatcccgcccaggcggaacgatacggcagcgccgccgatgccaccggcctgtgggtctctgaagggacccccccccaatcggactgccaaattctccggtttgccccgggatattatagaaaattatttgtatgaataatgaaaataaaacacacctcgtg

SEQ ID NO: 22197 - DNA, 475 bp, Homo sapiens
  misc_feature (1)...(475): n = A,T,C or G
gggggccnnnnnnnnaattgactttcgtgccgcgctgcaggaattcggcacgagcctggtgctgcttcgggattccgtggagtgggaggggcgcagtctcttgaaggcgcttgtcaagaaatctgcactgtgtggggagcaagtgcatatcctgggctgtgaagtgagcgaggaagagtttcgtgaaggttttgactctgatatcaacaatcggctggtttaccatgacttcttcagagaccctctcaactggtcaaaaactgaggaggcctttcctggggggccgctgggagccttgagagccatgtgcaagaggacagatcctgttcctgtcaccattgctctcgattcactcagctggctgctacttcgccttccctgcaccacactctgccaggtcctgcatgctgtgagccatcaggactcttgtcctggtgagacccctccttcattgtttcccctcatacatctccct

SEQ ID NO: 22198 - DNA, 461 bp, Homo sapiens
  misc_feature (1)...(461): n = A,T,C or G
cttttgccccgcgctgtatgaattcggcacgagcagcagtggcagcagctgcggcaatagcagtagcagcggcagccctgaaagcagcagatctcacctgcattggaggatgagacgccacatgaagaataaagatgacgccacagacagcagcgcaggaccaccttgcagagatgttctagaaacatactgagtgtctttagcctgccaaaaaggcaccttcctgactgacctgtaaggctgggaactccataatgcacttggaaatgcagaaatcacctgtcttctgcgtcgatcaggctgggagctgcagaccggagctgttcctattcggccatcttggaatggacccccatgtcttattctcanataaaacattttggtcaaaaaaaaaaaaaaaaaaaaaaaaaaaaaaccggggggggggcccgggcccccaatccccctttagggggggggtt

SEQ ID NO: 22199 - DNA, 486 bp, Homo sapiens
  misc_feature (1)...(486): n = A,T,C or G
gaggtataatattttcgcctgacgaacgagctctagtgcccctgccctaggggtgtctgtctccagaggggagggacaaatcccctactggggccatttcaatggggtagtttttggatttttttccccactcactttttattttttaatgataatggagatgtctggacccttcctcaccccacctgtcggtcttgtcctggctctgcctgtcccccaccgttgttctcgtaggtgaaccccaggtcctcaactccccccctttatgtgttgaaagttaatggtttcagatgtgaacatcacgtgttataactgtagcgctgtaaatttttttgtgggagggtgggcagggaggggtcccagagggtagagctcaaggattttgggttttgttttgttttcatttttccaaaaaaaaaannnnaaaaaaaaaaaaaaaaacccttgggggggggcccggcccccaattcccccttaagggggggt

SEQ ID NO: 22200 - DNA, 323 bp, Homo sapiens
tattttgtggctttggtgccacaggaagaagagttggatgaccataatattcaggtgactcctccaggcttccagctggtctttttaccctttgctgatgataaaaggaagatgccctttactgaaaaaatcatggcaactccagagcaggtgggcaagatgaaggctatcgttgagaagcttcgcttcacatacagaagtgacagctttgagaaccccgtgctgcagcagcacttcaggaacctggaggccttggccttggatttgatggagccggaacaagcagtggacctgacattgcccaaggttgaagcaatgaataa

SEQ ID NO: 22201 - DNA, 483 bp, Homo sapiens
  misc_feature (1)...(483): n = A,T,C or G
gtgggtnananaaactgacgcgtgcggannncctttgattgcataacgaaggcgttacacttcatgctctgaatactgaataaccatgaatgactgaatagtttagcccaaatttttacagaggatacatctatttttatcattatttggggtttgaaaaatttttttttacaccttctaatttctttatttctcaaagcaaataattcttctgtgggaaaatgttttctttttttaatttaaggtttaaaattccttttccaaatcatgttgattttgctctttgctttttcgttgtctgaaaaattgttggcgtaaatttggcttctggtatgggtttctgattgcttcctgttgagcacaaagtgagagctgccactgagcagccctgccaggggtgctgtttcaggctgggcatcgccaggcggcctccctgcaaaccaagggctgggggcaaaggggcatgatccagggtcccccagg

SEQ ID NO: 22202 - DNA, 469 bp, Homo sapiens
  misc_feature (1)...(469): n = A,T,C or G
atcgaccgccttaattgaccgcctttgcgaattcgccacgagcaagccagtgaacaacgcggacttcatcatccctgtggagattgatggggtggtccaccaggtctacgtgttgaagcgtcctcatgtggatgagttcctgcagcgaatgggcgagctctttgaatgtgtgctgttcactgctagcctcgccaagtacgcagacccagtagctgacctgctggacaaatggggggccttccgggcccggctgtttcgagagtcctgcgtcttccaccgggggaactacgtgaaggacctgagccggttgggtcgagacctgcggcgggtgctcatcctggacaattcacctgcctcctatgtcttccatccagacaatgctgtgagtgcgggctggactgggactgggacaggagctgagacccaggaaggggtcagtccattcaggccaccttggcctcttggatcn

SEQ ID NO: 22203 - DNA, 542 bp, Homo sapiens
  misc_feature (1)...(542): n = A,T,C or G
ggagattgacncctcgacggctgcangaattcggcacgagccgccatcgtggtgtgttcttgactccgctgctcgccatgtcttctcacaagactttcaggattaagcgattcctggccaagaaacaaaagcaaaatcgtcccattccccagtggattcggatgaaaactggaaataaaatcaggtacaactccaaaaggagacattggagaagaaccaagctgggtctataaggaattgcacatgagatggcacacatatttatgctgtctgaaggtcacgatcatgttaccatatcaagctgaaaatgtcaccactatctggagatttcgacgtgttttcctctctgaatctgttatgaacacgttggttggctggattcagtaataaatatgtaaggcctttctttttaaaaaaaaaaaaaaaaaaaaaaagaaaaaaaaaaaaaaaaaaaaaaaaaaaanaannnannnntttttttttttttttttttattttcccccgcccccttgtaaanaactggagaacagggaaaaaaaaac

SEQ ID NO: 22204 - DNA, 472 bp, Homo sapiens
  misc_feature (1)...(472): n = A,T,C or G
ttggaccgcantnagacttgccccgcgctgcaggaattcggcacgagaatttttctaggcttgaagagaaaggctgatctgagaggattcgtggaaatatgacttataaggggagaaatgctgagagaaaaaagtttgttttagtctcatgggttgtataaggcatggtttgtgttaagtaattgcaagagcaaaatctaattagatgccgggcttctcgtaacacccactcctttttcttgacgtggctctcctgactttgcctgcggtggctttcatcatacaaaaatgggaggaaaacttctggtcccttttataaaaagtgaaaagaggggacttgattttcgttgaaaataagaaactttaaggccgggcgtggtggcttatgcctgtaatcccaacactttgggaggccgaggagggcggatcacctgaggtcaggagtttgagacctgcctgaccaatgtgatgn

SEQ ID NO: 22205 - DNA, 467 bp, Homo sapiens
  misc_feature (1)...(467): n = A,T,C or G
cggcgntnnnnnnaattgaccgcctgcgggttttttgtagaattatacttacgttccttggatgatctctagttgattttttaagttctgagttgatgctgttaaggtacccggggtagccattggttcttggatctgtgttagaatgagtgctttcccttcctactgatgtgattgtggattaggaattcgtgaccgagtgatttttggccagtggttgggtttaaaattctattaaaatttgtagtttgggctgggtgctgtggctcatacctataatcccagcactttgggaggccgaggggggcagatcacttgagcccaggagttcgagagcagcctgggcaacatgacgaaaccccgtctctacagagaatacaaaaattagccaggcatggtggcccatgcctgtagtacctgctattggtaaggctgaggtggaaggttcacttgagcctgggagggtg

SEQ ID NO: 22206 - DNA, 542 bp, Homo sapiens
aggatgtttcgacggctgtggaattggcacgagccagcaccacctgaggatccagaaaccgccccagcgatggaagaggatcaggagctggagagaaaaatatctggattgaagacctcaatggctgaaggcgagaggaagacagccctggaaatggtccaggcagctggaacagatagacactgtgtgacatttgtattgcacgaggaagaccataccctaggaaattctctacgttacatgatcatgaagaacccggaagtggaattttgtggttacactacgacccatccttcagagagcaaaattaatttacgcattcagactcgagggacccttccagctgttgagccatttcagagaggcctgaatgagctcatgaatgtctgccaacatgtgcttgacaagtttgaggccagcataaaggactataaggatcaaaaagcaagcagaaatgaatccacattctagtcctttatgcagtatacaaggagaactgtcctgtaggatattctcttcctgatggtgcagaacccagaatt

SEQ ID NO: 22207 - DNA, 457 bp, Homo sapiens
  misc_feature (1)...(457): n = A,T,C or G
nggaggccattganncccctanccagcgcngcttggaagaatcggcacgaggaccattgtgaggtagatattttgttctaattttccagatgaggaagctgagaccctaaaaggctgaccggttccctgatgtgttacctgcttctgctactgatccaaactgcagaacttctcattcatccccaaggcctccaggcagtatccaatggggaatcagctctaaaaggaaccagaccaacgttttccagccccttcattctgtagcttccctctgtgtgaggaaaggatagaaatgttcaggacatcatcatacaggctcctcatctacaaagttccagtagcagtgacgcctacacggaagacttggaactgcaaacaggctggggtcacctcagtgacatctgacgctgtccaaccagaagttcgatttttgttctgggggtgaaggaggaaacaa

SEQ ID NO: 22208 - DNA, 381 bp, Homo sapiens
aggagattcgcgccttcgccggctgcaggaattcggcacgagcccggttgctgcttgctgtcctggtccgcgccagagcccagcgcgcctcgtcgccatgcctcggaaaattgaggaaatcaaggacttcctgctcacagcccgacgaaaggatgccaaatctgtcaagatcaagaaaaataaggacaacgtgaagtttaaagttcgatgcagcagatacctttacaccctggtcatcactgacaaagagaaggcagagaaactgaagcagtccctgccccccggtttggcagtgaaggaactgaaatgaaccagacacactggattggaactgtattatattaaaatactaaaaatcctaaaaaaaaaaaaaaaaaaaaa

SEQ ID NO: 22209 - DNA, 475 bp, Homo sapiens
cgcggccgggatgaaattgaaactagcagctgcgggcggaccttagagggacagtacagtcttgacaatagtagcaaactactaacccagcaaatctaagcccaaggaagaagggcggaaccagaagtagggcctcgacttgcttcagacgacacagagcaagaggaactgaccatctcatgacctgtggcattgcacggtgcagtggacagaagggattatcctcagccagtcacagggtcagcttaagttagttagatcactcccagaagagaccagctgggaccttctttgcagtacaatttgaaattcctgatgtattttgcttattatttggcttcattctcataataaagagagtgtatactgacatgggcaggatgataaaaatcatggtttaatattttcttttgtaaacttaatgccaacaaggtctaagttatgtttacaacatgaagaaaacctcaaagttctt

SEQ ID NO: 22210 - DNA, 470 bp, Homo sapiens
  misc_feature (1)...(470): n = A,T,C or G
attgcattcgatcgccnttaggcanatacagaagntctgtcattgaattcctgtgtagtgtatacatagtggctttttgcattcattaggtaataattgaagtcatgaaatgtatattttacagaaatatcgcttgaattgaagccaatatttgggagggaattggtttgtcttcttgaagctgtcattctcaaaagctctgtttttatgctttgcaccttttaaatgcacactttatcctaggtctttgtggcccacacatgcaggaatatattacttctaatgtcaatatatttaactttgcctagaaacatatttttaattataaagatattcatttgcttaatcaagtttaggcagtaatgatgtttaatatgtactgcatacattattgcttgtgcatttgcttatgtatttgaatcaaagaaattgtaatcactgaatattgttatagaacatttaaatgggcg

SEQ ID NO: 22211 - DNA, 475 bp, Homo sapiens
  misc_feature (1)...(475): n = A,T,C or G
agggtcaaggnngttgccgncaatgaccgccatgaagancctgcgaagggcacctcagcagccaggacaggcaggagcagtggaatagctactatggcttctggaatcctggttaatgtaaaggaggaggtgacctgccccatctgcctggaactcctgacacaacccctgagcctggactgcggccacagcttctgccaagcatgcctcactgcaaaccacaagaagtccatgctagacaaaggagagagtagctgccctgtgtgccggatcagttaccagcctgagaacatacggcctaatcggcatgtagccaacatagtggagaagctcagggaggtcaagttgagcccagaggggcagaaagttgatcattgtgcacgccatggagagaaacttctactcttctgtcaagaggacgggaaggtcatttgctggctttgtgagcggtctcaagagcaccgtggtcaccacn

SEQ ID NO: 22212 - DNA, 482 bp, Homo sapiens
aattgaacgccttcggtagaccgccctagcagagtcggagtgaaaagaaggcacggaaggctatgtccaaactgggtcttcggcaggttacaggagttactagagtcactatccggaaatctaagaatatcctctttgtcatcacaaaaccagatgtctacaagagccctgcttcagatacttacatagtttttggggaagccaagatcgaagatttatcccagcaagcacaactagcagctgctgagaaattcaaagttcaaggtgaagctgtctcaaacattcaagaaaacacacagactccaactgtacaagaggagagtgaagaggaagaggtcgatgaaacaggtgtagaagttaaggacatagaattggtcatgtcacaagcaaatgtgtcgagagcaaaggcagtccgagccctgaagaacaacagtaatgatattgtaaatgcgattatggaattaacaatgtaaccatatggg

SEQ ID NO: 22213 - DNA, 539 bp, Homo sapiens
  misc_feature (1)...(539): n = A,T,C or G
ggggttgtggcgtgattcgcacagcttaataggacatcactgctctcatgcaaggagaggaaactgtaggggaggaagacattcggctgtttaccagactccgacacgagttccacaaatggagtacaataattgaaaacaattttcaagaaggccataaaattttgagtagaaaaatccagaaatttgaaaatcagtatcgcggtagagagctgccaggctttgtgaattacaggacatttgagacaatcgtgaaacagcaaatcaaggcactggaagagccggctgtggatatgctacacaccgtgacggatatggtccggcttgctttcacagatgtttcgataaaaaattttgaagagttttttaacctccacagaaccgccaagtccaaaattgaagacattagagcagaacaagagagagaaggtgagaagctgatccgcctccacttccagatggaacagaatgtctactgccaggaccaggtatacaggggtgcatatganaaggtcagagagaaggagcctggagaagaa

SEQ ID NO: 22214 - DNA, 522 bp, Homo sapiens
  misc_feature (1)...(522): n = A,T,C or G
tggtgccccggggggagaaaaaaatttgctcgcctgtggtattcggcacgangagaaaacggaattagtgactgtacctataacaccagtaaatgcagagccaagattctgacccaggtctttttgttgtaccataagtttaaaagatgagtctcatttttcttgtggtagatggtggtaaaaaggagtaggcagagtgtacatagataaaaaaaagtaaaagggtaagtaaaaaattgattgtggtatatgttattctaatcagccaaaaaagtttagaagattgatgaaatgatcttttaaatatgtatttctgaataaaatgtaaaaccaagaaagttatttcaggaaggatagtgaccctttcattgaactgttagaagggcatttattaggctaaaacgtcattaacaaaatgcattgcatgttgaaaccagcctcttgaaccataagcacttagcgactttgctctgccctgtactgtgctgcttctgctgtcatcctgtgtgcctacagaagcct

SEQ ID NO: 22215 - DNA, 401 bp, Homo sapiens
  misc_feature (1)...(401): n = A,T,C or G
aggggaagaagccttttgatnncccctnncatcgatncagtntgcaggaattccgcacgagcagcccagcctcgaaatgcagaacgacgccggcgagttcgtggacctgtacgtgccgcggaaatgctccgctagcaatcgcatcatcggtgccaaggaccacgcatccatccagatgaacgtggccgaggttgacaaggtcacaggcaggtttaatggccagtttaaaacttatgctatctgcggggccattcgtaggatgggtgagtcagatgattccattctccgattggccaaggccgatggcatcgtctcaaagaacttttgactggagagaatcacagatgtggaatatttgtcataaataaataatgaaaacctaaaaaaaaaaaaaaaaaaaa

SEQ ID NO: 22216 - DNA, 470 bp, Homo sapiens
  misc_feature (1)...(470): n = A,T,C or G
gcggnttttaactgcggctgtagaacctgccagcaganaggnggcgggaagggctgtagggtacttgtcaattcgccgccatgaacgtggtttttgctgtgaagcagtacatttccaaaatgatagaggacagcgggcctggtatgaaagtacttctcatggataaagagacgactggcatagtgagtatggtatacacacaatcggagattctacagaaggaagtgtacctctttgaacgcattgattctcaaaatcgagagatcatgaaacacctgaaggcaatttgttttcttcgacctacaaaggagaatgtggattatattattcaggagctccgaagacccaaatacactatatatttcatttatttcagtaatgtgatcagcangagtgacgtgaagtcattggctgaagctgatgaacaggaagttgtggctgagggtcangaattttatggtgattacatt

SEQ ID NO: 22217 - DNA, 471 bp, Homo sapiens
  misc_feature (1)...(471): n = A,T,C or G
gatgggagnnnnnaaatgagngccatcgcccctctgcggagagcacagtgaccctgagatgactgaagaggagaaagagtatcaaatgatgttgctgacaaaaatgcttctaacagaaattctgctggatgtcacagatgaagaaatttattacgtagccaaagatgcacaccgcaaagcaacgaaagctcctgcaaaacagctggcacagtccagtgcactggcttccctcactggactcggtggactgggtggttatggatcaggagacagtgaagatgagaggagtgacagaggatctgagtcatctgacactgatgatgaagaattacggcatcgaatccggcaaaaacaggaagctttttggagaaaagaaaaagaacagcagctattacatgataaacagatggaagaagaaaagcagcaaacagaaagggttacaaaagagatgaatgaatttatccataaagn

SEQ ID NO: 22218 - DNA, 480 bp, Homo sapiens
  misc_feature (1)...(480): n = A,T,C or G
tgggnnnnnnnnnggntttgagactgatcgcaataggaanncggcacgagcacatgggctctgtggtggagtgggtcacacccctgggcgtccccgacatccagccgtatcgcctggactccaaggtcaagcaaataggaggtggaattgagagcatcacctacacccacaacggagacatcagccgaaagcccaacacacgtatgcagaagaacggcttgccgcccaacttcatccactcgctggactcctcccacatgatgctgaccgacctgcactgctacaggaagggcctgaccttcgtctctgtgcacgactgttactggactcacgcagctgatgtctccgtcatgaaccaggtgtgccgggagcagtttgtccgcttgcacagcgagcccatcctgcaggacctgtccagagtcctggtacagcggttctgctctgagccccagaagatcttggaggccagccagctgaagg

SEQ ID NO: 22219 - DNA, 496 bp, Homo sapiens
  misc_feature (1)...(496): n = A,T,C or G
aggctgtnnnaactggcgcctgcgtagaagccggcctcagatgggaaggcccgactcgctgtctgctgtcgtcggtggtcgcgagaccttgcactctcaccgggtcggcctacagcccctgtgcccgggatccgctcgccgcggatgagcgagagtttcttcctgggacttttcgggcacagctggccggtggcgacagaacggactttctttcctgcaagagtctcccctccagcgggagacagcgggctcctgtctcgggacgctgggacacctgtcgcctatttttaaatatccagattcccagaacacactggatactgctcttacaaaaccaagaggagatcatgaagaaatgttttagttattggaactacagttgaaatcatggatacatcaacaaatctggatattggagcccagcttatcgtggaagagtgtcccagcacttatagcctaactggcatgccagacattacaatagaacatccactgc

SEQ ID NO: 22220 - DNA, 456 bp, Homo sapiens
  misc_feature (1)...(456): n = A,T,C or G
ngatgggtannnnnaaaaagacgcgcgatggacccgcgctgcaggaattcggcacgaggaccacaggcatctacacagcctggactttggttctctccaggaaggtagcccagcactgtgaagacccagcaggaagccaggctgagtgagccacagaccacctgcttctgaactcaagctgcgtttattaatgcctctcccgcaccaggccgggcttgggccctgcacagatatttccatttcttcctcactatgacactgagcaagatcttgtctccactaaatgagctcctgcgggagtagttggaaagttggaaccgtgtccagcacagaaggaatctgtgcagatgagcagtcacactgttactccacagcggaggagaccagctcagaggcccaggaatcggagcgaagcaaagaggtggagaactgggatttgaacccccgccatccttt

SEQ ID NO: 22221 - DNA, 495 bp, Homo sapiens
  misc_feature (1)...(495): n = A,T,C or G
gggaagtnccnnaggnagggccttgaacccctntactatcgctctgcagaattccgcacgagcttctctgcctggcttatttcacttgtataatgtcctcaaggttcattcatgttgtagcatgcatcagaacttcctccccttttaaaggctggataatatttcatggtatgtttagatcacattctgtttatccattcatccatcagtgaacacttgtgctccttccaactttgggctgttgggtgtcctgccactgttgctcctagtgctcaatctcgtttattccctcctaatcaagtgtacaacgttggacactgtgcaggatgatgccacttcatcttggatgctaatctgccatgttgacttctgattaaccccaggcccaggaatgcctcaagatttctactttacttactgttgcttgtgtaagccaagacaaccttgatgttatcataaacatgtacttacctaagtcctgtcctttggcaaatt

SEQ ID NO: 22222 - DNA, 458 bp, Homo sapiens
aatagaccgccctcggaattcggtacgagccgatttcttggactctacagagatgagcatcaggattttatggatgagcaaaaacgactaaagaagcttcgtggaaaggagaaaccaaagaaaggagaagggaaaagagcagcaaaaaggaaatagtgttggtccctcaagagggagactttcttcctcagtggcggagagaagaaagtgcatttattgtctttccacatattggaggaatgtcatcttcctaaatgaagtttatttggaggaacacagtcatctccttggtgaaatctaatccggttacattgtggctggtttcttgaacacattctaactgtgcaaaattatcttggccttggccgtgtaatgtgaggtttacctgattctctaatgaaataaatacctaagttattgaaaaaaaaaaaaaaaaaaactcgagggggggcccggcc

SEQ ID NO: 22223 - DNA, 485 bp, Homo sapiens
  misc_feature (1)...(485): n = A,T,C or G
gcgccccattggatcgatcgctgcagagaagcagcagtggcccagaagccccgaagccacttcacgacacctgcccctatgtccagtgcctggaagacggtggcctgcggggggaccagggaccagcttttcatgcaggagaaagcccggcagctcctgggccgcctgaagcccagccacacatctcggaccctcatcttgtcctgaggtgttgagggtgtcacgagcccattctcatgtttacaggggttgtgggggcagagggggtctgtgaatctgagagtcattcaggtgacctcctgcagggagccttctgccaccagcccctccccagactctcaggtggaggcaacagggccatgtgctgccctggtgccgagcccagctgtgggcggctcctggtgctaacaacaaagntccacttccaggtctggctggntccctccccaagggccacaggagctccgtcagcttctcccaagccc

SEQ ID NO: 22224 - DNA, 544 bp, Homo sapiens
  misc_feature (1)...(544): n = A,T,C or G
aggcgttgattcgcgtctgcangaattcggcagaggatggattgattgtacagaaatcatgctgccatgctgggggggggtcaccccgacccctcaggcccacctgtcacggggaacatggagccttggtgtatttttcttttctttttttaatgaatcaatagcagcgtccagtcccccagggctgcttcctgcctgcacctgcggtgactgtgagcaggatcctggggccgaggctgcagctcagggcaacggcaggccaggtcgtgggtctccagccgtgcttggcctcagggctggcagccggatcctggggcaacccatctggtctcttgaataaaggtcaaagctggattctcaaaaaaaaaaaaaaaaaaactcgggggggggcccggcccccaattccccctatagggagccgaataacaattcacgtgccgcggttttacaacgcggggacggtgggaaaaaaaannnnnggngngtntttnggtccttttctctcgtggcgggtgggctttgtttcgggatggtgttcttcggg

SEQ ID NO: 22225 - DNA, 482 bp, Homo sapiens
  misc_feature (1)...(482): n = A,T,C or G
agaaaaaatttgacnccccntnnnnanatttgcaccgcgctgcaggaattccgcacgagggatatgaaagctaatgtctttgagagtcagtggacaagtctgtaacaggggctttgctgctggaaggaaagcgaccaagggtctgatccaaggcagcctggggatgaatacagtcagtgccaccacagcaggaacaggcacagttctgatggctgtggaagtaatatatatctttttaagaagaatttgtatctctacttatagcacatttttttctgtaatttctgcattacttttccctgaaaccagcttcagaaggttcttatcaagacttgaatcaaacttcattttaccaaaacctcaagcagagagactcatcctcttaaactacaatctctaagacagatgcacagacataagaatacacctctgtcacgtagttacatagcgatggcaactggaaaaaaataaaataaaaaatn

SEQ ID NO: 22226 - DNA, 476 bp, Homo sapiens
ggagggacactgactgcgctgcacgaattcggcacgagaggctctcaccctgctctcctgcaggtgcagctctgtgctctgcctctgatgagaccatggcccagcctctgagtacgctgctgctcctgctggccaccctagctgtggccctggcctggagccccaaggaggaggataggataatcccgggtggcatctataacgcagacctcaatgatgagtgggtacagcgtgcccttcacttcgccatcagcgagtataacaaggccaccaaagatgactactacagacgtccgctgcgggtactaagagccaggcaacagaccgttgggggggtgaattacttcttcgacgtagaggtgggccgaaccatatgtaccaagtcccagcccaacttggacacctgtgccttccatgaacagccagaactgcagaagaaacagttgtgctctttcgagatctacgaagttccctgg

SEQ ID NO: 22227 - DNA, 543 bp, Homo sapiens
  misc_feature (1)...(543): n = A,T,C or G
aggagactagannncttcgaccggctgcangaattcggcacgagatcacattctgtttatccattcatccatcagtgaacacttgtgctccttccaactttgggctgttgggtgtcctgccactgttgctcctagtgctcaatctcgtttattccctcctaatcaagtgtacaacgttggacactgtgcaggatgatgccacttcatcttggatgctaatctgccatgttgacttctgattaaccccaggcccaggaatgcctcaagatttctactttacttactgttgcttgtgtaagccaagacaaccttgatgttatcataaacatgtacttacctaagtcctgtcctttggcaaattatgggctatgagacacagcattcttgcctttccctgaggggtcaatttcagcgatcctacacattccttctgaagcacttatgctctttctatatggtatgtaagctctcggtctggggagtaacagtgcagagatctacctgtcttgttgccacatgtttctaaactttccaataaatcaa

SEQ ID NO: 22228 - DNA, 368 bp, Homo sapiens
  misc_feature (1)...(368): n = A,T,C or G
agaggggaatgattcgtctgncggatttcggcacgagctggaacagtgaccaagtgtaatttcactggtgatggaaagacaggggcatcctggacagacaacatcatggcccaaaagtgttcgaagggggctgcagcggagatccgagagcagggggatggggcagaggacgaggagtgggatgactgagggacgtggctgcctctgggggcaccagcaccttctgtagcattgtggaacatttcttccatgaacttctactctggagctggagagaacagtctgccaagtcttacctggttcttccccatagccaccttggaatactctttgaacaagctctgctaaaaccaaaaaaaaaaaaaaaa

SEQ ID NO: 22229 - DNA, 468 bp, Homo sapiens
  misc_feature (1)...(468): n = A,T,C or G
gcgantttgcctcgatgcctgcagaattcgcacgagtttataccaggggatgatagtaacgtgtaacttgcaatagattccttcatcttagtaataagatgatcagtctagttaggacaaaatagagattgaataaattaacttttccaagtttacagagtaaaaatgagcagatctctgcctggttttgtgaaaaagagttagcactggtaaatagaatatttctactcctacaccattctttcagtatatcatcactgaagacaggaagataggcacacagattcttcctcgtagtaattcatagtgcactaggtgaaagagatgaagtatgtattaaaagtacaatgtgatggcatttattattcagataatcccaggattctagaagaaaataaagaagagtgacagttcagttagggtgtgaacttccagaggagcactgcttaagctgaacttgagagcatt

SEQ ID NO: 22230 - DNA, 503 bp, Homo sapiens
  misc_feature (1)...(503): n = A,T,C or G
ggggagancccnnaggggngnnacctcgatnaccnttncatgaccgccctgcggaantccgcacgagccgcaacaggcgttttgcaatgcagatgtagtgatcagggccaaagcggtcagtgagaaggaagtggactctggaaacgacatttatggcaaccctatcaagaggatccagtatgagatcaagcagataaagatgttcaaagggcctgagaaggatatagagtttatctacacggccccctcctcggcagtgtgtggggtctcgctggacgttggaggaaagaaggaatatctcattgcaggaaaggccgagggggacggcaagatgcacatcaccctctgtgacttcatcgtgccctgggacaccctgagcaccacccagaagaagagcctgaaccacaggtaccagatgggctgcgagtgcaagatcacgcgctgccccatgatcccgtgctacatctcctccccggacgagtgcctctggatggactgggtcn

SEQ ID NO: 22231 - DNA, 477 bp, Homo sapiens
agtggggaattgaattcgtcggctgtcagaattcggcacgagctggctaatttttgtattttcagtagaagcagagtttcaccatattggccaggttggtctcgaactcctgacctcaagtgatctgcctgcctcagcctcccaaagtgctgggattacacgcgtgagccaccacacccagcctccatctttaaacttttaaatgtgaaatttctatcatgtaccgttagcctaacaagattttctttcctatttctgactggtgcctttcccctttttaggagcaacgaaagctactctcttagttatgttcttgtgatgtgacaaaatgtcaagaagataggagaagagaatattttatttcgttgatgcttttgttcccaagtgtgaccctaaacttaagctttgtaggagttgacattctttcatgtaccttccctttactcatgccgaaactatcaactgggacattttgtg

SEQ ID NO: 22232 - DNA, 509 bp, Homo sapiens
  misc_feature (1)...(509): n = A,T,C or G
cgggggccnnnattgattgcccgcctgcaggtcctttcgagtctttagtaaactgttggaatatccctttcatggcctttgaaaaatgagcttaacaaagttcaaacactttcattactgtggctccctggcttctcatagccaactggaatacgttcatgtaaataatttgcctgatgtgagctccttgcacagagtctcacagatctttagcatgaagatctggtaacttcagtcttaccttctgtaagaagggctactggacttgctcagcatcgtctaccattgttaagacaaattatacaaagcagacatctgtgactgacaactggtccataatattaatcatatgtaatactaagagatggannaatanatgtgcataagcnaaataacccatttcatggctaatgatgtaatctagctattagaaaatcttcaacctagggatacttccaacccaaggtatttattccttgcataacatttacccaaccggattcacacag

SEQ ID NO: 22233 - DNA, 479 bp, Homo sapiens
atagatagcttgaggaatcggcacgagccgccggtgaaggctgaaggcagctaccttaaagatgccgggatccgcagcgaatggctcggagttgtcagagaggatcgagagcttcgcggagaccctgaagcggggtggtgggccgcgcagctccgaggaaatggctcgggagaccctaaggttgctgcgccagatcatcacggaccaccgctggagcaacgcgggggagctgatggagctgatccgcagagagggcaggaggatgacggccgctcatccctccgagaccaccgtgggcaacatggtgcggagagtgctcaagattatccgggaggagtatggcagactccatggacgcagcgacgagagtgatcagcaggagtccctgcacaaactgttgacatccggaggcctaaacgaggatttcagcttccattatgcccaactccagtccaacatcattgaggcgattaatgagg

SEQ ID NO: 22234 - DNA, 492 bp, Homo sapiens
  misc_feature (1)...(492): n = A,T,C or G
agggtgtnccngagggagnaacatgatcgcctgcagtgagggcactgaggaagnctagagcagctctctgagcaggataaggtcccctgacagtgagttgtgtggtgggggcagcctctgcctcaaaaattcaccaagcagaatgcctctcagcctcatgtgttggtcctctgctcctcctagctccccagggatgttggggacccagcttgtctcggcagctaagaagcagtgaccaggatgtggattttggcgacctgtgtggtggccttgagctgctttctgtgtttgtgaggactgactcccatttcctaaaggaaatgcccccggggaggacattgggaggaagatggcctgagtgtgcactttggctctgctacctgctcctgaagccccgctaaaaataattcatccaagattcctttgtagttaaagggtccagttctgactggagcctctagagagctgggcttgtatgttcttttggccttt

SEQ ID NO: 22235 - DNA, 486 bp, Homo sapiens
  misc_feature (1)...(486): n = A,T,C or G
attagaaaaacctcgagagcctgtcangaattcggcacgagtaacgggccttattctgatctcacctgtcgcgtagctctaatattcacataaactgaaataaagaagtggaatgaggagctttgacattcaaattatgtgatgtaatttatcttccttaggaattttgatggatgcatctcaaaatgtatagccagacttgagaggtgacaattaaagatctaaaaaagagaggagattcccccaaacaacaatatttaattttcttagtaaaaagaataacagaatgcatcgtggcaatccttaagcaacattatctatgtggactgcttaaatcagcaaaacaccagaagtttggttaacttgggcaatatgacaagtattactttttgggcaaaactactcattaagcaatttctctagtgtgtcggacacaaataggttctttatttttggcatgtatgcctttntattttcattcaattt

SEQ ID NO: 22236 - DNA, 489 bp, Homo sapiens
  misc_feature (1)...(489): n = A,T,C or G
ggggggtnacccncaattgancgccctgatgagatcgcacgaggcagctcatcccgcagcagctgctgaccaccctagtgccgctgttccggaactcgcgcctggtccagttccacttcaccaaggacctggagacactgaagagcctgtgccggatcatggacaatggcttcgccggctgcgtgcacttttcctacaaagcatcgtgtgagatccgcgtgcttatgctcctgtactcttcagagaagaaaatcttcattggcctcatcccccatgaccagggcaactttgtcaacggcatccggcgtgtcattgccaaccagcagcaggtcctgcagcggaacctggagcaggagcaacagcaacgagggatgggggggtagtggttaccccgggctgggcccctccaggagtcacagatgaggcccccgcagagactggtgacacgcttctgagcaggggcccctggggacttcaactgcccagcaa

SEQ ID NO: 22237 - DNA, 477 bp, Homo sapiens
  misc_feature (1)...(477): n = A,T,C or G
cgcggcccttgcattgactcgcgctgcaggaattcggcacgagcagatggtgaatatctccctgcgagtgttgtctcgacccaatgctcaggagcttcctagcatgtaccagcgcctagggctggactacgaggaacgagtgttgccgtccattgtcaacgaggtgctcaagagtgtggtggccaagttcaatgcctcacagctgatcacccagcgggcccaggtatccctgttgatccgccgggagctgacagagagggccaaggacttcagcctcatcctggatgatgtggccatcacagagctgagctttagccgagagtacacagctgctgtagaagccaaacaagtggcccagcaggaggcccagcgggcccaattcttggtagaaaaagcaaagcaggaacagcggcagaaaattgtgcaggccgagggtgaggccgaggctgccaagatgcttggagaagcactgagcan

SEQ ID NO: 22238 - DNA, 546 bp, Homo sapiens
  misc_feature (1)...(546): n = A,T,C or G
nggtgttgatggctgtcaattcggcacgagatttctagcctanaagctgaattagaaagaataaaagtggaaaaaggacagttggagtccacattaagagagaagtctcaacagcttgagagtcttcaggaaataaagatcagtttggaagagcagttaaagaaagagactgctgctaaggctaccgttgaacaactaatgtttgaagagaagaataaagctcagagattacagacagaattagatgtcagtgagcaagtccagagggattttgtaaagctttcacagacccttcaggtgcagttagagcggatccggcaagctgactccttggagagaatccgggcaattctgaatgatactaaactgacagacattaaccagcttcctgagacatgacaccctcatggcaggattctagcctgcactttgggtttttaactcatctttagagcaacagtaattattatttaactcttaactgaagaaagagaagtcacaacaaaaggaagactggagaaatgcttacttctagagggagaagag

SEQ ID NO: 22239 - DNA, 465 bp, Homo sapiens
ctgtgccccgcgctgtaagaattcggcacgagctgtcgccatgaaggtcgagctgtgcagttttagcgggtacaagatctaccccggacacgggaggcgctacgccaggaccgacgggaagggtttccagtttcttaatgcgaaatgcgagtcggctttcctttccaagaggaatcctcggcagataaactggactgtcctctacagaaggaagcacaaaaagggacagtcggaagaaattcacaagaaaagaacccgccgagcagtcaaattccagagggccattactggtgcatctcttgctgatataatggccaagaggaatcagaaacctgaagttagaaaggctcaacgagaacaagctatcacggctgcttaggaagcaaaaaaggctaagcaagcatctaaaaagactgcaatggctgctgctaaggcacctacaaaggcagcacctaagcaaaagaa

SEQ ID NO: 22240 - DNA, 443 bp, Homo sapiens
aatgatcccgctgcggaattcggatgtaggaccttgaagccatccaggacatgttccccaacatggaccaggaggtgatccgctccgtgctggaagcccagcgagggaacaaggatgccgccatcaactccctgctgcagatgggggaggagccatagagcctctgcctcgatgccgatttgcccccgctctttggacacgccgacccggcgctccccaaggaatgctgtcccaacaagattcccgtgaaagagcacccgtgtcgccccctcccgtggacttctgtgccgccccgtccacacctgttcttgggtgcatgtgggttttcggttcctggcggtccaggacggggcgggggctcccctcccatctcgtgctgggaggtctcagcgcgctctcctgtccctgggacgtgcgtctctccttctcatgccgttctggaa

SEQ ID NO: 22241 - DNA, 498 bp, Homo sapiens
  misc_feature (1)...(498): n = A,T,C or G
gggagtnccagaggagaaacctgaaaccntnnaactganagtcgtgcgggaannccgcacgaggnccaccatcagcctcccctgctgaatctgagccacagtgtgatcccagctttaaaggagatgcaggagaaaatacggcattgctagaagccggcaggagtgactctcggcatggaggacccatctcctagcacacgtgcccactgaagtggcaccaacagaagtttggcttgaactaaaggacattttattttttttactttagcacataatttgtatatttgaaaataatgtatattattttacctattagattctgatttgatatacaaaggactaagatattttcttcttgaagagacttttcgattagtcctcatatatttatctactaaaatagagtgtttaccatgaacagtgtgttgcttcagactattacaaagacaactggggcaggtactctaatataaaggacaggtggtgtttctaaataat

SEQ ID NO: 22242 - DNA, 464 bp, Homo sapiens
  misc_feature (1)...(464): n = A,T,C or G
attgacncgcctgcggaattcggcaccagcagaaaccaacttttctaacgactgagttcgcggagatagcatcatccctgatcaaggatgtaattctaattaactgttgattgccaaacatttcactctgctgtgccgtctcttcataaagcttcacttgggatcatcgtcttcattaaggtttcaacagggaaattcttcacggcgcccttttatgtggcagaaatcagctggggcttgtttagcttccagcacactctcagtcatagcatgtgtagctaaaggaagtaatgggaaggggttcatgttctctttataatgcagtggcaaaaggttctgaaagccttttaaactcgaaccagtgggggaaagatggatcttgaagctaatcctgcagagagtctatagaggccagggattgccttctaaattatgataaaacagaagtgaagagtttcagagca

SEQ ID NO: 22243 - DNA, 485 bp, Homo sapiens
agaaaaaaaatttggaaaaccaataaaaattttgtcccccgctgcaggaattcggcacgaggaaaggcaccagaggctccagctctggccataatgccccagatgaagcttgacaggagaactggacacaacaggccaggtttccctaggatcaccagctgtcatggactgatttgtgtctctccaaattcatatgttgaatacttaacctgccatgcgattgtgattggagataattcctttagggaagcaatgaaggttaaatgaggtcataggtgggagcttaatccaatgggactggggtccctacaagaagaggaagacaccagagctctctgtctccacacacagagaaaagaggctgtatgaggacacaagagaaggtaatagctgtctacaaaccaacaagagaagcctctccagaaaatgaaccctgctggaacttggtcttggactttccagcctccagaactgggagaaaataa

SEQ ID NO: 22244 - DNA, 482 bp, Homo sapiens
  misc_feature (1)...(482): n = A,T,C or G
tgaaagtggccaggnaanaaccctgaaacccgcatagaccgcntcaggagnccngaggcggagacangaggcatgatcctagaccagcctggccaacatggttaaaccctgtctctactaaaattaacaaaaactagcccggcatggtggtgcatgcctgcaatcccagctatttgggaagccgacgcacaccaattgcttaaacccatgaggcagaggttgtagtgagccaagacggcacccctgtactttatcctggacaacagagcgagattccatccaaaatcttaacagagcaaaacacaaactaataaaaaacctgcttaatatacactaccatacacagtgagttttcaagatgtactgatctagagaactatgataagtgtccttagaaccctcagttcttttgtcatagagcatggtatagtacaaaggaaaggttctagactcagcatgacctgagtttgagtccagatgct

SEQ ID NO: 22245 - DNA, 487 bp, Homo sapiens
  misc_feature (1)...(487): n = A,T,C or G
gcgcggnnccnntnnaccttgataaaatgatcggcctcgcgaanncgcacgagagcacccaacgcagtgagtaccttgatctcctgcgtggcctcgtccctggtcttagttccaccgggcagcgggagtcaggaccgcctgtcctcagacccctccgcagcgactgtggcggccgcagtctagcaggaaaggagagggagctttccccgaagaccctcctggaccagccccaggctcctgtgctggcggttctgagaagtccaagggttgctgggagaggttggttgcacgccagggcctgtactgaccacctccacgtgccactggggctgtaaggaggaatggcggccgtgggcagcctgcttggccggctgaggcagagcaccgtgaaggccaccggacctgcactccgccgcctgcacacatcctcctggcgagctgacagcagcagggcctcactcactcgtgtgcaccgccaggcttatgc

SEQ ID NO: 22246 - DNA, 490 bp, Homo sapiens
  misc_feature (1)...(490): n = A,T,C or G
aggnagtncccaggaaagaaaatgatgcctttcatgatcgcctgcaggaanccgcacgagggaacatcctcctggactcaatcatggcttgtggtctggtcgccagcaacctgaatctcaaacctggagagtgccttcaagtgcgaggcgaggtggctcctgacgctaagagcttcgtgctgaacctgggcaaagacagcaacaacctgtgcctgcacttcaaccctcgcttcaacgcccacggcgacgccaacaccatcgtgtgcaacagcaaggacggcggggcctgggggaccgagcagcgggaggctgtctttcccttccagcctggaagtgttgcagaggtgtgcatcaccttcgaccaggccaacctgaccgtcaagctgccagatggatacgaattcaagttccccaaccgcctcaacctggaggccatcaactacatggcagctgacggtgacttcaagatcaaatgtgtggcctttgactg

SEQ ID NO: 22247 - DNA, 457 bp, Homo sapiens
  misc_feature (1)...(457): n = A,T,C or G
aattgacccgcgctgcaggaattcggctcgacgcngcgctgcaggaattcggcacgagcagaaatctatctctagagtgattgaatatttggaacattgctagctgctttacctttgcttcaggtgctcggtaatgctggagctatccttagacaaagaaaagtcaagtcatgaaagaagtccttgaagatataccaagaacattcatcagtatcattcgtgtttggatttttaaggccacctgatttcttcgtcatgcattcggcatttgctaaatgacagttactacatcaatctgcaactatcaaaaatgaggggaaaaggttcaggctgttaacaattccatgcagtatttaaatacatttactttggcagagtttataccctccccttgttttcttgctttattctgggcaagtttgaaggggaaaatttgtgctgctgttagtgcaactgc

SEQ ID NO: 22248 - DNA, 477 bp, Homo sapiens
  misc_feature (1)...(477): n = A,T,C or G
acgggccattgcccgtcctgcangaattcggcacgagcaccatccagaagaacttgatggaatgcttttattttttattaagggaccctgcaggagtttcacacgagagtggtccttccctttgcctgtggtgtaaaagtgcatcacacaggtattgctttttaacaagaactgatgctccttgggtgctgctgctactcagactagctctaagtaatgtgattcttctaaagcaaagtcattggatgggaggaggaagaaaaagtcccataaaggaacttttgtagtcttatcaacatataatctaatcccttagcatcagctcctccctcagtggtacatgcgtcaagatttgtagcagtaataactgcaggtcacttgtatgtaatggatgtgaggtagccgaagtttggttcagtaagcagggaatacagtcgttccatcagagctggtctgcacactcacattatcttgctt

SEQ ID NO: 22249 - DNA, 520 bp, Homo sapiens
  misc_feature (1)...(520): n = A,T,C or G
nggatgggcaactcancgcctgcatgaattcggcacgagtggngggcgggagggaggcaggcagagagggcacttctctgcagtcatctgcagaggtaatgggagagatgtgactggacctccttttataaataatgtgtttttagccaggtgcagtggctcatgcttgtaatcccagcactttgggagtttgaggctggtggatcacttgaggtcaggagttcgagaccagcctggccagcatggcgaaaccccatctctactaaaaatagaaaaaaattagccagatgtggtggcacgtgcctgtagtcccagctactcatgaggctgaggcagaagaatcacttgaacccgggtggtagagtttgcagtgagccaagattgcaccactgcactccagcctgggtgacagagtgagactctctctcanaaataaataaataaataaataaataaataaagtgtttttgtgttcaaagctaaaaaaaaaaaaaaaaaactcgagggggggcccggtacc

SEQ ID NO: 22250 - DNA, 460 bp, Homo sapiens
attggcccccgtttgccccgcgctgcaggaattcggcacgagccatggcagctgccttggctcggcttggtctgcggcctgtcaaacaggttcgggttcagttctgtcccttcgagaaaaacgtggaatcgacgaggaccttcctgcagacggtgagcagtgagaaggtccgctccactaatctcaactgctcagtgattgcggacgtgaggcatgacggctccgagccctgcgtggacgtgctgttcggagacgggcatcgcctgattatgcgcggcgctcatctcaccgctctggaaatgctcaccgccttcgcctcccacatccgggccagggacgcggcgggcagcggggacaagccgggcgctgatactggtcgctgacagcgccaaagagaccaacaagatgattttagcgtggactaggacacttaacctatgaaagtttcacttaatcattc

SEQ ID NO: 22251 - DNA, 460 bp, Homo sapiens
  misc_feature (1)...(460): n = A,T,C or G
ggcgggttaaaaaaanaattgatncgcctgcaagacttcggcacgagctgtcctgtgcagtgaagggagaggccctgggtgggggacactcanagtgggagcacatcccagcagtgcccatgtagcatgagcacagtggatggccttgtgtccctcgggcatgacaggcagaaacgagggctgctccaggagaagggcctcctgctggccagagcaaggaaggctgagcagcttggttctcccctctggcccctggagagaagggagcattcctagacccctgggtgcttgtctgcacagagctctggtctgtgccaccttggccaggctggctgtgggagagggtctggtcccacgccgcctctgctcagaccactgtgtgggaggtgcacagcacagcctgcgggtaaagtgtgagagcttgccatccagctcacgaagacagagttattaaaccatt

SEQ ID NO: 22252 - DNA, 500 bp, Homo sapiens
  misc_feature (1)...(500): n = A,T,C or G
cgggcaggtaaaatataanaaaatgggggaaanggggatttgcancgcttgcangacttcggcacgagcaagaatcttagtaaggtggttgccagcttggtaactgcatagtaatcgagaggctgtaagatgggaattcatcgtacgcagcgaggtaaagcgggtcccctgaaatgggattcgcttggcactgcctcttaaagataggggtgtcgggatcttgattgtggccgccccacccagctttacctgcccactttgtccttcttggcaagcctgttcacatggacgtccagagccagtggacagagaagaggggacggacagcagaggtgctgcttttgcagcagaaactttgttgcagttcaaagtataccttctgctctgctccagagcacgagttgcagaccaagcccttggggctggccatttgattcttgaaataaagttttattggaacacagcccagaccaatctgtgttcggattatctgtggctgn

SEQ ID NO: 22253 - DNA, 475 bp, Homo sapiens
  misc_feature (1)...(475): n = A,T,C or G
ggtgggaattgactgcgctgacgtggagctggaccggaaggtggctgaccagcagagcacactggagaaggcgggggtggctggcttctacgtgaccaccaacccacaggagctgatgctgcagatgaacctgctggaactcatccgaaagctgcagcagaggggctgccgggcagggaatgcagccctgggactgggaggtccctggcagtcgcctgctgcccagtgtgaccagaaaggcagccctgtcccaccatagccacaggcagcagaagtctgggcagagttcatcttcttgacctttggccactgccttcccagctgcccgcagggggttccccctgctgaggagagaccaggtggaccccagctgcctgtcacccttcatctgggacttgctgtcaaaccctaggatagtctcataaaggggaggctgggccagcctgctgctgtctgcttcaggaccaggcagagn

SEQ ID NO: 22254 - DNA, 523 bp, Homo sapiens
  misc_feature (1)...(523): n = A,T,C or G
ngatggtgggatatgacgctgtggaanattgcacgagctgcaggaatcgagacgagggccgccggagatgcctgacgcatctgtctgaggagcggtcagtgacgcgatggagcgggcaagggatcgcttacacctgagacgaactacagaacagcacgtaccagaggtggaagtccaagtcaaacgcagaaggactgcctcactgagcaaccaagagtgtcagttgtacccgaggcgttctcagcagcagcaagtacctgtggtggatttccaggctgaactgaggcaggcattcttagctgagacaccaagaggtggttaaagccatattggagtagcgaggaatctgattccaagcaaaaaccaggctccatctactctttgaagcttctgcccagcttgcattgtttctaggagaacccgcgtcatacctttatctatagccttcccctaggtcttcagaagcatcaagttttaactgtggacattggatttggtggaacagcaatcatgactgttggca

SEQ ID NO: 22255 - DNA, 505 bp, Homo sapiens
  misc_feature (1)...(505): n = A,T,C or G
tgggtgggtatatatttaggtnnatatgcggcggannncgaaaaatttgatcgtcgtgaggcattcggcacgagggtacttcttgtggagacaacagaaggaaataactgctctgtccagtgagatagaaagtgagcaagatatgaaagaaatgggatatgctgcaacagagcgggaaataagcctaagagagagcctccaggaggaactcaagaggaaaaaaatccagtacttgactcgtggagaggagtcttcgtccgataccaataagtcagcctgatgctctaatggaaaaatggccctcttcaagcctggtgaggaaatgcttcagatgaggctccaccttgttaaataaattggatgtatggaaaaatagactgcagaaaaggggaactcatttagctcacgagtggtcgagtgaagattgaaaattaacctctgagggccagcacagcagctcatgcctgtaatcctagcactttggaaggctgaggagggcggatcn

SEQ ID NO: 22256 - DNA, 503 bp, Homo sapiens
  misc_feature (1)...(503): n = A,T,C or G
ttggagggaaaaataaatnnnnnatggggggaaacgggaaatttgannctcgacccgcctgcaggaattcggcacgagccggaatccgcgcgcagcccggatcgtttaaatgagagtttgcagaagatgaaaggggagtcttgcattcagcaatttgccctgtatttaatgagccagccaccttgtgtcttcccctcctatgacatagcccttcagctcaccctacaattgccacatgaaaacttctctcatgaaacccacagggtgcaagttctctcctgttgccctgagtgcccactcccaggccctctgtatgagtgacacttcagtctgccatggaacctggccctgctctggcctggctcctgctcctgagcctgctggcggattgtctgaaagctgctcagtcccgagacttcacagtgaaagacattatctacctccatccttcaaccacaccatatcctggtggatttaaatgtttcacctgtgaaaaggcagca

SEQ ID NO: 22257 - DNA, 445 bp, Homo sapiens
  misc_feature (1)...(445): n = A,T,C or G
atttgaccgcctgcggaattcggttcgagctaccctgcatgatgtatgctatattccaggaaagagacctcctaaagacattcagaatctcatctgacacatttataacctacatgatgactttagaagaccattaccattctgacgtggcatatcacaacagcctgcacgctgctgatgtagcccagtcgacccatgttctcctttctacaccagcattagacgctgtcttcacagatttggaaatcctggctgccatttttgcagctgccatccatgacgttgatcatcctggagtctccaatcagtttctcatcaacacaaattcagaacttgctttgatgtataatgatgaatctgtgttggaaaatcatcaccttgctgtgggtttcaaactgctgcaagaagaacactgtgacatcttcatgaatctcaccaagaagcn

SEQ ID NO: 22258 - DNA, 450 bp, Homo sapiens
  misc_feature (1)...(450): n = A,T,C or G
nttgccatctgaccgcctgcagttccctgngcatcttttctttgaatcacaaatgctgccaaccttggtccaggtgaaggcaactcaaaaggtgaaaatacaaggtgaccgtgcgaaggcgctagccgaaacatcttagctgaataggtttctgaactggcccttttcatagctgtttcagggcctgtttttttcacgttgcagtccttttgctatgattatgtgaagttgccaaacctctgtgctgtggatgttttggcagtgggctttgaagtcggcaggacacgattaccaatgctcctgacaccccgtgtcatttggattagacggagcccaaccatccatcattttgcagcagcctgggaaggcccacaaagtgcccgtatctccttagggaaaataaataaatacaatcatgaaagctggcagttaggctgacccaaactgtgg

SEQ ID NO: 22259 - DNA, 450 bp, Homo sapiens
atagaattctgccccgctgcaggaattcggcacgagcaaaggcgctgtcatgtttgtggtaccccagcccgttgtgcagagttcaaagcctccggtggtgagcccgaatggcaccagactctctcccattgcccctgctcctgggttttccccttcagcagcaaaagtcactcctcagattgattcatcaaggataaggagtcacatctgtagccacccaggatgtggcaagacatactttaaaagttcccatctgaaggcccacacgaggacgcacacaggagaaaagcctttcagctgtagctggaaaggttgtgaaaggaggtttgcccgttctgatgaactgtccagacacaggcgaacccacacgggtgagaagaaatttgcgtgccccatgtgtgaccggcggttcatgaggagtgaccatttgaccaagcatgcccggcgccc

SEQ ID NO: 22260 - DNA, 457 bp, Homo sapiens
  misc_feature (1)...(457): n = A,T,C or G
aactggatccgcgctgcaggaatncggaacgtacctcgctgcaggtgctatagagggctccgacagcagttcccagccagcgtgttcagcctgcctgcctgcctgcctctgtgtgtgtgtgagcgtgtgtgcgtgcgtctactttgtactgggaagaacacagcccatgtgctctgcatggacgttactgatactctgtttagcttgattttcgaaaagcaggcaagatgtccagcacaccacatgaccccttctattcttctcctttcggcccattttataggaggcatacaccatacatggtacagccagagtaccgaatctatgagatgaacaagagactgcagtctcgcacagaggtgccacatcattgggaactatgatgatgatgacgacgatgacgacgatacacttattctggattctatcagcaaattaaataatgagagacctccac

SEQ ID NO: 22261 - DNA, 486 bp, Homo sapiens
  misc_feature (1)...(486): n = A,T,C or G
cccccccccccccgcccccccccctttagaccagcgctgcaggaattcggcacgagcttaaatgccttatatcctgttgggctttatttttaaaatcattttacaaggttctagatcataaaaggaaattaaagtcatccagcttagtcaaatcccttgagtttactactaaaaaaaggaaattcaatgtttgtggtttcaaacctataatttctgttaaaactgaatcaaaaagttgcaagatataacttcttttttaatgatgaggggccccatctacttaactaaacatattccccgagcaatagtggtatgcctgtgtcatctgatataactcaacaatttggatggaacccaaggcattatgctcagtgaaaagcatatctcanatggcaacctacagaatgattacatttcatatannattcttagaaatggcagaattatagtgatggagaactaatctgtgagtgccaagaagttggn

SEQ ID NO: 22262 - DNA, 460 bp, Homo sapiens
agggggtttgtatcgctcgctctgcaggaattcggcacgaggaaacctctctaaaaagctgccggttatttaaccccaatgatgatggaaaggaggaaccaccaaccacattactttgggtccagtactacttggcacaacattatgacaaaattggtcagccatctattgctttggagtacataaatactgctattgaaagtacacctacattaatagaactctttctcgtgaaagctaaaatctataagcatgctggaaatattaaagaagctgcaaggtggatggatgaggcccaggccttggacacagcagacagatttatcaactccaaatgtgcaaaatacatgctaaaagccaacctgattaaagaagctgaagaaatgtgctcaaagtttacaagggaaggaacatcagcggtagagaatttgaatgaaatgcagtgcatgtggttccaaac

SEQ ID NO: 22263 - DNA, 410 bp, Homo sapiens
  misc_feature (1)...(410): n = A,T,C or G
nttgcccgcctgcggcaaaaatccctggattgaagcgcatagctgaatgaaaacgcccaaaataattagtaggagttcatctttaaaggggatattcatttgattatacgggggagggtcagggaagaacgaaccttgacgttgcagtgcagtttcacagatcgttgttagatctttatttttagccatgcactgttgtgaggaaaaattacctgtcttgactgccatgtgttcatcatcttaagtattgtaagctgctatgtatggatttaaaccgtaatcatatctttttcctatctatctgaggcactggtggaataaaaaacctgtatattttactttgttgcagatagtcttgccgcatcttggcaagttgcagagatggtggagctagaaaaaaaaaaaaaaaa

SEQ ID NO: 22264 - DNA, 459 bp, Homo sapiens
agggggcaatggtttgactgagcgataaatgaaggaaacaaccactggcccagggtagagatgcctacagggtggttgcttgttggatacaatacaaggaacactgctcagaacccacgtcttcagcagcatttgaaacactggcagcaatgcacaagagcaagatggtgtcaggaaccatgtcaaaccctcaccttcttccattttttttttttttttaaaacagtctcactctgttgcccaggctggagtaaagggcaggggcatgatctcggttcactgcaacctccgcctcctgggctcaagccattttccttagcctcccaagtagctaaaactacaggtgtgtaccaacacgtagggctaattggtttggttttttttggggggggggaaacagggttttgccatgttgcccaggttggtctcgaacgcctaggctcaagtgatctgcccacc

SEQ ID NO: 22265 - DNA, 488 bp, Homo sapiens
  misc_feature (1)...(488): n = A,T,C or G
gggcgcccnaccaattgcncgcctgattagttcgcacgagcttgcctggaatcccatttgtttggggttggtagaaggtgttattgggaaaattcaacttcattcagatcttccatggtggcttattctaattcggcagaaagcattggtgggcaaactcccaggagaccatgaggtctgtaaagttaccaaaattgctgtgctctcactttctgaaatggaacctcaggatcttgagctagagctctgtaagaagcatcattttggtattaacaaaccagagaagatcataccatctcctgatgactcaaagtttctactgaagacctttacgcatattaaatccaatgtgtctgctcctaataaaaagaaagttaaggaaagtaaagagaaggagaagttggagaggagattacttgaagagttgctgaagatgttcatggactcagaatccttttattatagcttgacctatgacctgaccaatt

SEQ ID NO: 22266 - DNA, 457 bp, Homo sapiens
  misc_feature (1)...(457): n = A,T,C or G
ccttgcccgcctgttgaccccgctgcaggaattcggcacgagaaacttctctctgtttgcctgcctccaacagtacttttaactttttgctgtaaacagaataaaattgaacaaattagggggtagaaaggagcagtggtgtcgttcaccgtgagagtctgcatagaactcagcagtgtgccctgctgtgtcttggaccctgccccccacaggagttgtacagtccctggccctgttccctacctcctctcttcaccccgttaggctgttttcaatgtaatgctgccgtccttctcttgcactgccttctgcgctaacacctccattcctgtttataaccgtgtatttattacttaatgtatataatggaatggtttggtaagtattaaattatatatctaaacattgcctgccatggtggtgtanatttgtgtagaaactctgcctagagtacgac

SEQ ID NO: 22267 - DNA, 316 bp, Homo sapiens
cgacgaccatttgaccgccctaatcgaccgcttgcggatttcctatatctcttctggctgtagggtggctcagtggaatccattttgttaacaccgacaattagttgtttcacacccagtgtgtaagccagaagggcatgctctcgggtctgcccattcttggagataccagcttcaaattcaccaacaccagcagcaacaatcaggacagcacagtcagcctgagatgtccctgtaatcatgtttttgataaagtctctgtgtcctggggcatcaatgatagtcacatagtacttgctggtctcaaatttccaca

SEQ ID NO: 22268 - DNA, 484 bp, Homo sapiens
  misc_feature (1)...(484): n = A,T,C or G
tggnnnatggagggcccccccttgccccccctgtagcccccgctgcaggaattcggcacgagtgggagtgacagtgctgacaagaaggctcaaggtcccaaaggtggtggcaatgcagtaaaggtcagacacattctatgtgaaaaacatggcaaaatcatggaagccatggaaaagttaaagtctgggatgagattcaatgaagtggccgcacagtatagtgaagataaagccaggcaagggggtgacttgggttggatgaccagagggtccatggtgggaccatttcaagaagcagcatttgccttgcctgtaagtgggatggataagcctgtgtttacagacccaccggttaagacaaaatttggatatcatattattatggtcgaaggaagaaaataaaatcatatgaaagactgaataagttttatacattntggttctttaaaaggtattacatattcttttgagctggagctgcaag

SEQ ID NO: 22269 - DNA, 470 bp, Homo sapiens
  misc_feature (1)...(470): n = A,T,C or G
ggggnnnnnnnnnaagggggnccccnntttggccccgccttctgcaacgcctgtaagaattcggcacgagcttcataattacattgtctgatttagaatgtgattacattaatgctagatcatgttgctcaaaattaaacaagtgggtaattccagaattgattggccataccattgtcactgtattactgctcatgtcattgcactggttcatcttccttctcaacttacctgttgccacttggaatatatatcgtatgatcttagctttgataaatgactgaagctggagaagccgtggttgaagtcagcctacactacagtgcacagttgaggagccagagacttcttaaatcatccttagaaccgtgaccatagcagtatatattttcctcttggaacaaaaaactatttttgctgtatttttaccatataaagtatttaaaaaacatgaaaaaaaaaaaaaaaaa

SEQ ID NO: 22270 - DNA, 398 bp, Homo sapiens
  misc_feature (1)...(398): n = A,T,C or G
attagacccgcgctgcaatgaanngttgacccgcgctgcaggaattcggcacgagcggaggtccaagccccgtgtggagccgcttccggagctgggggtggtgtgggggtggacaccggcaaggccaccctgaccgcgagcccactgggtgcatcctgagagcaggggtgacgtatgtagaatgcttagggtgtcctccccacagagcagatacttgaaccgactcaattcctgtgtaaagagcactttgtcctgcttcacggacctccccaaagtgtgcagagttctatataggatgctggattagttcctttgatatttgtaaaaattcccccaagagccgcatatgaatctgccctttaataaagcattattgagaaaaaaaaaaaaaaaaaaaa

SEQ ID NO: 22271 - DNA, 491 bp, Homo sapiens
  misc_feature (1)...(491): n = A,T,C or G
ggggnnnagcgggggnaattgancttgcatggctgcggacattcggcacgagaagtaattgaggagaaagaaccgtgatgttccctgtttctccagtaaaggactggcttttgcttgggcagaggtggtgctgctgggtgtgcagctgccacagactccaaaggcgtagaagtttgtgccaacacacggagtcattctggctctctgctgaggcccctgttttctggcaggtgccctccttggaaactggttttggctctgatcagcggttctttttgcagcaaagcctgcatctgtgttgacttgcaagattttgcgtttattcaggcaaaaactggtcaaaatggttactacatgatttgttcccagaggtttgaaacattcagtgaaactttttaaaactttgattgcatgatgtattttttttttagaaagttattgtttgagaataatgtctttttataccaggaaaatagttatcctgaatgacn

SEQ ID NO: 22272 - DNA, 504 bp, Homo sapiens
  misc_feature (1)...(504): n = A,T,C or G
aggggcnnnnnntttgccttgctgcggcattcggcacgaggcagaattagtatagagtacattcattaaacatttttgtcaggattatttcccgtaaaaacgtagtgagcacttttcatatactaatttagttgtacatttaactttgtataatacagaaatctaaatatatttaatgaattcaagcaatatatcacttgaccaagaaattggaatttcaaaatgttcgtgcgggtatataccagatgagtacagtgagtagttttatgtatcaccagactgggttattgccaagttatatatcaccaaaagctgtatgactggatgttctggttacctggtttacaaaattatcagagtagtacaactttgatatatatgaggatattaaaactacactaagtatcatttgattcgattcataaagtactctgatatctctcactgcttcagtgctatcattgtgagcaatgggctttatatacggtactgtagccatactaa

SEQ ID NO: 22273 - DNA, 397 bp, Homo sapiens
  misc_feature (1)...(397): n = A,T,C or G
nttaganccgctctgcaggaattcggcacgaggttaatttaccagtagccgctgaagatttttcccagtaccaactaaagcaaaatcaggatgttaagcaagttgaacacaaaccatcacaaagttacctacgtgttagaaataaatctgatattgcaccttcacagcaacaagtttcaccaggtgatatggatcggacacaaattgagcttaatccgtacctcacatgtgtattttcaggtttgggggtacatgtgaagaaggtttcctgtataggtaaactcgggccgtggaggtttgtcatacagattatttcatcacccaggtgggaaagcagtgccactctccgcttcacagatgccccctgccaagatgtcagtgatgctgccgtcagtga

SEQ ID NO: 22274 - DNA, 500 bp, Homo sapiens
  misc_feature (1)...(500): n = A,T,C or G
nattgacggctgtggaattcgttggaggacgaacggaggtccttatgtttcttttctttccttaaatcttgcccggcctgaagaggccggaagttgcatctctggacaagtaaactctgagacctgggaatggcgggcgggacccgctcctcccttggggtctagaggagacccccggagatggtccctgatgagcagcgtgatggtggaaagctggactggtctcccgaaaggcgaagccgaggcttcttcctctgaacttttgggccagctgaggggcccacggacatagggcacccacaataggcgtgtgtctgctgtgtgtttgtgttcggccgtcctgcttctctgtttccacacgtacacatgcccctgtgttactttggttcatcttctgtactctgtcagttttctgctggtcagaacatctgtgactgtgacagagctgtccaggattgcagtggataggaatttcttcacatggctcctggagaagtgan

SEQ ID NO: 22275 - DNA, 451 bp, Homo sapiens
attgacatctgccccgctgcaggaattcggcacgaggaagaagaaacagccttgggagggaaataattaaactgacaaaggaacaggcagctgcagaactggaagaggtcagaagagagagtcccatagaaggtcagaggagtgagacggggccagccccgccaggcctggccatccagggggagctccctaaatctcacctggactccttcgaggccagccggccagcagccaaagcttccacaccggaagacggcaaagggatcccagagggcggaggcatgaggagcaccgtgaaaacctgaaggggagagggatctgacacaatgacacattgaaagccccagagagggtcaagaatgaagcatcggaatggtgcgctcacgtcgccttctcctgaaatacctccgagtctgcaagtgagaaaacgcgctgatcctgttgcaaactg

SEQ ID NO: 22276 - DNA, 497 bp, Homo sapiens
  misc_feature (1)...(497): n = A,T,C or G
nattgancgcctgtggatttcggcacgaggtggactgcccactgggccttgcccgagatggacagccggattccttatgatgactacccggtggttttcttgcctgcctatgagaatcctccagcatggattcctcctcatgagagggtacaccacccggactacaacaatgagttgacccagtttctgccccgaaccatcacactgaagaagcctcctggagctcagttgggatttaacatccgaggaggaaaggcctcccagctaggcatcttcatctccaaggtgattcctgactctgatgcacatagagcaggactgcaggaaggggaccaagttctagctgtgaatgatgtggatttccaagatattgagcacagcaaggctgttgagatcctgaagacagctcgtgaaatcagcatgcgtgtgcgcttctttccctacaattatcatcgccaaaagagaggactgtgcactagaaagttgcagcccacagc

SEQ ID NO: 22277 - DNA, 450 bp, Homo sapiens
aattagaaattttcgacccgcgctgcaggaattcggcacgagaaattcatttgtttctgttggaattgggatactaaggtccagaggtgtccttctaaagctggtagaggtttcacgagtcatcagggacccagaacccttctcttttgctgtccctttgtcctagtgcatggtttccacactgtggtgcaagatgtctcctcaagctctaggcattacatctgctatcctgctgtcagaaagaaggaaggggaaaagaagatcatttccttctctttaaggacatttcccagaagtcacacagaacatttccatttatattactttggccagaacttggtcatatggccacatttagttccagaatgattaggaaatgcagtcttttattgatccctgtgcccacgaaaatattggaggcctttttcaaggaaaaaggggaaaacagat

SEQ ID NO: 22278 - DNA, 478 bp, Homo sapiens
  misc_feature (1)...(478): n = A,T,C or G
ntttgccccgcgctgcaggaattcttcacgagacccgcgccatccccacccgcaccgtggccatcagcgacgccgcgcagctacctcatgactattgcaccacgcccggggggacgctcttctccaccacaccgggaggaactcgaatcatttatgacagaaagtttctgttggatcgtcgcaattctcccatggctcagaccccaccctgccatctgcccaatatcccaggagtcactagccctggcaccttaattgaagactccaaagtagaagtaaacaatttgaacaacttgaacaatcacgacaggaaacatgcaggtggggatgatgctcagttcgagatggacatctgactctcctgcaaggattagaagaaaagcagcaacactgatacttgtgtgcacctgatttggccaataggatcaacagtgaaaagacagaagaggcaataccagcagtccccattacagtctcc

SEQ ID NO: 22279 - DNA, 451 bp, Homo sapiens
  misc_feature (1)...(451): n = A,T,C or G
attagcctttcgcccccgctgcaggaattcggcacgaggtgaacatgggtcagaaacaggaaattctggatctcttttcttcagtactctatgaatgtgttacccaggagaccccagagatgttgcctgcatacatagcaatggatcaggctataagaagacttgggagaagagaaatgtctgagacttctgaactttggcagataaagttggtgttagagtttttcagctcccgaagccatcaggagcggctgcagaaccaccctaagcgggggctctttatgaactcggaattcctccctgttgtgaagtgcaccattgataataccctggaccagtggctacaagtcgggggtgatatgtgtgtgcacgcctacctcagcgggcagcccttggaggaatcacagctgagcatgctggcctgcttcctcgtgtaccactctgtgccagn

SEQ ID NO: 22280 - DNA, 411 bp, Homo sapiens
aggagtttcacggctgcatgattcggcacgagtgactatgtgaaggcactgcccgggcaactgaagccttttgagaccctgctgtcccagaaccagggaggcaagaccttcattgtgggagaccagatctccttcgctgactacaacctgctggacttgctgctgatccatgaggtcctagcccctggctgcctggatgcgttccccctgctctcagcatatgtggggcgcctcagtgcccggcccaagctcaaggccttcctggcctcccctgagtacgtgaacctccccatcaatggcaacgggaaacagtgagggttggggggactctgagcgggaggcagagtttgccttcctttctccaggaccaataaaatttctaagagagctaaaaaaaaaaaaaaaaaaaaa

SEQ ID NO: 22281 - DNA, 513 bp, Homo sapiens
  misc_feature (1)...(513): n = A,T,C or G
agtgggtgngnnnnttctccccggctgcangaattcggcacgaggaactgtacctgttgaggcacttttgtttcttgggcaaaaatacagtccaatggggagtatcattgtttttgtacaaaaaccgggactaaaagaaaagacagcactgcaaataacccatcttccgggaagggaggccaggatgcctcagtgttaaaatgacatctcaaaagaagtccaaagcgggaatcatgtgcccctcagcggagccccgggagtgtccaagacagcctggctgggaaagggggtgtggaaagagcaggcttccaggagagaggcccccaaaccctctggccgggtaataggcctgggtcccactcacccatgccggcagctgtcaccatgtgatttattcttggatacctgggagggggccacaatggggcctcagngagggccccctctggaaatgggttcccanggatgggcctgacatagaagccaccggatggcacttccccaccggatgga

SEQ ID NO: 22282 - DNA, 503 bp, Homo sapiens
  misc_feature (1)...(503): n = A,T,C or G
gaaataaatttganncccatatttgaccggctgcangaattcggcacgagtaacaatgggtggtcttctgatttttatttttgaggttttgtcaactggagtacgtagaggaactttatttacagtactttgatttggcaggttttcttctacttgtgctctgcctggagctgtttccatatgatataaaaagcaagtgtagtattccattactatgtggcttagggatttatttgttttttaaaatcaaccatgttagctgggattagactccctacagtccttcaatggaaaagtaacatttaaaaatcctttgggtaattcaaattacagatttaaaagagcttaagatctggtgttttgttaatgcttctgtttattccagaagcattaaggtaacccattgccaagtatcattcttgcaaattattcttttatataactgaccagtgcttaataaaacaagcaggtacttacaaataattactggcagtaggttatan

SEQ ID NO: 22283 - DNA, 457 bp, Homo sapiens
  misc_feature (1)...(457): n = A,T,C or G
nggcggtttgcactgatcgcctgcggaattcggcacgaggaggcgccggtgtttcgagccgtggcaccggcatcggctgacactgctgcctccagctagttatttcgtcctcttccgttcttcacccctacaccttggaggtgaacttctcacctgagggctgtaaagactcgtttgaaaatggagagccaagaaccaacggaatcttctcagaatggcaaacagtatatcatttcagaggagttaatttcagaaggaaaatgggtcaagcttgaaaaaacaacgtacatggatcctactggtaaaactagaacttgggaatcagtgaaacgtacaaccaggaaagagcagactgcggatggtgtcgcggtcatccccgtgctgcagagaacacttcactatgagtgtatcgntctggtgaaacagttccgaccaccaatggggggctactgcatag

SEQ ID NO: 22284 - DNA, 448 bp, Homo sapiens
attgacttgtctcccgctgaggaattcggcacgagatctggacctggagcctctgagtgatctggaggaaggattggaggaaaccagagatacagccatggtggtggcagttttcaaagaacgggagcaaaaagagattgaagccatgcattctctcagagcagccaacctagccaagatgacaatggtggaccgcatagaagaagtaaaattttgcatttgccgcaagacagccagtgggtttatgctacagtgtgagctctgcaaagactggttccataacagctgtgttcctcttcctaaatcaagttcccaaaaaaaaggatccagctggcaagctaaagaagtaaaattcctttgccctctttgtatgcggtctcgaaggcccaggctagagactattctgtcactcctggtatcccttcagaagttgcccgtacggttgccg

SEQ ID NO: 22285 - DNA, 444 bp, Homo sapiens
  misc_feature (1)...(444): n = A,T,C or G
actgagttcactgcggaatacggnacgaggcaccatggcactgcatcaggcccagatgatgctgagcatgaacagcctggaggcggtgaatgcgggcgtgcatgcataacaacacaaagtcctttgctgtcccactctgccacctcggatagctacacgcggagcacggctgttttgctgcaccttatgaagggttaaagcacttgtcggaacgacttccgcctaatagccagcacgcccagttatggatgctatgtgatcaaaaaatacagtttgacagagcaatgaatgatggcggatatcatttggctgattcacttgttacaggaatcacagctctcaatagcatagagggtgtttataggaaagcgggtgattacaagctcagaaccaaatgtcagaggcacataagcttttacaaaaattgttggttcattgtcagaa

SEQ ID NO: 22286 - DNA, 481 bp, Homo sapiens
  misc_feature (1)...(481): n = A,T,C or G
aatgacccgcctgaggannntttgaccccgctgcaggaattcggcacgagtgtgacttcctggagactcacttcctagatgaggaagtgaagcttatcaagaagatgggtgaccacctgaccaacctccacaggctgggtggcccggaggctgggctgggcgagtatctcttcgaaaggctcactctcaagcacgactaagagccttctgagcccagcgacttctgaagggccccttgcaaagtaatagggcttctgcctaagcctctccctccagccaataggcagctttcttaactatcctaacaagccttggaccaaatggaaataaagctttttgatgcaaaaaaaaaaaaaaaaaaaacctgggggggggcccgggcccccattcccccttatgggggggggaataaaattcacgggcccgcggtttaacaccgtggggagggggggagnnnnnnnngntttncccnttctttccn

SEQ ID NO: 22287 - DNA, 461 bp, Homo sapiens
  misc_feature (1)...(461): n = A,T,C or G
ngcggggannnnnnntttgcccggctgtggattcgcctcgagctgcatttacggngtctcccggagggccagagtcgtggcttacagaagagacgaaatgtggtctgagggacgatatgaatatgaaagaattccgagagaacgagcacctcctcgaagtcatcccagtgatgaatctggttatagatggacaagagacgatcattctgcaagcaggcaacctgaatacaggtttaccgacaagactgtgaaactttcgggatggtggtgaaaatgctgattgaaaaagatccttcattagaaaagtctatacagtttgcattgaggcagaatttacatgaaataggtgagcggtgtgttgaagaactcaagcatttcattgcagagtatgatacttccactcaagattttggagagcctttttagatttttctgctcaggctaaaaaaaaaaaaaaaaaa

SEQ ID NO: 22288 - DNA, 489 bp, Homo sapiens
  misc_feature (1)...(489): n = A,T,C or G
ctttgccccgcgctgcaggaattctgcacgagcgctgtaggaatgcccatcgaggaggacgccctttattcggttgggcggtggaggccacgggggagaaagtgctgcgctacgagaccttcatcagtgacgtgctgcagcgggacttgcgaaaggtgctggaccatcgagacaaggtatatgagcagctggccaaataccttcaactgagaaatgtcattgagcgactccaggaagctaagcactcggagttatatatgcaggtggatttgggctgtaacttcttcgttgacacagtggtcccagatacttcacgcatctatgtggccctgggatatgagtttttcctggagttgacactggcagaagctctcaagttcattgatcgtaagagctctctgctcacagagctcagcaacagcctcaccaaggactccatgaatatcanagcccatatccacatgttgctagaggggcttagagaactac

SEQ ID NO: 22289 - DNA, 499 bp, Homo sapiens
  misc_feature (1)...(499): n = A,T,C or G
gggaggtggggggggattgannncccctcgaccgcctgcagattcggcacgagtgaaatggtttcttcagcagggcttaaaagagcagccttcatcctgaaaatgtatttccttttgtttaatgctttgagtagataatcctgaattgaggtcatgaggaggccccccaggccagacagtcctgaacccctctgacacttggaaactgaatataagtaaaatgtccaggtggactctgagtatttcctgtggatcctgggaaagtactgttgcacaaaggctgcaaagctggactcaggaatgtcctccaaccagcagcgctgacctaagagctccctgtgccgtctatccagaccagacttcggtagatgcctttgttagatctatcacatgtaaacgagcttgtatctccttccctgtgccacgagagagattggctttttattccagtctaggcagagacagaagaatgttgaataagagcacgattagagtcctg

SEQ ID NO: 22290 - DNA, 497 bp, Homo sapiens
  misc_feature (1)...(497): n = A,T,C or G
ngcgggaattganattctgtcgccatgcaggaatncgccacgaggccttgagccagtcaccaatgccacaggaaagaggttttatggcaggcacacaaagaaacccttagatggctcagtatggacctcaacagacaggaccatccatgtcgcctcatccttctcctgggggccagatgcatgctggaatcagtagctttcagcatagtaactcaagtgggacttacggtccacagatgagccagtatggaccacaaggtaactactccagacccccagcgtatagtggggtgcccagtgcaagctacagcggcccagggcccggtatgggtatcagtgccaacaaccagatgcatggacaagggccaagccagccatgtggtgctgtgcccctgggacgaatgccatcagctgggatgcagaacagaccatttcctggaaatatgagcagcatgacccccagttctcctggcatgtctcagcagggagggccaggg

SEQ ID NO: 22291 - DNA, 498 bp, Homo sapiens
  misc_feature (1)...(498): n = A,T,C or G
aagagaaaanaattagatcgccctggtagatcggcttggngaattcngcacgagcagggcgaagccagaggaaactctggtggaggtccgtagcggtcctgacgtgcaaatcggtcgtccgacctgggtataggggcgaaagactaatcgaaccatctagtagctggttccctccgaagtttccctcaggatagctggcgctctcgcagacccgacgcacccccgccgcgtgtggccaagtccaaccgctgattttcccagctgctgcccaataaacctgtctgccctttggggcagtcccagccaaaaaaaaaaaaaaaaatctggggggggggccgggcccccaattccccttatgggggggcgtataaaaattccggggccgcggtttaaaaccggggggcgggggaacaaggggccgcggcttttgtctgtctgccctcttctttcgggtggccatgcgggaggaatacccgagttggggagtttgagacccct

SEQ ID NO: 22292 - DNA, 380 bp, Homo sapiens
  misc_feature (1)...(380): n = A,T,C or G
ngtggtggnnnnttttcccggctgcagaattcggcacgagcacacgagaacatgcctctcgcanaggatctccttcatccctctccagaagaggagaagaggaaacacaagaagaaacgcctggtgcagagccccaattcctacttcatggatgtgaaatgcccaggatgctataaaatcaccacggtctttagccatgcacaaacggtagttttgtgtgttggctgctccactgtcctctgccagcctacaggaggaaaagcaaggcttacagaaggatgttccttcaggaggaagcagcactaaaagcactctgagtcaagatgagtgggaaaccatctcaataaacacattttggataaaaaaaaaaaaaaaaaaaa

SEQ ID NO: 22293 - DNA, 505 bp, Homo sapiens
  misc_feature (1)...(505): n = A,T,C or G
nggaggganattganncccctncctcgaccgcctgtcggaattcggcacgaggttgaattaactgtgaggtgaatctgtttgagtggagcagaaggagctggggcagacagacatccaaatcctaagtgtgtcacttcttagctttggaatcttgggcagtttaattttcctgtctgtgaagctcaatttcttacctataaaatagggataatgccagtctttctggcttgtcaatacagactaaatgagagaatgtatgtgaaggttcctagtacatgccatgactgctaatctggatgactttatgtggtgctaagttttggtaagtatgattgttgatgaaaagtggatatcagccaggcgcggtggctcacacctgtaatcccaacactttgggaggccgaggtgagtggatcacgaggtcaggaattcgagaccagcctggccaacatggtgaaacctctactaaaaatacaaaatttagtacaaaatttagcacaaaat

SEQ ID NO: 22294 - DNA, 455 bp, Homo sapiens
  misc_feature (1)...(455): n = A,T,C or G
ctttgccccgctgttggaattcggcacgagagttttagaggaattctcctgctacttaggtactgggaaacaatgcttgctaaaccatgcccacgtgagcacctgtctcccactcaaacctctcccatctcccaacaactgcactttagaataccagcagtgaaatggtattactgtttccctctgagtgaaactgctagagtatatgtcacgtagtgacatttttttctcactcaggctattgccatctgggattctctccctactacagctggcaaagttggtttgcagcaagaagatagtgagagggggccaggctgcacgagaaggagaaaagtttagaagaaacaaaccattttgcttctaattttgacagtatcactttccttgtaaaacatacaataattttaaaaaggtgatgcctaaaagtccaattttaagcaatatgggaaccn

SEQ ID NO: 22295 - DNA, 453 bp, Homo sapiens
ataggaacctcgcccccgcgctgcaggaattcggcacgagatggaacaccctgggacaaatacaatctttctgccatcatccacctgcacaaatcctctatcttcaaattcctttacaatatcattcatcctatcttgatagaaggattcccctctctctattaaagagacgtccaatgcatcatagattttatttaactcttggcgggagacatcacagataagcttccaagcttttgtaatatctgggtttttaccctggagcagaactacacactgatatgctcgcttcttaaattcctcctcagtatcaaacctcttcttagattccttataaaagacctgaagatccccaataggaggtgaaactgttagataatctggaaatttgtcttgcaggtgagcgatgagcatgccaaactgggtcccccagtctcctacatgatttaacct

SEQ ID NO: 22296 - DNA, 446 bp, Homo sapiens
  misc_feature (1)...(446): n = A,T,C or G
attgaattgccctncgctgagcaatncggcacgaggcagacttcgagagcgaggacgagggcgaggaatttgatgactgggaggacgactacgactatcccgaagaggagcagctcagtggtgccggctacagagtatcagccgctcttgaagaagccgacaagatgtttctgagaacaagagaaccagccctggatggcgggtttcagatgcattatgagaagaccccgtttgatcagttagcttttatcgaagagctttttttcactgatggttgtcaatcgtctgaccgaagaactcggctgtgatgagattattgatagagagtagttagatgctgttaaaagaggaggaaactacttgaggagggacccaactttccgctatcttttgggttcattccaaatagttttgtgccattgaaaaacttgaccttcaaaaaaatn

SEQ ID NO: 22297 - DNA, 478 bp, Homo sapiens
  misc_feature (1)...(478): n = A,T,C or G
cttcgattcgccnccgcgctgcaggaattcggcacgagcaaaccaatatctaggaagaatgactgagggatagtattgggtattggccccatggcaggaacagccacttgcatctggtcccggtgccacactgcggtgcttggtgtggttgtggagcctgtccctgcgcgccttgctcccgttgagccacgctgtctggtgggtgattctctgccctgagccaccaccctggactggcccagtctccagagctggcacaccctgcctgttttctctttttagacacaacagccgcagtttggccagccactaagtcccaccagctgaggtccgaggaaagcggggtgactcatttcccttgtccagggcccgaggagagtgaggtgtccagcctgcaaagctattccagctccttggtgttggtttgcaataaattggtatttaagcagtaaaaaaaaaaaaaaaaaaaaaaaaaaaa

SEQ ID NO: 22298 - DNA, 516 bp, Homo sapiens
  misc_feature (1)...(516): n = A,T,C or G
agttgtgccccaggtggnnnnnnatttgaaacccattgtaccgcctgtcacgaattcggcacgaggagaatctagcacttctccacttgtagctgcactttaagtctcagcagaagatacgatcgtctgcctttataggcctcagatactgaagattatttttggtagaagcaccgtgtaggctttttctgcaatgagcagcagctgactgaattttcataagaaacttggactgcaggacttaatctgtagtctttagacaacagttgctttcataaagactagttcttatcaaccttgaatgactacagattattttgtgaaggaggatgaagtaatgtgtgttcttgtaaaattaaattttatctttatttcttctaaaaatctgtataccaggaactgaaaatctttgaacagatattaaaatctacgtaagtatacaaactagttgagggatacactgtttgcttttataaaataactntgattacatgaatataataaattatgtgcatn

SEQ ID NO: 22299 - DNA, 501 bp, Homo sapiens
gcgcggggattgacgctgtagtattcggcacgagagggaaagtgaagaaaacagaaaaggagagggacagaggccagaggacttctcatactggacagaaaccgatcaggcatggaactccccttcgtcactcacctgttcttgcccctggtgttcctgacaggtctctgctccccctttaacctggatgaacatcacccacgcctattcccagggccaccagaagctgaatttggatacagtgtcttacaacatgttgggggtggacagcgatggtgactaccaactgggaaattcatctcatcctgctgtgaatatgcacctggggatgtctctgttagagacagatggtgatgggggattcatggtgagctaaggagagggtggtggcagtgtctctgaaggtccataaaagaaaaaagagaagtgtggtaagggaaaatggtctgtgtggaggggtcaaggagttaaaaaccctagaaagcaaaaggtaggtaatgt

SEQ ID NO: 22300 - DNA, 461 bp, Homo sapiens
  misc_feature (1)...(461): n = A,T,C or G
cttcgcccacgncttatgcccagcgctgcaggaattcggcacgagctgcagtctttgctcttcagactgttgctccgttggaatgcttctgtgggactgatactgaggttctatagatattttttaaggacctactcatttggggatgtcagtggtgttttgcaagatcatctgaggaacaggaaagcatttgaaatctgaaaaggataactgtggcggttttcacagtggaaggaaactatattggcaaagaggcagatgactgaataaagtagttggctcaaagaagatgcacagtctgctatttttttctctgaatgaagactgtctaatggaagctgtattcatgtggagatcaaaggaaacactggaatgatacactactatgtttttcccccccctttttttttttaaagaaaacaaaaagcctgaagcagcaatttgagctcacatgccttcta

SEQ ID NO: 22301 - DNA, 473 bp, Homo sapiens
  misc_feature (1)...(473): n = A,T,C or G
ntttgaccgtttgcccgactgcaggaattcggcacgaggaactttgtacctttcccctgatttttaaaccctttttctaaacagactgactttcttacaaaatgcatttggaaaccagacctttgctacccaccaatgtctctgggttttgtaccagtccctgctctcaggccaccctgcccaggacccaggcccgcctccccctccacactcaggatgtcctgctccatctggccggctcactccgtgtggcctgcctttgctgaccgttttggggttccccgccggagctacaggggcattttcttccctaaaaccaacagtgtcccactgacctccccaagtgtttgctgcgtggcagatttcctgttcttgttcgcagtttgccgactgaagagtgtgggatttccgaggcccaggtgagcacgtccatctcangaggcgtggagggaaaagacatgtcatgaagggtt

SEQ ID NO: 22302 - DNA, 482 bp, Homo sapiens
  misc_feature (1)...(482): n = A,T,C or G
catcgaccgccnatggaacgccgtgcagaattcggcacgaggaggcctacacgccgccgcttgtgctgcagccatgtctctagtgatccctgaaaagtaccagcatattttgcgagtactcaacaccaacatcgatgggcggcggaaaatagcctttgccatcactgccattaagggtgtgggccgaagatatgctcatgtggtgttgaggaaagcagacattgacctcaccaagagggcgggagaactcactgaggatgaggtggaacgtgagatcaccattatgcaaaatccacgccagttcaagatcccagactggttcttgaacagacagaaggatgtaaaggatggaaaatacagccagggccttaaccatggcctggacaataagctccctgaagacctgcagcactgaacaagattcgtggcccatagagggttgggcgacttctgggcccttcatggcgaggcgcccacacccc

SEQ ID NO: 22303 - DNA, 528 bp, Homo sapiens
  misc_feature (1)...(528): n = A,T,C or G
tggggtnngnnnnnnagggggnattgacnggcnngnngnntttcgcaccggctgcaggaattcggcacgaggcgcagcagccatggcaagccgtctcctgctcaacaacggcgccaagatgcccatcctggggttgggtacctggaagtcccctccagggcaggtgactgaggccgtgaaggtggccattgacgtcgggtaccgccacatcgactgtgcccatgtgtaccagaatgagaatgaggtgggggtggccattcaggagaagctcagggagcaggtggtgaagcgtgaggagctcttcatcgtcagcaagctgtggtgcacgtaccatgagaagggcctggtgaaaggagcctgccagaagacactcagcgacctgaagctggactacctggacctctaccttattcactggccgactggctttaagcctgggaaggaatttttcccattggatgagtcgggcaatgtggttcccagtgacaccaacattctggacacgtgggcggccatggaagagctggg

SEQ ID NO: 22304 - DNA, 520 bp, Homo sapiens
  misc_feature (1)...(520): n = A,T,C or G
nggggnnnnaattgatnnnncnntnnatcgacccggctgcaggaattcggcacgagctcggcccgggccttactctccaccgactgcgtcaggatgagctccaggttttctttgggccgatgcttcgtgtcctccaccagcttatagacgcgatgtcgccggtgcaggcgcggcttccggccctccccggccagcggtaccttccaccagcgctccacgatgaccgtgccctggcggccaggaaagcgacgcatcacttataaggaagaggaggacttgacactccagccccgttcctgcctccagtgctcctgagtccctagtaggcctccaggagggcaaaagcaccgagcagggtaaccacgaccagcttaaagaactgtattcgtttgactgcaaccctggagtacgtggaagagaagacaaatgtggactctgtgtttgtgaacttccagaatgatcggaacgacagaggtgccctggctgcggccttcagctacatgggctntgagggtgtcan

SEQ ID NO: 22305 - DNA, 517 bp, Homo sapiens
  misc_feature (1)...(517): n = A,T,C or G
cgggctnnnnnnnaggggnttttgtaggccctcggaattggcacgacatgcaacacagatatgtggagctcttcttatattctactgcaggaacaagtgggggtgcttacgatcacagctatgtagaactttttttgaattctacagcaggggcaagtggtggcgcttatggtagccaaatgatgggagggatgggcttatccaaccagtctagttatggaggtcctgctagccagcagctgagtggtggttatggaggtggttatggtggtcagagcagtatgagtggatatgaccaagttctgcaggaaaactccagtgactatcagtcaaaccttgcttaggtagagaaggagcactaaatagctactccagatataaaagctgtacatttgcgggagttgaatagaatgggagggatgtttagtatatccagtatgactggtaaatgggaaatataattgattctgatcactcttggtcagcttctctttctttatctttctttctacttttg

SEQ ID NO: 22306 - DNA, 445 bp, Homo sapiens
actgacttcactgcggaattcgagacgagcctaagcgggagcggccaacatgaagtttagtccctttgtgacttccgaccgaagcaagaatcgcaaaaggcatttgaatgcacctttccacattcgaaggaagattatgtcttcccctctttccaaagagctgagacagaagtacaacgtgcgatccatgcccatccgaaaggatgatgaagttcaggttgtacgtggacactataaaggtcagcaaattggcaaagtagtccaggcttacaggaagaaatatgttatctacattgaacgggtgcagcgggaaaaggctaatggcacaactgtacacgtaggcattcaccccagcaaggtggttatcactaggctaaaactggacaaagaccgcaaaaagatcctcgaacggaaagccaaatctcgccaagtaggaaaggaaaag

SEQ ID NO: 22307 - DNA, 478 bp, Homo sapiens
atagaaagcctgaggaactctgcacgagcaaacatcttctctacccctcgggaaccaggctccttcctgcacaagtggtcatcctctgatgacatccgggtcctcccagcccagagccgggccctcgggggccctcctgagtacctgggacaaagacacagggcactctcctcgtcggccccggccactgggcctctcaccccgccgactctcccttgggtcccctgagagcagagccgttggacttcctttgggactaagcgcagggagacgctgctccctgacggggggtgaagaaagtgcaagggcttggggaggatcctggggcccaggcaaccccatctttccccagctgaccctgtgagcccaagcaggcctgctgaactcagaggagaaagcctgagtgagtaacacctcattctggccgagagtagggcagctgcctccagactctggggagacgggcgctagatttggg

SEQ ID NO: 22308 - DNA, 514 bp, Homo sapiens
  misc_feature (1)...(514): n = A,T,C or G
gagggtggnnnnnattcgccggctgcangaattcggcacgaggggtgcagggccctgtggttggacttcacctctcagcactgaaaacccaaaacccagctggccttaacactccttaaagacagaagtcacacttgaacaaaacccacacacaacaaaacctgatttgggagacggtgtctccactgagcacctgctgggctgagcttctacctacgagtgaaactctgtcctcccgcgaggaccaggcatcgctgtgtgaggacggcacggccagcgcctgctgtgagtgggtctcccaagactaggcctcaggacgcggggggagccatccccgccgccctcacaggacccaccaggcagcggagacatgtggaattagagtattttgagggtcctttctttacaaaatanatgggtcttgggcatttcacatcactccatttctactgagactttcagaatcacacanggcccttccgtggatttcatttgnggcaaagaaacaaacgaa

SEQ ID NO: 22309 - DNA, 495 bp, Homo sapiens
  misc_feature (1)...(495): n = A,T,C or G
gggggtttnnngggcctcgaccggctgtggtgaagcggcagaacaggcaggttccctcgacccaggaccccctgttcccaggctatggcccccagtgccctgtagacctggcaggccccccgtgcttgcgacccctatttgggggtctgggtggctactggagggccttgcagaggggcagagaaggcaggaccatgacatctagggcctctgaactttctccggggcgcagcgtgacggctggcatcatcattgttggagatgagatccttaaggactggacctacagagacatctgggattttctgcgtcagctgtttgtcccatactgtatcctgtatgaccgaggatacacatcactggggagtcgggagaataccgtgcggaacccggccctgaagtgcctgagcccaggaggacaccccacataccgtccagcctatctactggagaacgaagaagaggagcggaactcccgcacatgacctcccaccc

SEQ ID NO: 22310 - DNA, 458 bp, Homo sapiens
cctttgccccgcgctgtatgaattcggcacgagaagaaacctttgttcaagaaaacggcagatgctctgttgaatccactggagattgtcctgatactaaggacaagtatcaaccatctttcctgtgaaaaattccctctcgtactttagttctgtggatccaaaatttatagcattcttctaccaccacaggggctcatatgacattaacagacaagacacttttcagaaagacaggcaacgtgttggaccttccggagcttctcagaagacagagggttttcttttgaggatttaaacctcagacacagggagctgacctattcaccttagaatcctctggggcacccattacagtgtctgtaccaaggaggcaacaaagaacggcggaacagactggagcagaaggaccacccagcagagccaagccaaatcactgaccctcagaggcctgatgt

SEQ ID NO: 22311 - DNA, 446 bp, Homo sapiens
attgccttccctgcgctgcaggaattcggcacgagcttaggtataccctggaagagctggggtgggggaggagggagcgtgaaggtagtgactcctgaacacacccaggtggaaccatctttggggaggagaggcccgtgtgaggggtctgatactccctttgtcttccctctctactcctcgctacacctgagccaggctcttgccaactctgttccagcctatggctttaggctagctgttaaatatgtgacccagcattagctcagcatctgtcagagcaagagaccaggtaatttctaagaacagggttctagcgatgggactgcccatttcctcagctgcagaggaggaaagggaaagggtaggcctgtagactaacgctgtttacacccttgttctgtcaaagcaattaaagatcacttgtgttgaaaaaaaaaaaaaaa

SEQ ID NO: 22312 - DNA, 462 bp, Homo sapiens
  misc_feature (1)...(462): n = A,T,C or G
tggggngnnannnnnaacctgacttcactgcggaattcggcacgagatttgatggagccggaacaagcagtggacctgacattgcccaaggttgaagcaatgaataaaagactgggctccttggtggatgagtttaaggagcttgtttacccaccagattacaatcctgaagggaaagttaccaagagaaaacacgataatgaaggttctggaagcaaaaggcccaaggtggagtattcataagaggagctgaagacccacatcagcaagggtacgctgggcaagttcactgtgcccatgctgaaagaggcctgccgggcttacgggctgaagagtggtctgaagaagcaggagctgctggaagccctcaccaagcacttccaggactgaccagaggccgcgcgtccagctgccctttcgcagtgtggccaggctgcctggccttgtcctcagccagttaaa

SEQ ID NO: 22313 - DNA, 447 bp, Homo sapiens
acttgacggcactgcgctgcacgaattcggcacgagctgcagccctggtgcgacccggcccgttgccgtagagatgggcagggctggatggagtggggtgcggtgagctgagctgaccctgcttcgccacggggactgcagtgaccccggcttgccggcagggcgggtaacaggttgagccagggtggggctgctcaggggcgtggagccgaggccaggatttctctgaagacccggcacaggctattcctttctgcgacgagcccattgctatggaaaccaaagcgttaggccagcggggattgaggctgcgggatcatgacgggtctctctcccgaagaaccttgcctaatgcttccccaagcggctacttgctgagcgaacccgcccacccgcctgaaggagagagttttccatggacacagcctatcagatagacgcagtctt

SEQ ID NO: 22314 - DNA, 479 bp, Homo sapiens
  misc_feature (1)...(479): n = A,T,C or G
gggtaggggttaatgaaagcctggactactgcatgcggaaancgnacgagccgnggcacaggtcacttttgacattttaatttatcactttgtgggaattaaaaccttagtctacatgttggcagcatctttacttggcctgggtttgcacccaatttctggacattttatagctgagcattacatgttcttaaagggtcatgaaacttactcatattatgggcctctgaatttacttaccttcaatgtgggttatcataatgaacatcatgatttccccaacattcctggaaaaagtcttccactggtgaggaaaatagcagctgaatactatgacaacctccctcactacaattcctggataaaagtactgtatgattttgtgatggatgatacaataagtccctactcaagaatgaagaggcaccaaaaaggagagatggtgctggagtaaatatcattagtgccaaagggatttn

SEQ ID NO: 22315 - DNA, 488 bp, Homo sapiens
  misc_feature (1)...(488): n = A,T,C or G
gaaagganncaggnnnnnnnttactgaaagcctggctgatcgcactagagaagccccanaatgcggcggacagttactcctgggttccagagcgagctgagagcagggccatggagaaccagtacagtccgacacctgggacagactgctgaaagtgaggtggccctanagacactagagtcaccagccaccatcctcagagctttgaactccccattccaaaggggcacccacatttttttgaaagactggactggaatcttagcaaacaattgtaagtctcctccttaaaggccccttggaacatgcaggtattttctacgggtgtttgatgttcctgaagtggaagctgtgtgttggcgtgccacggtggggatttcgtgactctataatgattgttactccccctcccttttcaaattccaatgtgaccaattccggatcaaggtgtgaggaggctggggctaaggggctcccctgaatatctt

SEQ ID NO: 22316 - DNA, 411 bp, Homo sapiens
  misc_feature (1)...(411): n = A,T,C or G
cctcgcaccccgnnttttaccccgcgctgcaggaattcggcacgagcccttggtgctctgtccccatccacctcctttcagctgctcctgggcctcagctctgcccagggccagccaggttctgctgggaagggaagggaatggggagaagggagaagcaagcagtgtctgagcctcaggagcttccccctccccctttgcctatcccctcccctctgcttgagccttgagccttgactgggagctgaaaggagttgcagctgttggcatgagacctccttctccccgtcttggggaggtggggaccagcagataaatcccacccttccttgagctgtcgctgtactctgaagttcagccagctcagattttataaaaattaattaaaatctcaaaaaaaaaaaaaaaaaa

SEQ ID NO: 22317 - DNA, 506 bp, Homo sapiens
  misc_feature (1)...(506): n = A,T,C or G
gggggggnnnnaattgcctggctgcggcattcgaacgaggacgacgaaaggagcagctgtgacctccacagctgtggctgtcatgcttgcttcatctaatttctagttagtagctattaatatagcaaataataaatgcagtaataacagtataaagtcagaggaatgtatactgccttggccccagcgtacgaggaagcgtataaaacaccatatcacagattgtctgtcagtaatctgctggtcacccaacagagttcaaagggagcagtttctgcatgtagggatgttggaagacacaaaccccacctcccctgggagcttgtaacaaagcagacagggatgcaaaaataaatgatgtcagcctgcagccaaactccagcatgccacaccgcatctgacccactgctcatcgcgagggcctgccaggagctggcctaccgcactacttgtgagtaaagtgaatatcanataccaatcttagagtacaactgtaccagcagtaa

SEQ ID NO: 22318 - DNA, 480 bp, Homo sapiens
  misc_feature (1)...(480): n = A,T,C or G
atttgccccgcgctgcaggaattcggtacgagcacccatcaggtaagccaagatgggtgcatacaagtacatccaggagctatggagaaagaagcagtctgatgtcatgcgctttcttctgagggtccgctgctggcagtaccgccagctctctgctctccacagggctccccgccccacccggcctgataaagcgcgccgactgggctacaaggccaagcaaggctacgttatatataggattcgtgttcgccgtggtggccgaaaacgcccagttcctaagggtgcaacttacggcaagcctgtccatcatggtgttaaccagctaaagtttgctcgaagcnnncagtccgttgcagaggagcgagctggacgccactgtggggctctgagagtcctgaattcttactgggttggtgaagattccacatacaaattttttgagggtatcctcattgatccattccataaagctatcag

SEQ ID NO: 22319 - DNA, 471 bp, Homo sapiens
  misc_feature (1)...(471): n = A,T,C or G
ggatgatnccttttgaannncactgagagtcttgcgagaanncgcacgaggaccactccctgcacctaagcaaagcgaagatttccaagccagcgccctactgggaaggaacagctgtgatcgatggagaatttaaggagctgaagttaactgattatcgtgggaaatacttggttttcttcttctacccacttgatttcacatttgtgtgtccaactgaaattatcgcttttggcgacagacttgaagaattcagatctataaatactgaagtggtagcatgctctgttgattcacagtttacccatttggcctggattaatacccctcgaagacaaggaggacttgggccaataaggattccacttctttcagatttgacccatcagatctcaaaggactatggtgtatacctagaggactcaggccacactcttagaggtctcttcattattgatgacaaaggaatcn

SEQ ID NO: 22320 - DNA, 506 bp, Homo sapiens
  misc_feature (1)...(506): n = A,T,C or G
tggcggannnnnnnnaattgacccgcgctgcaggaattcggcacgagcccggagtgttggatggggtcttcctgcccaggcacccccaggagctgctggcctctgccgactttcagcctgtccctagcattgttggtgtcaacaacaatgaattcggctggctcatccccaaggtcatgaggatctatgatacccagaaggaaatggacagagaggcctcccaggctgctctgcagaaaatgttaacgctgctgatgttgcctcctacatttggtgacctgctgagggaggagtacattggggacaatggggatccccagaccctccaagcgcagttccaggagatgatggcggactccatgtttgtgatccctgcactccaagtagcacattttcagtgttcccgggcccctgtgtacttctacgagttccagcatcagcccagctggctcaagaacatcaggccaccgcacatgaaggcagaccatgttaaattcactgaggaa

SEQ ID NO: 22321 - DNA, 514 bp, Homo sapiens
  misc_feature (1)...(514): n = A,T,C or G
aggtgggttttnnaattcgacgtcctgtangacattcgcacgagcatgagtatgctcaggcttcagaagaggctcgcctctagtgtcctccgctgtggcaagaagaaggtctggttagaccccaatgagaccaatgaaatcgccaatgccaactcccgtcagcagatccggaagctcatcaaagatgggctgatcatccgcaagcctgtgacggtccattcccgggctcgatgccggaaaaacaccttggcccgccggaagggcaggcacatgggcataggtaagcggaagggtacagccaatgcccgaatgccagagaaggtcacatggatgaggagaatgaggattttgcgccggctgctcaaaagataccgtgaatctaagaagatcgatcgccacatgtatcacagcctgtacctgaaggtgaaggggaatgtgttcaaaaacaagcggattctcatggaacacatccacaagctgaaggcagacaaggcccgcaagaagctcctggctg

SEQ ID NO: 22322 - DNA, 484 bp, Homo sapiens
  misc_feature (1)...(484): n = A,T,C or G
attgcccgcctgtggcaatgcctgcgagccatggcgtgctatttcgatgaacacgactgcgagccgtcggaccctgagcaggagacgcgaaccaacatgctgctggagctcgcaaggtcacttttcaataggatggactttgaagacttggggttggtagtagattgggaccaccacctgcctccaccagctgccaagactgtggatgagaacctccccaggacagtcatcataggctctcaggctgagctcaagtgccccgtgtgacttttggaatttgaggaggaggagactgccattgagatgccttgccatcaccttttccattccagctgcattctgccctggctaagcaagacaaattcctgtcccttgtgccgctatgagctgcccactgatgacgacacttatgaggagcacagacgagataaggctcgaaaacagcagcagcaacaccgactggagaacctccatggagccatgn

SEQ ID NO: 22323 - DNA, 481 bp, Homo sapiens
  misc_feature (1)...(481): n = A,T,C or G
gggtggcnnnnaagggaggggnttctgcccgcctgtctgattcgctcgagggggactggttcactttttcctcccaagtgttactgccactactgtaacttggaactggacatcagggatgatccctgctgttctttctagtgagcctgctccatctcagcttagccttcacaaggcctccatctcccaggcattctaacctctgaagaaagctctctgtcccctggactgcctgtgtggagggtaatgaactgggtcctttaaggaatggcacctgggtgcccagaggcatggccggaaggtgtctgtgggggccatgccttanggggatgcacccagggcggctgagagagcaactgcaggagtttcccctaaaatctctcctccagatcgttctcgaactttccccactacttccataataaaatgtatacttgttgaaaaaaaaaaaaaaaaaactcgagggggggcccggtcccca

SEQ ID NO: 22324 - DNA, 490 bp, Homo sapiens
  misc_feature (1)...(490): n = A,T,C or G
gggagtgccnnaagggagnnnnncccgacccgcctgtttgacttccctgcaagaattcggcacgagcaggctcggtggctcactcctggaatcccagcactttgggaggccaaggtggggggatcacgaggtcaggggatcgagaccatcctggctaacaggtgaaaccctgtctctactaaaaatacaaaaaaattaaccaggcgtggtggaggcgcctgtagtcgcagctactcgggaggctgaggcaggagaatggcgtgaacccaggaggcggagcctgcagtgagccgagattgctgcactgcactccagcctgggcgacagaggaagactccgtctcanaaaaaaaaaaaaaaaaagaaagaaaacttccgggggggaacggtttctggtttttaagaaaatggcatgggtggaaaaacggaactgcccctcccccttttaatggaccaaacccccttggttattttaactttttggcaggcat

SEQ ID NO: 22325 - DNA, 454 bp, Homo sapiens
gggaggcaattgaccccgctgctactagtcgctatgagcaaagacacaggccgctgccgctatgtgctggtacgcctcatccctgcacccaggggcactggcatcgtctccgcacctgtgcctaagaagctgctcatgatggctggcatcgatgactgctacacctcaacccggggctgcactgccaccctgggcaacttcgccaaggccacctttgatgccatttctaaaacctacagctacctgacccccgacctctggaaggagactgtattcaccaagtctccctatcatgagtgcactgaccacctcgccaagacccacaccagagtctccgtgcagcggactcaggctccagctgtggctacaacatatggtttttatacaagagaaataacgtgaattaagcgtgtatgtcaactgccctcactcttgtgtaatagaaatatattgc

SEQ ID NO: 22326 - DNA, 466 bp, Homo sapiens
attgcccgcctgcagatttcgcacgagccccccgagcgccgctccggctgcaccgcgctcgctccgagtttcaggctcgtgctaagctagcgccgtcgtcgtctcccttcagtcgccatcatgattatctaccgggacctcatcagccacgatgagatgttctccgacatctacaagatccgggagatcgcggacgggttgtgcctggaggtggaggggaagatggtcagtaggacagaaggtaacattgatgactcgctcattggtggaaatgcctccgctgaaggccccgagggcgaaggtaccgaaagcacagtaatcactggtgtcgatattgtcatgaaccatcacctgcaggaaacaagtttcacaaaagaagcctacaagaagtacatcaaagattacatgaaatcaatcaaagggaaacttgaagaacagagaccagaaagagtaaaaccttttatgg

SEQ ID NO: 22327 - DNA, 505 bp, Homo sapiens
  misc_feature (1)...(505): n = A,T,C or G
aggnnnnnnnnnnaaggaggngccnaaggcngccccctctgaccgcctgttggaattccgcacgaggggacaaggatgtgtaccctgagcccccgcgccgcacgccggtgcagcccaatcccatcgtctacatgatgaaagcgttcgacctcatcgtggaccgacccgtgaccctcgtgagagaatttatagagcggcagcacgcaaagaacaggtattactactaccaccggcagtaccgccgcgtgccagacatcactgagtgcaaggaggaggacatcatgtgcatgtatgaagccgaaatgcagtggaagagggactacaaagtcgaccaagaaattatcaacattatgcaggatcggctcaaagcctgtcagcagagggaaggacagaactaccagcagaactgtatcaaggaagtggagcagttcacccaggtggccaaggcctaccaggaccgctatcatgacctgggggcnctcagttctgccaggagtgcctggcc

SEQ ID NO: 22328 - DNA, 481 bp, Homo sapiens
  misc_feature (1)...(481): n = A,T,C or G
attgaanngccnattttgccccgctgcaggaattcggcacgagagaacaagcgccttacgaaaggcggcaaaaagggagccaagaagaaagtggttgatccattttctaagaaagattggtatgatgtgaaagcacctgctatgttcaatataagaaatattggaaagacgctcgtcaccaggacccaaggaaccaaaattgcatctgatggtctcaagggtcgtgtgtttgaagtgagtcttgctgatttgcagaatgatgaagttgcatttagaaaattcaagctgattactgaagatgttcagggtaaaaactgcctgactaacttccatggcatggatcttacccgtgacaaaatggtgtccatggtcaaaaaatggcagacaatgattgaagctcacggtgatgtccagactacccgtggttacttggcttcgctggtctgggtgggtttactaanaaacgcacagtcagatacgg

SEQ ID NO: 22329 - DNA, 495 bp, Homo sapiens
  misc_feature (1)...(495): n = A,T,C or G
agagcaggggtcctgnnccatggtgcatgagaacntccgcgaggccagnncgaggactcggtgttcgaggagaggccggagcggcggtcaggaccgcccgcgttctactgcgccaagctctgcgagccgcagtggttttatgaagaaacagaaagcagtgatgatgttgaagtgctgactctcaagaaattcaaaggagacctggcctacagacgacaagagtatcagaaagcactgcaggagtattccagtatctctgaaaaattgtcatcaaccaattttgccatgaaaagggatgtccaggaaggtcaggctcggtgtctggctcacctgggtaggcatatggaggcgctggagattgctgcaaacttggaaaataaagcaaccaacacagaccatttaaccacggtactctacctccagcttgctatttgttcaagtttgcagaacttggagaaaacaattttctgcctgcagaaactgatttctttgcat

SEQ ID NO: 22330 - DNA, 408 bp, Homo sapiens
gaattccgcacgagaaaagaagaggatgaaatagtgtgcacacaacactggcaggatgctgtgccttggacagaactcctcagtctacagacagaggatggcttctggaaacttacaccagaactgggacttatattaaatcttaatacaaatggtttgcacagctttcttaaacaaaaaggcattcaatctctaggtgtaaaaggaagagaatgtctcctggacctaattgccacaatgctggtactacagtttattcgcaccaggttggaaaaagagggaatagtgttcaaatcactgatgaaaatggatgacgcttctatttccaggaatattccctgggcttttgaggcaataaagcaagcaagtgaatgggtaagaagaactgaaggacagtacccatctatt

SEQ ID NO: 22331 - DNA, 474 bp, Homo sapiens
  misc_feature (1)...(474): n = A,T,C or G
atcgaccccgctgcaacgcgctttggcctgcgcgctgcgccgctcccagcccggatggagccgcaccgactgcgtgatgatcagcaccaggctggtttcctcggtgcacgccgtgctggccaccggctcggggatcgtcatcattcgctcctgcgacgacgtgatcaccggcaggcactggcttgcccgggaatatgtgtggtttctgattccatacatgatctatgactcgtacgccatgtacctctgtgaatggtgccgaaccagagaccagaaccgtgcgccctccctcactcttcgaaacttcctaagtcgaaaccgcctcatgatcacacatcanccggtcattctctttgtccttgtgccagtcgcacagaggctccggggagaccttggggacttctttgtcggctgcatcttcacggcagaactgagcactccgtttgtgtcgctgggcagggttctgattcagct

SEQ ID NO: 22332 - DNA, 485 bp, Homo sapiens
  misc_feature (1)...(485): n = A,T,C or G
agagtaggggtctnncctgatagcatggactgcggaancccacgagaattacctacagtggtggcgcttgcctgggccccagctgctccggagctgagctggaggatcactttagccggggaggcagaggctacagtgagccgagatggcacgactgcactccagcctgggcgacagggcgagaccctgtctcaaaaacaaaacaaaacaaaacaaaaggaaaacaaaataaaaagattctcgatcccnnaaaaaaaaaaaaaaaaaaaaaaaaaaaaaaaaaaaatctttgggggggggccgggcccccaattccccttaaaggggggggtaataaaatttcggggccgggttttaaaaacgggggggggggggaaacctctccnncctttttnncgcttggggtccccctctttttggtcttggttcggcctgccgggctggggtnnccccttttcttgtcccctggtcgggtttcttggncc

SEQ ID NO: 22333 - DNA, 468 bp, Homo sapiens
  misc_feature (1)...(468): n = A,T,C or G
aattgcccgcctgcaggaatcggcacgcgctgcatgaattcgtcacgagcagaagcgagatgactaatggaacgtcatcgtttggaaagcgtcgcaataagacgcacacgttgtgccgccgctgtggctctaaggcctaccaccttcagaagtcgacctgtggcaaatgtggctaccctgccaagcgcaagagaaagtataactggagtgccaaggctaaaagacgaaataccaccggaactggtcgaatgaggcacctaaaaattgtataccgcagattcaggcatggattccgtgaaggaacaacacctaaacccaagagggcagctgttgcagcatccagttcatcttaagaatgtcaacgattagtcatgcaataaatgttctgggtttaaaaaatnngggctgtgactagctgtgagatgcaagcgaacagaatttacgcctggcgcctgcttgctctctccg

SEQ ID NO: 22334 - DNA, 540 bp, Homo sapiens
  misc_feature (1)...(540): n = A,T,C or G
agggagttcgacggctgcagatttcgcacgagctgactccaaaatagtttcctttcttggatctgcaaagaaagcttttcttccgtcgctgcctcagcctcctccctatgcctctggcacctgcgcagcaaggctggctgtgctggagtcaccatcatcttcctctcccccagcctcccaggctggatggcatggactgtttgctgacctctgttctcttagggcatgggaggtgggaggatatcaaattctctagccctttcctcctattctcccaaggagagagattcccatttctcctcggccattgtacctagctcttgtccctagctgcatttcagtggaccatggatagagggactgagggttagacggggaagactggcagggaggcacgcaggtactgtgaaaatccttccctttgccctcccccagtgggagaaaggggggtgggtcaatgtgagaacagcacaataaacctgatgtctaaggcagtggccccccnnanaaaanaaaannnnaaaananannannnaaaag

SEQ ID NO: 22335 - DNA, 422 bp, Homo sapiens
aggagtcgcggctgagttcgccggactgcacgaattcggcacgaaggaaaaccctatgagtgtaatgcatgtggaaaggccttcaatcggagtgcacatcttactgaacaccagagaactcatactggagagaagccctatgtttgtaaagaatgtggaaaaaccttcagtcgaagtacacaccttactgaacatctaaaaattcattcttgtgtgaaaccctatcaatgtaatgaatgtcagaaactgttttgctatagaacatcactaattcgacatcagaggacgcatacaggagagaaaccctaccagtgtaatgaatgtgggaaatccttcagcttaagctcagctctaactaaacataagcgaatacatacaagggagagaccctatcaatgtaaaaaaaaaaaaaaaaaaaaaaa

SEQ ID NO: 22336 - DNA, 332 bp, Homo sapiens
  misc_feature (1)...(332): n = A,T,C or G
taaacaccctaattcattctcaagtcggagcaacacataccaaccttgaccttatcctcaagctccagggcagcctggccgagcagcccctgctccctcctggagacccttgtcacctcccgagctcctcctggagacccctgtcacctcctgaccaanctttcccagggcggcaccgatcaccgagcagccgtgcgtgtatctcaaggaactaaataagatgacgctactcctcatagcaccacaacctgaatgtgtgttcatatttttttgttagttttatccaaaatgtttaagatcccaacaaactttattttctaaacctgcaaaan

SEQ ID NO: 22337 - DNA, 472 bp, Homo sapiens
  misc_feature (1)...(472): n = A,T,C or G
ntttgacccgtttgtcccgcactgcaggtttttaaaaaaaaaatccagtttaaccttttcctagttttgcatttcaaaaaggtgcaccaaaacactgacattttttttctagctcaatctgtaaaacagagtatataaatcaaaaaacaaaagggctttaaaaaggggagtatctgaataaatgtgtgtattaaaatgtgtagcattaattcatacctctagttttgttgggtttacttcattaagaagtactgtaatataaaggcaaataaaatggacaaagttgcaaagccaagcacaatgatggctgcaaactgttcatcagtaggcatcatgctcttcattttgggatcatctaagctccccatgtcccctgtaagcatgacctcacttcgttgtaatacaaaagccgcaaaggggctgaaggctccgcttagctcctgagaggtgtctaaacagcgacgacacgcac

SEQ ID NO: 22338 - DNA, 405 bp, Homo sapiens
tgtgcagatgtggacgagtgctcactagcagaaaaaacctgtgtgaggaaaaacgaaaactgctacaatactccaaggagctacgtctgtgtgtgtcctgacggcttcgaaaaaacggaagatgcctgtgtgccgccggcagaggctgaagccacagaaggagaaagcccgacacagctgccctcccgcgaagacctgtaatgtgccggacttaccctttaaattattcagaaggatgtcccgtggaaaatgtggccctgaggatgccgtctcctgcagtggacagcggcggggagaggctgcctgctctctaacggttgattctcatttgtcccttaaacagctgcatttcttggttgttcttaaacagacttgtatattttgatacagctctttgtaataaaa

SEQ ID NO: 22339 - DNA, 461 bp, Homo sapiens
  misc_feature (1)...(461): n = A,T,C or G
actagacnccccttgatcgcnttcgcgaattcggcacgagctcgggtgaggagctggtggcgtcggcaggttcgaggcgattcgagctccagctaggatgatcgaggttgtttgcaacgaccgtctggggaagaaggtccgcgttaaatgcaacacggatgataccatcggggaccttaagaagctgattgcagcccaaactggtacccgttggaacaagattgtcctgaagaagtggtacacgatttttaaggaccacgtgtctctgggggactatgaaatccacgatgggatgaacctggagctttattatcaatagatgagaatcctcatcttcctgccccgctttcctctcccatcctcatcccccacactgggatagatgcttgtttgtaaaaactcaccttaataaagacttagatgttgctaaaaaaaaaaaaaaaaaaaaaaactcgcggccg

SEQ ID NO: 22340 - DNA, 515 bp, Homo sapiens
  misc_feature (1)...(515): n = A,T,C or G
agtnnnnnnnnnnaaggagnncccnnnagggggngccnaattgatnncctcatagtatcgcctgcaggaattccgcacgagcaaggcgggcccggagcggaacttcggtcccagctcggtccccggctcagtcccgacgtggaactcagcagcggaggctggacgcttgcatggcgcttgagagattccatcgtgcctggctcacataagcgcttcctggaagtgaagtcgtgctgtcctgaacgcgggccaggcagctgcggcctgggggttttggagtgatcacgaatgagcaaggcgtttgggctcctgaggcaaatctgtcagtccatcctggctgagtcctcgcagtccccggcagatcttgaagaaaagaaggaagaagacagcaacatgaagagagagcagcccagagagcgtcccagggcctgggactaccctcatggcctggttggtttacacaacattggacagacctgctgccttaactccttgattcaggtgttcgtaatgaa

SEQ ID NO: 22341 - DNA, 474 bp, Homo sapiens
  misc_feature (1)...(474): n = A,T,C or G
ccctcgcaccgccctgcagttagacccgcgctgcaggaattcggcacgaggtgacatgcctcgtatgtgttagagggtggaatggatgtgtttggcgctgcatgggatctggtgcccctcttctcctggattcacatccccacccagggcccgcttttactaagtgttctgccctagattggttcaaggaggtcatccaactgactttatcaagtggaattgggatatatttgatatacttctgcctaacaacatggaaaagggttttcttttccctgcaagctacatcctactgctttgaacttccaagtatgtctagtcaccttttaaaatgtaaacattttcagaaaaatgaggattgccttccttgtatgcgctttttaccttgactacctgaattgcaagggatttttatatattcatatgttacaaagtcagcaactctcctgttggttcattattgaatgtgctgtn

SEQ ID NO: 22342 - DNA, 466 bp, Homo sapiens
  misc_feature (1)...(466): n = A,T,C or G
atagaccngctgtgaggcattcggcacgagttggaaatgcccagtcctctacaactgtaactgtgttagttgaacccactgtgagcctgataaaagggccagattctttaattgatggaggaaatgaaacagtagcagccatttgcatcgcagccactggaaaacccgttgcacatattgactgggaaggtgatcttggtgaaatggaatccactacaacttcttttccaaatgaaacggcaacgattatcagccagtacaagctatttccaaccagatttgctagaggaaggcgaattacttgtgttgtaaaacatccagccttggaaaaggacatccgatactctttcatattagacatacagtatgctcctgaagtttcggtaacaggatatgatggaaattggtttgtaggaagaaaaggtgttaatctcaaatgtaatgctgatgcacatccaccaccctt

SEQ ID NO: 22343 - DNA, 471 bp, Homo sapiens
cgcgtgcccaattgacgatcttaggacttcggcacgagcatcttttgggaagcaccagggagagctgcctgtgcctggcagaagctgcccatgccccactgataccccacagtacttcctgttctgcttagtactcctgcttctttctacaaacaactgtgattctctacctgggagcttcctctggccacaggagcctgctcacctgattgggacaccctagcagtactggctcatagatggaagggacttgccttgtcgctgatgagactttcgacttggacttttgagtcaatgctggaatgagttaagactttggggaactgttggaagggtgtgattgtgttttgaattgtgaggacatgagattttgaagaggctaatggcagcgtccccacctacatctcttcttgaatgtagttcccataatccccacgtgtcgtggggtggagcccgtggagataattgaac

SEQ ID NO: 22344 - DNA, 405 bp, Homo sapiens
cgagatcggctgtgggagagaggctaggcctctgaggaggcgaatccggcgggtatcagagccatcagaaccgccaccatgacggtgggcaagagcagcaagatgctgcagcatattgattacaggatgaggtgcatcctgcaggacggccggatcttcattggcaccttcaaggcttttgacaagcacatgaatttgatcctctgtgactgtgatgagttcagaaagatcaagccaaagaactccaaacaagcagaaagggaagagaagcgagtcctcggtctggtgctgctgcgaggggagaatctggtctcaatgacagtagagggacctcctcccaaagatactggtattgctcgagttccacttgctggagctgccgggggcccagggatcggcagggct

SEQ ID NO: 22345 - DNA, 446 bp, Homo sapiens
  misc_feature (1)...(446): n = A,T,C or G
nattgaaaatcgatccgcgctgcgcgaattccgcacgagcctaacattaaaaaatttcactgatctttctttcattaacagggtagaatctcctaatttccactttcttgggaatatacttttatagacaatagaagcagttctcaatattagcatatactttaaaaaatcaaagtgataacttaattcagctttggaagtatctcaaacatatttttactttatagtgcattaacttgcttctagagtacttaatgcaactgctctagccacttaattttttatactaatctcaacattaagaaatttggattaagtaataaattagttatgtaattcaagtaatctgaattacagcagtacttttagtgatcattcataggactatatattaacccagctaataactcagtttttttacaaaatgtttcgagtattattgggaa

SEQ ID NO: 22346 - DNA, 507 bp, Homo sapiens
  misc_feature (1)...(507): n = A,T,C or G
aggggnnnnnnnaaggaggggccnnaggggngnntttatgaccgccttctgaattccgtcgagggaaggtgagaatgtggtatgtgtgtgtgtgtagagccccctgcaggagatgaagccccagagaaacacagcggaccttctgccaaaactcaagtccatggccctggctgacagagctgtgtttgaaaagggcatgaaagcttttgtgtcatatgtccaagcttatgcaaagcatgaatgcaacctgattttcagattaaaggccttgctcgaggttttgccctgctgaggatgcccaagatgccagaattgagaggaaagcagtttccagattttgtgcccgtggacgttaataccgacacgattccatttaaagataaaatcagagaaaagcagaggcagaaactcctggagcaacaaagaagagagaaaacagaaaatgaagggagaagaaaattcataaaaaataaagcttggtcaaagcagaaggccaaaaaaaaaaaa

SEQ ID NO: 22347 - DNA, 475 bp, Homo sapiens
  misc_feature (1)...(475): n = A,T,C or G
tggggnaaggggnnaattgcttgatggcttagaattcgccgagcaaacatctccatgacacggtcctccaatgccacttcacctgctccgggaagcaggagtcaatgaattccaacgtcagcgtgtaccagcctccaaggcaggtcatcctgacactgcaacccactttggtggctgtgggcaagtccttcaccattgagtgcagggtgcccaccgtggagcccctggacagcctcaccctcttcctgttccgtggcaatgagactctgcactatgagaccttcgggaaggcagcccctgctccgcaggaggccacagccacattcaacaacacggctgacagagaggatggccaccgcaacttctcctgcctggctgtgctggacttgatgtctcgcggtggcaacatctttcacaaacactcagccccgaagatgttggagatctatgagcctgtgtcggacagccagatggt

SEQ ID NO: 22348 - DNA, 491 bp, Homo sapiens
  misc_feature (1)...(491): n = A,T,C or G
attggccccgcgctgcaggcttttattacctggcgctcagcttccccatcagtgaaaaggggtggctagagtaactaacctcagcaggccgtccagtcctgatagtctgtggatttcggatccttctcaggaagcttcatgtctaatggagactataattataactcctgttctgcatagagcatttgcatcaaaggctttccatacccctccctcccctggtcctcataagatccttgaagcaggttcctattcctcattggcaacatggcaaacagatcacaggagtcaaagggccttgctcaaggtccccagcttcagccccaggccctaagccagcgtcagaacannnnttctgcatttttcatcagtcattctatagtgacatcatcccagactgccttctgtattcccctgtgtacagtctccttctgtttctaggtttagaagttcagaggtgactggtgttctccatttccacagccaaatgg

SEQ ID NO: 22349 - DNA, 512 bp, Homo sapiens
  misc_feature (1)...(512): n = A,T,C or G
aggtggcccnntttggacccctttgctcggcttcggaattcggcacgagcaggctatgacgtagttgcacagacagcagatggtgtggatgctgacctctggaaagacggcttatttaaatccgaggttaccagatacctgtgtttcacaagatcattttccaaagaaaatagtcatctggggaacgtgttagtagatatgaagctcattgacatcaaggacacactgcctgtgggcttcatcccaattcaggagacggtggacacacaggaagtggcttttaggaagaagaggctgtgcattacatttattccacgggattcaacggaagctgcgatttgtgacattcggatcatgggccggaccaagcaggccccgcctcagtacacgtttattggggaactgaacagcatggggatctggtatcgaatgggcagagtaccaagaaatcatgactcatctcaacccacaacgccttcccagtcatcagctggctccaccccagcccccaa

SEQ ID NO: 22350 - DNA, 471 bp, Homo sapiens
  misc_feature (1)...(471): n = A,T,C or G
aattagcnccgcgctgcaggttttttttaatatcaaaatatattttattctggacctctttcagatctgattcaaattacagttgtcaaagcaatacaatgcaaaggggaactgcaacaacaacaacaacaagaaatgtgcctagaaaggataaaagggtcactggggacaaatcattgtgatgtggaactaaaatacgtcgtaagtgtaattaacatggtccaggacagcacagaacatctacatcagtcttccttacacaataatcatgaaaactgaacaatgaagttctttaacatgtacaaaaacctgtcatgggctggtttacacttttacaacagttttaaagttaactggataactaaagaaatgatgcagacattttaatccagtgctataggtaggctcacagaattagacccaaaggatttgtaaaaacaaaaatggaaacagtatagctacaatgtcaan

SEQ ID NO: 22351 - DNA, 473 bp, Homo sapiens
ccttcgcccgcccctgcgttttgatccgcgtgcgtgaattctgcacgatcaatgattgataatttgtgacactgtaaatcctgaggtttatagaaaggattcatgactttgtaatggagttaggatccatcagagaagcagaactactttgtgagctaaagacctatggaattgtgggaggtggcagagcggtctgcagacttgcctctgagtctcttgttcagcctgaagttgctgcagatctactagactggcagtcagacagggatactggatgtggatgagagaaaagacaaactgaaacccttgggaacaaaacggaacctgcatcagcctctcaccaaccctagttttgatgcttgagtaacctgcaggagaggatgacactttcgatgtcagagctgcacttgtgggcccaggatttggagaagtggagagaaggtctgatgggagttgaaggagctgcaggtccc

SEQ ID NO: 22352 - DNA, 357 bp, Homo sapiens
  misc_feature (1)...(357): n = A,T,C or G
agtnnnnnnnaggggnnnccnaggcnnnnnncntttagacccccttttgtattggctccagaanntcccacgaggtttattacttatgataaagaattaaacgatgataaactcaggaaaaggaagactctcgtacataatataagataaaacaggactgcgattagcaactggataaaatacgcacaatgggaagaaagcctaaaggagattcaaaaggctcgatccatatacgaccgtgctttagatgtagactaccgaaatattacactctggctgatatacgcaaaaatggaaatgaagaatcgccgagccaaccatgctcgaaatatctgggaccgagccataacaacgctg

SEQ ID NO: 22353 - DNA, 411 bp, Homo sapiens
  misc_feature (1)...(411): n = A,T,C or G
gaattccgcacgaggacagagtgaaaataaagcttggagtgagtaaaagtgacagactctacgccatgaaggccgaggtcttggctcgtgccggcatccccacttccagtgtttttgcattgcattttaccgagccgcccatctctgctcagcttttggcttttctccgagtattctgtatgactgaagaagaactgaaagaacacttgctgggagacagcgctattgatagaatcttcaccttggggaactcggaatttcctgttagctgggacaacgaggtcaaactttggacatttcttgaagatagagcctcacttcttttataaacatataaaacaactattgaggaagataaatccgtcttgaaaaaccacgatctttctgttcgtgcaaaaatggccatcanat

SEQ ID NO: 22354 - DNA, 466 bp, Homo sapiens
  misc_feature (1)...(466): n = A,T,C or G
cctcgccacgcctgcagtaagttcgcacgaggttgttttgtcacctgaattcttggtgccttcacattgttcaaaataatttgctcacgaaatgtcactcttaaacgtggctggtgggagggtagattggtacaactctggagagagtccagcaatatttctcaaattacacataccgtctagcccagaaattccaattgctggaatttagctattattttatatgtgcaaagtggcatatatatgccatatagataaggatagtcatttagtatgacataatagaaaaaagcttggaagcatcctatatatttcattaatggtgattaagtaaagtgtgtgatacaagtgtagaatggagtattaaattgccttaaaaaatgaagtgttctgtatctgtaagataaagaatgaatcaccaaaatacataaaatgacaaaactggctgggcatgttggctcacgcn

SEQ ID NO: 22355 - DNA, 509 bp, Homo sapiens
  misc_feature (1)...(509): n = A,T,C or G
tttggggggnnnnanntttgaacggctgcggaannnncnnaanatttgcaccggctgcaggaattcggcacgaggcagagtgaactatgcaactagattaagaggtctaaatatgaaataccagttgaggctgaggacctcttcgtcttcctttaaatgtcttttgcctagggagtgtttaccatttgtgaggcagctttgtctgctcttacactgtacatcctattactccattgggaagtaggttcactttcctctggccttttgcctaagttaggctttgctgaatcaaccctacttttccttttagaaaagggtgttacaggagatttactggcaactgttcttttcccatcaaaaatcagtgaatgtttgctgagtataaatgctgcttccttaaaccacttgtcgctttaggatcaactttacctgtaccttttctcctttcctcccttgccacctcaggtgcaaatctgaactcagtgtctgcttcttccattttctcgtct

SEQ ID NO: 22356 - DNA, 408 bp, Homo sapiens
cagtggcccccatgacgcataactcctggaggtagcagcagctcctgccccagagtggtgtcctctggcagcccagccccaggctctgtgacagcctattgagggctgcaagaccatcctgcccggaccacagaaggagagttggcggtcacagagggctcctctgccaggcagggggaagccctgggtttggcctcatgagctgggggtgcagagggggactgccctagtccttgccaggtcgccagcaccctggagaagcatggggcgtatccagctcggaacttgccaggccccaaaggccacgactgcctgttggggacaggagatgcatggacagtgtgctcaagctgtgggcatgtgcttgactgcggtagaggtccttcactgtatgtacacagcatgatc

SEQ ID NO: 22357 - DNA, 508 bp, Homo sapiens
  misc_feature (1)...(508): n = A,T,C or G
tcggtaaataatnaaaatannnattaaaaaaggggngaaaaaggattgaannacaattggacccggctgcaggaattcggcacgagcagcagcctccaacacaaggctccaagacctaggctcatggacgagatgggaaggcacagggagaagggataaccctacacccagaccccaggctggacatgctgactgtcctctcccctccagcctttggccttggcttttctagcctatttacctgcaggctgagccactctcttccctttccccagcatcactccccaaggaagagccaatgttttccacccataatcctttctgccgacccctagttccctctgctcagccaagcttgttatcagctttcagggccatggttcacattagaataaaaggtagtaattagaaaaaaaaaaaaaaaaaaaaaaaaaaaaaaaaaaaaccctggggggggggccgggccccaaatcccccttaaaggggggggaataaaaaaaaaggggcc

SEQ ID NO: 22358 - DNA, 408 bp, Homo sapiens
  misc_feature (1)...(408): n = A,T,C or G
cgagaagatggcggcacccgaggaacacgattctccgaccgaagcgtcccagccgattgtggaagaggaggaaactaaaacatttaaagacctgggtgtgacagatgtgttgtgtgaagcttgtgaccagttgggatggacaaaacccaccaagattcagattgaagctattcctttggccttacaaggtcgtgatatcattgggcttgcagaaactggctctggaaagacaggcgcctttgctttgcccattctaaacgcactgctggagaccccgcagcgtttgtttgccctagttcttaccccgactcgggagctggcctttcagatctcagagcagtttgaagccctggggtcctctattggagtgcagagtgctgtgattgtaggtggaattgattcaatgtn

SEQ ID NO: 22359 - DNA, 472 bp, Homo sapiens
  misc_feature (1)...(472): n = A,T,C or G
ccttcgcccgccctgcagtttgatccgcgctgcaagagccacttctcctgccgggctgtgcccagaattcctgagcctcacagacctctgcactgtccttaaggaggcatgttaaggggctgaacatgtgcctggacctttgccttgcactgagggcaaatcttgtgactctggagggaattgtgacccagccaacacctcccctacaagatatgcattgccaggcctctgcaggccccagccctggcctccaagcaagatggtttgtcactctgcacctgtgtctccacaaagaagattcctgtagactcgtgggcctcgggtcccccactcaggtagtgcttcctcacctgctcagaagtcaggctgcacctggacaagaacacaagggtggcttagtgggtgaccagcccctgcggggtacctgtggagccacagctgcctcagcccactcctcaccacccacctttcn

SEQ ID NO: 22360 - DNA, 471 bp, Homo sapiens
  misc_feature (1)...(471): n = A,T,C or G
nttagaacgcggtagccgcgctgcaggaattcggcacgagcctgtgcagcacttcctctctccgatatctccctagctagcgcatgaccctaccttttctactcaaagccctcgaggcttgtaaacacctcgcaggccttgtgaaaatcaagtccacaaatccctccgtcagaatttttatcttgggaagcgcaaggtcaaaagcatcaagtacgctttgagacaattctggctctgtagaacctgaggatggtatatctgaaaacgaggatggatcagtataaacttgctaacagattcatttttggagggccagttttaagccgaacggttagggaaacagaaaaacaaaccagtggagataaatgtttattgacactacaaaagctcagagactttcctaatcttaatcctttctggataccaggaatcacttaaaaatctgtgtataatgcccccaaacatatacaa

SEQ ID NO: 22361 - DNA, 466 bp, Homo sapiens
catagccccgcctgcattaattcggcacgagaatgtaccgagaccttggagagccacgaaccaagaaacttcagaaacctctgatatctgatcaagagttaagagacgtcagaatcatcacaactgacaaaagaatgttttctctcttcaagattctcttttgaaagacatctaaaaaggggttaagcatctgaaaggccagaatgaatcagcattccctgaagaagaagaaggcaccaatgaaagagaggagcagcgggaccattaattactggtctgcagcaagaaggcttcttggaaataactgaactattaacttttctgagtataccatggaattccactgcttgacttccagaagcatcctccatctctgcaccccacactcatacagtagctatgcacatcctggaagtctccttgactgaactttagaactaagtacacattgttccacatcacttat

SEQ ID NO: 22362 - DNA, 554 bp, Homo sapiens
  misc_feature (1)...(554): n = A,T,C or G
tgacaagatagcacgagatatgatggataaatgatcaccgatacaatgaacttacatcacccaccgtggcacancggagaaaaaaacttgacncgcctgcgagattgcagcacgatcacattccgcgggaagacctctgagtgcagggaaatcagacaagcaggccgaccaaacaagccagactccatcactgtggtcatcaccaaggtaacagacagctaccctgagccaacccagctcctcatggggaccaagtctgtgtgcgaagtaggcagcaactggttccagcccatctacctcggagccatgttctccttgcaagaaggggacaagctaatggtgaacgtcaacgacatctctttggtggattacacaaaagaagataaaaccttctttggagccttcttactataggaggagagcaaatatcattatatgaaagtcctctgccaccgagttcctaattttctttgttcaaatgtaattataaccagggggtttcttgggggcgggagtagggggcatttcacaggaacaacgggttagctatgaag

SEQ ID NO: 22363 - DNA, 412 bp, Homo sapiens
gcttgacatctgaagagggacaagaagatgaggatgaagaggatgaagaagatgaagatgaagaagaggaagatgaggaagaagatgaggaagataaagatgcacactcgctggatgagggcttggatggtgacactgagctgccaggttttaccctccctggtatcacatcccaggaaccaggcttagaggagggaaacatggacctgttggagggagctacctaccaggtgccagatgccctcgagtgggaacagcagaatcaaggcctggtgagaagctggatggaaaaattaaaagacaaggctggttacatgtctgggatgctggtgcctgtaggggttgggatagctggagccttgttcatcttgggagccctctacagcattaaggttatgaatcgccgaaggag

SEQ ID NO: 22364 - DNA, 469 bp, Homo sapiens
  misc_feature (1)...(469): n = A,T,C or G
nataganccgctctgcaggctctctctctcgtttttttgaggcacattcctttacaaccagagtttaaaccaccacgtaatcatcttctgcaaacaaggggtgccagtgttgcctaacagaagataatctttaataaagcaaatcctctgcttcaaaggtttttgaaataattggatccctttttgaaaaggaagatgagtttaactgtgtccaggtggagtaatagtactgctgttgcatgaatagatgatacaaagcaagtgatgaggttggtatgacttctttagtgaccttttagggtttgcttttattttcctctcttttttgtattatttctttcaaacatagtaaatatatgattttaccgcccccnnaaaaaaaaaaaaaaaaaacaaaccaaaaaaaaaaaaaaaaaaaaaantttctggggggggggcccccccccccatccccccttaagggggacat

SEQ ID NO: 22365 - DNA, 482 bp, Homo sapiens
  misc_feature (1)...(482): n = A,T,C or G
nattgaccgcttganggccntgcgggaaatccgcacgagccagcctccagcagatctctgcatcttgtactcaatagcaaccattagtattgtcatttaaaaagaatgaatcaaaaattcatacgtaatggaatgaaaagaggaaaactttctattaaacactgtcaagaaagacccattgctatctatcacctatgaaattaaacctaaaaaaatttttttttattgtaaaagcgactgctcgctgatgtctggaagtgatccagactttgtttcactgtgatccaaaaagttagacattccttccatttctcaagatttggtcacaatttttttttaagtcagcatttcatataatacataaaattaagacaaattaacttactgatatgtggccaatatcaacccttctcacccaacccaaacatgttctggagatagaaggacttatcctcaattatattccagtaaatttatctccn

SEQ ID NO: 22366 - DNA, 463 bp, Homo sapiens
  misc_feature (1)...(463): n = A,T,C or G
ccccccattgaatccaccgcctcagcctccgcccctcccaccgttcaatgaaagatgaactggcgagaggtctgttttgcctgaacccatcaacagctgggagattaatcaaccacactgaaaatgtggagggatttatgggggagggggttgaaatgtggtgtttgaaacacaagtgtataaacaaacgaattgttgataacttagttattgacctggagactggtagcttattaaagaaactccgcgttactcattcctggagttgcgggtttctgtaggcactttatttctccactttcaagagcttgggcttggcccaaatcttagactgtccaattctgcctctattaccaatttaaatctatggcttgaacctgtgcactgaaaatcaaatcctttaaaaagaaagaggagaacaagaagcanaaaaaaaaaaaaaaacctcaaggggggccccggc

SEQ ID NO: 22367 - DNA, 501 bp, Homo sapiens
  misc_feature (1)...(501): n = A,T,C or G
tggttgtaatttatatggggattaaaagggaaaaaaaaggttgaanacaatttgccccgcctgcaggaattcggcacgaggtgaaaaggagcaacgtagttttgggttttttgttgtttgtttgttttgctttgttttttaagagattaaaatgtttctggataaggattagcttctcgaagtgtccatcattctgtgtagaagcttaaatatgtaatgtaaccaaactccagtattaaaaatctctcatgttgttttctttatacaaagcaagataacggcatataacactgccattacatggcaaaatgtttgctaccttagtttaaaaaacaatctcaaacaaaagacttgcttcaaggtgtttttaaatagcagtgattcagaattttttttaatgaaagtataattgcactaaccttcttcctgctgctctgattctgcatttgtggtacttgtgactacgttttttcaaatatagatagatttaagctgctaatt

SEQ ID NO: 22368 - DNA, 485 bp, Homo sapiens
  misc_feature (1)...(485): n = A,T,C or G
aggggcncgngaattgannnccatttgagcngcgctgcaggaattcggcacgagggattacaggcgtgagtcaccgtgcctggccaggcttttaaatattttataattgaactacattttcttacctcagcccatctggggaagcagttaagtaaggaatgtacatgattggacaaacttaccccttaatggtgcttctgtttcttgtagtttaaagtccttgggtagcttgtctttttttcagataaatgctcaattctttgcattttcccctccttgtccttccatggcaatgggagcaagactgcagactggtcctgattctcttctgccccaggtggttggtttatctagtcttgtgcctggactagccttagcttttattcttgccatctctccactctggggagtcttagtctctgcattacccccactgggtcacagganagctcaggatccactgcataacatacgcatggggctgt

SEQ ID NO: 22369 - DNA, 501 bp, Homo sapiens
  misc_feature (1)...(501): n = A,T,C or G
gagggaannnnnntttggacgccgcggaagnccncanntttgcccgcctgcgngattcggcacgagctgaacccaagcacattgtggaatggaatgtatctctgttttctatcctcttggctcttggtggaattgaattcatcttgtgtcttattcaaataataaatggagcgcttggaggcatatgtggcttttgctgctctcaccaacagcaatatgactgctaaaagaaccaacccaggacagagccacaatcttcctctatttcattgtaatttatatatttcacttggattcatttgtaaaactttgtattagtgtaacatactccccacagtctacttttacaaacgcctgtaaagactggcatcttcacaggatgtcagtggttaaatttagtaaacttcttttttgtttgtttagggcacaaaagtttcatcttttcagtaaaaactaaccattatattgaaaaaaaagtctcggtggggggggcccccctcc

SEQ ID NO: 22370 - DNA, 472 bp, Homo sapiens
  misc_feature (1)...(472): n = A,T,C or G
ntagaacngttgacccgcgctgcaggaattcggcacgagtctctctctctctctctctctctctctctctctctctctctctctcgccctgatgccccgtgggggcacatatcgtatgcctagggcagaaaggaagtgagaatggcgaatatgtcacattcctcggtgatagaccctgttttttcttaacaaggtgacgcgtgtatagagcaagaattggttctccagcagtgtgtctgtacacctgagataaaaaaagatgtcgcggaagccgctatacacactcgctcaaaccctgcgaaacaaataaaaaatacaaaaataaaaaaaataacttcctgggggggggggcccccccccatttttttttttggggggggtaaaaaaaaatccgggggggggcttaaaaaacgggggggggaaaaaaaagggcccgctccccaccccaattttcttgtaatcaggggccctg

SEQ ID NO: 22371 - DNA, 461 bp, Homo sapiens
  misc_feature (1)...(461): n = A,T,C or G
agggcnggnnccccattcgtttgcaccgcctgcaggaattcggcacgaggcgtcgctctctggtaaaggcgtgcaggtgttggccgcggcctctgagctgggatgagccgtgctcccggtggaagcaagggagcccagccggagccatggccagtacagtggtagcagttggactgaccattgctgctgcaggatttgcaggccgttacgttttgcaagccatgaagcatatggagcctcaagtaaaacaagtttttcaaagcctaccaaaatctccctactgccaataaagggaaaataagagatgctcatcgacgaattatgcttttaaatcatcctgacaaaggaggatctccttatatagcagccaaaatcaatgaagctaaagatttactagaaggtcaagctaaaaaatgaagtaaatgtatgatgaattntaagttaaaaaaaaaaaaaaaaaa

SEQ ID NO: 22372 - DNA, 472 bp, Homo sapiens
  misc_feature (1)...(472): n = A,T,C or G
ntcgaccattgaccggntgtcggaattcggcacgagcagagactgacttcaacagtgctccaaaatggggtatcagagacctaggatagttgatatagatggaaagatgggtacgttgtcctgtatccagcctttcaacagatgtctggccagacgaagaacattgtgtcctaatggtaggcatgagaccaaggagcagaaggcttgccttcctgggagcaggatgtttgagctgttttagagcagtgagccctaccattacatcctgatatctggggcttctgaaggtctgtgctgggagtgaagagaggcttaactatttacccgctctttggggacagggcaaactaaatgcatcccttcttacctaactcccaacccctgccctgggctgaggcatatgaatgctatagttgtgcattaaaataaatgttttttatctcctggaaaaaaaaaaaaaaaaagagaaaaa

SEQ ID NO: 22373 - DNA, 495 bp, Homo sapiens
  misc_feature (1)...(495): n = A,T,C or G
aggggnagnnngccgnnnnnnnnnaattgaccactggaggacntccgcacgagcttgcacctactcgaggctgaaagcagctatagacaatacatacatgaatgagcgcgagtgtgctccaatactaaaaaaacatggctgtttgcttcggccccagggttgtagcttaccagacctgtaacagatcacagtttgctcttttggtcacaaatacttgaacccctccctacttcagagcatttgataccgtaatattgatagctcacttgaaaaacatcttttgttgcctccatccatagtatctcaaacagaatgtctctcccaaatatacctaaattccatattctctgaagcacaaccagctattttcttgacatacttcctaacacaccccacagttcacaatttgatctgaaaacttgttaagggaggttctttggcatgtgatgccataaaaagagaggtatgggctctcctttaaaaaagagacccttc

SEQ ID NO: 22374 - DNA, 446 bp, Homo sapiens
  misc_feature (1)...(446): n = A,T,C or G
nattgaaaatcgatgcgcgctgcacgnnnttctttgctgatacaggtttgattttaatcacgtaaagtggaagagtgctttgatctcagttgctaatgatgatggactaatctttaaaagaacggaggccttgattggtgatttcatgggaacaaaacagatttctgcattacctctgcctgctttgtgggtcccttagttggcgtacactttctgatagtgcctgccttatgaatgcctgaagtctaatcctgaccttactttgttgcccataaatatctttcaaattgaatgcatcttgcctcttcctgaaactttctgtaggcgtctgtgtagactctgatttgccctaagttcaaatacacagaaatcagctgccttgggcttggcatcaagttaatttcagcaccatgtatttgttttgctttggttttttgccttaattn

SEQ ID NO: 22375 - DNA, 470 bp, Homo sapiens
  misc_feature (1)...(470): n = A,T,C or G
acgtgccaatgcacgtctgcggcattcggcacgagcgcactgcgttcatgtcttcatatttgatatatttgtgaaagaacagatttaccagatctaaatagccaatggctgattatgctctcacacaacatgattagactaattcattaatggcggcttcaagcttttccttattggctccagaaaattcacccaccttttgtcccttcttaaaaaactggaatgttggcatgcatttgacttcacactctgaagcaacatcctgacagtcatccacatctacttcaaggaatatcacgttggaatacttttcacagagggaatgaaagaaaggcttgatcattttgcacggcccacaccacgtggctgaaaagtcaactactacaagtttatcacctgcagcgtccaaagcttgctgaaaagcagncttgctctcgatctgcttcaccatcttggctgctggagtctga

SEQ ID NO: 22376 - DNA, 479 bp, Homo sapiens
  misc_feature (1)...(479): n = A,T,C or G
cgggncgaanttttgaccgcgctggaggaactctgcacgagatgaaatcctgctttcttttcctcagaactactatattcagtggctaaatggctccctgattcatggtttgtggaatcttgcttcccttttttccaaccttggtttatttggattgatgccctttgcctttctctttctggaatcagaaggctttgctggcctgaaaaagggaatccgagcccgcattttagagactttgggcatgcttcttcttcttgcgttactcattcttgggatagtgcgggtagcttcagcactcattgacaacgatgccgcaagcatggaatccttatatgatctatgggagatctatctaccctatgtatattcctgtatatcattgatgggatgattgttacttctcttgtgtacaccagttgacctttttcgtatgttcacagtgatgggtcaactgctaatgaagccaacaattcttg

SEQ ID NO: 22377 - DNA, 486 bp, Homo sapiens
  misc_feature (1)...(486): n = A,T,C or G
cggggcncgngaattganncccattgaccngcgctgcaggaattcggcacgaggaccagcctgaccaacatggagaaaccccatctctactaaaaatagaaaattagccaggtgtggtggtagatacgtgtaatcccagctactcgtgaggctgaggcaggagaattgcttgaatccgggaggcggaggttgcagtgaactgagattgcaccactgcactccagcctgggcgacagagtgagactccgtctcagaaaaataaaaaacaactttggacatagaggagttgggggcagaggggggaggatgagagaattttccatgtaactccttttccttaagaaaaagaagcaaaaatccctcatgcagtgccatctgactttatggtggttcacattatatagttactttttttaataaacgcataagattaactcttcctgcaacccaaaaaaaaaaaaaaaaaactcgagggggggcccggtg

SEQ ID NO: 22378 - DNA, 483 bp, Homo sapiens
catcgacgctcgcccgccctgcggaattcggcacgagaatgagctgggccatccagtgatcttggcattctgagcttagaaatacaaagacaaagaggaaattagcaggaggtacagaaccggaaagaatgcaccaagaggtatcatgaagaaagagtccaatctgtcatcatgagagggcagaagccagagagaagcagaggtccccccagagagaggagagaggctgaatagcccagcagaggcgaggagtggcattcggttcccaagagctctctgagtccaaaacctaagctacagaaaactatttatgataaatcttttatttgaacaaactcaaataggtttctcttccttactattaaaactaccccactaaattgatcagcatacaaaaatccccccaagaatcattatgagttccacaaaaaccaggaccacatctgagttatttctcattctatccccagtgtctcccaaagt

SEQ ID NO: 22379 - DNA, 408 bp, Homo sapiens
  misc_feature (1)...(408): n = A,T,C or G
cgagccaagctgctgagatctgggacatgagcgacgatgagaccatctgagatggccccgctgtggggctgacttctccccggccgcctgctgaggagctctccatcgccagagcaggactgctgaccccaggcttggtgattctgggcccctcctccataccccgaggtctgggattcccccctctgctgcccaggagtggccagtgttcggcgttgctcgggattcaagataccaccagttcagagctaaataataaccttggccttggccttgctattgacctgggaaaaaaaaaaaaaaaaaaaaaaaaaaaaaaaaaaaaaaaaaanccccggggggggggcccggccccccccccccccttagggggggggaaaaaaaattccgggggccgggtttaaaaaa

SEQ ID NO: 22380 - DNA, 411 bp, Homo sapiens
gaattcggcacgagatagcttccaccaaaggttcttcctcatacatggaagagcgactcagagcagagatgcataaggcagaagacaaagcagtatagcataaggagattttggatcacctggagtcactcaaattaaaaaatcgtcatctttctgaaatggtgatgaaattggaattgggtttacatgagtgctccttgcctgtatctccccttggttcaatagctaccagatttttggaagaggaggaactgaggtctcatcacattctatagcgcttggatgcccatattgaagaactaaaaagagagagtgaaaagacagtgagacaattcacagccttaaagtagcctcttaaaaaaatcacaatcttggaaataaaaataaacaccaaagagttactgtcatctg

SEQ ID NO: 22381 - DNA, 468 bp, Homo sapiens
  misc_feature (1)...(468): n = A,T,C or G
nggggcnctatgacctcctgcaggaattcggcacgagcagccacctctcccttgatggtctgggagcctggcctcagcaaggggccttcctgacctctggctccagtgaagctgaatgtcctcactttgtgggtcacactctttacatttctgtaaggcaatcttggcacacgtggggcttaccagtggcccaggtaattttttgtttcatggactatggactctttcaaagggatctgatccttttgaattttgcacagccctagatacaatcccttttgataaaagggtctttgcttctgattacaggagcactgtggaacgtctgtaaatatgtttttataattccatgtatagttggtgtacactcaaaacctgtccccggcagccagtgctctctgcatagggccataatggaattctgaagaaatcttggggagggaaggggagttggaacaaatgtctgtt

SEQ ID NO: 22382 - DNA, 467 bp, Homo sapiens
atagacccgctgtgcagccaatcttctgtacattttaatctgaataattcttcaggatttaaaattaattggctctggcttggttggaccgtactcggatctcgccacctctgcgtttcccgagtcactggcgaagaggtcccagttcctctgggaatcgtcctgtatgcaacatcttcacaagagtggcaggcagttgaatctctggccttcgtgggaccactggacatctggcagagaaccaggaaaccacggttcccttctgtgagtccctcagccggaaaactacaagctcctcatgcagctgctgtctacagaccccctggactgcctggggaagtgagtcggagctcctgcagcagaggggtggaacagctacacgaagatccgaaggtggccaaaaataacagcgctttccagatgagggagccagttgtccagcacagtgtcatgggacagtgggccct

SEQ ID NO: 22383 - DNA, 481 bp, Homo sapiens
  misc_feature (1)...(481): n = A,T,C or G
ccgcgcncnnnaattgacccgcttgaggaactcggcacgaggatatggaaaggctcaccagaacccaagctgttaaccgaagatcagccctcggcgacctcgccggcgacaactcccttggccttgagccacttcgaacttcggggatctcacctcttcctcaggatggggagctcactccgagaacaggagaaatcaacattgcagtaacaaaagaatggcttattattgccaggtttggcctcctcagtgccctcacactctgctacatgatcatcagagccacagctagcttgaatgctaatgaggtagaatggttttgaagaagaaaaaacctgctttctgactgattttgccttgaaggaaaaaagaacctatttttgtgcatcatttaccaatcatgccacacaagcatttatttttagtacattctattttttcataaaattgctaatgccaaagctttgtattaaaagaaatn

SEQ ID NO: 22384 - DNA, 462 bp, Homo sapiens
ttgacccctgagaattgaccgcgtaaatagagcctgagcttgatggcagtgctcaagtgacctctcacgacgcttctaccaatgggctcatcaacttcatcaagcagcagcgcgaggccagagtccaataaactcgtgctcatctgcagcctcctctgtgactcccctttctcttctcgtccctcctccccggagccggcactgcatgttcctggacaccacccagagcaccctctggttgtgggcttggaccacgagcccttagcagggaaggctggtctcccccagcctaacccccagcccctccatgtctatgctccctctgtgttagaattggctgaagtgtttttgtgcagctgacttttctgacccatgttcacgttgttcacatcccatgtagaaaaataaagatgccacggaggagggaaaaaaaaaaaaactcaaaaaaaaaaaacggggggg

SEQ ID NO: 22385 - DNA, 479 bp, Homo sapiens
  misc_feature (1)...(479): n = A,T,C or G
agctggggnattgaaattgattcgctctgcaggaattcggcacgagggaaacgggagtgaacggagagcgtagtgaccatcatgagcctcctcaacaagcccaagagtgagatgaccccagaggagctgcagaagcgagaggaggaggaatttaacaccggtccactctctgtgctcacacagtcagtcaagaacaatacccaagtgctcatcaactgccgcaacaataagaaactcctgggccgcgtgaaggccttcgataggcactgcaacatggtgctggagaacgtgaaggagatgtggactgaggtacccaagagtggcaagggcaagaagaagtccaagccagtcaacaaagaccgctacatctccaagatgttcctgcgcggggactcagtcatcgtggtcctgcggaacccgctcatcgccggcaagtaggggccgcctgtctgttgacagaactcactcctctgtcctan

SEQ ID NO: 22386 - DNA, 473 bp, Homo sapiens
  misc_feature (1)...(473): n = A,T,C or G
nattggccattcctccgcgctgcaggaattcggcacgaggttttactttgccctttagtatggtggcagtgtgggctctcagccacccccagtggcaccagagccaggtcctgttccctcttctcccagccaggagcctcccaccaagcgggagtatgaccagtgtcgcatacaggtcaggctgccagatgggacctcactgacccagacgttccgggcccgggaacagctggcagctgtgaggctctatgtggagctccaccgtggggaggaactaggtgggggccaggaccctgtgcaattgctcagtggcttccccagacgggccttctcagaagctgacatggagcggcctctgcaggagctgggactcgtgccttctgctgttctcattgtggccaagagatgtcccagctgagggcctttggcccattggccctctgtgagcccttcatctttgataaagcactgac

SEQ ID NO: 22387 - DNA, 471 bp, Homo sapiens
  misc_feature (1)...(471): n = A,T,C or G
catttcgcccgtcctgcggaattcggcacgaggagagagaagagagagagactcanagtgaatttgatcgtcaagcagagattaccagacttctgctagagggaatcagcagtacacatgcccatcaccttcgctgtctgaatgactttgtagaagcccagatgacttactatgcacagtgttaccagtatatgttggacctccagaaacaactgggaagttttccatccaattatcttagtaacaacaatcagacttctgtgacacctgtaccatcagttttaccaaatgcgattggttcttctgccatggcttcaacaagtggcctagtaatcacctctccttccaacctcagtgaccttaaggagtgtagtggcagcagaaaggccagggttctctatgattatgatgcagcaaacagtactgaattatcacttctggcagatgaggtgatcactggtgtcagcggtg

SEQ ID NO: 22388 - DNA, 519 bp, Homo sapiens
  misc_feature (1)...(519): n = A,T,C or G
tggattgcnccnaggggtnnnnnnnaaatggannccaactgataggcctgtcagaatcggcacgagccaaaaccaggcttgaggttggtgactcttgaaagattttctttcttcaggcctagatcagaaaattaagtgcagcaatatcatgaattctcagaagccctttcagggagccagtgagtcatacagtatccacagttgagtcacttaaagatgtcagtatacgaaacattattcacaatccttgggcaatctcatttttttttccttctcccctcctcccctgccccccatacatttctatccttgagttagttttggaggggcaggaagtacttaacatctcagaagctagattgggaaacatgctcagctataagaactgagctttaaattttgagtttaaaaatgtacatcaggagcagctggggagggtctttttttaaaaaaatctttcaaatttggttttctgtgcatatggccgttttgtaaatactttggggttgttcatttttt

SEQ ID NO: 22389 - DNA, 473 bp, Homo sapiens
  misc_feature (1)...(473): n = A,T,C or G
natagannnactgacccgcgctgcaggaattcggcacagcccacccaaatgccctttctgattctaattgatttctttcaacagaatttgccataattcagacatgcacttctatggggaaggcgagtttctagttcaaaaaaatgggcaggagtggggaacaaaacaattaacgtaagagctacaaaggagggaaaaggaaccaagaagtagaaggagtcccatcatgagggaagatggtgggcctcagggaggatggggatcaagggacaggccaggagccaggagtggggaagggagggatgaaaggggacacaagtccctgtctctgaagtttctttaaaatctgagttccctcccctctctttgacattcctgaaagattaccagccagcaatagcccagggctcccccaaaagaattggttcagattgtaattatcagttaggcaatgtttttaaaacttagtaatg

SEQ ID NO: 22390 - DNA, 484 bp, Homo sapiens
  misc_feature (1)...(484): n = A,T,C or G
aggcggttncttgaaaatcgatcggcactcggtagaatacatgtcactttttgaggcaaaaaaaatgacaagatgtccatcccttggctcccttccctcccccctcctgctgctcctcagcccccagagattgagccctggctggggctgggtggcaggacagcccctcagatgaggtcagcaacattgaggggcatttcctcaatggaggtgttgtagaaggtctcaatgtctcgaagagtcctcttgtcttcttctgtcaccatgttaatagccacacctttacggccaaaccgtccacctcgaccgattctgtggatatagttttccctgttggtgggaaggtcatagttgatgactaaagaaacctgctgcacatcaatgcctctggccagcaggtcagtggtaatcaaaactctgctagagccagaacgaaactccctcataatcacgtctcgttccttttggtccatatctccatgca

SEQ ID NO: 22391 - DNA, 474 bp, Homo sapiens
  misc_feature (1)...(474): n = A,T,C or G
nattgacnattgagcgaccttaggaattcggcacgagggcgttcaagatgtcgaccaagaatttccgagtcagtgacggggactggatttgccctgacaaaaaatgtggaaatgtaaactttgctagaagaaccagctgtaatcgatgtggtcgggagaaaacaactgaggccaagatgatgaaagctgggggcactgaaataggaaagacacttgcagaaaagagccgaggcctatttagtgctaatgactggcaatgtaaaacttgcagcaatgtgaattgggccagaagatcagagtgtaatatgtgtaatactccaaagtatgctaaattagaagaaagaacaggatatggtggtggttttaatgaaagagaaaatgttgaatatatagaaagagaagaatctgatggtgaatatgatgagtttggacgtaaaaagaaaaaatacagagggaaagcagttggtcctgcan

SEQ ID NO: 22392 - DNA, 475 bp, Homo sapiens
  misc_feature (1)...(475): n = A,T,C or G
agaggggttnnaactgactgccgtatgcattcggcacgagcaccaactttctgagccttgttcagctacaactgctgccacaagggcccctggtgcagtatttgaccatggagacctgtgaggatggcaacgatcttgtcttcttctatcaggtttgcgaaggtgttgcgaaggccagccatgcctcccacacagctgcccaggctgggcttcctgacaagcttgtggctcgtggcaaggaggtctcagacttgatccgcagtggaaaacccatcaagcctgtcaaggatttgctaaagaagaaccaaatggaaaattgccagacattagtggataagtttatgaaactggatttggaagatcctaacctggacttgaacgttttcatgagccaggaagtgctgcctgctgccaccagcatcctctgagagtccttccagtgtcctccccagcctcctgagactccggtgggctg

SEQ ID NO: 22393 - DNA, 475 bp, Homo sapiens
  misc_feature (1)...(475): n = A,T,C or G
nttggaanaatcgcaccgcctgcaggaattcggcacgagcctatcactgtctcccatcactcccagatgggaccgtctagttgcaggaaaacaagctcagggctcccactgattctacattatgatcaactgcatggggtcctacaggagaagaccaagagacagagacagagaccagggaaaatgaccgataccattccttctcagggatgctacacacccatggggcagaggataagaggttcctgaaggcatcacccctctggccatggctggtgtgcagacaaagctggagatttggagtagcctgttgtcccactgactcttagactgccccagctaagaagaaccaactcctcctattacagatgaaataaacaaagctactcaagctctctggcatcgccctgacggtcatcatgtgcttcacatttccctcctgccccccctgattttctggaaaagggagaaagtg

SEQ ID NO: 22394 - DNA, 465 bp, Homo sapiens
  misc_feature (1)...(465): n = A,T,C or G
ntaganccgctctgcagcttcgcttctgactgttaaacaccgatgacgcatgcactgcacttcttcgttttcttcttgctcccccattggcctgagtttcttgcgcattactcctctccctccttcgttagaataggtatatcagctgtgtaaatagagcaagaaaacagtattctgcatctgtggcatttatgtataggtgcagttgcgtactgctgaaaatgcaggcttttgtaacagagagatctttactgatgcactcatgacaagtacccaatgtattttagctattttagtagtatttgttcaataaatacgcaagctgtaaggtcaaaaaaaaacaaaaaaaaactaccgggggggggcccggcacccaattacccctatagggggtcgtatatattacgctgcccgcgcttttacaaggtcaggacgggggaaccactgcgaaaatctacctccgac

SEQ ID NO: 22395 - DNA, 475 bp, Homo sapiens
  misc_feature (1)...(475): n = A,T,C or G
nngggcattcaccgctgtatgattcgccacgagctgaaatggtttaaaatgatgccttgtatttattgaaagcttaaatgggtgggtgtttctgcacatacctctgcagtacctcaccagggagcattccagtatcatgcagggtcctgtgatctagccaggagcagccattaacctagtgattaatatgggagacattaccatatggaggatggatgcttcactttgtcaagcacctcagttacacattcgccttttctaggattgcatttcccaagtgctattgcaataacagttgatactcattttaggtaccaaacctcttgagttcaactgatcaaaccaaaggaaaagtgctgctagagaaaattagggaaaaggtgaaaaagaagaaatggtagttattgagcagaaaaaaattaatttatatatgtattgattggcaaccagatttatctaagtagaactgaattgg

SEQ ID NO: 22396 - DNA, 474 bp, Homo sapiens
  misc_feature (1)...(474): n = A,T,C or G
nngggcactcgacgctgatgaattcgccacgagaaagattttacctcccagctttggttgtatgtgttcccaagtggtgaggtgagattgtggctggaggaagaaaaaggatggcatgaaagaatgacccttattgtggtctgtccttctaatcaacataattagggcagcttaccccaacatgaaaatgatgacctggccatttttaatggccagagcttgaagtctggtctctcattttgtttcagaaatgagtgagaggccttcctgcagagcagtcaggagaaatggtggagcctggggccctggaatggctgaccctgtgcctagagagctgatggcaagggctgtctggcatggctcatttgggtgggtttccccaggcataccttagttccctgatcctctgcaaagagtagctcattgactgagcaagcgcttcaggaggactgtgctggttgttcccagaccaaa

SEQ ID NO: 22397 - DNA, 482 bp, Homo sapiens
  misc_feature (1)...(482): n = A,T,C or G
atcgaccgccctcgatagacncgcctgcaggaattcgcgcacgaggacctattcaccctccacttcccgtctcagaatctaaacgtggtcaccttcgagtagagaggcccgcccgcccaccgtgggcagggccacccgcagatgacacgcgctctccaccacccaacccaaaccatgagaatttgcaacaggggaggaaaaaagaaccaaaacttccaaggccctgctttttttcttaaaagtactttaaaaaggaaatatgtttgtattttttatttacattttatatttttgtacatattgttagggtcagccatttttaatgatctcggatgaccaaaccagccttcggagcgttctctgtcctacttctgactttacttgtggtgtgaccatgatcattataatctcataggagaaaaaaaaccttgtaaaaaaagcaaaaatgacaacagaaaaacaatcttatttcgagcattgca

SEQ ID NO: 22398 - DNA, 481 bp, Homo sapiens
  misc_feature (1)...(481): n = A,T,C or G
ggcggtnttttggcctcgatcggctgtggaattcggcacgagaatatgatgaactcggcttcaggccgggtgtggtggctgatcacgccactcccagcactttgggaggccaacgcgggcagatcatgaggtcaacagatcgagaccatcctggccaacatggtgaaaccctgtctctactaaaatacaaaaatcagtaatcccagctactcgggaggctgagacaggagaatcgcttgaacccaggaggcagaagttgcagtgagctgagattgtgccgagattgcgccactgcactccagcctggtgacagagcgagactccatctcaaaaaaaaaaaaatctattatttgtaaaggcacaaaacaagtctctgagagattgcaacttcacaaagaccgatcatacttttccacagataggctcttaatcatgtcagcctcacaaactttgggtgtatttggtgggagtgctaagtcct

SEQ ID NO: 22399 - DNA, 478 bp, Homo sapiens
  misc_feature (1)...(478): n = A,T,C or G
nnagggttgacgccgattgaacggctgtggcaccagccttttagtgaaattgagaaattggagcacaaattgaaccaagcccctgagaagtggcagcagctgtgggaaagggtaaccgtggaccttaaagaagaaccaagaacagatcgctcccaaagacacctgtcgagatccccaggaattgtgtctaccaacctaccttcctatcataagaggactctgctacatctcccagacagcagcatgggggaggaacagaattccagcatctccccatccaatggagtggagcgaagagcagccacgctctatagccagtatacatccaagaatgatgaaaacaggtcctttgagggaacactttataaaagaggggctttgctgaaaggttggaagccccgttggtttgttttggatgtaacaaaacatcagctgcgctactatgactcaggtgaggacacaagctgtaaaggccaca

SEQ ID NO: 22400 - DNA, 482 bp, Homo sapiens
aggcggggtttaaattgacggctgattgatacccatgagccttgacggcccttcctagagtgtcctcacagcatggtggctggctttcccctgagtatgaaagcaagaaggaaaccacagtgcctttcagtggcctccctgtggaagtgacatgctcatttttgccttattctgtaagtggggagtcactaagtctagcctatattcaagggtaaggagagttaagctccacctcttaaagggaaaatttatagacattttcaaatgactacatcacttaacccctcaccatctgccctcccattgctagcacttgatgactagcccttgctgggctttacatgaacagatgtttcccaaagttataaaattagtaccactaaaatgtatcaaatgttaagccattctgtggtatgtcatagtccagcaaaccctttctgttctttgtaggtgttagtttaccccgtataaacctgattatg

SEQ ID NO: 22401 - DNA, 468 bp, Homo sapiens
  misc_feature (1)...(468): n = A,T,C or G
ggggaactgagtgagcctgcccgaccgaaggagtaagccgacaggatgaagagttagaccccatggaccctagctcatactcagacgccccccggggcacgtggtcaacaggactccccaagcggaatgaggccaagactggcgctgacaccacagcagctgggcccctcttccagcagcggccgtatccatccccaggggctgtgctccgggccaatgcagaggcctcccgaaccaagcagcaggattgaagcttcggcctccctggccctgggttaaaataaaagctttctggtgatcctgcccaccccanaaaaaaaaaaaaaaaaaaaaaaaaaaaaaaaaaaaaaaaaannttctggggggggggggccgccccccaccccccccaaaagggggggaaaaaaaaacccggggggggggtttaaaaaagggggggggggggaaagnnnnnnntgctctntctcn

SEQ ID NO: 22402 - DNA, 479 bp, Homo sapiens
  misc_feature (1)...(479): n = A,T,C or G
aggggggattganatcgatcggctgtcangcattcggcacgaggtgatgacttcctatggactttgactcagctgtggctcctcgggcaaaatctgtacgggcaaagaaacctataaagtacctggaagagtcagatgaagatgatctgttttaaaatgtgaggcgattattttaagtaattatcttaccaagcccaagactggttttaaagttacctgaagctcttaacttcctcccctctgaatttagtttggggaaggtgtttttagtacaagacatcaaagtgaagtaaagcccaagtgttctttagctttttataatactgtctaaatagtgaccatctcatgggcattgttttcttctctgctttgtctgtgttttgagtctgctttcttttgtctttaaaacctgatttttaagttcttctgaactgtagaaatagctatctgatcacttcagcgtaaagcagtgtgtttat

SEQ ID NO: 22403 - DNA, 474 bp, Homo sapiens
agagggccactgccttcgctgcacgaattcggcacgaggaaggccaaagactcaagatttatctatccttgaattattcagtgatgctgattacaacaggcctccgttatacgaagggaaaacattccagaccccccagtgaatgcctgaaactggattctactgaaccctgagatggtactaagtgactaacgggtgaatagcgtgtacagcatggatacactagacaaagggaggattcgcatcccgggctggtcagcaagaggtttcatcaccccactcaaaatggcaggaccgtatgaacctgaatccagagaaacggctcatcagtctccaatcctctgattttctaaaccaggactacattatattaaaaccagaaaaagcaatacctcttttcacagaatggactttctggtggaaatgggaggaaccaaaagaaggctgacttcttcattttgacaccctgccctg

SEQ ID NO: 22404 - DNA, 379 bp, Homo sapiens
ggagattggaccttcccggctgcagattcggcacgaggaatggctggctgtggatgggttggtcagtccctccaacaacagcaaggaggatgccttctccgggacagattggatgttggagaaaatggatttgaaggagttcgacttggatgccctgttgggtatagatgacctggaaaagaagaacgaggctctaaaagagagggcggattccctggccaaggagatccagtacctgaaagatttgatagaagaggtccgcaaggcaagggggaagaaaagggtcccctagttgaggatagtcaggagcggcaatgtgcttgtacatagagtgctgtagctgtgtgttccaataaattattttgtagggaaagtaaaa

SEQ ID NO: 22405 - DNA, 544 bp, Homo sapiens
  misc_feature (1)...(544): n = A,T,C or G
aggatgtttcgacggctgtggaattcggcacgagtgatggtcagccaggtgccttcacctgctatttggatgcaggccttgccagaactaccactggcaataaagtttttggtgccctgaagggagctgtggatggaggcttgtctatccctcacagtaccaaacgattccctggttatgattctgaaagcaaggaatttaatgcagaagtacatcggaagcacatcatgggccagaatgttgcagattacatgcgctacttaatggaagaagatgaagatgcttacaagaaacagttctctcaatacataaagaacagcgtaactccagacatgatggaggagatgtataagaaagctcatgctgctatacgagagaatccagtctatgaaaagaagcccaagaaagaagttaaaaagaagaggtggaaccgtcccaaaatgtcccttgctcagaagaaggatcgggtagctcanaagaaggcaagcttcctcagagctcangagcgggctgctgagagctaaacccagcaattttctatgaa

SEQ ID NO: 22406 - DNA, 335 bp, Homo sapiens
ggtggggaattgacgtctgtagacttcggcacgagagcgccaggcccaggagtatgaggccctgctgaacatcaaggtcaagctggaggctgagatcgccacctaccgccgcctgctggaagatggcgaggactttaatcttggtgatgccttggacagcagcaactccatgcaaaccatccaaaagaccaccacccgccggatagtggatggcaaagtggtgtctgagaccaatgacaccaaagttctgaggcattaagccagcagaagcagggtaccctttggggagcaggaggccaataaaaagttcagagttaaaaaaaaaaaaaaaaaaa

SEQ ID NO: 22407 - DNA, 474 bp, Homo sapiens
  misc_feature (1)...(474): n = A,T,C or G
cgcggcntttgccttgactcgcgctgcaggaattcggcacgagccgccttggagaccctggacgagctgctggcggcgggcgaggccggcaccttcgacgtggccgtggtggatgcggacaaggagaactgctccgcctactacgagcgctgcctgcagctgctgcgacccggaggcatcctcgccgtcctcagagtcctgtggcgcgggaaggtgctgcaacctccgaaaggggacgtggcggccgagtgtgtgcgaaacctaaacgaacgcatccggcgggacgtcagggtctacatcagcctcctgcccctgggcgatggactcaccttggccttcaagatctagggctggcccctagtgagtgggctcgagggagggttgcctgggaaccccaggaattgaccctgagttttaaattcgaaaataaagtggggctgggacacaaaaaaaaaaaaaaaaaaaaaacctgga

SEQ ID NO: 22408 - DNA, 394 bp, Homo sapiens
  misc_feature (1)...(394): n = A,T,C or G
gtgcgntnnnnnnaaatcgccctctctgangaattcggcacgagagcaggcgcagcccagcctcgaaatgcagaacgacgccngcgagttcgtggacctgtacgtgccgcggaaatgctccgctagcaatcgcatcatcggtgccaaggaccacgcatccatccagatgaacgtggccgaggttgacaaggtcacaggcaggtttaatggccagtttaaaacttatgctatctgcggggccattcgtaggatgggtgagtcagatgattccattctccgattggccaaggccgatggcatcgtctcaaagaacttttgactggagagaatcacagatgtggaatatttgtcataaataaataatgaaaacctaaaaaaaaaaaaaaaaacggca

SEQ ID NO: 22409 - DNA, 494 bp, Homo sapiens
  misc_feature (1)...(494): n = A,T,C or G
gggaagnnnagcggnnnnnnncctgaccactgcaggcatgcggagagccgcgagggaccatggcgcagacaacgaacgtgggcaacagtgccgaggggtttcacccgggagagggagcagcctccctgggcatcccagatggacttcagggcacaggatggaggagacaggagaggtcggctcaggagggggaccacagactcctgggaggtgatggtccttgggactaggagcaggacccatcccacagcggggaggaggtggaacaacaggcctgggagagctccacaccagacagtgtccagggcccatggcatttccagagccaagcacaacatgaatttatgctgaattgtgctgtggagtgaacggtgttcttgtccgttcctagtatttaaggaataagaattcgttaacttgagatgaatttgaaaatcttggccaataaatctgatcttgaaaaattacccaaaatgggtttgggcatggtggct

SEQ ID NO: 22410 - DNA, 471 bp, Homo sapiens
cattggcccgtcctgcacgaattcggcacgagggacagatgagcctcctgtcttccagcaacaaccctcacatatgcactgagtaaaggatgaatgtatggacacatctgggagtattttaaagaatgtatcttgccttgtgttgacccaaaccaaaaacatttttgaggggcacatgtggggtcaaaaagatagccaatttccattacatgggtttacaatttccattcttttgtgccacgagtgttagaatttaaatgaatacttttacaaagtctactttttgttcaaggatatgctgacccatatagtttactcttaaaattgtgtcacggtatttctcactatactctagaacaaacagacttgaaaagagaccatttgagatttgaatctaatggttaacgctattcagattttcccaaagatcttacctcatgaaagtagatctgggtcagaatgatctactca

SEQ ID NO: 22411 - DNA, 461 bp, Homo sapiens
agggggtttaactgatacgtacgtctacgaagcggtgctggcacagagctgcatctttgaccaattccgggatacagaacattgtggtaggggaagggactcactttctcatcccatgtgtacaaaaaccaattatctttgactgctgttctcaaccacatagagcgccagtcatcactggtagcaaagatttacagaatgtcaacatcacactgtgcatcctcttccggcccatcactagccagcttgctcgcatcttcaccagcattggagaggactacgatgagtgtgtgctgccgttcattaccacggagatcctcaagtcactggtggctcgctttgatgctggagaactaatcacccagagggagctggtctccacccaggtgagcaacaaccttatggagtgagcaggcaccttttggctcattctggacgacgtagctttgacacatgtgacc

SEQ ID NO: 22412 - DNA, 434 bp, Homo sapiens
  misc_feature (1)...(434): n = A,T,C or G
agggagnnnnagagnnnnnnaatgaccattgagcatcgacgaccgggagccattcccaggtgtgctccatcctctggtctccccattacaaggagctcatctcaggccatggctttgcacagaaccagctagttatttggaagtacccaaccatggccaaggtggctgaactcaaaggtcacacatcccgggtcctgagtctgaccatgagcccagatggggccacagtggcatccgcagcagcagatgagaccctgaggctatggcgctgttttgagttggaccctgcgcggcggcgggagcgggagaaggccagtgcagccaaaagcagcctcatccaccaaggcatccgctgaagaccaacccatcacctcagttgttttttatttttctaataaagtcatgtctcccttaaaaaaaaaaaaaaaaaaaaa

SEQ ID NO: 22413 - DNA, 291 bp, Homo sapiens
  misc_feature (1)...(291): n = A,T,C or G
ggtggggncttcccgtctgcaggaacgcttattacattcaggatcgtcttgaggctcagagctgggcgcgtcactaccagcagctcgcccgtgaagagaaagaggcagaactggcagacgacatggaaaaaggcctgccccagcacctgtttgaatcgctatgcatcgatcatttgcaacgccacggggccagcaaaaaatccattacccgtgcgtttgatgacgatgttgagtttcaggagcgcatggcagaacacatccggtacatggttgaaaccattgctcaccacc

SEQ ID NO: 22414 - DNA, 502 bp, Homo sapiens
  misc_feature (1)...(502): n = A,T,C or G
gtnnntnnnaagagncccaggggnnnnaatgancgcactgatgcctcgaaaccccgancagaccacctaagcacatggcaaacctccctgtataaaaaacaaaaatagatggcatggtggtggcacctgtagtcccagctacttggggggctgaggcaagaggatcgcttgaacccaggaggctgagactgcagtgagccgcattcatgccactgcactccaacctaagtgacagaccaagaccctgtcaaaaaataaataaataaaataaacataagtgtgattccgacatggttaaggataagaagaggagagaccatcaaacagagtgatggaaggggaactgggctaggatgactcttggcatactgggattcccactctatttataatagttcagntctccaagttctaccttcatacaagtgctactgcacctctccattcaatcttacttatgaataagagtcccaatcccacagatttcagactaatttgctgn

SEQ ID NO: 22415 - DNA, 478 bp, Homo sapiens
  misc_feature (1)...(478): n = A,T,C or G
agctggannattgaaattgactcgctctgcaggtggaagcaattttggaggtggtggaagctacaatgattttgggaattacaacaatcagtcttcaaattttggacccatgaagggaggaaattttggaggcagaagctctggcccctatggcggtggaggccaatactttgcaaaaccacgaaaccaaggtggctatggcggttccagcagcagcagtagctatggcagtggcagaagattttaattaggaaacaaagcttagcaggagaggagagccagagaagtgacagggaagctacaggttacaacagatttgtgaactcagccaagcacagtggtggcagggcctagctgctacaaagaagacatgttttagacaaatactcatgtgtatgggcaaaaaactcgaggactgtatttgtgactaattgtataacaggttattttagtttctgttctgtggaaagtgtaaagn

SEQ ID NO: 22416 - DNA, 463 bp, Homo sapiens
agaaaaaattgacccgcgctgcaggaaatcgacacgcgctgcaggaattcggcacgagcggatgccgaaggtgaaggcgctgcagtgcgccctggcgctggagatcagctcagtaacttgcccaggagtcgtgcttaaagacaaagaggacatctatcttagcatctgtgtgtttggccaatacaaaaagacacaatgtgtcccagccacttttcccctggtcttcaatgccagaatggtgtttgaaaaggtgttcccggacgcagtagatcctggagatgtggttacacagcttgaatatgatacagcagtgttcgagttgatacagctagttccaccagtgggtgaaacactgtctacgtatgacgaaaatacacgagatttcatgtttccgggtccaaaccaaatgtctggacaccatgattcaaaccgccaggttaccatgaggaggatttctggcctt

SEQ ID NO: 22417 - DNA, 466 bp, Homo sapiens
  misc_feature (1)...(466): n = A,T,C or G
cctcggcccaccgctgtatgccccgcgctgcaagaaaggagaatgttttgaggaccactttggttttcttttttgcgtgtggcagttttaaattattagtttttaaaatcagtactttttaatggaaacaacttgaccaaaaatttgtcacagaattttgagacccattaaaaaagttaaatgagaaaaaaaaaaaaaaaaaaaaaaaatctggggggggggccgggccccaaattccccttatagggaggggaataaaaattcatgggccggggtttaaaaacggcgggagggggaaaaaagnttnccnncctcgtgcaattcaggccttttaatgcttacagaggcaccattactgaacttcacccctagtactatgtgcagcggcggaccaaacactttgtcttcatggggtactccatgacaggcttactcctcttcacaagggacaaacggcacaacgggg

SEQ ID NO: 22418 - DNA, 500 bp, Homo sapiens
  misc_feature (1)...(500): n = A,T,C or G
aggggnaggggnnacgagnnnnnnnnnaattgaccgactggcngacttcgcgacgagacaaatgtaaatagaaaagtttttaacggttttatatagatttcactataaataagcattttaagactgacaaatgttgaactgtacatacatttatcagcataactgcccagtttttttggtgctgaagtactgtaagtagaattcatcaacggtctcctaatttttgcatctacatctggggggaaaaagctgtgatactatagttaataaattcccactagagtgacactgaagatttaaacacaagcattcataagatgcgctgatctctggtggttgtcactagttcttctaggtgataatgatttacccatagatggagctgttggatattattttattgtacaaattcatgtttaaaaaactttgtgactgtttctagttaagtaattttttaacctttcttgggtcatagacttctttggtaaactatgaactct

SEQ ID NO: 22419 - DNA, 470 bp, Homo sapiens
  misc_feature (1)...(470): n = A,T,C or G
agctggggacattgacctgcgctgcacgaattcggcacgagggtatctgagactcacacagtgtggttggaagatagcacagtgacctcccaggcacagccctctgccagccctccactggctgccctaggatgctggccttcctccgatgggagtcgggcccagtctgctgtgagccaggagaagccagcaagctccctgcgaggcctggaggagcccttctcactcagcttggtgttcgatgccagtgcccccgcccattgtggggtgagggtgggactctcagcacagccctgtccaaataaatcctctaaagccctcttcaaaaaaaaaaaaaaaaaaaaaaaaacccctgggggggggcccgggccccaattcccccttatgggggggggtttaaaattccaggggcggggttttaaaaagggggggagtgaaaaaaacnnnnnnnnnnnnnnnncnnnnnnncn

SEQ ID NO: 22420 - DNA, 521 bp, Homo sapiens
  misc_feature (1)...(521): n = A,T,C or G
tggtnnnnnnnnnnaggggnnnnnaggggncccnnnaactgaccgcctctggatgcggcacgagcacctggagagatagatgttaattttggttggtggaatttattgaatacctattacacgttaggcacattaaacatcatttcttctgtcacatggtaggcattattttacctgcctcatagatgagaaaactgaggctcagaatggtatgcctgggaagaattcagagttggcattttgtgattaatacatggtggcccatgctcttttaattaccacatgatgactttcaggatcagaggaggtttatgcaggaagtaccacaggttgggcattgacaggccttgaatctggtagagtcctgtcccataaagattcagctgggagtaagcccttgaggccatatcagtcctctgtgactgtccttccccgactcctcgctgacccatcctanaccagatcaggtagaacctgctcttgggaattctcaatctgaatttaaggaatagaaagtgtca

SEQ ID NO: 22421 - DNA, 531 bp, Homo sapiens
  misc_feature (1)...(531): n = A,T,C or G
tgggggnnnnnnnnnagggtgncccccaggggnncccnnnttatganngcaactgaccgcctgtacgaattcggcacgagtctctgtcgtgtgggtgccaagtgcttgtgtagaaactgtgttctgagcccccttttctggacaccaactgtgtcctgtgaatgtatcgctactgtgagctgttcccgcctagccagggccatgtcttatgtgcagctgtgccacgggtcagctgagccacagtcccagaaccaagctctcggtgtctcgggccaccatccgcccacctcgggctgaccccacctcctccatggacagtgtgagccccgggccgtgcatcctgctcagtgtggcgtcagtgtcggggctgagccccttgagctgcttcagtgaatgtacagtgcccggcacgagctgaacctcatgtgttccactcccaataaaaggttgacagggaaaaannnannnnnnannannnnnnnnnnnnnnnnnnnaactctgggggggccccgggaccaaatcccccttaat

SEQ ID NO: 22422 - DNA, 439 bp, Homo sapiens
ttttcccgcctgaggaatctcggcacgagggaagccaaacagatggacatggagtcacagggcggtgagctgttgaaggtgacccatgagaatatcctttcagaaagtttgatgtgaagacacagattgtatctcaccctggtcacgggaaggttattgaggaatgcattggcctgtttgcagattgaggagtgggtcagctggagggggagataactaatggtgcaggtgttgggggaagtgagttgagacaggtcaaggaaaaagaagagacatggagaggagcgtacaggtgacctttctatgtaaggaggagcagataaggggatagtgtagatatggagacattttgaggtggagaggaaaaatcaagggaccccttgtcagatgccctgattgctcctgtagaacaggcagttgtcaagcatggagtggaagg

SEQ ID NO: 22423 - DNA, 442 bp, Homo sapiens
  misc_feature (1)...(442): n = A,T,C or G
ntttgcccccgcctgatcaccgctgcaggaattcggcacgagaaagtagaggccctgttttgatgccagaacattcatatgctgtctgttctggatttcttttaaatgcacgtattttaaatactggttaaagattacaatctcggctatattttacaattctggctcttggtaaccatattacagaagtctatattgtaaaagcctaaagatctggacaagtttccaacaaccttgtttccatgagtatataattttggcagacacctgaattctttgggacactgtgtctgtgtatgtgtgtgtgtgtgtgtgtgtgtgcgcgcgcttgtatcttgaagttggtgcacttcaaaaccacagctggtgtaaattcttaaacactggagagccatcctttggtttaaatggtagagggttagtggaagcgcacacgttgttt

SEQ ID NO: 22424 - DNA, 498 bp, Homo sapiens
  misc_feature (1)...(498): n = A,T,C or G
agtncaagggacgaccccgnnnnaaaannntttgatncccattgaccgcctgcaggattcggcacgagcagatgacttttggaattggagcatttccctttgagatatttgccacaacatttaatataaatgatgggcggcctcctccagctgtccctgggacaccccagtatgtggacgagcagttcctgtcacgcctcttcctatttgtggccctggtgatcatgttctggctcctgattgcctaatgctgggctcctgcctacatccgtggcagggctctggactggtgacgtgccaccccaactcctggtgtttggcttcctggctaatcttgactcctggaatcagtgggatcagtaacacatcaaggagtcttgtttcttcatcagagctttggaactcgagaccagttggcgatgacccctgaatatcgccaccgctgtaaacactctataacttcaagccttggcattgagtcatctctcatgggtgaca

SEQ ID NO: 22425 - DNA, 503 bp, Homo sapiens
  misc_feature (1)...(503): n = A,T,C or G
ggggggnnnnntttgcatgctgcgcattcgaacgaggacgagggcttataaacgaccatgtttctccagtattacctcaacgagcagggagatcgagcctatacgctctataaatttgacccgatgggacgacagacctgctcagcccatcctgctcggatctccccagatgacaaatactctcgacaccgaatcaccatcaagaaacgcttcaaggtgctgatgacccagctaccgcgccctgtactctgagggtcccttaaactgatgtcttttctgccgtctgttacccctcgcagactccgtaaccaaactcttcggactgtgagccctgatgcctttttgccaaccatactctttggcatccagtctctcgtggcgattgatcatgcttgtgtgaggcaatcatggtggcatcacccataaagggaacacatttgacttttttttctcatattttaaattactacaagattattatagataaaatgattcgaaaaaaa

SEQ ID NO: 22426 - DNA, 459 bp, Homo sapiens
  misc_feature (1)...(459): n = A,T,C or G
nttatgccccgcgctgtatgaattcggcacgagggcaaggcaaagtgggatgcctgtgccaacatgaaggtgtggctctttgaaacaaacccccgcttcactggcaccattgcctcattcaacatcaacaccaacgcctgggtggcccgctacatcttcaaacgactcaagttccttggaaataaagaactctctcagggtctctcgttgctattcctggccctctggcacggcctgcactcaggatacctggtctgcttccagatggaattcctcattgttattgtggaaagacaggctgccaggctcattcaagagagccccaccctgagcaagctggccgccattactgtcctccagcccttctactatttggtgcaacagaccatccactggctcttcatgggttactccatgactgccttctgcctcttcacgtgggacaaatggcttaaggtg

SEQ ID NO: 22427 - DNA, 441 bp, Homo sapiens
  misc_feature (1)...(441): n = A,T,C or G
ntttgccccgcgctggaagaactctgcacgagctacagcagctgtggggaagtgttccttaatcagtcataccttcaggcacgtgcgggaagtcacaacggagaagaaacatggaaatggaagccgtgtgggaaagctctaactcactccatgggctgcgccacacctgttgaaatgcatgccgtcaggaatccccacgtatgtagggaatgtgggaaggcctttaggtacactgcctaccttactggtcgcgtgcaagtccaccctggggaaaagccctgtgaattggaagaatgtggaaaagcctcccctgtttcttccagcctaactcaacatgtaagaattcatgctgcagagaaaccctgtgaatgtaaagaatgcggaaaagccttcactggactctcaggtctttctaaacacgtccaaacagaccctggacag

SEQ ID NO: 22428 - DNA, 473 bp, Homo sapiens
  misc_feature (1)...(473): n = A,T,C or G
acttgatntcccctnnnnnananctgatncgcgctgcaggaattccgcacgagcccacccctgggtctctgtagggtgccatccagggcaagcaacccaagcactgcttcccaccgggtgatgagccatgcaggcctccaaactgcacgtcatgattcatccctaaagtgagtttggccttgagagtccccagggtcctcccccactgggcaggggtcctcaaagccaaggaagcctggtgacacaggcacccatgggaggtgggcccagaaaggggcttcccatagataggccctgtgagtagggagcttgtacactgggccatgggcagcgccagttcccttgagcagtaaaggcccttttccccctacggtgggacccaggagtctctctgacagcttttctgccaggcacagtggctcatgcctgtaatcccaacactctgggaggccgaggcgggaagatcacttgag

SEQ ID NO: 22429 - DNA, 485 bp, Homo sapiens
  misc_feature (1)...(485): n = A,T,C or G
aattgaccgccctngtttgatcgcctgcaggaattccgcacgagcatggctgctcgcagagctctgcacttcgtattcaaagtgggaaaccgcttccagacggcgcgtttctatcgggacgtcctggggatgaaggttctgcggcatgaggaatttgaagaaggctgcaaagctgcctgtaatgggccttatgatgggaaatggagtaaaacaatggtgggatttgggcctgaggatgatcattttgtcgcagaactgacttacaattatggcgtcggagactacaagcttggcaatgactttatgggaatcacgctcgcttctagccaggctgtcagcaacgccaggaagctggagtggccactgacggaagttgcagaaggtgtttttgaaaccgaggccccgggaggatataagttctatttgcagaatcgcagtctgcctcagtcagatcctgtattaaaagtaactctagcagtgtctgg

SEQ ID NO: 22430 - DNA, 350 bp, Homo sapiens
  misc_feature (1)...(350): n = A,T,C or G
agatgtctcnnagtagtgccctcatagcgccccactgatatcgtcgagccngcccccttcctcgtcctttccttttgcctttgagaccaaaccaagtgcttccaaattcttttggtgcaattgaggagatatgccagatgcttaaacacatttaattgctgtcagattaattccatgatcactaaagagttgctgcttttttcatatttatttttgtaaatgattctgtgcccaggagcagctgggggttccacctcagggtggggcgggcaggaccccgtctccccaggtgtcggagcctgacctgaattaaagtactgactgctcgccacaaaaaaaaaaaaaaaaaa

SEQ ID NO: 22431 - DNA, 496 bp, Homo sapiens
  misc_feature (1)...(496): n = A,T,C or G
ngaggtgcnnnattgaagccaattgatcgccttcggaattcggcacgagagatcgcgcgcctgccgccgccggagcctgcgagccgagaccgagccatgtggctagaaatcctcctcacttcagtgctgggctttgccatctactggttcatctcccgggacaaagaggaaactttgccacttgaagatgggtggtgggggccaggcacgaggtccgcagccagggaggacgacagcatccgccctttcaaggtggaaacgtcagatgaggagatccacgacttacaccagaggatcgataagttccgtttcaccccacctttggaggacagctgcttccactatggcttcaactccaactacctgaagaaagtcatctcctactggcggaatgaatttgactggaagaagcaggtggaggttgcggtgagctgagatcacaccactgtattccagcctgggtgactgagactctaactaaaaaaaaaaaaaaaaa

SEQ ID NO: 22432 - DNA, 521 bp, Homo sapiens
  misc_feature (1)...(521): n = A,T,C or G
agatgccggnntatcttcannnaatgggaggcctagntancnntggacgagnacgngacccctgtgnccgcccccaacgaagggcttctggctccgcnncggagtccaaaccggaggcctggagtaggctggacctnncacttgggttggggagaaagaggtattctagtaggcctccgattcaggtggctgttgaattgtgggaacctagatgagaatgagacancttattgtcagcaagttctgcaagtatgagcatgatgacattgtgtctacagtcagtgtcttgagctctggcacacaagctgtcagtggtagcaaagacatctgcatcaaggtttgggaccttgctcagcaggtggtactgagttcataccgagctcatgctgctcaggtcacttgtgttgctgcctctcctcacaaggactctgtgtttctttcatgcagcgaggacaatagaattttactctgggatacccgctgtcccaagccagcatcacagattggctgcagtgcgcctg

SEQ ID NO: 22433 - DNA, 441 bp, Homo sapiens
  misc_feature (1)...(441): n = A,T,C or G
nttttgcnccgcgctgcaggaattcggcacgagattgaagttcaggtgccgccaggcacgcgcgcccaggatatccagtgcggcctccagagccggcatgtggcgctgtcggtgggcggccgcgagatcctcaagggcaaactctttgattctacaatagctgatgagggaacatggactttggaggacagaaaaatggttcgtattgttcttacaaagacaaagagagatgcagcaaattgttggacttctctactagaatctgaatatgcagcggatccttgggtgcaagaccaaatgcagagaaagcttacattagagagattccaaaaagaaaatcctggttttgacttcagtggagcagaaatctcaggaaactacactaaaggtggaccagatttctcaaaccttgagaaataactgctttttttcctgcattct

SEQ ID NO: 22434 - DNA, 331 bp, Homo sapiens
  misc_feature (1)...(331): n = A,T,C or G
ntttgcccgcctgcagattcggcacgagagcccgaagaattctgctgctcaccaggacccagctctgggagtgcagctggaatggaacccagcattggagagagccgggagagagccgcagctccgtccacagcaccacggagaggacagcgcctcttgggctgctccctcgtgcacagcgcatgggaggatgggtgccagagggtgggagtgggtgcgcgtgtgtgtatgtgagggcatgttgtccatatccctgtggaatacagaccgtgtaactggacagctgagtgtcataaactctaaaatagtaaaaaaaaaaaaaaaaaactta

SEQ ID NO: 22435 - DNA, 458 bp, Homo sapiens
cctttgccccgcgctgtatgaattcggcacgaggggatctcaccgtgggtccgattagccttttctctgccttgcttgcttgagcttcagcggaattcgaaatggctggcggtaaggctggaaaggactccggaaaggccaagacaaaggcggtttcccgctcgcagagagccggcttgcagttcccagtgggccgtattcatcgacacctaaaatctaggacgaccagtcatggacgtgtgggcgcgactgccgctgtgtacagcgcagccatcctggagtacctcaccgcacaggtacttgaactggcaggaaatgcatcaaaagacttaaaggtaaagcgtattacccctcgtcacttgcaacttgctattcgtggagatgaagaattggattctctcatcaaggctacaattgctggtggggtgtcattccacacatccacaaatctctgattg

SEQ ID NO: 22436 - DNA, 473 bp, Homo sapiens
  misc_feature (1)...(473): n = A,T,C or G
nattgannccttgaccgccttccgaattcggcacgagtcacattgcatgcaagtttgctgagctgaaggaaaagattgatcgccgttctggtaaaaagctggaagatggccctaaattcttgaagtctggtgatgctgccattgttgatatggttcctggcaagcccatgtgtgttgagagcttctcagactatccacctttgggtcgctttgctgttcgtgatatgagacagacagttgcggtgggtgtcatcaaagcagtggacaagaaggctgctggagctggcaaggtcaccaagtctgcccagaaagctcagaaggctaaatgaatattatccctaatacctgccaccccactcttaatcagtggtggaagaacggtctcagaactgtttgtttcaattggccatttaagtttagtagtaaaagactggttaatgataacaatgcatcgtaaaaccttcagaaggaaa

SEQ ID NO: 22437 - DNA, 473 bp, Homo sapiens
  misc_feature (1)...(473): n = A,T,C or G
gcgggcccatagancatcgtcccgcgctgcaggaattcggcacgagatggcttggataaaattgagtttctccagagccacgagaaccaggagatctaccagaaggccttcgacctcattgagcactactttggtgtagaagacgatgatagcagcctggctccccaagtcgatgaaacgcaacagcagttcatcttccagcagcctgaggcccccatggagggcttccagctataatatctgcctccagggaggggaggggatgggaagcaccaccagccagcggaagagcagccctctggtgggcgggaaaccagtgtccccaccatcagccaccacacacctctgctgccctggagactgtgctcttgacctgctccgcccccttccctggagggagcaccctctggacagacagaaccatctgaggctcacctttgggttttgtgacaagaaggggacgtgttgggttt

SEQ ID NO: 22438 - DNA, 481 bp, Homo sapiens
attgatcgcctgtcagaatcatcgagaggcttatcgataagacagaatgctcaggtgttgccacccctggagacaactcacccccagctcccaggtattgtatgtatctaacccccacagtctggagactccagcacagtagacagttggggggacagaaaggacacacagctgtaccattcacagctacagctctagggcctgccagggcccggagtggcctgggaggctcagcagctagaccctggggatttgtgtgctaggagagcttcagcccctcagggagcagccaggggtcgggggtggggggtccccatcttgcccagctgcccattttcctgtgctgatggcattaacaagaaccatccccaactctgggctgcttctcccatcaaaaaaaaaaaaaaaaaaattggggggggggccgggaccccatttcgccttatagggaggggaataacaattcaggggccgcggtttt

SEQ ID NO: 22439 - DNA, 466 bp, Homo sapiens
cccccccccccccttgaacgcctgattgatcgcctgcagaatacactcgagaacaagtcaggtcttataaataaactcacaaatccggaagcatttctaaattctgcaaatgcctcctggggtgacttaacagggaataatgccacaatatacctagctacctaatacatggagctggagctcaacccactgtttttaaggatttgcgcttacttgtggctgaggaaaaataagtagttcgaggaagtagattttaaatgtgagcttatacatagaaacagaatatcaacttaattatgaaatcgttacaacctgttctcttgtatctgaatctgattgcaattactattgtactgatagactccagccattgcaagtgtcagatatcttagctgtgtagtgattcttgaaattctttttaagaaaaattgagtagaaagaaataaaccctttgtcaatgaggctt

SEQ ID NO: 22440 - DNA, 407 bp, Homo sapiens
gcacgaggcacagtggggggtattggctgcagggcagggaaggcattgccgactagataaccgtgtgagcttggactgagcgttggtggttcttcccaaaggaaaggaatttctcccggcctgccaggtctctgggccttcagcgcgggtcctggtgctgcggccacaccaccctggggtgctcattgacagagctgccataatgaacttgaaaggacgggaatcacgagggaagctggggctcccctgcccacaggagaggatccccgttcttcaagcttctctgctcagtgtctactaacgaccgacatttgctaatgtaaataatagtaaattattgagaattctaattcttttacacagtctgtttttaatctattttaattaaataaaatctatgactctac

SEQ ID NO: 22441 - DNA, 507 bp, Homo sapiens
  misc_feature (1)...(507): n = A,T,C or G
agagttctccaagtatgcccnccagggngngcctgagnaggctncgaccgnncccaccctnaacacggatatcaccatgctgtccttgcaggcttctgaattaccttctgaggtaatgtcaaatgacagcaaagcactgagtggctgaataagcggcgttcatgatttcttttattctttgcacaacaacaacaacaacaaattcacggaatcttttaagtgctgaacttatttttcaaccatttcacaaagaggacacgttgaatggacctttttaaaaagaaaaaaaaaatggaaggaaaactgaaaatgatcatcttcccaaggaggtctcttacttggactgagagattcggtatttatgaaaaagacttttatatgccctttctgcaggaggaaagttttctttatatactattcccaccatggggagcgaaaacgttaaaatcacaaggaattgcccaatctaagcagactttgccttttttcaaaggtggagcgtgaata

SEQ ID NO: 22442 - DNA, 489 bp, Homo sapiens
  misc_feature (1)...(489): n = A,T,C or G
aggggnnnnnagggaggggccnnnnnntttagaaaacactganccgcgctgcaggaattcggcacgagctggcgctgcagcgccgctactactccccgtcctgccgggaattctgcctcagctgccctcggctctcgctgcgttcgctcaccgctgtcacctgcacggtgtggctggcggcctacggactcttcaccctctgcgagaacagcatgatcctctctgctgccatcttcatcaccctcttaggtctgcttggttatctccattttgtgaagattgatcaggagactctgttaatcattgattcccttggcattcagatgacttcatcttatgcttcaggcaaagaaagcactaccttcatagaaatgggcaaggtcaaggatattgtcatcaatgaggccatttacatgcagaaggtgatttactacctctgcatcttattgaaagatccagtggaaccacatgggatatcccaagtagtcc

SEQ ID NO: 22443 - DNA, 501 bp, Homo sapiens
  misc_feature (1)...(501): n = A,T,C or G
gcgggcnnnnnaattgannaactgcaggcatgcgcgaancgccacgagtagatgcggcgagggctggngacctccgtgggtttatatgtcggaaactcttctctccaaatcccaggcctggcttccagcaccattcagctgtgcccaagaagccaccctggtctgttctccaactcttttaaatggggcccaacttttctaagtgagcttagcaatgagaagaaaaaaaaacatgaattctttttctggaaaatcagggagacatgggtaataataggtactaataaatatttatagatgagtgaatgaggaaataattacatcaaaaaggtcagtgacaattgataaatgacaaggaaatatttaattaggtaaaactaaatcattgctctctatactaggatagactttatctacttcatctgttcctaagtcagcatgttagttctggggaaggatcataagaaaggaaatactttttaaaagaaaatttggaaacat

SEQ ID NO: 22444 - DNA, 500 bp, Homo sapiens
  misc_feature (1)...(500): n = A,T,C or G
gtgcgtttnnnnnnaattgaccgccttgaggatcttgcacgaggttactttccacccagcactgggagacagagccaggtattagaagagagaagactgagagcctctaggtttgcaggaatgcacttggctgttcttaggtttttgtgtatctttaactgttactctaatttattgatgcttaacttggggcctgtgtacttcttgtagtttggaggcccatgaatagtctttatcgaccctgggaaattgtacagaaaattgtgggtgagtcattcttgggagggaaccccagctcctcacaaaggttcctctctcaccctgccaaggataaggaccattgctctaaattacatattattctgaatgtaatgagagcattgatactagttgaactatttcatcttgtagaacaatttacagttgtctagctcatgtgctgccctgtactgcgacatattcacttctgttggaggcctgcaggtgaccatggcttgcct

SEQ ID NO: 22445 - DNA, 520 bp, Homo sapiens
  misc_feature (1)...(520): n = A,T,C or G
agagttccccnnaggatgggccctatctgaaagccntatcgtgtccctcncgaggaanncgcacgagcggtggcggtggaacggcgcatgcgcatcctaagcggagtcatcagcgccatcagcgaggcggctgcgcagtacaacccggagcccccgcccccacgcacacattactccaacattgaggccaacgagagtgaggaggtccggcagttccggagactctttgcccagctggctggagatgacatggaggtcagcgccacagaactcatgaacattctcaataaggttgtgacacgacaccctgatctgaagactgatggttttggcattgacacatgtcgcagcatggtggccgtgatggatagcgacaccacaggcaagctgggctttgaggaattcaagtacttgtggaacaacatcaaaaggtggcaggccatatacaaacagttcgacactgaccgatcagggaccatttgcagtagtgaactcccaggtgcctttgaggcagcagggn

SEQ ID NO: 22446 - DNA, 469 bp, Homo sapiens
  misc_feature (1)...(469): n = A,T,C or G
gtggntgnnnaaatgataactaagaccatngcggacgaccagccccatccacaacaaagatgccagagtggaaagtaggcagcctgtggcagcagagcatggaggtgaggaacctggtggctggagaaaccaagaagggatcttgaggaggacctcatacatgggtattagacacaaggtcagctgctagcagggagaaaaggaaatggaagctgtaaccagtctggcaggatcttagagaacacttgctgaagataagccaatcactgtgccgagtactgtgccagggatgggcaattggaagatgagctacattcaggcctggccatgttggagcacagggcaccagcaaacaaatagccattgcacaggtaagttcacaacggtgtctattagtgctatgggagcatagatggagaaatgtttagccagggtttgggatgcaggaagatggaagagtgtgagcaaa

SEQ ID NO: 22447 - DNA, 289 bp, Homo sapiens
  misc_feature (1)...(289): n = A,T,C or G
ggtgtccnaagtatgccnaactggagcccgtagcnaacgtcgcgnancgnccctgccactgggccatggagactgtggcacagtatactgtagtgtgaggctcgcggtggcagtggccatggaggccgtgctgaacgagctggtgtctgtggaggacctgctgaagtttgaaaagaaatttcagtctgagaaggcagcaggctcggtgtccaagagcacgcagtttgagtacgcctggtgcctggtgcggagcaagtacaatgatgacatccgtaaaggcatcgtgctg

SEQ ID NO: 22448 - DNA, 461 bp, Homo sapiens
cttagaccccatagaccagcgctgcaggaattcggcacgaggtgctctgccaatgtgactcgctattattttaatccaagatacagaacctgtgatgctttcacctatactggctgtggagggaatgacaataactttgttagcagggaggattgcaaacgtgcatgtgcaaaagctttgaaaaagaaaaagaagatgccaaagcttcgctttgccagtagaatccggaaaattcggaagaagcaattttaaacattcttaatatgtcatcttgtttgtctttatggcttatttgcctttatggttgtatctgaagaataatatgacagcatgaggaaacaaatcattggtgatttattcaccagtttttattaatacaagtcactttttcaaaaatttggatttttttatatataactagctgctattcaaatgtgagtctaccatttttaatttatggt

SEQ ID NO: 22449 - DNA, 478 bp, Homo sapiens
  misc_feature (1)...(478): n = A,T,C or G
aggaggggnnnngnngnnnnttttgcccgccttttgctagcgcttgcggagtaggactgatgatgcattttagctttgagctttttggggttattctaccaacaaacagtccattggaaagaaaacagtccctggaattaacagatcagaatgttcacactggttaatctttttttaacaatgagcatgaaggtagcagaagctggtgtgtttccagatggttcttctaaccaaactaatttttcactgttgacaagcgaggcaagggttgcactggaccaaaggctgaggcttggccatctagcattccatacaaaattgtttcctataagcattccttttattctctattctatcctgggtctgcctccaccgtgagataggagagtctctggtactagctgctggacagtgcccttcatccacggcagttaatggagtcttggaccctttctttctctgggatccctgcccagca

SEQ ID NO: 22450 - DNA, 461 bp, Homo sapiens
  misc_feature (1)...(461): n = A,T,C or G
nataggancnccacttgacccgcgctgcaggaattcggcacgagccaggatctggggctcggaacgagactgcacggattgttgtaagaaaatggcagacaagccagacatgggggaaatcgccagctgcgataaggccaagctgaataaaacggagacgcaggagaagaacaccctggcgaccaaagagaccattgagcaggagaagcggagtgaaatttcctaagatcctggaggattttgtacccccgtcctcttcgagaccccagtcgtgatgtggaggaagagccacctgcaagatggacacgagccacaagctgcactgtgaacctgggcactccgcgccgatgccaccggactgtgggtctctgaagggaccccgccccaatcggactgccaaattctacgggttgcgccgggatattatagaaaagtatttgggtgagtaatgagaatcaaac

SEQ ID NO: 22451 - DNA, 511 bp, Homo sapiens
  misc_feature (1)...(511): n = A,T,C or G
agatgtccnnaggatggcccccaaagaggncctagnnaggctgcgcanncnncncgcccnggagngagncaagaaaatgcagagatggagggccctgagcgagaccagtttgtcatccctctcggacaggaggaggagcaggaagctgccggggaagggagaaaccagcataaactgagaggagaagatgactacaacatggatgaaaatgaagcagaatctgagacagacaagcaagcagccctggcagggaatgacagaaacatagatgtttttaatgttgaagatcagaaaagagacaccataaatttacttgatcagcgtgaaaagcggaatcatacactctgaattgaactggaatcacatatttcacaacagggccgaagagatgactataaaatgttcatgagggactgaatactgaaaactgtgaaatgtactaaataaaatgtacatctgaagatgattattgtgaaattttagtatgcactttgtgtaggaaaaaatggan

SEQ ID NO: 22452 - DNA, 457 bp, Homo sapiens
  misc_feature (1)...(457): n = A,T,C or G
natagatccgcgttggaagaactctgcacgagggaaaatgggaagtccctctgcctaaagtacgtgcccagggagaaacagaagtattaaaagttattcgaacaggaaagagaaagaagaaggcatggaagagaatggttactaaagtgtgctttgttggagatggctttacaagaaaaccacctaaatatgaaagattcatcaggccaatgggcttgcgtttcaagaaagcccatgtaacacatcctgaactgaaagccaccttttgcctaccaatacttggtgtaaagaagaatccctcatccccactgtatacaactttgggtgttattaccaaaggtactgtcattgaagtaaatgtgagcgaattgggccttgtgacacaaggaggcaaagttatttggggaaaatatgcccaggttaccaacaatcctgaaaatgatggatgtataaatgg

SEQ ID NO: 22453 - DNA, 493 bp, Homo sapiens
  misc_feature (1)...(493): n = A,T,C or G
ntttgcaccgctctgcaggaattcggcacgaggaanaagccttatagaaagactacactggatttataagtgtgtttatgtttctctaagaatgggagcttctgttaacttaagggtggagttgttctgaggaaaccagtagattggatgactgactggagaatccagaataacaaatccattagccagacatgtttacttttatattagaagtttgttgattaggtcttaattttcaaatgcaaacaccaagctttaaaaatattgcatatacaatgtattggtcagcaatttaataatatttaatttgaagttaattattgttaatccttctagaaaagttttttttctttaaataaaagtacatatatatacttttttatttagaggttaccagaagctctggntttggtttggtttggtttggttttttggttttttaatcattttcagatgctatccagaaatctgcaagtgtacttttcctgttnta

SEQ ID NO: 22454 - DNA, 499 bp, Homo sapiens
  misc_feature (1)...(499): n = A,T,C or G
gaggtcnngnnaattgaaaaactgaggcctgcggagacggcacgaggntcatgggacggcataactggaaccaatgcttagggcgcaagggtatgtgagagtgggtctttccgtacaggaagtagaagatcttttgtttgggggcctcgtcgtcctcctccatgtcattggccagatagctgaggacagaaatcaggttgctgctcaggggcaccaccaggagagacctccggctgaggtcagcttcccagagaggaaggtaagggaccgtccctagctcaggactggcacccaccctgcagagagccacgccttcctcaggagggctctgctggacagagacctgatcaagggcatctcccactccttcaggatggagacaaaaacccaactggtgaccaagagtggtggcttaggcctggaatcccagcacactgggaggccgaagcaggaggatcacttgaggccaggagtttgagacaggcctgggcaacatacn

SEQ ID NO: 22455 - DNA, 472 bp, Homo sapiens
attgacgcctgagaatcttgcaacggctgcagattcctatcaggctggaattccgtctcataatcaatgccatgtacattaagatctgcgaaagaccaacttttaggcagtgatacttttctcccattccctggggtggggggagtatgcagttggtgctttctgtaattcccttgttctgttttgtttctgtaagcttttcccctggtgtcatggaaaggacttcttaaataaccacattgtgggtggctgtatccaaagtttaaataattggccagaagtgcagagtatcctttcctggattcgtgtcagaaaagggctccttgccacaactgaacttactgtataaaaacctggctagggagatttaattttactaaaattacagtttaatgttaccgtctagccacaaatcaagcagcaaaagctattttgatgatgaaagggggtccccgttgagctggccatctaa

SEQ ID NO: 22456 - DNA, 470 bp, Homo sapiens
atttgacccgcgctgcaggcggtacgagatcactggcagaattccgcacgagcgggcattgccattgatatcgatgcggagcacggagggaaaagaagccgcctgacccccgtctctccagagagttccagcacagaggagaagagcagctcacagccaagcagctgctgctctgaccccagcaagccgggtgggaatgttgagggcgccacgcagtctctggcggagcagatgaggaagatcgccttggagtccgaggggcgccctgaggaacagatggagtcggataactgttcaggaggagatgatgactggacccatctgtcttcaaaagaagtggacccgtctacaggtgaactccagtccctacagatgccagaatccgaagggccaagctctctggacccctcccaggagggacccacagggctgaaggaagctgccttgtacccacatctcccgccagaggc

SEQ ID NO: 22457 - DNA, 464 bp, Homo sapiens
atttgccccgcgctgcaggaattcggcacgagctccagggagcaagacagagacgcaggaatggaaagcggagttcctaacaggatgaaagttcccccatcagttcccccagtacctccaagcaagtagctttccacatttgtcacagaaatcagaggagagatggtgttgggagccctttggagaacgccagtctcccaggccccctgcatctatcgagtttgcaatgtcacaacctctctgatcttgtgctcagcatgattctttaatagaagttttattttttcgtgcactctgctaatcatgtgggtgagccagtggaacagcgggagacctgtgctagttttacagattgcctcctaatgacgcggctcaaaaggaaaccaagtggtcaggagttggttctgacccactgatctctactaccacaaggaaaatagtttaggagaaaccagcttttactg

SEQ ID NO: 22458 - DNA, 464 bp, Homo sapiens
  misc_feature (1)...(464): n = A,T,C or G
tgganannnnaattgaccttcantcgcgctgcaggaattcggcacgagaagcccccggcccctatacatagtttatgttcctggccaccccgaccgcttcccccaagttctgctgttggactctggactgtttcccctctcagcatcgcttttgctgggccgtgatcgtccccctttgtgggctggaaaagcaggtgagggtgggctgggctgaggccattgccgccactatctgtgtaataaaatccgtgagcacgaggtgggacgtgctggtgtgtgaaaaaaaaaaaaaaaaaaaaactcgggggggggcccgggccccaattccccctatagggaggggaattacaattcacgggccggggttttacaacgccgggacgggggaaaannngncntnctgnncctactnnaatattctcttctccttttgttgaccccaaaagggtgttgcgttgatggtg

SEQ ID NO: 22459 - DNA, 465 bp, Homo sapiens
  misc_feature (1)...(465): n = A,T,C or G
atggannnnnnttctggctgccntgacgatttcggcacgagattttctgctttttatactccctgccctctttcttttccttaataaatcttccatgtttaagatgttggcctgaagatctgtcccattcataccatgcaccagctgggactgtccctatctgatcagaggggagattaaagaatcaatgttcccaggggaaaagggccttaaattgtttggtcttttcaatggctgacactgtctccaactctccccttcctccttcttcctcaagcttcctatgcaccctactttcccaggccaggatggttggcactgatcccaaacctctgggggcaggtggaaattggctgtggtgagccatttcttcatgtccattcaactctgaggccttcctggccctagctgagatcatcatctcctcctttgcttttaccccangagtgaggttgggttagaggt

SEQ ID NO: 22460 - DNA, 514 bp, Homo sapiens
  misc_feature (1)...(514): n = A,T,C or G
gccccgcccccnnnnatttgccccgctttgcnccgcgctgcaggaattcggcacgaggtgaaagtgagtcaggctcctccatagcagagaaatcttatcagaatagtcccagctcagacgatggtatccgaccacttccagaatacagcacagagaaacataagaagcacaaaaaggaaaagaagaaagtaaaagacaaagatagggaccgagaccgggacaaagaccgagacaagaaaaaatctcatagcatcaagccagagagttggtccaaatcacccatctcttcagaccagtccttgtctatgacaagtaacacaatcttatctgcagacagaccctcaaggctcagcccagactttatgattggggaggaagatgatgatcttatggatgtggccctgattgggaattaggaaccttatttcctaaaagaaacagggccagaggaaaaaaaactattgataagtttataggcaaaccaccataaggggtgagtcagacaggtctgatt

SEQ ID NO: 22461 - DNA, 480 bp, Homo sapiens
  misc_feature (1)...(480): n = A,T,C or G
agatggngnnnannatttgaaatcgatccgcgctgcaggaattcggcacgagattcggccacagcctcagcctccgtcgctctgtgacctgcgggtattggatgattcgtagctaagactctacgacatccctgaagccgggaaatggtgtgtgttctcattttacccaagatctttggccagtgcagggcatagaagattcattccacaaacttatactgagaagatatgagaaatgtggacagaagaatttacaattaaggaaaggctctaaaagtgtgaataagtgtaaggtgcagaaaggaggttataatggactttaccaatgcttatcaactacccagagcaaaataattcagtgtaatacatctgtcaaagtttttcataaattttcaaattcaaacaccctangaaaaaaaaaaaaaaaaaaaaaaaaaaaaaaaaaaaaaaaaaaaaaaccctgggggggggcccggcccc

SEQ ID NO: 22462 - DNA, 465 bp, Homo sapiens
  misc_feature (1)...(465): n = A,T,C or G
gcgtgggngggnngttaagtttgcanttngatctgcacgagnccngagcccccaacctgagcggacgtggaaaaagaacgcccctcctcaagtgtctggctgaaagatgccacccagggaagggaactcgggctagctaaggaggccattcttgatgttgcttctagatctcatgtcatcaccgagccctcagctgctggtggcagctgctcagcagacccttggcatgggaaagagacggagtccaccccaagccatctgccttcacttagctggagaggtgctggctgtggcccggggactgaagccagctgtgctctatgattgcaactgtgcaggggcatcagagctccagagctatctggaggagctgaaggggcttggcttcctgacttttggacttcacatccttgagattggagaaaacagcctgattgtcagtcctgagcatgtatgtcagcactt

SEQ ID NO: 22463 - DNA, 453 bp, Homo sapiens
catagaccgctttggagacctctgcacgagctcgcccgggagatccgtgccctggagagaagcaaggagcagctgctctcggagagagctggacagaagtttgtattacaggctcgtagcaccggaggtttctgatggagcagacaagttgaggaaggccggccttgctgaacacagtggactgaccgggtctggacccctcccccacaggtgactgtgcactgcagcagagagaagaggaaggagtcagaaacactctactgagatcctcccggatagataacgtacgtacatattgatacctctacccggactctgtgattaatggtgaggtggggagcacccgagtcctctgaactgaacagctgtgcagcaacatctgctgggtggaatgctggaaggaccgcgtcacacaccaatcctagctaaagtttcacccaagtcttctgaaaa

SEQ ID NO: 22464 - DNA, 475 bp, Homo sapiens
  misc_feature (1)...(475): n = A,T,C or G
ccccccccccgngccnnnnttagannncaatagatcactctgcaggaattccgcacgaggttgtcttcaggtgttgtcatctactcccacactaaaatgctctcatctcctagacgtgaatgtttaattgcaccccagcatgacatttggcctgtgcttagcaggcagtttaatgcccaaaagcacagcacataaacaagccaacacctaaatcctaattagcaagaatcaggctgtatctctgtgtcactgcatctgctctggtcaccatcactgtatgcttagggcagccacgtgaacattaattattgtacactcccaagacagtagttaccgttaatgcaggcagaagtagtggccttgtttgtttcttgtgctgctgctccccttgctgctgtcccatacaccctcctcgtgaggtgtacgtctgtggtgcctcatgattcangcgctgatgagtaaagaaaatgggaag

SEQ ID NO: 22465 - DNA, 498 bp, Homo sapiens
  misc_feature (1)...(498): n = A,T,C or G
atggnnnnnnnnnattctctcgcctgcaggaattcggcacgagcagccacatgccaactcatgtccaatactgctttgcctggtgtggggaaggattgggtcttgtcccccaacacagcttctgtggctgactgtaatactgtacaactgtttctgaccattaaatgctgttgtactctgtgtggcctctgctgtgtttcctggggaggaagcagcactaggatatagatattcattcgtcataacaggcaatctaagccactctatactacaagagatggatttaaattgtaacctgttcttaccaaagaactaaataaaaaatgagtacagagcccgaanaaaaaaaaaaaaaaaaaaaaaacctcgggggggggcccggcccccaattccccctatagggggccgaataacaattcccgggccggggtttaaaaacggggggacgtggaaaaaannnnnnnnnnnnnnnnnnnnnncnnccnncccccctacacc

SEQ ID NO: 22466 - DNA, 504 bp, Homo sapiens
  misc_feature (1)...(504): n = A,T,C or G
acggttgttnnnttatatgtcggctgcatgaattcggcacgagcacgggtgcggngctccggcctgggtgcacggngcagctcctacggggtcacctcaaccgagtcctacaaggagacactgcacaagacaatggtgacccgcttcaacgaggcccagtgagcagcttcaagagcaacttctccacatgttgggtgtccatcctggggcagggaaggacagagtgttggatggctgggacggggccttgctcttgtcggccagcccactccccagccagagagggcttgaccaaatcaaattgaggtggtgacttttgttggaaaattgggctgggatcacgtcctgttttgtaataaaagctgaaaagtcaaaaaaaaaaaaaaaaaacctggggggggggcccggaccccatttccccttatagggagcggtataacaattcatgggcggcggtttaacaccggcggggacatgagaaaaaannnnnnnnnnnnannnncn

SEQ ID NO: 22467 - DNA, 480 bp, Homo sapiens
ggcgcccaaatcgcattccccggctgcaggaattctgcacgagccaggcaggaggaggtgtggacagtgatggtacggcggccctgcatcagcctgcgggtggcctctggatcctccgtggaccgaaccgtccccccaggaacacaccttcaggtagaccccgaagcctcaaggccggggctggagcggagaccccagggcctctcaggagacagtgaggctgcccctcctaccacctacctcattctgcctactcaccccaggggccacagccacagcctgctggactcaggactgtcctgtcaactccagacaactgattaaacaggccgggtacagtggctcgcacctgtaatcctagcactttgggaggccgaagcgggtggaccacttgacgtccgtagttcgagaccagcctggccaacatggtgaaaccccatctctactaaaaatacaaaaattagccaggtgtggtggcac

SEQ ID NO: 22468 - DNA, 487 bp, Homo sapiens
  misc_feature (1)...(487): n = A,T,C or G
agggcaggggnnnnnnnaaatgatccgccctgcaggcgaagatggcggagtaaggcgtgccgctgcaaactggcctctgggccgggggcgagcagcccccgggaggccgagtgcatctgttggaccgtgcgaggagaagaaaaaaaatatcggccagaggagaggaactaaccgaacattcttcctccctaccttatagaggggagtggtcatctacactaaagcaaagtgttaggcgcgtccgtgcgaagagaccaccaaacaggctttgtgttccttatcacaggaagaaaattttccttgacctttaggtgcttttatattcatctcaaaaacaaaattctgaactcaggacttggcaagtgtctctatgttgtctcctagagtgggtagtcctgcttcttttacccagttactttcccgtttttgaaatgtggctatcacttctctacacattacctccatgatttggaatggaaaaggccac

SEQ ID NO: 22469 - DNA, 478 bp, Homo sapiens
  misc_feature (1)...(478): n = A,T,C or G
agtgcggggnnnnnattgaaattgatccgcgctgcaggaattcggcacgagccagcacactgcccggccagtcctcctacctcccgagtctgcgggcagctgctgtcccagcatctgctggtcatttcgccctgacagtcccaaccagaacccctgggacttgaatccagagacgtcctccaggaacccctcaacgaagctgtgaatgaagaggtttcctctttaaacctgtctggtgggcccccagatatcctcacctcagggcctcctttttttgcaaactcctcccctcccccgagggcagacccagccagctgctaagctctgcagctccccagtggacagtgtcattgtgcccagagtgctgcaaggtgaggcctgctgtgctgcccgcacacctgagtgcaaaaccaagcactgtgggcatggtgtttccctctctggggtagagtacgccctctcgctgggcaaagaggan

SEQ ID NO: 22470 - DNA, 454 bp, Homo sapiens
  misc_feature (1)...(454): n = A,T,C or G
natagaccccgttgaagaactctgcacgagggccaaggcatgttgctgtgacctttctgctctgttccccaaccccactgaggcctgctgcacaggtcaatgccttcgttatcgttattgtactgtcactttgttcttgaggtagtagtcaaggatcaggaggggcagatgtcttctctgggctgcgtggggccggagcagaggtgagcagcaatgcactggttcgggagcccccatcagcctccttgtgcaaactgggcccccatgccacagtctggctttccctccatctgccccaggacaagagcaagaaggacatcagttgcccagtcatgtgatcccctgccatcttgccttaagaacagccttcccccaccagcagccatggctggctggggctttagccaagccacctactgccaggaattggagcctcagttccctcctgtgtcaa

SEQ ID NO: 22471 - DNA, 538 bp, Homo sapiens
  misc_feature (1)...(538): n = A,T,C or G
agagatcgcgctgtgattcggcacgaggatctattaatatgccgaacctaactacagatgactttttaatattgtaaaatattttctgctttttgacttgcatctgagagtttcttgtttcagtaaaaaaagaaaagacaaaaaaatcagctttggaaagtaatttaaatgtaccttattttttttttctttatgttttctttcattgggcaacagctaaaagggcccagcaaggtaatttatggttgagctgatgtcaattggttcttgtcttgagtcgactcaatttagcccaagtgctgaaacaagaaatgtcatttttttcatcaaagacaccagggcagatttttaagtaaagaaagacaattggacccttaagaatttatgcatttgtaaagttgctgttgatccaaatattttcaagccatgtaatccattggttttgtgggcagtttaataaacctgaacctttgtgtgtttctaattgtacctgagttgaccatcctttctttttatagnatatttcttggatgatatt

SEQ ID NO: 22472 - DNA, 456 bp, Homo sapiens
  misc_feature (1)...(456): n = A,T,C or G
ctagaccccatagaccccgctgcaggaattcggcacgagaactggaccagtggtgatgcattttcccctgttcaacatagatgcctgtggaggtgatattgaggcatggagtgacacatacgacacattcaagcttgctgacacctacactctagatgtggtggtgctactcttggcattagccaagaagaatgtcagggaaaacaagaagaagatccttagagagttgatgaacgtggccgggctctactacccgaaggatagtgcccgaagttgctgcttggcatagatgagcctcagcttccagggcactgtgggcctgttggtctactagggccctgatgtccacctggccttcctgttcttcactcccttcagccacacgcttcatggccttgagttcaccttggctgtcctaacagggccaatcaccagtgaccagctagactgtgattn

SEQ ID NO: 22473 - DNA, 448 bp, Homo sapiens
aatagacacctcgctgcacgcggaggggtcttttccttcttctttcctacctaccccttttctcttggccaggggcctcgtatcctacctttccttgtcccctgggctggctgcacagaggattgccccttctcttttcagagctggccctcgatgccaaattagcatttagtattttgcacaaagtctaagggaccatggctgcctgccttggggaggaaccatagctccctctgggccgcttctggcctcttggagccatgggccaaaggccaaggggatgggcagaggtctgtgtttggtctggcccagttccccatcattaaactcagcctgactgctgcctacctctggttccctctcactgcccctgcttcccccatcacagcatggactactatgctaagggtaaggccaaattgcctgccattgccaattcagcatagac

SEQ ID NO: 22474 - DNA, 500 bp, Homo sapiens
  misc_feature (1)...(500): n = A,T,C or G
acggggctnnnttcttactgaccgcctgcatgaattcggcacgagaatactctaaaatgtttgtcatcctttagaataatgggaattaaagttgagcagttttccatctctaccaaatccttcaccacaagcagcattctattacagtatgaagaattgtctcatatgttaaaactgtacttttctctaacctttctctcactcctacaaggcccttttctcaaatcatatttctgagagaaatgtatggttctttctcacaggcctgctgatttgtaactgtgccatcgaatagagcaattagatccatcagacctttttcccctcattaggttcagtggaaccattctggttaaaacagcatgaactgaactcagtttacattcatattctatgggcaataccatttgcgttttggaactgtttatctgctgttccctatcaagtattaatgtagggatgtcactcaggctgcgtagcactgggctgagttcaactgc

SEQ ID NO: 22475 - DNA, 480 bp, Homo sapiens
  misc_feature (1)...(480): n = A,T,C or G
ngggtggggnaaactccgtctgcaggaattcggcacgagacagtacaggaagacttgaggacattttcttgggcatctgtgaccagtaagaatcttccacccagtggagctgttccagttactgggataccacctcatgttgttaaagtaccagcttcacagccccgtccagagtctaagcctgaatctcagattccaccacaaagacctcagcgggatcaaagagtgcgagaacaacgaataaatattcctccccaaaggggacccagaccaatccctgaggctggtgagcaaggtgacattgaaccccgaagaatggtgagacaccctgacagtcaccaactcttcattggcaacctgcctcatgaagtggacaaatcagagcttagagatttctttcaaagttatggaaacgtggtggagttgcgcattaacagtggtgggaaagtacccaaattttggtntgtggggttgatgatc

SEQ ID NO: 22476 - DNA, 488 bp, Homo sapiens
  misc_feature (1)...(488): n = A,T,C or G
acggacccgcctttcggattcggtacgaggagagagagagagagagagagagagagagagagagagagagagactgctctcaacatatgtggggcgcctcagtgcccggcccaagctcaaggcctttctggcctcccctgagtacgtgaacctccccatcaatggcaacgggaaacagtgaggggtggggggactctgagcgggaggcagagtgtgcctttctttctccaggaccaataaaatttctaagagagctaaaaaaaaaaaaaaaaaaaactggggggggggcccggcccccaattccccctatagggaggggtataacaattcaggggccggggttttacaacggggggaggggaaaaaaannnnnnnnnnnnnnnnnnnnnnnnntnntnnnnnnnnnnnnnnnntnnnnnnnnnnnnnnnnnnnnnnnnntntncnnnnnnnnntnnnnnnnnnnnnnnnnnnnnnnnnnnnnnnnnnn

SEQ ID NO: 22477 - DNA, 474 bp, Homo sapiens
  misc_feature (1)...(474): n = A,T,C or G
cgtggtcnnnnaattgacctcgtgcgcgatttcggcacgagcagacatgggggaaatcgccagcttcgataaggccaagctgaagaaaacggagacgcatgagaagaacaccctgccgaccaaagagaccattgagcaggagaagcggagtgaaatttcctaagatcctggaggatttcctacccccgtcctcttcgagaccccagtcgtgatgtggaggaagagccacctgcaagatggacacgagccacaagctgcactgtgaacctgggcactccgcgccgatgccaccggcctgtgggtctctgaagggacccccccccaatcggactgccaaattctccggtttgccccgggatattatagaaaattatttgtatgaataatgaaaataaaacacacctcgtggcncactaaaaacatgaaaaaaaaatagctaaaaaaaaaaaaaccctctagactggccgggggggg

SEQ ID NO: 22478 - DNA, 450 bp, Homo sapiens
  misc_feature (1)...(450): n = A,T,C or G
nttgaccgcgtgaggatcttgcacgagcggcatctgctccccgccgtctgctccctctccactctcttctcaaatggctgacttctggttctccctcaagtgttttttacactgggtgttcaaatttattttaagagatagggagggaggggacataaagggaatgcatacattgctagtcacatttttaaaattaacattttggaatagtgtttatggaaatctttagcttttaatcatttttaccaatttgaacagtttaataaactggttctgctctcttctgaatctcatgcctttggcaccttggtaggtgcaggaggagctcagtgcaaaaatcactttggggcctcattaaccctttagagacaagctttgccccaggctgcggaccagacagatgcttaaggaaggttgataccagcttcagtctctactggattagcccta

SEQ ID NO: 22479 - DNA, 458 bp, Homo sapiens
  misc_feature (1)...(458): n = A,T,C or G
natagaaccccatagatccgcgctgcaggaattcggcacgagccggcgccccgggcccctgcacatcccgcacgggttttcttctcggccccagcaagcctctttggggtcgaggtcaaggaaaggtcgcaccgagatcccctctaatttattcaaaggtttggcggcggcgcgtaattttttccccctcttccgcctacacccgctgcgtctactggtgtctcgttcctttccctttaccggagtcgattgcctcactgcatgtgtattcgggctgactgggttacttttttaaacactacgaatggtaatttctactcttctggacttcaaactaagaagttaaagagacttctctgcaaataaacaaatctcttctgctgtccttttgcatttggagacagctttatttcaccatatccaaggagtataactagagctgtcattatgaatgtgac

SEQ ID NO: 22480 - DNA, 499 bp, Homo sapiens
  misc_feature (1)...(499): n = A,T,C or G
tggggnnnnnnnnnattcgcctgngctgcaggaattcggcacgagccagaggaactctttgtccacaggagagcagcggatccacgccagagaagatgcttgtatcttttcacggctcttctctgagaaatgaagccacaccacgatacagtcagcaagaggaagccgggaatgggagatggcaacagtccctgtcactggaacgctggcctccctggacaagccaccctttaggaaccccaccccttatgcctgtggcggtggcacggtgctgtatcctgcctgggctctggcctctactctctcctccctctggctctgcctcccctgtttctcaggggcctggatgcctctcgctctggccaaatgccttcaaaaaagatgacttcccagtccgtcagggagacacttcctggaanaaaaaaaaaaaaaaaaaaaaaaaaanccctggggggggggccgggcccccaatcccccctaaagggggcggataacaatc

SEQ ID NO: 22481 - DNA, 477 bp, Homo sapiens
  misc_feature (1)...(477): n = A,T,C or G
gtagaaaaccttgcaccgcctgcaggccgccgcagtcttcgcaccatgccgccctacaccgtggtctatttcccagttcgaggccgctgcgcggccctgcgcatgctgctggcagatcanggccagagctggaaggaggaggtggtgaccgtggagacgtggcaggagggctcactcaaagcctcctgcctatacgggcagctccccaagttccaggacggagacctcaccctgtaccagtccaataccatcctgcgtcacctgggccgcacccttgggctctatgggaaggaccagcaggaggcagccctggtggacatggtgaatgacggcgtggaggacctccgctgcaaatacatctccctcatctacaccaactatgaggcgggcaaggatgactatgtgaaggcactgcccgggcaactgaagccttttgagaccctgctgtcccagaaccagggaggcaagaccttcatn

SEQ ID NO: 22482 - DNA, 453 bp, Homo sapiens
attgcccgcctgcggatttggtcgcctccctaccgctccaagcccagccctcagccatggcatgccccctggatcaggccattggcctcctcgtggccatcttccacaagtactccggcagggagggtgacaagcacaccctgagcaagaaggagctgaaggagctgatccagaaggagctcaccattggctcgaagctgcaggatgctgaaattgcaaggctgatggaagacttggaccggaacaaggaccaggaggtgaacttccaggagtatgtcaccttcctgggggccttggctttgatctacaatgaagccctcaagggctgaaaataaatagggaagatggagacaccctctgggggtcctctctgagtcaaatccagtgggggggaattggacaataaattttttttggtcaaatttaacaaaaaaaaaaaaaaactcgaggggg

SEQ ID NO: 22483 - DNA, 457 bp, Homo sapiens
  misc_feature (1)...(457): n = A,T,C or G
ncctagaccgcgtttgaagatcngtcacgaganacaacagaatctcagtgtattctcaaagtaaaaaggcataaccaagcactctcttatcttgccttattgctatactatttacatcccactgcagaacagcagatttgaggcttttctatatacttctcagagcactgaaaagaaaggaagggtttgcagaggagagtgtagaaatcccagtggtagcatgtaccaacatgtgattagaaaggtactggtaccctgacatttgagttatactctgtgctgcctgagcaagatttgtagaatcatataattaccttttcatgtatatttgaaatcagaggtgtttaaaatacctatgagataccaatgtagccttaacatatgtcaaaatgcattgctggttagataattatttggactacacataaactcctaatattgaatcattacctatcag

SEQ ID NO: 22484 - DNA, 462 bp, Homo sapiens
  misc_feature (1)...(462): n = A,T,C or G
atttgccccggctgcaggaattcggcacgagtctaaagcaaagtcattggatgggaggaggaagaaaaagtcccataaaggaacttttgtagtcttatcaacatataatctaatcccttagcatcagctcctccctcagtggtacatgcgtcaagatttgtagcagtaataactgcaggtcacttgtatgtaatggatgtgaggtagccgaagtttggttcagtaagcagggaatacagtcgttccatcagagctggtctgcacactcacattatcttgctatcactgtaaccaactaatgccaaaagaacggttttgtaataaaattatagctgtatctaaaaaaaaaaaaaaaaaaaaaaactcgggggggggcccggaccccaattccccctatagggagcggataacaattcacgtgccgcggttttacaacgccgggacgtgggggaagnnnnnnnn

SEQ ID NO: 22485 - DNA, 474 bp, Homo sapiens
  misc_feature (1)...(474): n = A,T,C or G
aactggatagcccctcngaaannctcgatccgcgctgcaggaattcggcacgaggggaaaaggagtgagaagacaaagccgtcaaagccccaacagctttgtatttctccagcccggcgcagaccccggagctcccgaggcactccctccatctttggaacacgccagtaattgattgataacaggaagctatgagggaccctgtgagtagccagtacagttcctttcttttctggaggatgcccatcccagaactggatctgtcggagctggaaggcctgggtctgtcagatacagccacctacaaggtcaaagacagcagcgttggcaaaatgatcgggcaagcaactgcagcagaccaggagaaaaaccctgaaggtgatggcctccttgagtacagcaccttcaacttctggagagctcccattgccagcatccactccttcgaactggacttgctctaaggccaagact

SEQ ID NO: 22486 - DNA, 467 bp, Homo sapiens
  misc_feature (1)...(467): n = A,T,C or G
ntttgccccgcgctcgcaagaaanntttcgcccccgcgctgcaggaattcggcacgaggccgcttgtgctgcagccatgtgtttagtgatccctgaaaagttccagcatattttgcgagtactcatcaccaacatagatgggcggtggaaaataacctttgccatcactgccattaagggtgtgggccgaagatatgctcatgtggtgttgaggaaagcagacattgacctcaccaagagggcgggagaactcactgatgatgaggtggaacgtgtgatcaccattatgctgaatccacgccagtacaagatcccagactggttcttgaacagacagaacgatgtaaaggatggaaaatacagccaggtcctagccaatggtctggacaacaagctccgtgaagacctggagcgactgaagaagattcgggcccatagagggctgcggcacttctggggccttcgtg

SEQ ID NO: 22487 - DNA, 453 bp, Homo sapiens
  misc_feature (1)...(453): n = A,T,C or G
catagaccgcgttggagaactntgcacgagcctccacaattatttctagatgatttctggataagaattgctctctcggtaccagacagtttgacattctccacccttagaaaatgactgacattgttttgttactgctcctacccaccaaggggataaagaaggcgagttctgagtgttggatgagtcagtcgcgtggaaggacgtggagcgtggcgctctgtaacttcctgccgtctgccaccccgccacgtgtatttaaccctcgcactttctccactgtggagatggctggggcggcgccccacagtgtgtattcctgtcctctatgttagagtgcatcagaagcacatttactgtgctatctatatcgctatataaaagtgttttataaaaacccagaataggagcacgacgcatgattggtgtttgaggcgtttgccagctgggaca

SEQ ID NO: 22488 - DNA, 472 bp, Homo sapiens
  misc_feature (1)...(472): n = A,T,C or G
nattgacncctcgcactcgcctgcaggaattcggcacgaggcagaaatggcacctcgaaaggggaaggaaaagaaggaagaacaggtcatcagcctcggacctcaggtggctgaaggagagaatgtatttggtgtctgccatatctttgcatccttcaatgacacttttgtccatgtcactgatctttctggcaaagaaaccatctgccgtgtgactggtgggatgaaggtaaaggcagaccgagatgaatcctcaccatatgctgctatgttggctgcccaggatgtggcccagaggtgcaaggagctgggtatcaccgccctacacatcaaactccgggccacaggaggaaataggaccaagacccctggacctggggcccagtcggccctcagagcccttgcccgctcgggtatgaagatcgggcggattgaggatgtcacccccatcccctctgacagcactcgcang

SEQ ID NO: 22489 - DNA, 481 bp, Homo sapiens
  misc_feature (1)...(481): n = A,T,C or G
gatgggncaggccnngaaaattgagnnccattgatacgcgctcgcggaanncggcacgagaaagatttaaggaagcacagaaaactgtaattcctggaacctgctgcgtaaaaccataaaggagtgtgttaccagtagtttggagggcatttttaaatttattttcaaaattttaagttaaaagtcagtcttacagcttggatgtttggatgtggatgtttggctgaatttatatatagtgtgtactcatcaataccacattctttgttgtattcaagaaccgttaagagtgtgctaattccctgtaggtacataatgaggaaaatttgctccactacaaccattaaaaaataattttggccagatacggtagctcgtgcctgtaataccaacattttgggaggccaaggcagaaggatattgaggctaggcattcaagaccagcctaggcaggataataagaccttgtctctatttaaan

SEQ ID NO: 22490 - DNA, 465 bp, Homo sapiens
  misc_feature (1)...(465): n = A,T,C or G
atggcccgcctgcagaanttgcaccggctgcacgaattcggcacgagtgggcaggtggatttggggaggagaggatcagcagcagcagcagtactcagtgatagggggctggctgggtcaggaatggtgagatgaacatgcaagtggaagagagaatagttgaaaatgtgaatgaaagtagctctggagcctctcccttaccccaccccacacacacgcaacagctctgtacccctgcccagaacttggaacctcccaggaatgctgccttccttcagcccagcctccagtcctgggttccctcaggaattcgaagaccttggctaggtggtgagcttggaagagctgggctttgttttctgtctcctctaacctctttccttactccttatcccatcccatttgagttcaggggtgaggcttaagatcttaataaataataccttactgcttaaactgtggctt

SEQ ID NO: 22491 - DNA, 308 bp, Homo sapiens
cgagcccacacaaggcggtgatgctcccacgccacgtgcacacacacagacccacatgtgggtggggggcaccctcacgtgcttggcctcaatgcaggcctgctgggcccggacgtggctgtcgtcctcatcaccctcgtggtttcgctggcactcttccagctccctgggggttgaccaggagccggtcagagatggacctggccagatgtctgaccacaccccaatctcagagctaacatccacacttccccacatttcctgcttgccagtaaagccttcgataaacaaaaaaaaaaaaaaaaaaa

SEQ ID NO: 22492 - DNA, 498 bp, Homo sapiens
  misc_feature (1)...(498): n = A,T,C or G
aggggatnnnnattatgaccgcctgcgngattcggcacgagcctggcaccgttatccctgcacacggcacagagcatccgtctcccctcgttaacacatggcttcctaaatggccctgtttacggcctatgagatgaaatatgtgattttctctaatgtaacttcctcttaggatgtttcaccaaggaaatattgagagagaagtcggccaggtaggatgaacacaggcaatgactgcgcagagtggattaaaggcaaaagagagaagagtccaggaaggggcggggagaagcctgggtggctcagcatcctccacgggctgcgccgtctgctcggggctgagctggcgggagcagtttgcgtgtttgggttttttaattgagatgaaattcaaataacctaaaaatcaatcacttgaaagtgaacaatcagcggcatttagtacatccagaaagttgtgtaggcaccacctctgtcacgttctggaacattctgtcc

SEQ ID NO: 22493 - DNA, 478 bp, Homo sapiens
  misc_feature (1)...(478): n = A,T,C or G
ngggtgactgacgctgttgagacggctgcaagaattcggcacgagatttattttccaatttagttttactttcagtgcatatcaaagttgttgtactcttcagaccaacaaattaacttgagggcaaattacatagctttccatgtacccttttttcctcaggtgctaatcaaaggctctgaaaatggatactgctttagtgatgtctgctttattcttaaaatgcttatttcttttgctagatgtaaagatttggtgttaacaaaagtggttttaatatgtaaatatgaatgaatgcctttagtttaccctgtttgtctattattaatctgttttcatttatccttcatagaggaggatcctttcatgatcttgaatacatttcattagatattgttgcattttaagaatgaaaatacaactggtttctgtcttagattaatcctgctgctatgagacnactgaaatcaagaatgtg

SEQ ID NO: 22494 - DNA, 453 bp, Homo sapiens
attgacccgcctgcaggaattcgttgcgacgcctctgggctactatactggacagtacagagtcatagagtataaaatatgactttaactttggagatggagaggtaggcctgtaattatggtactttaaaaattcagaatatttagaaaagcatctaatagaattatccacttggtttccttcatcttcattttaatatgttctagaagtaggatcagcctgttccagtttgccaagcattattaaggaggaataattccataccatgtaaaataccatgatacgctgattatactacattaacaaatttttaagatgcgttcactaaattctgtgctgtttcttcaaaacaatatagcttaaattgcatgtgaactgtatatcttagctatcttggctttatagtattcttacaacataatcatgtatattaacaaacaggcctgtgattc

SEQ ID NO: 22495 - DNA, 453 bp, Homo sapiens
  misc_feature (1)...(453): n = A,T,C or G
ngtgctaaaatgatnactctcgaatgacgcncgctgcaggaatcggcacgagagaagatgtaccttggcctggagtcattcttgggcagaccccagcttcagtatggcactggtgtgctgaccaagtcatcgcgcagaggggccttgcagccaaaaacattgctcatgccaaaggctctactcttatggctggcttcttaaagctcctgccaatgtttatcataggtgtcccaggaacgatttccaagatactgctgactgatgatatagcttgcatcaacccagagcactgcatgctggtgtgtggaagcagaactggttgctccaatattgcttacccacgcctggggatgaacctggttactgtgggccttcggagtataatgatggcagcgatgatagcagcactgatgagggacttatactctatctttaacagtgccagcaccatat

SEQ ID NO: 22496 - DNA, 455 bp, Homo sapiens
  misc_feature (1)...(455): n = A,T,C or G
nattgacnatcgatgcagcgctgcaggaatacggcacgagctcacatctcttaaaaagacactggctaccacacttgcaccccgagtcctgttgcccgccatcaaaaaaacttacaagcacattgagacgaactggaagaatcacatgggtccgtttatgagcatcttgcaagagcatattggggcgatgaagaaggaagagctcacctcccatcagtctcagctaaccgcctttttcctggaggccctggacttccgagcccagcactctgagaacgatctggaggaagttggaaaaacggaaaattgtatcattgactgtctagtagccatggctgtcaaactttccgaggtcacattcaggcccctgttcttcaagctgtttgattgggctaaaacagaagatgccccataggacaggttgttgacattttacaacttggcagattgcgttg

SEQ ID NO: 22497 - DNA, 479 bp, Homo sapiens
ggcgccccattgacatcgaccgcctgcaggattcggcacgagacactttcatctaatttggggtatcactgagctgaagacaaagagaagggggagaaaacctagcagaccaccatgtgctatgggaagtgtgcacgatgcatcggacattctctggtggggctcgccctcctgtgcatcgcggctaatattttgctttactttcccaatggggaaacaaagtatgcctccgaaaaccacctcagccgcttcgtgtgggtcttttctggcatcgtacgaggtggcctggttgaggctcctgccagcatttgtcttcattgggctggaacaggatgactgctgtggctgctgtggccatgaaaactgtggcaaacgatgtgcgatgctttcttctgtattggctgctctcattggaattgcaggatctggctactgtgtcattgtggcagccctatgcttagcagaaggaccactatgtc

SEQ ID NO: 22498 - DNA, 468 bp, Homo sapiens
  misc_feature (1)...(468): n = A,T,C or G
gtgtntttagacgttgtccgcctgcggacgacgagccgacgccacaatgcagattttcgtgaaaacccttacggggaagaccatcaccctcgaggttgaaccctcggatacgatagaaaatgtaaaggccaagatccaggataaggaaggaattcctcctgatcagcagagactgatctttgctggcaagcagctggaagatggacgtactttgtctgactacaatattcaaaaggagtctactcttcatcttgtgttgagacttcgtggtggtgctaagaaaaggaagaagaagtcttacaccactcccaagaagaataagcacaagagaaagaaggctaagctggctgtcctgaaatattataaggtggatgagaatggcaaaattagtcgccttcgtcgagagtgcccttctgatgaatgtggtgctggngtgtttatggcaagccactttgacagacattattg

SEQ ID NO: 22499 - DNA, 476 bp, Homo sapiens
  misc_feature (1)...(476): n = A,T,C or G
natggaaagactgagngacntccgaaanggcacgagaggataaggnccttgagcaacaggggaaatgttctgcttagaagctatagtaaaacattctgatatatccacacattgtgataaaatcgaagcagacggaggcctgcagctacttctgaggctgtaccgacttgacaaggactgccctaaagtacagagaaatataatgcgtgtcattggaaatatggctttgaatgaacatcttcattcttctatagttcgctcaggctgggtttccatcatggcagaagcaaagaaatctccccacattatggagtcctcacacgctgccagaatcctggcaaatctagaccgagaaactgtgcaagaaaaatatcaggatggcgtatatgtgctgcatccccaatatcgaacaagtcagcccattaaagcacatgtcctttttattcatggccttatgggagcagcattcaaaacan

SEQ ID NO: 22500 - DNA, 476 bp, Homo sapiens
  misc_feature (1)...(476): n = A,T,C or G
nattgaccgatcgaccgccttcggattcggcacgagccgcaatgtccgctacgtccacatcccagatgacgtgaacatcacctcgaccattgagcagcagctgcagattatccatcgggtgcgaaactttggtggcaagggccaaggccggtgggaatttcccccaaaaaactgtaagtgaggccctcagcaagccctggccccaactcggagtcctccagtgatctccggagctagttccctgccctcacaccctgtctggtacccgagaagaaagcagggccaggccagaagctggtgtccaacagacaccacctgtcaaagctgcctttcacagggttccacctcccagactcactctgggacccagaatcctatatgtggccttggggtaggtgacaatccccctttttgatgatctgaatctctgacttattgattatggaacctgtcaagtagttttcaactctcccagt

SEQ ID NO: 22501 - DNA, 480 bp, Homo sapiens
  misc_feature (1)...(480): n = A,T,C or G
agcgcgccgtgnagctgaaaaactgacggcntccgaanncgcacgaggntcctgcaagccgtcagaatgtgggagcccccagcccaactgattgtaactgtcccctgttacctgtgacatgaacctccaacagcacctggaaacggttccctctgtcagctgctctgtagacagggctggggagatctcagagttcacacctcgcctgttgtaggggaggttgggggtagggtttggaatggccaagtgcccttggaacctcccacagctatggccgtcctgacctcatcccaggaactctacggtgaccaggaaccacccctctgacgaggtctgtagcggcccttctcagagtggaacagcccacagtgctagttgtgcctggtcttacctgtactccacggacctcggtgaagcaaaagcttcagggcagagggaatgaggcaacccagtggcagccccgctgggccccgtggctcn

SEQ ID NO: 22502 - DNA, 409 bp, Homo sapiens
  misc_feature (1)...(409): n = A,T,C or G
tgattcggcacgagggcagatgttcagcgatgcacgtagcggggacgatgccttggatggagacgatgacctggtgatcgacatcccggagtgaccgtgacatcacgccatgcccaccacggccccgcccggcgccctccccgtgccagcacacacgagtccagcttcctcggaggtgtttattgatgcccagctgccatgctccggccactgacacaaccagaaaaggcgtaaacatgcacgggtgtcccccaggagggtggcaggggccctgccttcaaaccccggccccctccaggggacagttatttaaacgagtggccgggagcatctgccacctgctggggaggcagagaccctgcaatggccacctctttaaaagggcagctgtacagggctaggttttttn

SEQ ID NO: 22503 - DNA, 473 bp, Homo sapiens
  misc_feature (1)...(473): n = A,T,C or G
cttggaacgccctgnaggatttgacccgcgctgcaggtctggacaggccaccttccccatctccctttagtggacctgaagtggatactccagcctgggattgctgccttctcttttgaaccctgtcctattggggctttggggcttttgtgcccttgggacccaggcagctcctgggggtgtgtgagttatggtctgccgtgtgcctgagggccagtcatgcagcatccacctacgcaggcttgagagtccttgggagagtccaggtgacctgggttttaattaaaacgcgtgctgtgtattgtggatgggctctgcccaaagaagaaaggtagggcttgaagtggagatgaccaggtttgctgcacagggaaggtggaggcaacgatggactctggcatggtcttacaaaccaggaggggtcaacagtacctttagaagcgggttgttgcccgctggttggagacctgttt

SEQ ID NO: 22504 - DNA, 296 bp, Homo sapiens
  misc_feature (1)...(296): n = A,T,C or G
attttaacagcagggaagttggtcagggacatgtggccacttattattacctaaagaaaacatttgttccctgttcattttattttaggggccagatctaacattgtagtgtctttcaccagatagacttctactgtttcatcaaanctccctcttaactagacctagactttctactccaatcaggctaatctacttactgaatgtgacatatttattcctagttccatacctttgcacatgccctactctccactaattatacttaaaagtgcaaaaattttttctttagtaac

SEQ ID NO: 22505 - DNA, 466 bp, Homo sapiens
  misc_feature (1)...(466): n = A,T,C or G
aggagttccngnnngttgcccaacactgacactcctggntagattcgccacgagccctggccacctatgcaccagtcatctctgcagaaaaggcataccacgagcagctgtcggtggcagagatcaccaatgcctgctttgagcctgccaaccagatggtaaagtgtgatccccggcacggcaagtacatggcctgctgcctgctgtaccgtggagatgtggtgcccaaggatgtcaacgctgccattgccgccatcaagaccaagcgcagcattcagtttgtggactggtgccccacaggcttcaaggttgggatcaactaccagcctcccactgtggtgcctgggggtgacctggccaaggtgcaacgtgccgtgtgcatgctgagcaacacgaccgccatcgccgaggcctgggcccgcctggaccacaagttcgacctgatgtatgccaagagggcgtttgt

SEQ ID NO: 22506 - DNA, 477 bp, Homo sapiens
  misc_feature (1)...(477): n = A,T,C or G
ggggtgggggaggnnggaaactgaaaagcttcgtgaacncgcacgagcgacnnngngaagctgcgggagatgctgattcgggtcaacatggaggatctgcgggagcagacccacacccggcactatgagctgtatcgccgctgtaagctggaggagatgggcttcaaggacaccgaccctgacagcaaacccttcagtttacaggagacatatgaggccaaaaggaacgagttcctaggggaactccagaaaaaagaagaggagatgagacagatgttcgtccagcgagtcaaagagaaagaagcggagctcaaagaggcagagaaagagctgcacgagaagtttgaccgtctgaagaaactgcaccaggacgagaagaagaaactggaggataagaagaaatccctggatgatgaagtgaatgctttcaagcaaagaaagacggcggctgagctgctccagtcccagggctcccan

SEQ ID NO: 22507 - DNA, 474 bp, Homo sapiens
  misc_feature (1)...(474): n = A,T,C or G
ggtggcnaattcccgtctgcacgacttcggcacgagcatctgttttcttctgtatttcttttatatttaggtctttaatccacctggattttttgtttgggtttttgttgttctttagtcaaagatccaattcttttttctatttaaataaccatcattgactgactagtccatccttaccccacccctactgattatgatgtcactgctgtcacatattgtcatacgtggggggctgttactgggttctccagtctcctccctttatctgtttgtgtatccctgtgctggtgccacactgcctcgttcactgatgtttttaataagcctgcaccatttgtatgtcaattcttcctgctcttcttatccatcaaaaatcactttaacttttcttggtcctttactcttccatataaattggttattcaaccatcaggttccagggaaaagccctgtagtattttcattggactt

SEQ ID NO: 22508 - DNA, 569 bp, Homo sapiens
  misc_feature (1)...(569): n = A,T,C or G
ccgtatgactgtttctccgctcttgccgcttgccaccactgcggcatcatgcgacagatcgttcgcntctcattcgagacgacgaccgaagaaaaanattggaccgcctaaggattgacngcgctgcaggctgatacggcggatttgacctgtacttcattttggacaaatcaggaagtgtgctgcaccactggaatgaaatctattactttgtggaacagttggctcacaaattcatcagcccacagttgagaatgtcctttattgttttctccacccgaggaacaaccttaatgaaactgacagaagacagagaacaaatccgtcaaggcctagaagaactccagaaagttctgccaggaggagacacttacatgcatgaaggatttgaaagggccagtgagcagatttattatgaaaacagacaagggtacaggacagccagcgtcatcattgctttgactgatggagaactccatgaagatctctttttctattcagagagggaggctaataggtctcgagatcttggtgcaattgattactgtgttggtgtgaaagatttcaat

SEQ ID NO: 22509 - DNA, 456 bp, Homo sapiens
cgggcccttgcctgatcgcctgcagaattcggcacgagcatcacttctcgcctgtcagtgattccatgtttcgtaacgggggattctctgcctttttgtatcaaagaacaagcaaatggacccccgcccgctgcaggcgcccatagccatcgggtctctaaagctgagtggctagcagcgtttgtttgtttgtttgtttttttttttctgaaggggggacagtcacttcctcctccctccccacccctgtcgcatccacgtgcgacctggaggactggtcaaaaccgttactgtgaatgagtgaagatcctggaggaccctgggccccaggccagctcccatcgttgggggacggtgaacggccatgtgttaatgttacgatgtttttaaaagacaaaaaaaaaaaaaaacctcgggggggggccgggcccccaattccccttatagggagccgaa

SEQ ID NO: 22510 - DNA, 450 bp, Homo sapiens
  misc_feature (1)...(450): n = A,T,C or G
nttttgccccgcgctgcaggaattcggcacgagcaggcaagggcttccaactgaggcagtgcatgtgtggcagagagaggcaggaagctggcagtggcagcttctgtgtctagggaggggtgtggctccctccttccctgtctgggaggttggagggaagaatctaggccttagcttgccctcctgccacccttccccttgtagatactgccttaacactccctcctctctcagctgtggctgccacccagccaggtttctccgtgctcactaatttatttccaggaaggtgtgtggaagacatgagccgtgtataatattttttttaacattttcattgcagtattgaccatcatccttggttggtatcgtgtaacacaaataatgatattaaaagcatcaaacaaaaaaaaaaaaaaaacctcgagggggggcccggcccccatttcg

SEQ ID NO: 22511 - DNA, 482 bp, Homo sapiens
  misc_feature (1)...(482): n = A,T,C or G
agtggtttaatgatgcccgttgagggcatcagagagaacagagactaaaacataaaataaaagtactcaagaaaaatggggttatcccagagccatccaagctaccttatataaaagcagcaaatgagaacccccaccatgatataaggaagggccgtgcctcatggaaaagcaacaggtggcctcaagaaaataaagaaacacaaaaagaaatgaagaacaagaatagaaactgggagaagcacaggaaggctgacagacatcgtgaagtggatgaggattttcccaggggccccaaaacctactcttcttctggcagttttaaaacccagaagccttctaagccctttcaccgttcatcacattaccacacgtcaagagaagacaagtctcccaaggaaggcaagaggggcaagcagaagaaaaaggagaggtgctgggaagatgatgacaatgataacttatttcttattaagcagagn

SEQ ID NO: 22512 - DNA, 404 bp, Homo sapiens
cgagccggggagcagtgagtggaaatcccccacgagggtctagctctaccacattcaggaggcctcaggaggccagcctgccatgagagcacatgtcctctggccaggagtagtggctgagctctgtgatcgctgtgatgtggacccagctccaaggagcagagtgtcggggatggaggggcccagcctggactgactgctacttcctgtctctgtttccattatcacccagagagggacaagataggacatggcctggaccagggaggcaggcctcccactcagagtctgggtctcactggccccaagtctcccacccagaactctggccaaaaatggctctctaggtgggctgtgcaggcaaagcaaagctcaaggctggttcccagctggcctgagcaggg

SEQ ID NO: 22513 - DNA, 505 bp, Homo sapiens
cgccccccccccccccccccccatagcccgccttaggatgcctccgagccagacagggatatatgagagaagaagataacccagcgaactcaccgctgttttttccttagcccgtcatgtccccagctggtctgccttcttctccatctttcagagtcttcttatatttgttttgtagataatgtgcatggtctttagttgtacttagagggtggaaaagtggatgacttagggaaaagtggatgactctatcttcctggaagcagaagtcctagtggagcacagtggcatgatcatagctcactgcagcctcaacctcctgggctcaagggatcctcccacctcagcctcctaagttgctgggactacaggcatgtaccaccacatctggctaatgctgtgtttttatagatgagaagaaagtaaccagagaggtacatgtaaaggaaccaagatttttctagcctggagccttgctgtggccttgaagagggcggacaccacc

SEQ ID NO: 22514 - DNA, 500 bp, Homo sapiens
  misc_feature (1)...(500): n = A,T,C or G
naattgaccggctgtatgaattcggcacgagcgggcatctagggtacagcctctgctcatggcactgggcctccagttcttccacatgtgtgcacccccagcttggccaaccctcagccttgcggtggggcccgaagcatcttcccttccgcttggcgtctctgggattgggatgagtgcctggctcccatctcctcctcaccttttgttgctatcggcagctgctggctcaagggcatcccacctccgggctctgggttcctctgccctggaagggctccaggacccgtcccaataaccacccacggccaggagggccaaggccccgtgctggatatttaaatttaagggccggtctccagggcgcgtagataaataaatacactcagcgtcaaaaaaaaaaaaaaaaaaactcgggggggggcccggccccaatccccctatagggagcggattacaatcactggccgtgtttacaacgtggggatggagagaacnnn

SEQ ID NO: 22515 - DNA, 467 bp, Homo sapiens
  misc_feature (1)...(467): n = A,T,C or G
nttgacccgcctgcggttcagatctgctggatctaggtccagggagtctcagtgatggtctgagcctggccgcgccaggctggggtgtcccagaagagccaggaatcgaaatgcttcatggaacaaccaccctggccttcaagttccgccatggagtcatagttgcagctgactccagggctacagcgggtgcttacattgcctcccagacggtgaagaaggtgatagagatcaacccatacctgctaggcaccatggctgggggcgcagcggattgcagcttctgggaacggctgttggctcggcaatgtcgaatctatgagcttcgaaataaggaacgcatctctgtagcagctgcctccaaactgcttgccaacatggtgtatcagtacaaaggcatggggctgtccatgggcaccatgatctgtggctgggataagagaggccctggttgaaagaagctcaan

SEQ ID NO: 22516 - DNA, 460 bp, Homo sapiens
  misc_feature (1)...(460): n = A,T,C or G
atttgccccgcgctgaggngaaattgtccccgggctgcaggaattcggcacgagcacatacagagtgggccccgggctggagaaagagctgcctggatgagaaacagctcaaccagtggggatgaggtcaccaggggaggagcctgtgcgtcccagctgaaggcagtggcaggggagcaggttccccaagggccctggcacccccacaagctgtccctgcagggccatctgactgccaagccagattctcttgaataaagtattctagtgtggaaacgccnaaaaaaaaaaaaaaaaaaaaaaaaaattttttgggggggggcccgggccccaattccccctttggggggggggtataaaatttatggggcggggttttaaagcggggggaatgggggaagtggcnnnngccnnngtgtnnnggcgctgcntgatgttagctgtgggcactgtggatttg

SEQ ID NO: 22517 - DNA, 537 bp, Homo sapiens
  misc_feature (1)...(537): n = A,T,C or G
nggagtttcgctggctgagcaattcggcacgagcttctctgggtctggctcttctactgagagaacaaggtgggcaacagaagtcaccaaaacctcctccagttgtgcaatgctaaccttgagagcagggccaggctgagacaaacacagaacccagcttcttgcagataagatgtgaaaagagtctgttactcattccaggtcctgtggcacttttagcagagatggatgtttccagctggggcttgccttagtttactagagacactgtaacaaaacaccttagactgggtaatttgtaggtaatagacatttatttctcagttttggaggctggaagtccaagatcaaggcacaggcagatttggcgtctggtgagggcccactctgtacttcatagatggtgccccttgctgtgtcctcacaaggtggaaggggcaagnncagctctgctgcagctgtntataagggcactaatcccatctaggaggcctncaccctcatgacttaatcatctnctaaaggcccactcttatt

SEQ ID NO: 22518 - DNA, 511 bp, Homo sapiens
  misc_feature (1)...(511): n = A,T,C or G
agggagtccccnnnagggnnnnnnnttactgaccgccctgtactgatnagcctgcaggaattcggcacgagggtttttgttttttcagaaggcagtgatgatgaaaacttaggaagaaggtattttgcaataagcttggctgagtgtccatgggaagaatactttccctaaagagagagaagcactcacagaggctgcctttctcctgagctcggggagaaggcagcacatcacaacctgtcacattgaaataggcactcattctgctatttcaccttccgtcctgagcagagcctgaattacgtttttgggcaatttcatggtgtttcaccagagggcgctagagactcaaacgaaatgtccatctggaaagattcgggagacactttgccgaggggatgaagctgagatgatgcttgtatggaaagtttgatatttttatcagtcacatggcttttgaaaaatgatgtatatattttaaattaactattttcaataaaatatttcactc

SEQ ID NO: 22519 - DNA, 476 bp, Homo sapiens
attggaccgcccttcgagattggccccgcgctgcaggattcggcacgagaacaaaggccaagaccaaggacctccagaacgtgtagtcttattaggagagttcctgcatccctgtgaagatgacatagtttgtaaatgtaccacagatgaaaataaggtgccttatttcaatgctcctgtttacttagaaaacaaagaacaaattggaaaagtggatgaaatatttggacaactcaaagatttttatttttcagttaagttgtcagaaaacatgaaggcttcatcctttaaaaaactacagaagttttatatagacccatataagctgctgccactgcagaggtttttacctcgacctccaggtgagaaaggacctccaagaggtggtggcaggggaggccgaggaggaggaagaggaggaggtggcaaacgtggtggcagaggcggtggttttagaggtggaagaggaaggtgag

SEQ ID NO: 22520 - DNA, 471 bp, Homo sapiens
  misc_feature (1)...(471): n = A,T,C or G
nttgaccgcgcagaattcttggaggtcctgtacacatattttgctactgtgtggatccatttatttttattgtggagtgtatacaacaggttgcgaactggctgcctgtgtcttattttgacttgcactgccattttgaggggagaagaatcaattagtggcaaacatttaaaaatgcaattttttgcagaccaaagtataattttaaaaaatgcaaattttctaaaagacacatctcttgaaaaatgagatgatgtggccaggcgcagtggctcacgcctgtaaccccatcactttgggaggccgaggcgggcgggtcacgaggtcaagagatggagaccatcctggccaacatggtgaaaccccatgtctactaaaaatacaaaaaaattagctgggcgtactggcatgcacctgtagtcccagctgcttgggaggctgaggcaggagaatcacttgaacccgagaggt

SEQ ID NO: 22521 - DNA, 466 bp, Homo sapiens
  misc_feature (1)...(466): n = A,T,C or G
nttgaacgcctgcggatttcgcacgatcgcagaccagacttcgctcgtactcgtgcgcctcgcttcgcttttcctccgcaaccatgtctgacaaacccgatatggctgagatcgagaaattcgataagtcgaaactgaagaagacagagacgcaagagaaaaatccactgccttccaaagaaacgattgaacaggagaagcaagcaggcgaatcgtaatgaggcgtgcgccgccaatatgcactgtacattccacaagcattgccttcttattttacttcttttagctgtttaactttgtaagatgcaaagaggttggatcaagtttaaatgactgtgctgcccctttcacatcaaagaactactgacaacgaaggccgcgcctgcctttcccatctgtctatctatctggctggcagggaaggaaagaacttgcatgttggtgaaggaagaagtggggtggaaga

SEQ ID NO: 22522 - DNA, 467 bp, Homo sapiens
  misc_feature (1)...(467): n = A,T,C or G
ntttgcccctgcgctgcaggaattcggcacgagtttcagttaagctattagtaataaaagtgaacattgctactatctgagcctacatacataacttgtgtgatttcaaattaaacttgcattatgtgttaattttcttgcatctaaaaaagcatagaattcctactcacacagctcagcaacaaccattttgatggtaacaggcaatttctttcattagttttttaaattcagggttctggatattaaattaaaatggcattcttaaagattttcttcaaaaagcaatcctaaatgaaagtgtgtaaattataagaagctggcgatcttttgatatgctgtttcacaggatcctgacactggagggcagctgtcttgtgcattacttgtgtttccagcaccaaagttgtgggacatgttgctgtagactggctggcagtcctgggtgcattcagtctctctgcctc

SEQ ID NO: 22523 - DNA, 482 bp, Homo sapiens
acggcccccattgccatctgtcccgcgctgcaggtcattgtaaaaccaccacagtcctatgaattattcctattttaccaataaagaaaatgaggtcattggagatgaagtaacttgccaaggtcacagctcataggtgttggcaccaggatcccaacccaatcaatgtggttccaaagatcacactctcatgtagtatctgtatggcctcccagtgcagtcagtgttgactacatgcagagagctgagccaggtggtggagtgagacaaagcagcaaaaagaacccaggtctgctcatttctgcctgccagcatcatttcacaaagcccctgaccctgtgacgacatgcaactctctggaaagatgccttgaagacaaaacagggcacagggcacccccacatcgcttgcctgagtcactacattccttaaatgaccccagtccttgccttttcttacacatgagatgtctgatgggatta

SEQ ID NO: 22524 - DNA, 504 bp, Homo sapiens
  misc_feature (1)...(504): n = A,T,C or G
gggggattttgatnnccccntnngnaaattgatnncgcctgtangaattcggcacgagccttggaggggctccaaactgagaggggagggaagaccgcagggaaaggcggacctcagtgtctgaaaagccagcttagagtgggagggcctgggagtagaagctgctggttgcgcagccacctcgggatactgcacacggagaggagggaaaataagcgaggcaccgccgcaccacgcgggagacctacggagacccacagcgcccgagccctggaagagcactactggatgtcagcggagaaatggctttgagctcagcctggcgctcgggtctgcctctgtggctcctctggagcgctgcctgctcccgcgccgcgtccggggacgacaacgcttttccttttgacattgaagggagctcagcggttggcaggcaagacccgcctgagacgagcgaaccccgcgtggctctgggacgcctgccgcctgcggccgagaaatgca

SEQ ID NO: 22525 - DNA, 519 bp, Homo sapiens
  misc_feature (1)...(519): n = A,T,C or G
aaggananggtgccnnggnnnnnnnagnnnaattgtatcgccttcgngaatcgtcacgacgtgaagtcattatcaggaccaagagaacatatcgtggacctggagatgctgacagtcagcagtatagggaccttccgcacaagctctgtgttaagattgacaataatagtggggccattttcattttagtcttttctaagagtcaaccacaggcatttaagtcagccaaagaatattgttaccttaaagcactattttatttatagatatatctagtgcatctacatctctatactgtacactcacccataattcaaacaattacaccatggtataaagtgggcatttaatatgtaaagattcaaagtttgtctttattactatatgtaaattagacattaatccactaaactggtcttcttcaagagagctaagtatacactatctggtgaaacttggattctttcctataaaagtgggaccaagcaatgatgatcttctgtggtgcttaaggaaact

SEQ ID NO: 22526 - DNA, 500 bp, Homo sapiens
cttcgacccgcgttgtgcgccgcgctgcaggaattctgcacgagaagggctgaggatttttggtgcgcacgctcctgctcctgactcaccgctgttcgctctcgccgaggaacaagtcggtcaggaagcccgcgcgcaacagccatggcttttaaggataccggaaaaacacccgtggagccggaggtggcaattcaccgaattcgaatcaccctaacaagccgcaacgtaaaatccttggaaaaggtgtgtgctgacttgataagaggcgcaaaagaaaagaatctcaaagtgaaaggaccagttcgaatgcctaccaagactttgagaatcactacaagaaaaactccttgtggtgaaggttctaagacgtgggatcgtttccagatgagaattcacaagcgactcattgacttgcacagtccttctgagattgttaagcagattacttccatcagtattgagccaggagttgagggtgaagtcaccattgcagatgc

SEQ ID NO: 22527 - DNA, 502 bp, Homo sapiens
  misc_feature (1)...(502): n = A,T,C or G
agggccnnnnnnaatttgacnatcngtccgacctgtacgaattcggcacgagctgaggagaaacccaagacagaggccaaagccaaggaagatgacaagaccctctcaaaagagcctagcaagcctaaggcagaaaaggctgaaaaatcctccagcacagaccaaaaagacagcaagcctccagagaaggccacagaagacaaggccgccaaggggaagtaaggcagggagaaaggaacatccggaacagccaaagaaactcagaagagtcccggagctcaaggatcagagtaacacaattttcactttttctgtctttatgtaagaagaaactgcttagatgacggggcctccttcttcaaacaggaatttctgttagcaatatgttagcaagagagggcactcccaggcccctgcccccaggccctccccaggcgatggacaattatgatagcttatgtagctgaatgtgatacatgccgaatgccacacgtaaacactn

SEQ ID NO: 22528 - DNA, 496 bp, Homo sapiens
  misc_feature (1)...(496): n = A,T,C or G
ngaggggtnnnnnnaattgatcgtctgtggactctgcacgagccctcctgaggccagctgctctaatatcgatggtcctgcttgccagagagttcctctacccagcaaaaatgagtgcctcagaagtgtgctcctctggcctcagttctcctcttttggaacaacataaaacaaatttaattttctacgcctctggggatatctgctcagccaatggaaaatctgggttcaaccagcccctgccatttcttaagactttctgctccactcacaggatcctgagctgcacttacctgtgagagtcttcaaacttttaaaccttgccagtcaggacttttgctattgcaaatacaaaacccaactcaacctgcttaagcagaaaataaatttattgattcaaaaaaaaaaaaaaaaaaaaaaaaaaaacccttgggggggggcccggcccccaattcccccttaaggggggggaaaaaaaattcccgggcccgggttt

SEQ ID NO: 22529 - DNA, 513 bp, Homo sapiens
  misc_feature (1)...(513): n = A,T,C or G
agttnacnanntnagnnntncncncncgcnnnncccccnaatttgaccggcctnattgcaccccctgcaggaattcggcacgagtggacgtcgagaggctccaggaggcgctgaaagattttgagaagagggggaaaaaggaagtttgtcctgtcctggatcagtttctttgtcatgtagccaagactggagaaacaatgattcagtggtcccaatttaaaggctattttattttcaaactggagaaagtgatggatgatttcagaacttcagctcctgagccaagaggtcctcccaaccctaatgtcgaatatattccctttgatgaaatgaaggaaagaatactgaaaattgtcactggatttaatggtatcccttttactattcagcgactatgtgaattgttaacagatccaaggagaaactatacaggaacagacaaatttctcagaggagtagaaaagaatgtgatggttgttagctgtgtttatccttcttcagagaaaaacaatt

SEQ ID NO: 22530 - DNA, 535 bp, Homo sapiens
  misc_feature (1)...(535): n = A,T,C or G
gcgcgattcgttggctgaggaattcggcacgagacagcaaccagtactcaacaagcagctgacttatgttttattggacattgtgatacaggaactgtttccagagctcaataaggtacaaaaggaagttacctctgtgacatcttggatgtaaacacttggatttggtatagaataacccattgaaatttctgctgtgcgagggtggtagaaatttacttttttgggtatattcttatatatattatgtacatcgctgtctgaaattttagttattttttgtttttaataaagactaacacaaacttaatgattaaaagtgattgagtctcatagtctttcatttgctagctgtgatccaaattttattagaacataagtcacttgttattgccatttttaaaagagaaaattcataatgatgttatggcaaacagataagactgataaacttcgtattgtatagctttgaaaatattatgcctagtatggagaaacaggaataagatctgattttctagagttatataattan

SEQ ID NO: 22531 - DNA, 475 bp, Homo sapiens
  misc_feature (1)...(475): n = A,T,C or G
ggggcccattgcccgcctgcangaattcggcacgagctgctacacaagaccctgagactgacctgcaggacgaaaccatgaagagcctgatccttcttgccatcctggccgccttagcggtagtaactttgtgttatgaatcacatgaaagcatggaatcttatgaacttaatcccttcattaacaggagaaatgcaaataccttcatatcccctcagcagagatggagagctaaagtccaagagaggatccgagaacgctctaagcctgtccacgagctcaatagggaagcctgtgatgactacagactttgcgaacgctacgccatggtttatggatacaatgctgcctataatcgctacttcaggaagcgccgagggaccaaatgagactgagggaagaaaaaaaatctctttttttctggaggctggcacctgattttgtatccccctgtagcagcattactgaaatacat

SEQ ID NO: 22532 - DNA, 507 bp, Homo sapiens
  misc_feature (1)...(507): n = A,T,C or G
aaggtnnnannnnnnncagnngnnnnnnnnnnattgancaattgacccgccctgcaggaattccgcacgagcccaggcgacccccatccctatctagacttaggagctcagtttgggatggaggtgggagaacaaaaatgaatagggatttcacttgggaaatgaagtactttagttggcttccgagttccagactatatgtccagatattaattgactgtcttgtaagccacttgtttggttatgatttgtgtcttatcagggaaaaggtgcccagctgccagcccagctccgctgctatctttgcctcacttagtcatgtgcaattcgcgttgcagagtggcagaccattagttgctgagttctgtcagcactctgatgtgctcagaagagcacctgcccaaagtttttctggttttaatttaaaggacaaggctacatatattcagctttttgagatgaccaaagctagttagggtctccttgatgtagctaagctgcttcagt

SEQ ID NO: 22533 - DNA, 495 bp, Homo sapiens
  misc_feature (1)...(495): n = A,T,C or G
cggccnnnnnnaattgaccgcttgaccggctgcggattcggcacgagattgactcctgtactcagtgcacctgccacagcggacgggtgctgtgtgagacagaggtgtgcccaccgctgctctgccagaacccctcacgcacccaggattcctgctgcccacagtgtacagatcaaccttttcggccttccttgtcccgcaataacagcgtacctaattactgcaaaaatgatgaaggggatatattcctggcagctgagtcctggaagcctgacgtttgtaccagctgcatctgcattgatagcgtaattagctgtttctctgagtcctgcccttctgtatcctgtgaaagacctgtcttgagaaaaggccagtgttgtccctactgcatagaagacacaattccaaagaaggtggtgtgccacttcagtgggaaggcctatgccgacgaggagcggtgggaccttgacagctgcacccactgctactgcctgc

SEQ ID NO: 22534 - DNA, 478 bp, Homo sapiens
  misc_feature (1)...(478): n = A,T,C or G
natttgacncactcgatncgccntgtcggattcggcacgagagacactgaggcttcgtccttatagtagtcaggagcaggcgattgaagtaattctgtcctgcggggttcagcatcatgcacgttccccctgggccattctctgatgcagggcacttgctccacactctgggaacccagattcaccagtctgccctgtcacgtagatgaaggagctgcatttatctttctggctcctaattcctttaaaattacatttgttgcagaacctccacaaggctaaataaaattacatttgtgaccatcagagaactgaataaaccattaactggccatcctggttttgcagagatcacgatgttgacagctcctggttgacccacagctacccatgtgagttatctccactaacatatccaagaatctttgtaggacaatgtctccacctgcaagggctttcaagtagaactctttttttt

SEQ ID NO: 22535 - DNA, 493 bp, Homo sapiens
  misc_feature (1)...(493): n = A,T,C or G
nggggtnnnnnnaattgancgtctgaggaacttcgcacgagagacatggctccctgtctccataaacatccagccattcagacaaagggggcctggagatacagagagcccaaataatgcctgctggattgtctcctgatgagtacatgtggactcacctgaggaagggaaggaagggaataatcttttatgtttcatttaccttatgaaaagtgttaaaacattgccaactcaaaataacattatttaatgcatgtgcaaagttaggtcttcccagttgtctcagtgctgaggaacctcatcagagaagcatggaagatgccaaaggatttttggaaggtaaagaaggctgaatagtgaccacatgggcctgttttcagggtcccagcttagttaagtcacccatgcacctggtcattgtgtctcccatgcacatccagcgtttctcagaagcagacccacccttaagttgacaggattgatggaacatgct

SEQ ID NO: 22536 - DNA, 486 bp, Homo sapiens
  misc_feature (1)...(486): n = A,T,C or G
agatgtcccnnnnaggagnnnnccttgatnnccctcatcgctcgcgctgcaggaattcggcacgaggtgtagattcttttgaaggttcattaaattgcatgaatagagacagatcaaataaatacgccaaagggatttttacagttagagataaaagagaaaaccattcactgtattttatttcatttctcctgattcagatatttttagtaatttgcttatatgtaaaagttgtttttgtggagtcagtggatatatttctaatgaagtgctagactatccaattacttaatttcttatacctttagataatcagtatgaaaagttcccatttataatggaaatgaaaattcttaactaaactatacatgtgatatgtatttctagaagagaataaaaacccaagtcagttattagatttaaatcaccttctgaaatgctgctatagggctggtatctgtaaaagaatatcctgatgcatctgtt

SEQ ID NO: 22537 - DNA, 504 bp, Homo sapiens
agcggtggggaattgacggctgtggtattcggcacgagatgacattgtgtatcgattttttgttgttgaccaaaatcacacacatggaaacatgtaattcaacagagtgggaaagctagcagattcttggcttagtattactaataggcaggattgtacaatgagcaactatcagattattcctttcagtggttcttatggcatctaaattactgaataaattattaatccattaatcagtgaatcaaattatgattacaattatcaaatgaatgctcagcattaattgaaaactgttttgtgaaacatgtctacccagaaaagtagcattctataaatactattaaacaacttagctatattatttttaagtattaaattatatgtcaagcagttaaagtgaatttcagagtaaaagtaaggcatgtttctgagcaacattgataatttcttaatttgcaaatttcttcttattttggtacttggaatatagtgtgagatttt

SEQ ID NO: 22538 - DNA, 531 bp, Homo sapiens
  misc_feature (1)...(531): n = A,T,C or G
gggggaagatgncccngggnnnnnnnnaggnngattttgatcggcccctnngaaattgtancgcctgtcggaattcggcacgagccggaacggcggcgacaagggtgttcccgaactagagtggggcatacataatcttgctgctatgcttcgaagctgtagtctgaatcaacctaagttttaaacagaaggtgaacctctgagatagaaaatcaagtatattttaaaagaagggatgtgggatcaaggaggacagccttggcagcagtggcccttgaaccagcaacaatggatgcagtcattccagcaccaacaggatccaagccagattgattgggctgcattggcccaagcttggattgcccaaagagaagcttcaggacagcaaagcatggtagaacaaccaccaggaatgatgccaaatggacaagatatgtctacaatggaatctggtccaaacaatcatgggaatttccaaggggattcaaacttcaacagaatgtggcaaccaggctgacaggggctgggaac

SEQ ID NO: 22539 - DNA, 509 bp, Homo sapiens
  misc_feature (1)...(509): n = A,T,C or G
gaggggnnnnnnnnnnnagnngnnnnnnnnnttttgancaattcganccgccctgcaggaattcggcacgaggaagtcgcaccctcctcctccggagaagtagagaaataaatttctcccaccctaaaccagtctttgagtgattgcagtatgactccatttccctggtgcattcatataatagttcacctggtgaaaacaatgaagattatttacaatgctaccctgctttttctggtgtcctgaacctggaagttgtgctttttaagtcttatgatgtaatcagcacgatttcacttcctgaatttcgatgaattctaagacatgggcaagatcgggttgtaagacctctgagatttaaggccatgccctggatcatggtgaacttaccaaagcaaacaatgcctgtgagatggtcctgcagcagccaaccagtgaactcttttggtgacatcctgttcttgttgtataactttatattcctataaatccattaaggccccaataaa

SEQ ID NO: 22540 - DNA, 492 bp, Homo sapiens
  misc_feature (1)...(492): n = A,T,C or G
gcgggattgaattcgatggctgtcangcacagcgnaacaaatttattataaaagtgtagctcgactcttcttggtcttggagtttgagagtacagaattacatggaatgaagagaggtataagtacatattttaatggaaatgaagtataaattaataacttgacttacccctccataagctactgctaactggagatacccttgtatgcccaacctgtaaaggaaaaagttctatttctatatttataggacattcttctcactcaaggaacatataagaaatatgtaggcttcaatcagttgctctcaaccctgactgcattttagaaacatttggagagtttttaaaaatatccatgcctgaatcttgattcccattttcatgtaatttgagacaagacctggtcatcagtattttttttaaagttctccaggtaatttgaatgtgcaggaaggattcagaatcactggtttaatttgttattgaaaan

SEQ ID NO: 22541 - DNA, 511 bp, Homo sapiens
  misc_feature (1)...(511): n = A,T,C or G
nggcgaggcgncctttgcccgcctgcgatgganatgacctccatctgtccagagtatggctatgatgctactgagtatgccaggagcccagggagctgcagcagcagggtctgaaccccctccagccaccacgagcccagagggacagcccaaggtccaccgagcccgcaaaaccatgtccaaaccaggaaatggacagcataccaagaccccatctctaaaagaagtttaaaagaatgtttcaaaggccaggcccagtgactcacgcctgtaatcccgtactttctggggaggatcacttgacaccaggagttcaagaccagcctgggcaacatggcaagacctcttctctaccaaaaaaaaaattaagaagacattagttaggcattgtgacatgtgcctgtaatcccagcttcccaggaagctgaggcaggagaatggcttgagtccagttcgaggctgaagtgagccatagtcatgccactgcacttcatcctgggtaacagaatga

SEQ ID NO: 22542 - DNA, 458 bp, Homo sapiens
  misc_feature (1)...(458): n = A,T,C or G
ggacgggaaccnnnaattgacccccatttgaccgcgctgcangaattcggcacgaggtggaggcagctaaaagccatctcatctttcaccgtattcaacaagcccattataacaagtctttcacgctcaaccattcaaacaatcccaacaatcccagcctaagaatttcctggcatttgatgaaaatggctgtgggttttgctatctttaagctccctgggaagcaggatataagcccagggctggcaggctctttctagctacctgctcttgcacatagagtttgcctcatggttgcaagaaggctgccatagctccagatggcacatagacattccaggcagcaggaaaaaggaaggagcacttaaccgaaggaggtcagggagttggttagtctccacctgaagaagagagccatgaaccagcttcagttgactaacgggctcctgtgagtgcat

SEQ ID NO: 22543 - DNA, 450 bp, Homo sapiens
  misc_feature (1)...(450): n = A,T,C or G
ntggaccccgcgctgcaggaattcggcacgaggggcaacacacgtgtataggtctatgagtctggaagaatgtatatagccatggaatcactaccatgtcaaaacataggatatttccattatcccaaaaagttccctcctgcccctctgcagtcaaacacttccctcccccagctcctggcaactgctgatctgaactgtagacctgaaaatgtcattcagaacccatttcatctggacccttctctctgtgtcaacattgctgtgagcggtgtctgtgggatttttctggacgttctctgccatgcccctgctccttccttcctgccttctggaaggcacccctgccaggagtcggctgcattaaagtgggtgtttcaggggtgtcttcctttactctcttctcactgatttccagctatccctgtgtctcttgtttaatgagtgcct

SEQ ID NO: 22544 - DNA, 480 bp, Homo sapiens
  misc_feature (1)...(480): n = A,T,C or G
attgaccgcctgcagaattcgtcgcgagcggagctgtgtgccgacctgtgcctgaggctcctacgacactgtggcagccgcatcagcaccatccgcacgcacgccagcgcctcgctgtacctgctcatgcgacagaacttcgagatcggccacaactttgcccgtgtgaagatgcaggtcaccatgtctctctcgtccctggtggggacgacgcanaacttcagtgaagagcacctgcgacgttcactcaaaaccatcctcacctatgctgaggaggacatggggctgcgggacagcaccttcgcagagcaggtccaggacctgatgttcaacctgcacannnnnctgacggacacggtgaagatgaaggaacaccaggaggaccctgagatgctcatcgacctcatgtacagaattgcccactgggctgtggggtgaccacactgtacttggggctgggccctctgcccctgtgtnccc

SEQ ID NO: 22545 - DNA, 469 bp, Homo sapiens
aattgaccccgcgctgcaggattcggcacgagcatggatgtgttgcccctcctccgcatgccaacgcagttcatgtacaaggcccctctgcaactggagagaaaattaattcctatcccgtgagtggattgtgagaaattccacccacgtggagacagcttactgcagcactgttggtgttcggagctcttctgtgccctggctccatgctttcacctacacaagcatcaccttcctaatcaccgcggggcggggagcgtgtggctgtgccccttctctttaatctcatttaatttttattaaacatgctcagtacctgtgttgagaaaaggcgaactttatcctaaagattattacctttttaaagtgctcttatattttcatgagtttttattttgtctctgagattttgtattccacattctagggtattctgtaatttggctccttaccaatattattctcgtgg

SEQ ID NO: 22546 - DNA, 466 bp, Homo sapiens
  misc_feature (1)...(466): n = A,T,C or G
nattgaccgcttgtggacnttgcacgagtgccgtcggcgagtacaacaaagccagcaacgacatgtaccacagccgcgcgctgcaggtggtgcgcgcccgcaagcagatcgtagctggggtgaactacttcttggacgtggagctgggccgaaccacgtgtaccaagacccagcccaacttggacaactgccccttccatgaccagccacatctgaaaaggaaagcattctgctctttccagatctacgctgtgccttggcagggcacaatgaccttgtcgaaatccacctgtcaggacgcctaggggtctgtaccgggctggcctgtgcctatcacctcttatgcacacctcccaccccctgtattcccacccctggactggtggcccctgccttggggaaggtctccccatgtgcctgcaccaggagacagacagagaaggcagcaggcggcctttgttgctag

SEQ ID NO: 22547 - DNA, 475 bp, Homo sapiens
  misc_feature (1)...(475): n = A,T,C or G
nttttgacnaactcgagcgccntgtggaattcggcacgagaagagataatgacaaagagggaagacttggtggtagcccctgcaggcatcacactgaaggaggcaaatgaaattctgcagcgcagcaagaagggaaagttgcccattgtaaatgaagatgatgagcttgtggccatcattgcccggacagacctgaagaagaatcgggactacccactagcctccaaagatgccaagaaacagctgctgtgtggggcagccattggcactcatgaggatgacaagtataggctggacttgctcgcccaggctggtgtggatgtagtggttttggactcttcccagggaaattccatcttccagatcaatatgatcaagtacatcaaagacaaataccctaatctccaagtcattggaggcaatgtggtcactgctgcccaggccaagaacctcattgatgcangtgtggatgccn

SEQ ID NO: 22548 - DNA, 489 bp, Homo sapiens
ggcccggcccccctttgccccggccattgcaccgctctgcaggaattcggcacgagcgcagggctcgggcgccggggggaccccggtttcgagttcgtgctcctgagggcagatgccggggcgtgtaggggcggaaaggcgctcctgaaatggtggggaaacgcgggaagcttccggaagctgcctttctccagaagtggcagaccatttttggcttattgttctttttcatgtatctaataataggcttttaaggataccggaaaaacacccgtggagccggaggtggcaattcaccgaattcgaatcaccctaacaagccgcaacgtaaaatccttggaaaagggtcagtgcattcgttatgcgggggggagggggaattgggcgaaaagcgacgagctttactcgttaatgttagtgtagaaggtggactgcaagaactaaagtgacaagttacttaaaaaagtaaagcgtggcttaaaattgctt

SEQ ID NO: 22549 - DNA, 453 bp, Homo sapiens
  misc_feature (1)...(453): n = A,T,C or G
ntttgccccccctgtacccccgctgcacgaattcggcacgaggtaaatcctaaattcaaactgttaaatgacatttttatttttatgtctctccttaactatgagacacatcttgttttactgaatttctttcaatattccaggcgatagatttttgttgttttgctaattaatccaagatttacaatagcacaacgcttaatcacacagtaactacaaaaggttacatagatatgaaaagattggcagaggccattgcaggatgaatcacttgtcacttttcttctgtgctgggaaaaataatcaacaatgcgggtctttcatgagcagcgacggatagtttagcttactatgtttcccccgcaattcaatgatctataacaacagagcaaagtctatgctcatttgcagactggaatcattaagtaatttaataaaaagattgtgaagcag

SEQ ID NO: 22550 - DNA, 481 bp, Homo sapiens
  misc_feature (1)...(481): n = A,T,C or G
ggggnggagggggnnttttgcttgcgcgcattcggacgagctcaactccgagttctgcttcatcctcaaggttccctttgagagtgaggacaaccagggcatcgtgtatgcctgggtgggccgggcatcagaccctgacgaagccaagttggcagaagacatcctgaacaccatgtttgacacctcctacagcaagcaggttatcaacgaaggtgaggagcctgagaacttcttctgggtgggcattggggcacagaagccctatgatgacgatgccgagtacatgaaacacacacgtctcttccggtgctccaacgagaagggctactttgcagtgactgagaaatgctccgacttttgccaagatgacctggcagatgatgacatcatgttgctagacaatggccaagaggtctacatgtgggtggggacccagactatccacgtggagatcaagctgagactgaaggcctgccaggtt

SEQ ID NO: 22551 - DNA, 454 bp, Homo sapiens
  misc_feature (1)...(454): n = A,T,C or G
attgancactgatggncgctgcagcagacattgagaagattcagaaaggagactcaaaaaaggatgatgaggagaattacttggatttattttctcataagaacatgaaactgaaagagcgagtgctgatacctgtcaagcagtatcccaagttcaattttgtggggaagattcttggaccacaagggaatacaatcaaaagactgcaggaagagactggtgcaaagatctctgtattgggaaagggctcaatgagagacaaagccaaggaggaagagctgcgcaaaggtggagaccccaaatatgcccacttgaatatggatctgcatgtcttcattgaagtctttggacccccatgtgaggcttatgctcttatggcccatgccatggaggaagtcaagaaatttctagtaccggatatgatggatgatatctgtcaggagcaatttctagn

SEQ ID NO: 22552 - DNA, 454 bp, Homo sapiens
aattgacccgcctgcggtcgagttattgatttcgctctgctgaatacaaacgaggcctgttgagcattggagaagaatggcacccagctgatgattcgctcctaccagctgggggtccttttcctcccttcagcatttggtctagacagtttcacagtgaaacagaagttcttcgctggcagccaggagccaatggccacctttcctgtgccatatgatttgcctccagaactgtatggaagtaaagatcggccatggatatggaacattccttatgtcaaagcaccggatacgcatgggaacatgtgggtgccctcctgagaatcttgaggcactgtgaaatttaagtgtaagacattgagccacaaacatggaatctcttctttgtactggatgttcacttcccttaaagtcttatttgcacccttacaaaatctttccaaaggtcactctt

SEQ ID NO: 22553 - DNA, 443 bp, Homo sapiens
  misc_feature (1)...(443): n = A,T,C or G
nattgagngcccattgatnngcntgcggannnggcacgagttccttgtcttttcagcttgggaaagaggcggcagtggaggaaggcatggaatgcccacagtggtcagttcaaagaacaaacgtgcaattaaaaaactgtagtcagccaggcacggtggttcacacctgtaatcccagcactttgaaaggccaaggcgggcagattgcttgagctaaggagttcgagaccagcctgagcaacatgatgaaaccccgtctctacaaaaagtacaaaaattagccaggcgtggtggtatgccctggtagtcccagctgctcgggaggctgaggcaggaggatcacctgattctaagaattcgagactgcagtgagccgtgatcttgccactgtagtccaggctgggctacggagagaccctgcctccaaaaaaaaaaaaaaaaaa

SEQ ID NO: 22554 - DNA, 495 bp, Homo sapiens
  misc_feature (1)...(495): n = A,T,C or G
gggggcgccaattgaccccccctngatagcaccgcctgcaggacgaatcctatcatctgggcaaaagatgtgatgagtgtaacttcctgttttctccaaactaaaacactacgcagattcctgtaccgctctgggacagaaatcctcagccagagcagaggccgtccccagagtccacactgtttcctgcataaagtgggttatctcagaagaaacatcccactggtctgtgtgatccctctattgaaatgtggtcttttatctacatctaagtatctctagaagtaatgcgtttgtatgtacttgtcactcagatatgtaatcccttaatttgtgcggggttttggggtgtgaaaaattcaccgagcagtggccaaggaagctgtacatgcagctcatcccgcagcagctgctgaccaccctagtgccgctgttccggaactcgcgcctggtccagttccacttcaccaaggacctggagacactgaagagcct

SEQ ID NO: 22555 - DNA, 484 bp, Homo sapiens
  misc_feature (1)...(484): n = A,T,C or G
gagggccgnnaattganncccattgacccgcgctgcaggaattcggcacgagtgagtcattacaatagcaccctgcagctatgctggaaaactgagcgtgggaccctgccagactgaagagcaggtgagcaaaatgctgctttctgccttggtggcaggcagagaactgtctcgtactacaattcaaggagaaaagaagaagaaataaaagaagctgctccatttttcatcatctacccatctatttggaaagcactggaattcagatgcaagagaacaatgtttcttcagtggcaaatgtagccctgcatcctccagtgttacctggtgtagatttttttttctgtacctttctaaacctctcttccctctgtgatggatttgtgtttaaacagtcatcttcttttaaataatatccacctctcctttntgccatttcacttattgattcataaagtgaattttatttaaagctatgccacac

SEQ ID NO: 22556 - DNA, 510 bp, Homo sapiens
  misc_feature (1)...(510): n = A,T,C or G
agtgggttttnnaattgacgtccgtangacttcgcacgagccggactgaggcagccagcttgcgggtgctggagagggagagacggaagcgcagccgaaaagagctgctcaacttctacgcctggcagcatcgagagagcaagatggagcatctagcgcagctgcgcaagaagttcgaggaggacaagcagaggatcgagctgctgcgggcccagcgcaaattccgaccgtactgagctgtgagagccgcagtgaatggctggaggtgcagggccaggaggaggcgaggcagggcctgcagcggtctctgagaggccgagctctggccaacgggccccaggttgaaggccaccgcgtccaacagccccatcagagtccacacaggccaggagggaaggaccaggccacccctcgggtcttgtgcttcagcagtcctggggacccaggcgtgccgagaggaggacttgtccttcctgcttcttgcctccacaccctcctcttcaggaccct

SEQ ID NO: 22557 - DNA, 473 bp, Homo sapiens
ggagcccattgaccttgtgcccgctgcaggaattcggcacgaggagagagagagagagagagagagagttgagggagtcgggccgcgactgtggtcgtttttataccttcccgcgcggacgccggcgctgccaacggaagggcggagacggagtttcgtcatgttggccaagcccatttgagatctttgaagatatcctcaacgtgaggctctgctgccatgaaggtgaagattaagtgctggaacggcgtggccacttggctctgggtggccaacgatgagaactgtggcatctgcaggatggcatttaacggatgctgccctgactgcaaggtgcccggcgacgactgcccgctggtgtggggccagtgctcccactgcttccacatgcattgcatcctcaagtggctgcacgcacagcaggtgcagcagcactgccccatgtgccgccaggaataggagttcaaggagtg

SEQ ID NO: 22558 - DNA, 498 bp, Homo sapiens
  misc_feature (1)...(498): n = A,T,C or G
tggataaaatatatttattaanggggaaaaaggaatttganngcttgagagcctgcggaggtgaacctggcggccatggtgtggcgccggcttctgcggaagaggtgggtgctcgccctggtcttcgggctgtcgctcgtctacttcctcagcagcaccttcaagcaggaggagagggcagtgagagataggaatctcctccaggttcatgaccataatcagcccatcccgtggaaagtgcagtttaacttgggcaatagcagtcgtccgagcaatcagtgccgcaactccattcaagggaagcacctcatcacggatgaactcggctacgtttgcgagaggaaggatttgctggtaaatggctgctgtaatgtcaacgtccctagcacgaagcagtactgctgtgatggctgctggcccaacggctgctgcagcgcctatgagtactgtgtctcctgctgcctgcagcccaacaagcaacttctcctggagcgcttc

SEQ ID NO: 22559 - DNA, 508 bp, Homo sapiens
  misc_feature (1)...(508): n = A,T,C or G
agaaaaaactgggaacaccnntnaananttttgcacgcgctgcaggctcacatggaagaaagattatgaaatacgtcccaagagttgcaatctcttcaagtccagaatataaagcttgcaggaagtctgcagcatgtggctgaaaaactctgtcgtgagctgtataacaaagctggagcacacaggtgcagcccttgtacagaacaatggaaatggcatggagacaattgctaccagttctataaagacagcaaaagttgggaggactgtaaatatttctgccttagtgaaaactctaccatgctgaagataaacaaacaagaagacctggaatttgccgcgtctcagagctactctgagtttttctactcttattggacagggcttttgcgccctgacagtggcaaggcctggctgtggatggatggaacccctttcacttctgaactgttccatattataatagatgtcaccagcccaagaagcagagactgtgtggccatcctta

SEQ ID NO: 22560 - DNA, 491 bp, Homo sapiens
  misc_feature (1)...(491): n = A,T,C or G
ntttgccccgcctgcaggaattcggcacgagccttatcaggagggctccactcactgaaaagagtcgttcatggtagctaacctgtggtttgtgctgaaaacctgctttcttcctgggagtctagaattttggtacatggtaggtagaaggtacctacgtgaccagcccccagtaaaaaccctgggcactgtatctctaacaagtttccctggtaaacaacatttctcacatgttgtcacaattcagttgctggtggaatgaaacaacagatatgtgtgactccactgttagaggactctggaagcttatacctggtttcccccagactttgcctctgtaccttttctctttgctggtttgcttcatatgcttttgctgtaataaatcatagctgtgtgatgatnnnnnnnnnnnnnnnnnnnnnnnnnnnnnnnnnnnnnnnnnnnnnnnnccttgggggggggccgggcccccaaccccctataggggg

SEQ ID NO: 22561 - DNA, 475 bp, Homo sapiens
  misc_feature (1)...(475): n = A,T,C or G
nngggtgttcaccgctgatgaattcggcacgagcggagacttcaggcggccttctgatctgtttaccacgtgagcaagcagctcggttctgtgcagagataaagtcccccaaatatggtgaaggccaccaagcatggattattgggattgtagagaagggcaaccgcacagccagaatcatagacgaaccccggatcatcgaggtcgcaccacaagtggccactcaaaatgtgaatcccacacccggggccacctcttaatctagacagaaatagctgtttggttttggttttaaatagatctatttgccttatcacttccattaaagactataaacaacaaaaatctcattgtgtctacacatcggggtgaccttaagtcggtttgtaagtggatacgattaataaaataaaatccattgccttttaaaaaaaaaaaaaaaaaaactcgagggggggccgggtccccatttggc

SEQ ID NO: 22562 - DNA, 526 bp, Homo sapiens
  misc_feature (1)...(526): n = A,T,C or G
aggaagtncncaggggngnccncncntttgacccgctttccaccggctgcaggaattcggcacgagctgtggttggcttgnggtggccaatgggctgggaccctccatgagagttttggacacttgggtcacctgacccgtgcctctctgacacatgtctccggggggcagccacctggccaatgtgcatttttgcacatgctggaaccttccatgggggtctgggctattggctggagccaggacatgagtcaggggcaccatggacctcacgtgccaaggagacttgaatgtggctgtcactcttccggacgccaagggctgcaggaggctgcttttggcactacccaccccgtgtgacagaataggagccagcgactcaggactgctcacgggtcaggagggcaacgcctgaagtcagacctccctataggtcaacagggacaacctggggatctctggagcagggccctcctctctcaagcttggcccactcccccagacacctggacacgtggccacaaan

SEQ ID NO: 22563 - DNA, 497 bp, Homo sapiens
  misc_feature (1)...(497): n = A,T,C or G
cttcgaccgcttttgcgccgcgctgcaggaattcggcacgagccgcgaccaggagaacgaggatattgcgctaacagtagggaaactgcgtgttgagcttgaaacagcaaaatcaaaactcaacgagcagcgtgagtattacgaaggtgttatctcggatgggagtaagcgtattgctaaactggaaagcaacgaagtccgtgaagacggaaaccagtttcttgttgttcgccatcctgggaagactcctgttatcaagcactgcactggtgacctggaagagtttctgcggcagttaatcgaacaagacccgttagtaactatcgacatcattacgcatcgctattacggggttggaggtcaatgggttcaggatgcaggtgagtatctgcatatgatgtctgacgctggcattcgcatcanaggagagtgagatcggttntgaaaagataacgcttgtgaaaatgctgaatttcgcgtcgtcttcacagcgatgc

SEQ ID NO: 22564 - DNA, 408 bp, Homo sapiens
ggaattccgcacgaggtaaaaaaggacagaggctgttccctatggcagaaggcaaccacagaaaaaagccacttaaggtgttggaatccctgggcaaagatttcctcactggtgttttggataacttggtggaacaaaatgtactgaactggaaggaagaggaaaaaaagaaatattacgatgctaaaactgaagacaaagttcgggtcatggcagactctatgcaagagaagcaacgtatggcaggacaaatgcttcttcaaaccttttttaacatagaccaaatatcccccaataaaaaagctcatccgaatatggaggctggaccacctgagtcaggagaatctacagatgccctcaagctttgtcctcatgaagaattcctgagactatgtaaagaaagagctg

SEQ ID NO: 22565 - DNA, 464 bp, Homo sapiens
  misc_feature (1)...(464): n = A,T,C or G
nactgatggcccactgaanccgtccgagagaacagggagccccaaatgcaaccagcctcttgttctattcttgcctgcaaaagaacagaggtttctcatatgcctcagtccctgagagccatttcttcccctacatcgtctcactttgcttcctattgactgctggtagaaagagatttggggtaggggctagacctccttttatttgaagggggcaagggctgatatgtggtccccaaggggccagaaattcccaagttggtcacaggtggcttagaagtgtgtgttatggttttacggatttccttgaagcctctctccttctctgcctacaaagaccctatactctcagtctcgccaacccacccccaaggagctgtgggaggctttgtgttatctgtgaaactccaaaacaggtgtgatgcggagaagggagagttcaaggcatacgcaaggactggact

SEQ ID NO: 22566 - DNA, 498 bp, Homo sapiens
  misc_feature (1)...(498): n = A,T,C or G
agagttgtnnnaggggnggnngnnnggaattgatnnccccactgaccgcgctgcaggaannccgcacgagcatgcctatacctccctccccgagctaagtcccagggcatctgggccttgcctggagactgggctagctctgtaggctcggagagcctggggagggtgccaaccccacctctagtattttgggagatagggaaagtgaaccgacttccccttcccatacccctcagggtggttccctaccagccaggcttactacttctagaagaaagcagagtgccagggagtgagattgcatccctgggcttagaagtgacggagagaagacttgtttagtattttgccatcagcacaaggaaaaccaggagagagtctgcctccaggactctgagccttctgcctcgtatgttcagaaggtggataggtcttcccactccagcatggcttgaactcttaagggtctgcagtgctccatctccattggtggccccn

SEQ ID NO: 22567 - DNA, 483 bp, Homo sapiens
ggggccccattgtcgtctgcggacttcgcacgaggcctataagcggaatcccatgcgatcagaacgttgctgcagacttgcccgccacctgatgacccttgtcatggacccgctacagacagcatctgtccagcggtttgaacgcacactggatgatagtgccaaccgacggatctgtttggccgaggcatttcttaccgcagatactatattgaatacgctgcagaacatttctgaaggattggtcgtgtaccccaaagtaattgaacggcgcattcggcaagagctgcctttcatggccacagagaacatcatcatggccatggtcatagctggaggtagcctccaggtgcagagattcttagaagaggaggtgtatcccctgttaaaaccatatgaaagcgtgatgaatgtgaaagcataattatgtctcgttagctggaagagaattaaacgaacatcattggctattgctgaacaaaa

SEQ ID NO: 22568 - DNA, 505 bp, Homo sapiens
  misc_feature (1)...(505): n = A,T,C or G
agaaaaactagaacggcntgaggaatttgacnccgcgctgcaggaattcggcacgagctgaaaccgtgtgtaagggggactgttgtgaggggctgtgcacaaatgcttcccagctcttgagggcctggacgcagtgacccgtgcactcagggtcttggccctgataccattctgtaaccaaaaggaaccagggccaggccagagaaggtatcagatgagctagagagtgaagaattgctgggatgaggagacttgttgaaataacacggggggatgggaaggagcatacagtggccagcctggggcagtgtgagcgtgaaaataaacaggctgggcgcagcggctcacgcctgcaatcccagcactttaggaggccaaggtgggaggatcacttgaggctaggagttcaagaccagcctgggcaacatgggtgaaaccctgtctctacaaaacaagaaaagtcagccgtgcgtggtgcacccgcctgtagtcccagatactcang

SEQ ID NO: 22569 - DNA, 467 bp, Homo sapiens
  misc_feature (1)...(467): n = A,T,C or G
naattgagngccactagaganccgtccgaggagacacggcaagctggtgattaacaaagacctcgcggaggaagatgataccacgagtcaacccaaaagttgctggggagaagttgctctttaatgaattgcatctcatgaatgtatcaggctgtgacctttctgcactctctaatgagttcatgaatttaggccaattatggccacaaatgctgctgctgtcacagagagatgccggataaagaacacccaccaccagtctctgaacagggaggggagaatcaactctgaatgtgatgtagtggccaggagagaggaccatgttcaacaacgccacacagatgcaaatgacttgtttcttcaacaaactgcaagggaaaaaataaaaatgggggaagctacagattaaaatacatgtgtttggataggagagtatttaatggcaaaaaaaaaagggggcccggtct

SEQ ID NO: 22570 - DNA, 503 bp, Homo sapiens
  misc_feature (1)...(503): n = A,T,C or G
cttgagtgccccnncaatagaccgcgctgcaggaattcggcacgagaaggatttaaaacaatacagtcttgagacttagtttctgtagatagaaatctcctctctctgtctatcagtcatggtccaaataggagacagaaaccattccagttatttcaacaatatgataaaaagaattactgacacagtaaccaaaaaagcaaaaaacccacacaagaattaaggaagtagcaacttccagaagtgctctaaggatgggtgttgctcacctggtcctgggtctttgagcccatcatgaagctggttctgagcaggtcagaaatggcagctgggatcacatgcagctgtgagagcaaactgctgcagcagtgctgacaggaacgggaaggagcacgccccttcttcctgcagcatggaagcttccctctactggaaaaatccaacaggatgccagctgcgaagcagagatgtttgcagagttctgtcgctggtatcacaaaagn

SEQ ID NO: 22571 - DNA, 473 bp, Homo sapiens
  misc_feature (1)...(473): n = A,T,C or G
nattgacnccccattgaccgcgctgcaggaattcggcacgaggcagaatctcctttcagatgcctggatgaatttgatgtctacatggatatggttaataggagaattgccatggacttgatactgaagatggcagattcccagcgttttagacagtttatcttgctcacacctcaaagcatgagttcacttccatccagtaaactgataagaattctccgaatgtctgatcctgaaagaggacaaactacattgcctttcagacctgtgactcaagaagaagatgatgaccaaaggtgatttgtaacttaacatgccttgtcctgatgttgaaggatttgtgaagggaaaaaaaattctggactctttgatataataaaatgagactggaggcaaaaaaaaaaaaaaaaaactcgggggggggccgggcccccatttccccctatagggagtcgaataacaattcacggccg

SEQ ID NO: 22572 - DNA, 252 bp, Homo sapiens
  misc_feature (1)...(252): n = A,T,C or G
agatgcgggtgcctccaactgaaacagtganaggccgaggaattccgcacgagaatacctgctgcctgtctccctgacccatgatctggcaagttaggcacagtcagacatggacagttgatccatgaggaaaagatgctctcccacctaaggccaggaatctgagagcaggactggctgagctcccagggcaaggggttcactaatgcttatcaataaagaatattgagcctggaaaaaaaaaaaaaaaaa

SEQ ID NO: 22573 - DNA, 495 bp, Homo sapiens
  misc_feature (1)...(495): n = A,T,C or G
gatggggttctncttatcgtctattcgaacctaccgcaancacacatgagggagaaacagacatatctttctgtctttagtttattgagtgctggtctaagcaagctgagatcatttgcaaaggaaaacacgtaacttgtttaaaagtttttctggtagctttagctttatgctaaaaaaaataatgacattgggtatctatttctttctaagactacattagtaggaaaataagtcttttcatgcttatgatttagctgttttgtggtaattgctttttaaaggaagttattaatatcataagttattattaatattttgaacaaggtggaagtgaaggattttcatttaaaaaccaagtggttttgactttttctgttgaatgaacaactgtgccttgtggaatttttgcagaagtgtttatgctttgttagcatttcaacttgcattattataaagaggtattaatgcctcagttatgtgtttgtcaatgtn

SEQ ID NO: 22574 - DNA, 508 bp, Homo sapiens
  misc_feature (1)...(508): n = A,T,C or G
ccccccccccccgccccccccccattgccncgccatgaggaattccgcacgagcagtgattcagtaaaaagtgctgaaaaagaaatcagcctatggtttaagcctgaagaactggttgactacaagtcttgtgctcatgactgggtctatgaataagaggtggacacaacagcagtctccttcagcacggcgtggtgtgtccctggacacagctcttcattccattgacttagaggcaacaggattgatcattcttttatagagcatatttgccaataaagcttttggaagccggannaaaaaaaaaaaaaaaaaacaaaaaaaaaaaaaaaaaannccctgggggggggggccggccccccattcccccttatgggggggctattaaaattccgggggccgggttttaaaaggggggggggggggggaaaaagnttggcccctggcctctctggccgggcctgttttctttttttcncccccctttctgcccgggtggagacacaca

SEQ ID NO: 22575 - DNA, 513 bp, Homo sapiens
  misc_feature (1)...(513): n = A,T,C or G
cccccccccccccnccccccccatcgcncgccttagcacgcctgcagggttttttatataaactatttattaacagacaaggcctacagacttatttcttcttggacacacccacggtgcggccacggcggccagtggtcttggtgtgctggcctcggacacgaaggccccagaagtgacgcaaccctgtatgggcccgaatcttcttcagtcgctccaggtcttcacggagcttgttgtccagaccattggctaggacctggctgtattttccatcctttacatccttctgtctgttcaagaaccagtctgggatcttgtactggcgtggattctgcataatggtgatcacacgttccacctcatcctcagtgagttctcccgccctcttggtgaggtcaatgtctgctttcctcaacaccacatgagcatatcttcggcccacacccttaatggcagtgatggcaaaggctattttccgccgcccaatcgatgtggtggtgagtactcgcn

SEQ ID NO: 22576 - DNA, 401 bp, Homo sapiens
cattgacccgccatgaggaatccggcacgagaaaatacagtcttggtacctagagactgtcatgcagatagtataatttggtatatgtgctaatgcattgagtagaggattattttaacacactattttgcttttgtattttagctaaaataatcgatggggatgtgtagcccccccgtgtgaggatgacatcaccacatttctagtttcatggagctcaagatgtcttgtgtctgtgtggctagatggcctctgcttggtaatcttatttttaggcctaaaattcccacttaaatccaaagtaaaaatggttatactgaagcataaaccttgcctgtgtaattttaaaaattaatagagctgtgcaaaccctgttatttttgtaaaaaaaaaaaaaaaaa

SEQ ID NO: 22577 - DNA, 507 bp, Homo sapiens
  misc_feature (1)...(507): n = A,T,C or G
agatacgagtcnctccnnttaaaaggncctgnngaggtcccgnanannncgcacgagcagaaangggggagaaacagtacatatctttctgtctttagtttattgtgtgctggnctaatcaagctgagatcatttgcaatggaggacacgtgacttgtttaaaagtttttctggtagctttagctttatgctaaaaaaaataatgacattgggtatctatttctttctaagactacattagtaggaaaataagtcttttcatgcttatgatttagctgttttgtggtaattgctttttaaaggaagttattaatatcataagttattattaatattttgaacacaggtggatgtgaaggattttcatttaaaaaccaagtggttttgactttttctgttgaatgaacaactgtgccttgtggaatttttgcagaagcgtttatgctttgttagcatttcaacttgcattattataaagaggtattaatgcctcagttatgtgtttgg

SEQ ID NO: 22578 - DNA, 504 bp, Homo sapiens
  misc_feature (1)...(504): n = A,T,C or G
cgcggggccnntnnnaaattgatnaatcgaccggctgtacgaattcggcacgagacgaacagtctgagtattctgatatccggaggtgaaatgaaaggcctggccacgaaatctttcctccacgccgtccattttcttatctatggacattccaaaacatttaccattagagaggggggatgtcacacgcaggattctgtggggactgtggacttcatcgaggtgtgtgttcgcggaacggacaggtgagatggagacccctggggccgtggggtctcaggggtgcctggtgaattctgcacttacacgtactcaagggagcgcgcccgcgttatcctcgtacctttgtcttctttccatctgtggagtcagtgggtgtcggccgctctgttgtgggggaggtgaaccagggaggggcagggcaaggcagggcccccagagctgggccacacagtgggtgctgggcctcgccccgaagcttctggtgcagcagcctctggtgct

SEQ ID NO: 22579 - DNA, 472 bp, Homo sapiens
  misc_feature (1)...(472): n = A,T,C or G
nattgacgcctgaggaattcctacgagactactccagtcctctccccagctaccaccagtcccttactctgttctcccccagtgaaaaagagtctgttgattttcctcaaaactgctttattaggaatgtaccagggattgagttaggggagttggacagccccggctcctataggagtcctacttctctccagcatcctgtgccatcctcttgacgtaatcgctgtacattgtgtacacagcacctgtgtgagagaaaagaaataatgccccttggcatcaaacccttcacccgtcctctggctctcaggcgtcccaggggttcacctctagctgctcccttgagagtccagcttcccgctcatctttctgccccaggtcccaacagctgcttcaagcatctgaccacacaacctggggaaaccacttatctgacagttcacgaaacactttcacatgtattgtgtatctg

SEQ ID NO: 22580 - DNA, 503 bp, Homo sapiens
  misc_feature (1)...(503): n = A,T,C or G
agagaggagtccncccnnccaaaagncctaaaanggcccgnannnncnccgagangnnncctagcaggatcgaagacataaaccatgacaggtctgccccgccattccccggtgggtttgtctgcacttggtgctcctggccacacgagccactttggtgacaatgacccttccaagaatctttggttcaaggagcaccagttccctcttcattcttgaagcagggagaaattgacctttgccttgtcgcccaggaagtggggctcggcacccataactaacacctcccacccttggaaaccatgtcttctgggggtgagatgaccattctgggtctaagactgtttcaaagaagagctcatagactgactggtccagaagacagagggtacaacagtggcatcacagtgacagtgtcatggggagctgggcgggcccagccaaaccctccttcttcctagagcccagccagcaggcaggagttcctggaccctcangacagn

SEQ ID NO: 22581 - DNA, 510 bp, Homo sapiens
  misc_feature (1)...(510): n = A,T,C or G
agatgacggagtgctgncttaccgcaactatctgcatccctccggaaatttcgcacgagctgtttcactaacaggaacaaagacagaaaccatgacagggctgccccgccaggccccggtgggtttgtctgcacttggtgctcctgcccacaccagccactttggtgacaatgacccttccaagaatctttggttcaaggagcaccagttccctcttcattcttgaagcagggagaaattgacctttgccttgtcgcccaggaagtggggctcggcacccataactaacacctcccacccttggaaaccatgtcttctgggggtgagatgaccattctgggtctaagactgtttcaaagaagagctcatagactgactggtccagaagacagagggtacaacagtggcatcacagtgacagtgtcatggggagctgggcgggcccagccaaaccctccttcttcctagagcccagccagcaggcaggagttcctggaccctcaggacagn

SEQ ID NO: 22582 - DNA, 482 bp, Homo sapiens
  misc_feature (1)...(482): n = A,T,C or G
gcnaatgaccgccttggnnnnattgatcgcctgcangattcggcacgagtctgcttctgcccatcacaagtgccactaccgccatgggcctcactatctcctccctcttctcccgactatttggcaagaagcagatgcgcattttgatggttggattggatgctgctggcaagacaaccattctgtataaactgaagttaggggagatagtcaccaccattcctaccattggttttaatgtggaaacagtagaatataagaacatttgtttcacagtatgggatgttggtggtcaagatagaattaggcctctctggaagcattacttccagaatacccagggtcttatttttgtggtagatagcaacgatcgtgaaagaattcaggaagtagcagatgagctgcacaaaatgcttctggtagatgaattgagagatgcagtgctgctactttttgcaaacaaacaggatttgccaaatgct

SEQ ID NO: 22583 - DNA, 477 bp, Homo sapiens
aattgcccgcctgcggcttgacctagatttccttgtgacacagagaagggcaaaggtctgagcccagagttgacggagggagtatttcagggttcacttcaggggctcccaaagcgacaagatcgttagggagagaggcccagggtggggactgggaatttaaggagagctgggaacggatcccttaggttcaggaagcttctgtgtaagctgcgaggatggcttgggccgaagggttgctctgcccgccgcgctagctgtgagctgagcaaagccctgggctcacagcaccccaaaagcctgtggcttcagtcctgcgtctgcaccacacattcaaaaggatcgttttgttttgtttttaaagaaaggtgagattggcttggttcttcatgagcacatttgatatagctctttttctgtttttccttgctcatttcgttttggggaagaaatctgtactgtattgggattgtaaag

SEQ ID NO: 22584 - DNA, 483 bp, Homo sapiens
  misc_feature (1)...(483): n = A,T,C or G
aattgaccgccctnggnnnnnattggaccgcctgcggaattcggcacgagagcggcttatcaacagaggcattttctgcttatggtaataagacggacaacacaagagaaaagaggacccacagaaggacaaaacgttttttatcctatccacggtttgtagaagtcttggtggtggcagacaacagaatggtttcataccatggagaaaaccttcaacactatattttaactttaatgtcaattgtagcctctatctataaagacccaagtattggaaatttaattaatattgttattgtgaacttaattgtgattcataatgaacaggatgggccttccatatcttttaatgctcagacaacattaaaaaacttttgccagtggcagcattcgaagaacagtccaggtggaatccatcatgatactgctgttctcttaacaagacaggatatctgcagagctcacgacaaatgtgatacct

SEQ ID NO: 22585 - DNA, 494 bp, Homo sapiens
  misc_feature (1)...(494): n = A,T,C or G
cttcgcccccgntgcnggnnaatagacnccgcgctgcaggaattcggcacgagctggccatgtcacaggcaagttcacagctcaccattgcctctcaggctgcccactggctgagaggaaccagagccggctgaaagcggagctgtctgactcggaggcctcagcccgcaagaagaacctctcaggcttctccccaaggaagaagcctcgccatcacggccgaattggacgccctccgaagtatcgaaagattccgcaggaagatttccagaccctcacgcccgatgtcgtgcaccagtccctcttcatgtcagccctgtcggcccaccctgaccgctcactctcagtgtgctgggagcagcactgcaagctcctgccaggagtagcgggcatctcagcctcgacagtcgccaagtggaccatcgatgaggtcttcggctntgttcagaccctgacaggttgtgaggaccaagcacgcctcttcanagacgagg

SEQ ID NO: 22586 - DNA, 465 bp, Homo sapiens
atggcccgcctgcagatttcggcacgagatttaaatgaactgcttagccctgctctgaagaaccttttttggaattagattttagttgattttttaaagaatacagcccaacacttgttttttacattttaagagttgtagaagttgttcctaacttggggactggacctaccctctaggagggagttgttaatggggctcttttagcccactgatgcttacttaggccggagagcaggggacacggtgctaggttccctcgtgcagtgcctggtgctctcaaattgtctcaaaaggaccaagaggaaaagagtcggaggggtagaccctgcagccctgttgagaagaaagattccagtgaagttgctgatggtatggctgtggtctgggacttgcggtgtctcggcatacccctctcctcttcccacctcctcctggctatgttctgcagcctcccagagtagg

SEQ ID NO: 22587 - DNA, 473 bp, Homo sapiens
  misc_feature (1)...(473): n = A,T,C or G
gggggagngggcngnaatgagnccaatgagagcgctgcggaaancgcacgaggcttgatgcccttctctccgtacgagcccctgaacttccacgccatgttccagcccttccttgagatgatacacgaggctcagcaggccatggacatccacttccatagcccggccttccagcacccgccaacagaattcatacgagaaggcgacgatgaccggactgtgtgccgggagatccgccacaactccacgggctgcctgcggatgaaggaccagtgtgacaagtgccgggagatcttgtctgtggactgttccaccaacaacccctcccaggctaagctgcggcgggagctcgacgaatccctccaggtcgctgagaggttgaccaggaaatacaacgagctgctaaagtcctaccagtggaagatgctcaacacctcctccttgctggagcagctgaacgagcagtttaactg

SEQ ID NO: 22588 - DNA, 440 bp, Homo sapiens
  misc_feature (1)...(440): n = A,T,C or G
aacgcgggnanttgaaaactgacgtactgagcgctcttagagggntggccccatgaagtgggtgccccactcacttctctgagatcgaacggactgtgaatccgctctttgtcggaagctgagcaagctgtggcttttttccaactccgtgtgacgtttctgagtgtagtgtggtaagaccccggcgggtgtggcagcaactgccctggagccccagcccctgcgtccatctgtgctgtgcgccccacagtagacgtgcagacgtccctgagaggttcttgaagatgtttatttatattgaccttttttactggaagacgtacgcatactccatcgatgttgtatttgcagtggctgaggaattcttgtacgcagttttctttggctttacgaagccgattaaaagaccgtgtgaaatgaaaaaaaaaaaaaaaaaactg

SEQ ID NO: 22589 - DNA, 363 bp, Homo sapiens
gatggtgccccaattgatcgcctgcaggtattcggcacgagccagaaccagactagaaactgctggcagaactacctggacttccaccgctgtcagaaggcaatgaccgctaaaggaggcgatatctctgtgtgcgaatggtaccagcgtgtgtaccagtccctctgccccacatcctgggtcacagactgggatgagcaacgggctgaaggcacgttttccgggaagatctgaactggctgcatctccctttcctctgtcctccatccttctcccaggatggtgaagggggacctggtacccagtgatccccaccccaggatcctaaatcatgacttacctgctaataaaaactcattggaa

SEQ ID NO: 22590 - DNA, 483 bp, Homo sapiens
  misc_feature (1)...(483): n = A,T,C or G
aatagaacagcantggnaaaantttgaccccgcgctgcaggaattcggcacgagacccccatcaggtggagctggtggcagggaaaacctacaggtggtgtgtgtgtggccgcagcaagaagcagcccttctgtgacggctcccacttcttccaacgcactggcctatctccactcaagttcaaggcccaagagacccgcatggtggcactctgtacctgcaaggccactcagaggcccccgtactgcgatggcacccacaggagtgagcgcgtgcagaaggcagaagtgggctccccactctgagggggctgctgctgtccagccacaggtggccttggctccaggcctctgacaggcacccccttctgtgggaaaggaaacaggtgctgagcccaagagactctggtacccactgctggctcatgaaggaagaattattccttataacctaaaagtctccagtctggggcaggcgggagtg

SEQ ID NO: 22591 - DNA, 468 bp, Homo sapiens
atgcccgcctgcagattcgcacgagacgtactcaagatacttctattttaataaaactttccttatgaccatctgtgcttgcttctcatcataggctgattccttaaaaatattagctaatgactttctttattttttccctcttccttccaataatacattccagttatggaattgaccctcactacccctgctgaaatttctcaccaaagtcaacagtaaccttgttgctaaatctaggaggatacttctcagtacttctcttatctggcaaggtaactgtttggtttcttatcacattctacttgatacacttttccccttttggcaggctctcctggtttccctcctgtctttctgtaccttattagtatattagcgtgtccttttcctctgcctctctatttaataccagtgtatttaagatctggtcttctcttactctttatcgtctccctgagtcctctg

SEQ ID NO: 22592 - DNA, 505 bp, Homo sapiens
  misc_feature (1)...(505): n = A,T,C or G
ntggaannccccnnnnnatttgccccgcgctgcaggaattcggcacgagagtagaatctgacagaataagacagagacactgaaaataaagccctagaaaggaagaaattggaagcaaagaaaaggagaggtgaaaagataaaaagcctccttcaaggttaggttcaggttctgttttccatttaacctcatgtgccataaagctgcccaggcacaccagagccacatcctgaacccgaccctccctgacagtgctgctctgccagtagcaagccccagatggaggaagctgggcccatttctggccacttccacccatttggagctttgccagaggagtcgtctatgccaataatatttctgcaacagcatattatattatttgaagattagtagatctttttggggggggtggggcaggggacagtttctatagatgaagaaccagtgttggttgtacagcttgtggnggtcatctatcccatgtgaagctattctttttcca

SEQ ID NO: 22593 - DNA, 497 bp, Homo sapiens
  misc_feature (1)...(497): n = A,T,C or G
agagacggggccggcnncctggagncctggggggcccggaannggccnccagagggcagcgtacagctttatgctgaaaaggcggccactacaggtctgtgtgccattgcccaggcagagtctctgcgttacaaactcctaagagggcttgctgtgcggagggcctgctatggtgtgctgcggttcatcatggagagtggggccaaaggctgcgaggttgtggtgtctgggaaactccgaggacagagggctaaatccatgaagtttgtggatggcctgatgatccacagcggagaccctgttaactactacgttgacactgctgtgcgccacgtgttgctcagacagggtgtgctgggcatcaaggtgaagatcatgctgccctgggacccaactggtaagattggccctaacaagcccctgtctgaccacgtgagcattgtggaacccaaagatgagatactgcccaccacccccatctcagaacagaagggtgg

SEQ ID NO: 22594 - DNA, 505 bp, Homo sapiens
  misc_feature (1)...(505): n = A,T,C or G
ngagggcccnnnnnnaattgannaattgagncccatgcgcgaattcggcacgagtggtgcttctgttgctcacaggacaacttgcctttgatgattttcaagagagttgtgctatgatgtggcaaaagtatgcaggaagcaggcggtcaatgcctctgggagcaaggatccttttccacggtgtgttctatgccgggggctttgccattgtgtattacctcattcaaaagtttcattccagggctttatattacaagttggcagtggagcagctgcagagccatcccgaggcacaggaagctctgggccctcctctcaacatccattatctcaagctcatcgacagggaaaacttcgtggacattgatgatgccaagttgaagattcctgtctctggatccaaatcagagggccttctctacgtgcactcatccagaggtggcccctttcagaggtggcagccttgacaggtctttttagagctcaaggatggtcagcagaagat

SEQ ID NO: 22595 - DNA, 460 bp, Homo sapiens
  misc_feature (1)...(460): n = A,T,C or G
natgaaggcagtgaaancgtccgagcaacanncngaaaggcactgagaatatagaaggactggtagtttactgatgtagatgtgaattctgcataaagatgtgcaaattcttttgaggggtcattaaattgcatgaatagagacggctcaaataaataggcccaagggatttttacagttagagatgaaagagaaaaccattcactgaattttatttcatttcttctgattcagatatttttagacctggcttatatgtaaaagatgtttttgtggagtcagtggatatatttctaatgaagtgcttgactatccaattacttaattacttatacctttagataatcagtatgaaaagcttccatttataatggaaatgaacattcttaactaaactatacatggtgtatgtatgtctagaagagaatatatacccaagtcagttattagatttaaatca

SEQ ID NO: 22596 - DNA, 481 bp, Homo sapiens
gtgggccttttgaatcgcccgcctgcggaattcggcacgagagtgcttcagtgacgagcaaggggaagagctcctcaggcatgtggccgagtgctgccagtgaccgagactcacccgtgcccttgcggcctcctggcccggtgcagctgccctcagggacagggtgggtgctctcagatgccatgggttgagctctactgagagccaaggcccctagaatagttgcggggcactctgatcgttcactttggtccctttggctatggaacaggctgggtcacagggaactgccagtgaggctggaggctggaggtggagatggggtcaggaacatctggcagagggaggtcccagtctgtgtctccatcaggcttaagccagagctatctggtgctggtgtgccagcccctcccccagcctgcctagaaaggggtggctgcctgagggagtcacttgtatggtccccagggtgggagcccca

SEQ ID NO: 22597 - DNA, 448 bp, Homo sapiens
  misc_feature (1)...(448): n = A,T,C or G
nattgacctccgtgagcaattcggcacgacgagaatatggccccagctgtttgcctttgactccctgacctccagagccagggttgtgccttattgtcccatctgtgggcctcattctgccaaagctggaccaaggctaacctttctaagctccctaacttgggccagaaaccaaagctgagcttttaactttctccctctatgacacaaatgaattgagggtaggaggagggtgcacataacccttaccctacctctgccaaaaagtgggggctgtactggggactgctcggatgatctttcttagtgctacttctttcagctgtccctgtagcgacaggtctaagatctgactgcctcctttctctggcctcttcccccttccctcttctcttcagctaggctagctggtttggagtagaatggcaactaattctaatttttattt

SEQ ID NO: 22598 - DNA, 453 bp, Homo sapiens
  misc_feature (1)...(453): n = A,T,C or G
nattgaaatcgatccgcgctgcaggaattccgcacgagcacatgtgaggagcctgagtgcaacgacatcactgccaggctgcagtatgtcaaggtgggaagctgtaagtctgaagtagaggtggatatccactactgccagggcaaatgtgccagcaaagccatgtactccattgacatcaacgatgtgcaggaccagtgctcctgctgctctccgacacggacggagcccatgcaggtggccctgcactgcaccaatggctctgttgtgtaccatgaggttctcaatgccatggagtgcaaatgctcccccaggaagtgcagcaagtgaggctgctgcagctgcatgggtgcctgctgctgcctgccttggcctgatggccaggccagagtgctgccagtcctctgcatgttctgctcttgtgcccttctgagcccacaataaaggctgagg

SEQ ID NO: 22599 - DNA, 474 bp, Homo sapiens
cttcgactttccctccgctgcaggaattcggcacgagccaaccatagcctgaagttcacagcaaagttaaattccagttaagtaaaccagcgaggtcataatacacttaaataacaactgagacgtgagaaactaacagagatcctcagcatgactaagagatatcgtgaaattacaactcaacaatgaattacagcacaggcttttcacaactaagagactgtccatcatggtgccagtttttctcaaaatggcatgtgtgcatgaaattctacaggcatatggggtcgtgatctgctaatctccagttattatacaaaactacagatacttgaaaacagaaccaaataaaaattctagcagaagaagacaatatatgaaatttaataattcatttcctgggaatgacagcagaaaggtgatgacagaggaaagagccaataaaatttgaagacagactactttgaaaaggga

SEQ ID NO: 22600 - DNA, 453 bp, Homo sapiens
agcggggtctgaactgctgacgctcgcctggaaggagaccaacatggcgcgcacccagatcctctgcagccacctggagggccacagggtcacgtggaccggccgcttcaagtacgtccgcgtgactgacatcgacaacagcgccgagtctgccatcaacatgctcccgttcttcatcggcgactggatgcgctgcctctacggcgaggcctaccctgcctgcagccctggcaacacctccacggccgaggaggagctctgtcgccttaagctgctggccaagcacccctgccacatcaagaagttcgaccgctacaagtttgagattaccgtgggcatgccattcagcagcggcgctgacggctcgcgcagccgcgaggaggacgacgtcaccaaggacatcgtgctgcgggccagcagcgagttcaaaagcgtgctgctcagcctgcgcca

SEQ ID NO: 22601 - DNA, 491 bp, Homo sapiens
  misc_feature (1)...(491): n = A,T,C or G
cttccccgcctgcagatttcggcacgagccgcccttctctatttggtgccatttactttattgccactcctcacgatggcctatttaaagggcgacctccggcggatgtggtctgagcctttccactccaagtccagcagctcccgattcctggaagtatgatggatcacgtggaaagtgaccagatggccgtcatagtccttttctctcaactcatggtttgtttcctcttagagctggcctggtactcagaaatgtacctgtgtttaaggaactgccgtgtgactggatttggcattgaaagggagctcgtttgcaggagagaggtgctggagccctgtttggttccttctcttcctgcggatgtagaggtggggccccttccaagagggacaggcctctccccagcgcgccttcctcccacgtttttatggatctgcaccagactgttaccttctggnggagatggagatttgactgtttaaaaactt

SEQ ID NO: 22602 - DNA, 475 bp, Homo sapiens
  misc_feature (1)...(475): n = A,T,C or G
attggaacaccactnaancttgatccgcgctgcaggtttacatgttcgaaatctcttaataccactcaggagtgagtaaatattagcagccattagttatggagtagtaaactgagctagaaataagatgaatgacaagttctagaacgtaacagcggtgggaggtgtctcagcaaagcagcaatggagccaataaaggtttatggactcataagtccacagtaagaaatgtcctacatgcagtgtaggactcaggaagttgagacctcagagtgcttgcttggttttgaactccatatcacggaaccataaatacatacatagtcatatgcatgagtcctcaggttctagtaactgattcacaaactcttcctggaagtcctttggtaataaatatcagaattacgagcaatgtgttttctaagtcagaacaacacactgtatccaattagtctcagcgaagtcccagtaaagg

SEQ ID NO: 22603 - DNA, 482 bp, Homo sapiens
  misc_feature (1)...(482): n = A,T,C or G
ntttgatcgcccgtngnaanntttgcaccgcctgcangaattcggcacgaggaaaggtgttttccctttcagagctctttaaagctctgcagaagatttacatgtgtttatagagctaagagaaatcagggcatggaaattgagtgtgtaataaaaattaaactcttcatgttatataatcatgcataacttctatcttcattctctgaagttgcctagagcaccatcacagctaggaagcttccatcatgaattaccttatttccaaaagcaagtactcaaataattgtctcaagagaggaaggacaaaactgttacaagctgaaatatttggggatttgtttgacttgactagggaaccacaagttttcatataatgcctgatttatccctgtgcctaacagtttaaatcttaatgctaatgttaattgcttcccagttggttgaccttataagaaaacactgtgtggtattttaatgtg

SEQ ID NO: 22604 - DNA, 473 bp, Homo sapiens
  misc_feature (1)...(473): n = A,T,C or G
nttcgatcgcctgtggaattcttccgagtcgacttagacgatcctcctgcctcagcctcccaagcaactgggattcatcctttctattaattcattgtacttatttgcttatttgtgtgtattgagcatctgtaatgtgccagcattgtgcccaggctagggggctatagaaacatctagaaatagactgaaagaaaatctgagttatggtaatacgtgaggaatttaaagactcatccccagcctctacctcctgtgtgatacttgggggctagcttttttctttctttcttttttttgagatggtcttgttctgtcaaccaggctagaatgcagcggtgcaatcatgagtcaatgcagcctccagcctcgacctcccgaggctcaggtgatcctcccatctcagcctctcgagtagctgggaccacagttgtgtgccaccacacttggctaactttttaatttttttgcgg

SEQ ID NO: 22605 - DNA, 470 bp, Homo sapiens
  misc_feature (1)...(470): n = A,T,C or G
aattgagngcccctagaagacctctaggggcaaggactttaaatccacagaagtgtaatgtgccatgctaaagccacaggggaagaaaagaactcattagaaactacacctgttacataccattcggttaaatgatttaagggggaaaatggtgtgaaacaaaccttcaaaaaatcatgaaacaaccttaatgttacaggcaactgaaagctaaacttccctatggctttaggacacagccttgcataagagccgtgaagaacttggggcagttgcaatttccaagctctatttttataactgcaattaacctacaatctttgcaactgattcagatgccaaacattatagttctgcttgattgggcaaattatggtacattcacactatagattattccagaatgaggttattctagctataatatataccatggaagtttgttcaagatatctgttaaatgaaaataa

SEQ ID NO: 22606 - DNA, 503 bp, Homo sapiens
  misc_feature (1)...(503): n = A,T,C or G
nggcgatactgacgccgttgaattcggcacgagcaaatatgttttaatatgcatatcatccaggcagcataatgttatatttcaaagacagatttatccattgaattattgtttttaaaagttgggattctctacatagaacatattttctgaaatttcaagaatattttcaggtaaattaagaattaatttcttctaagactatccaatgtgtctcaatctattccataatataatcaatgataaagattcacatgtatcaccaaattcgaggcagcttagttgaaaaaatttgaaacagcttactgaattccatttgctgattctgtggtggcttcctcaatggcatgtgtgctcctttggatgcctgcaggggtggtcactgcaaagtcgtcatctgtgccactgggagttgggaggcggcctgctgggttccctgggtggcaggatttacacctgctcctcctgctggaaggcttccatcctggacatctggattagcc

SEQ ID NO: 22607 - DNA, 485 bp, Homo sapiens
  misc_feature (1)...(485): n = A,T,C or G
cgccccccattgaacgcttgaggaattcggcacgagaaanaagaaaagaaaaaaagctgtaaccttatcatttctgagtagaccattgagcgatgaatgcacacctgtagtagcccaggaccagctgtggtggctaaagggaatatgttaattaagcaagaggttcttttctaaaagtggtatctgttatccacaatgtattttagttattcccacaagtcaggggtccagataaaatgagggttatcagctaactgatatgctatcattgaggttcatcaatgaatttgtacatttctagttccctttggtgaagggaaaaatgatgattttgcaagacctagattttggcttgggttcttgcctccttttttggcagccttcatcttctcatctcccaaaccccctgagcccgtaggttttcatagtggacaaagacttgtggcttttaaactgggactgatactttttgagagatatcgtgn

SEQ ID NO: 22608 - DNA, 473 bp, Homo sapiens
  misc_feature (1)...(473): n = A,T,C or G
ntttgatcgcctgtggaattcttgcgagcccataagccactggccccccatagcacccagtgcatcctttttacaagtggaagaactaggatggctttccaaagtcttctagaaatgaagttctttctctgtgcagctttcccccttggagcaggagtgaagatgtttcattatcttgggcctgggaaaccacttccccaggcttctccctccccccacccccataggaacaggatttggccttagcttctgggcctatcggctgccttccctctacttcctaccacctcttctgccttcctttgagctctgttgggcttggggatcttagttttcttttgtttatttcccagctcatttttttcttctggtcagtttttttaagggggggtgttgaggntttttggttttgttttgcttctgagaaagcatttgcctttcttcctctcccaacataacaatcgtggtaacag

SEQ ID NO: 22609 - DNA, 507 bp, Homo sapiens
  misc_feature (1)...(507): n = A,T,C or G
aagtgttactgaagccgtatgcatcggctgtangaattcggcacgagcccagatggaatctgcctgtgtttcaattcacgaagctctgaagtctgtcatcgattatcagactcatttccgtttaagagaagctcaaggccgaagccgagcagaggatctaaatacaagagtggcctattggtcagtaggagaagccctcattcttctggtggttagcatagggcaggtatttcttttgaaaagctttttctcagataaaagaaccaccacaactcgtgttggatcataactacgttttgagaattgatgcaccattgccactgtaatattgctgtcctcntaattaatttaggtactgaagaacttaatattggcaacatttttaaatccttactcatacacttgttgggagggatgtacaatgcatattcccaaactgtggaaaggacacctttttttatttgntaaggtggaaaaactttggaactcattttgggctattcatgt

SEQ ID NO: 22610 - DNA, 488 bp, Homo sapiens
  misc_feature (1)...(488): n = A,T,C or G
cgcggtttaaattgatngccgatttgaaggcnctaggaatnncgcacgagtggaactataacactgacagccagttttaggaagtctctacagataatgaattggataagccaattaagaaaaatagaattcactgggaagaatgcagaacctacatttaaatcaaggaaggaatagaaatggtcacaattaaccaaaaaaaatcaataaacatagaaattcatgtgatccccttaaataggcaccacaccctggccaggtgcagtagctcattcctgtaatcccagcactttgggaggccgaggtgggtggattatgaggtcaggagttcgagaccagcctgcctaacatggtgaaaccccatctctactaaaaatataacagttagccaggtgtggtggcgcacgcctgtaatcccagctactcangaggctgaggcaagagaattgcttgaacccaggagacagaggttgcagtgagctgagatc

SEQ ID NO: 22611 - DNA, 459 bp, Homo sapiens
  misc_feature (1)...(459): n = A,T,C or G
cgcggggcaatgagactcactcgcgctgcagcaattcggcacgaggggaagcgcagtgccagcgccacagcccttcaatcattttggttgctatccagcttctccacatcaagtccaacttcagaaaccccaagcctgtagagaaaagttgacctgtgctgactctggtgatggtgactgtctctcactaatttctttgaagtcttcaaggataagcagagttgatccatctgagaaagggatcatgaactagacagaatgaacagccttagaggcacagactcttgaacgggacggtggtggtatgactagtgcagagtgtttagagatcactcagtttttaaagactggcctttatcgtgtctcagtgcagccgaggcagagcctttgaaggatgcgatgttgtcattcttactaatctagtccagccgctgaggtgactttcaacggcagaccgtn

SEQ ID NO: 22612 - DNA, 453 bp, Homo sapiens
ggcgtaacatgagttgctatgcgatttccgcacgagccagagcagaatctgtgggcttgtcgcctgccagtagtataagcaacactttctgttcaccaccattgtcccttgcattacttctttcttacagcatatttttaacataaagctgttagactttatatatttctaataggtcagacattgcctatttttcatacatctggtgctgcctttttgtaaaactaataatgacttggttgagcttgaaagaaaagatgtctgaggcgacatcaaaggggcagaatttttatatttcccatatggctttgggagagcgccgagaagccgccatcccgcacctcagcgctggccagtactctgggggctggcggggtggatccattgagggggtcggagggagcttggaagcagccggtttctttaaactcttaccaaaaccccgcgctctgt

SEQ ID NO: 22613 - DNA, 473 bp, Homo sapiens
  misc_feature (1)...(473): n = A,T,C or G
nttttatncccctccggaaaagcctgcggaaanccgcacgagctgtgagccacgtcggggcggtggtccccactcacggcttctcgtccttcaagttcatccccaacaccgacgaccagatcattgtggccctcagatccgaggaggacagcggcagagtcgcctcctacatcatggccttcacgctggacgggcgcttcctgttgccggagaccaagatcggaagcgtgaaatacgaaggcatcgagttcatttaactcaaaacggaaacactgagcaaggccatcaggactcagcttttataaaaacaagaggagcgcacttttgttttgatttgtactttttggaactgtgcctgggttggaggtctggacagggagcccagtcccgggccccatattggtgcgggcactggacccccgggccccacggaggccgcggtctgaactgctttccatgctgccatctggtgg

SEQ ID NO: 22614 - DNA, 499 bp, Homo sapiens
  misc_feature (1)...(499): n = A,T,C or G
nagtggactgaagctgtggatcgcactagcagnctcggtccggntgactttgcggagccatggagggcggcttcggctccgatttcgggggctccggctgcgggtagctggacccagggctcataatggagcaggtgaaagtgcagatcgccgtggccaacgcgcaggagctgctgcagaggatgacggacaagtgtttccggaagtgtatagggaaacctgggggctccctggacaactccgagcagaagtgcatcgccatgtgcatggaccgctacatggacgcctggaacaccgtgtctcgcgcctacaactcgcggctgcagcgggaacgagccaacatgtgaccggcgagcgcgggccaccccaccctgttcatttccataaacgtgctttgagaggcggggtccgcatgtacgtactgcctgcccggngcttaagagggtggcaccggtgctgggacacacgggactgtgtcctcgccaccccccgcccttgg

SEQ ID NO: 22615 - DNA, 336 bp, Homo sapiens
agttttttaaaaaacccccaattcccctggcgggaggaagtcccaccagggaacccccttcccaggcccatttgttcccacaaaaccccccccgtggaaacccaccttgactgccgactgtttccaagtccccaggagggctttattttttttttaaacatcctgttttgcggcttccttggctttttttgcccgtatcccaaaaacccggccgttggcccggcccttccggaaactagcgaaggctttgaaatttttcttttcctcagggatgactcgagctttttcttttttataaactttccgaacggtcttgaccggcccggccagttgggg

SEQ ID NO: 22616 - DNA, 487 bp, Homo sapiens
  misc_feature (1)...(487): n = A,T,C or G
ngatgtccnccattgatcgcctgtattaataccgcacgagcagcggtggtcggctgttgggtgtggagtttcccagcgcccctcgggtccgaccctttgagcgttctgctccggcgccagcctacctcgctcctcggcgccatgaccacaaccaccaccttcaagggagtcgaccccaacagcaggaatagctcccgagttttgcggcctccaggtggtggatccaatttttcattaggttttgatgaaccaacagaacaacctgtgaggaagaacaaaatggcctctaatatctttgggacacctgaagaaaatcaagcttcttgggccaagtcagcaggtgccaagtctagtggtggcagggaagacttggagtcatctggactgcagagaaggaactcctctgaagcaagctccggagacttcttagatctgaagggagaaggtgatattcatgaaaatgtggacacagacttgccaggcagcc

SEQ ID NO: 22617 - DNA, 452 bp, Homo sapiens
  misc_feature (1)...(452): n = A,T,C or G
nattganatcgatgcgcgctgcaggaattcggcacgagtaacggtgcaaatattaatgtatatactgtacagttcagattttaaagctgatatttttatatccctgaattgtaagccgtttgttacgctgcagtgctagatttgccagggaaccagaatttatggatgaactgattgcttatattttagtcagggtttataaatgtagatggtcaaatttacattgcctagtgatggaaaattcaactttttttgatttttttttccaatattaaaaaaggctctgtatgcatggtggggctatgtaagtactctttaaaactatggccctattaatcttacaagtgttacttatgggtcaagcaatgtaaactgtataaatgtaaaaacaacccctccacacacataacccctggaatatatggtaaaaacaagtagaagctgtttcagcg

SEQ ID NO: 22618 - DNA, 477 bp, Homo sapiens
  misc_feature (1)...(477): n = A,T,C or G
gtggtaaaaaactgatngcctcggaanngctttgaccccctggacacagcgaaggactgtgtggacatagaggtattccctgctggtgagaataccgaggaccagaaatcctctgaagacactgccccattcctaggaaccttagcaggtgctacctatgaggaacaggttcaaagccaaattcttgagagcagttctctccctgaaaacacagtacaggttgagtcaaatgaggtcatgggtgcaccagatgacaggaccagaactccccttgagccatccaactgttggagtgacttagatggtgggaaccacacagagaatgtgggagaggcagcagtgactcaagttgaagagcaggcaggcacagtggcctcgtgtcctttagggcatagtgatgacacagtttatcatgatgacaaatgtatggtagaggtcccccaagagttagagacaagcacagggcatagtttagag

SEQ ID NO: 22619 - DNA, 500 bp, Homo sapiens
  misc_feature (1)...(500): n = A,T,C or G
agggcnggnnnnnnttttcaatcgcatcgcctgcaggaattcggcacgagccggcctgcgctgttcggccgctccggttaagcagaggctgaacgtgcccggtggcgggggttcccggtggtggcccggagtcctagcctggagacaccttcagcagtaaacaagataaaacaacttcttaaagataagcctgagcatgtaggtgtaaaagttggtgtccgaaccaggggctggaatggcctttcttatactctagaatatacaaagacaaaaggagattctgatgaagaagttattcaagatggagtcagagtattcatcgaaaagaaagcacagctaacacttttaggaacagaaatggactatgttgaagacaaattatccagtgagtttgtgttcaataacccaaacatcaaagggacttgtggctgtggagaaagctttaatatttgaaatctcaggactcttctggtcgaggttccaggaaagctcgtggaagc

SEQ ID NO: 22620 - DNA, 496 bp, Homo sapiens
  misc_feature (1)...(496): n = A,T,C or G
gtgggctaaangaacctggatcgccctcaggaannnncntttgatgcgccctgcggaattccgcacgaggagactcctcatcgtttcatattcttctctcaactgaacagccagatttaattactaaaacattttcagaattaagttttgcagtaagcatagatctggttttcttaggcttttcaagtaatttcttcttcacttagcccctcctcttatccctggtattgaaagtgagttttacaggccaggcatggtggctcacacctgtaatcccagtactttgggaggctgcggtgggcggatcacctgaggtcaggcattggagaccagcctgaaaaacgtggtgaaaccccatctctactaaaaatacaaaaattggccagacacggtagcaggtgcctgtaatcccagctacctgggaggctaaggcaggagaaccacttgaatccgggagatggaggtagcagtgagccaaggtcgtgccactgcactc

SEQ ID NO: 22621 - DNA, 495 bp, Homo sapiens
  misc_feature (1)...(495): n = A,T,C or G
ngagcgctnnnnnnaatgganaatcgaccgcatgcggattcggcacgagcaaaaactaacattgaaattttgaaacagcagcagagtgagtggattttatttttcgttattgttggtggtttaaaaaattccccccatgtaattattgtgaacaccttgctttgtggtcactgtaacatttggggggtgggacagggaggaaaagtaacaatagtccacatgtccctggcatctgttcagagcagtgtgcagaatgtaatgctcttttgtaagaaacgttttatgatttttaaaataaatttagtgaacctaanaaaaaaaaaaaaaaaaaaaaaaaaaaaaaccttggggggggggcccggcccccaattccccttaaaggggggggaataaaaattcatgggccggggtttaaaaacggggggaggggggggaagnnnnnnnnnnnnnnnnnnnnnnnnnnnnnntnnnnnnnnnngnnnnnnnnnnnntntn

SEQ ID NO: 22622 - DNA, 497 bp, Homo sapiens
cttccccgcctgcagatttccccgcgctgcacgaattcggcacgagaagttaacgggacttggatagagccagctgtacaggaggaatagcagtgacggcaaccatggggtctggaaccttggcccaccatagagtgtacaggctttgagttggtttcatgagattaccacatgttttttaggaattgctttaaccttgaagagcagttccactgggcacatcaaataatacatcttgctcattccattcgccttttggagattggtatgcagatggcaactgcaaatgcttatattaaacatcgtatttttttctgtttctttccagtcattcttaaaagcatacaagcttctcattccatgagctaaaaacatatttcattccataaacagaagaaactatgtcagaaattgtaggctcctaaatctcacaaatgaggtaaacatacattaattgtttctcagatatttatggagaggcagaaaggaaatgttca

SEQ ID NO: 22623 - DNA, 478 bp, Homo sapiens
  misc_feature (1)...(478): n = A,T,C or G
gtggaaaaaaactgatcgcctcggaangcgtttgagggccatcggcatgaaccatggngcccagcctcatttttgaaatggaatagagaacagttatatcacagttgagagtttaatcaaaatgaccggatcagcatattctttttttagatgagacagagtttcgcccttgtcacccaggctgtagtgcggtggcgcgatctcggctcactgcaacctccgcctcccgggttcaagcaatgctcctgcctcagcctcccaagtagctgggattacaggcgtgtaccaccatacccagctaatttttgtatttttagtagagatggggtttcaccacgttggccacactggtctcaaactcctgacctcaggcgatccatctgcctcagcctgaaagtgctaggattacaggcgtgagccaccacacctggccagctcagcatattcttaagtaggattcacatttaattcttggtag

SEQ ID NO: 22624 - DNA, 484 bp, Homo sapiens
  misc_feature (1)...(484): n = A,T,C or G
aaagaaaaaaaagaagaannntttgatncccctatgactacgctgcagtactgctgctacacaagaccctgagactgacctgcaggacgaaaccatgaagagcctgatccttcttgccatcctggccgccttagcggtagtaactttgtgttatgaatcacatgaaagcatggaatcttatgaacttaatcccttcattaacaggagaaatgcaaataccttcatatcccctcagcagagatggagagctgaagtccaagagaggatccgagaacgctctaagcctgtccacgagctcaatagggaagcctgtgatgactacagactttgcgaacgctacgccatggtttatggatacaatgctgcctataatcgctacttcaggaagcgccgaggggccaaatgagactgagggaagaaaaaaaatctctttttttctggaggctggcacctgattttgtatccccctgtagcagcattactg

SEQ ID NO: 22625 - DNA, 475 bp, Homo sapiens
  misc_feature (1)...(475): n = A,T,C or G
atttgccctcgccgcacggctgcaggaattcggcacgaggaaagttcgttaccttttctagtgcgttctatcatagttaacggttgcacacttttttataaaaagtaaatggatttgccacaattaaatgtcataacatttatgacagaatataaaatattaacatattttaagccaagttttaggtgtattttttgaatcttggttataaacccaattttaaagggcgatgtatccaccgttgtgaaggcaacagagtgtacccatatttatatttttataaaatacctataagactgcgaatctcttgtgctaatggctgagttaattgaaggatcgttttgcccctttttagcctcccagagcttcgaggactcaattcgaacccgaaatcctgccgtggggggaggggtgcgacgagacctgagcccggcgaggttctcctgcgtcactttctgtcctgaaaggcgccctn

SEQ ID NO: 22626 - DNA, 521 bp, Homo sapiens
  misc_feature (1)...(521): n = A,T,C or G
tggccngggnnnnacgcccacctgcacggctgtggaattcgacacgactgtgtgaacgcggcacgagacacgacctaccacttctctatatctctgcctttgccacatatggacgtgctggttgctaagtggagggaggagctagagcatcttcctttttgaagaaaaagaatccctctccaagagctttcactgtcctgattaattagagccatctgcagagcaggggtacattaggacacacacatgtggacaaaaaagcacatccaagagccattcaccaagaagcctgcccctactccagtgacctacctgcgttagagctaaatagcgctgatgataatgatgatgcattatgatcaaaagttatttttatgaaaggctcctgcctaccaccctctgccatcagaatagtctattccctgatggggaaagaagaactgtagtagaataggagcagaagtgggaatgtaaaacacttcaactccagaaaactgagccctaaaaagattttagacccc

SEQ ID NO: 22627 - DNA, 485 bp, Homo sapiens
cttgcccgcctgcaggaattctgcacgagcgacattcacggaggtgggttcgacctccggttcccccaccatgacaatgagctggcacagtcggaggcctactttgaaaacgactgctgggtcaggtacttcctgcacacaggccacctgaccattgcaggctgcaaaatgtcaaagtcactaaaaaacttcatcaccattaaagatgccttgaaaaagcactcagcacggcagttgcggctggccttcctcatgcactcgtggaaggacaccctggactactccagcaacaccatggagtcagcgcttcaatatgagaagttcttgaatgagtttttcttaaatgtgaaagatatccttcgcgctcctgttgacatcactggtcagtttgagaagtggggagaagaagaagcagaactgaataagaacttttatgacaagaagacagcaattcacaaagccctctgtgacaatgttgacacccc

SEQ ID NO: 22628 - DNA, 516 bp, Homo sapiens
  misc_feature (1)...(516): n = A,T,C or G
agtggagnnnnnnnatttgattgcaccgcctgcaggaattcggcacgaggttctgggaggcctgcgccgagctccagcagcccgctctggccggggccgactggcagctcctagtggagacctcgggcatcagcatctaccggctgctggacaagaagactggactttatgagtataaagtctttggtgttctggaggactgctcaccaactctactggcagacatctatatggactcagattacagaaaacaatgggaccagtatgttaaagaactctatgaacaagaatgcaacggagagactgtggtctactgggaagtgaagtacccttttcccatgtccaacagagactatgtctaccttcggcagcggcgagacctggacatggaagggaggaagatccatgtgatcctggcccggagcacctccatgcctcagcttggcgagaggtctggggtgatccgggtgaagcaatacaagcagagcctggcgattgagagtgacggcaagaagg

SEQ ID NO: 22629 - DNA, 482 bp, Homo sapiens
tgcggcgaaattgaccccattgaaagactttggcacgagtcaagaagaagttagaagatgagttccccggccgcctggacatctgcggcgagggaactccccaggccaccgggttctttgaagtgatggtagccgggaagttgattcactctaagaagaaaggcgatggctacgtggacacagaaagcaagtttctgaagttggtggccgccatcaaagccgccttggctcagggctaatgcgccctgaaggcagagtccagggaccttgacccagcccctctcagcagacgcttcatgataggaaggactgaaaagtcttgtggacacctggtctttccctgatgttctcgtggctgctgttgggggcagagattgacgcccccggtctttgcctctgagcgggagagtctgtgtgtatgtgtcttcccccgaatccacaccaccccacccttctcctggtccgtggtttcatcatatctt

SEQ ID NO: 22630 - DNA, 451 bp, Homo sapiens
attggaccctctccgccgcgctgcaggaattcggcacgagggaactagaaaatcaagctgcactgaccaacctgaagcagaagtacctgactgtgatttcaaaccccaggtggttactggagcccatacctaggaaaggaggcaaggatgtattccaggtagacatcccagagcacctgatccctttggggcatgaagtgtgacaagtgtgggctcctgaaaggaatgttccagagaaaccagctaaatcatggcaccttcaatttgccatcgtgacgcagacctgtataaattaggttaaagatgaatttccactgctttggagagtcccacccactaagcactgtgcatgtaaacaggttcctttgctcagatgaaggaagtagggggtggggctttccttgtgtgatgcctccttaggcacacaggcaatgtctcaagtactttgacc

SEQ ID NO: 22631 - DNA, 485 bp, Homo sapiens
  misc_feature (1)...(485): n = A,T,C or G
nggcggcggggccattgaatcctcactganggcntccgaancgcacgagccaagccggagggatttcccttaggcaacaccatcccagggagatctgccacaatttgcgtttcacagctgaagacgctgaggcttagagagctcgacctcctcaaggtcacaccactgggtaaatagagggatgcagactcaggttttgctatgtgctcacatttcaactttatgcttaacatgaatggaaaaatatgaaagtaaatagtgaaaaggtaagttatgagcttagattacctagattattccagtatcccatggaagctgaggacttattccgctttccacaccgaacactaaatgtggaccagtatcaagaaccctcctgtccccacgcagtgtaaacccagtggcttctctgacctggagctgatgggccgtgaagggggcctatttttctccaaaggccatccttttggggccacctggctcca

SEQ ID NO: 22632 - DNA, 512 bp, Homo sapiens
  misc_feature (1)...(512): n = A,T,C or G
aggcnnggnnnnnagnnnnaattgatcggctgtggaaatcgacacgcgttgtggccgtccggcctccctgacatgcagccctctggaccccgaggttggaccctactgtgacacacctaccatgcggacactcttcaacctcctctggcttgccctggcctgcagccctgttcacactaccctgtcaaagtcagatgccaaaaaagccgcctcaaagacgctgctggagaagagtcagttttcagataagccggtgcaagaccggggtttggtggtgacggacctcaaagctgagagtgtggttcttgagcatcgcagctactgctcggcaaaggcccgggacagacactttgctggggatgtactgggctatgtcactccatggaacagccatggctacgatgtcaccaaggtctttgggagcagttcacacagatctcacccgtctggctgcagctgaagagacgtggccgtgagatgtntgaggtctggaaccagctgctaagccagaa

SEQ ID NO: 22633 - DNA, 486 bp, Homo sapiens
  misc_feature (1)...(486): n = A,T,C or G
cgggagtnccggagncnnnnnnaattganngccctgcccgctctgcggaattcggcacgaggagagagagagagagagagagagagagagagagagagagagagagagagagagagagagagagagagagagagagagagagagagagagagaggggtgatctgtgtgtgcccctgtgctctcctgtgtgtgagagagagcgaccccctctctcaaaaaaaatactgtgtgtgtgtttttgtagtgagatacacagagagcttggctctctctcctttctgtctcgggagatgcctcgcacttttgatatttttggaggggatgtggagaaagatatgggccccttcttttctctctctctgtgtgggggctctgtttttttctcaacaccctccccctttctggtgtttgtgtgttctctctttagtgcgccctctccccctctctctctctggaggggtgtttgtgtctcagcgcgcgctcata

SEQ ID NO: 22634 - DNA, 520 bp, Homo sapiens
  misc_feature (1)...(520): n = A,T,C or G
agggcnggnnnnnnagnnnaattgancggctgtgganattgccacgcctgcaggaattcggcacgaggatttttggtccgcacgctcctgctcctgactcaccgctgttcgctctcgccgaggaacaagtcggtcaggaagcccgcgcgcaacagccatggcttttaaggataccggaaaaacacccgtggagccggaggtggcaattcaccgaattcgaatcaccctaacaagccgcaacgtaaaatccttggaaaaggtgtgtgctgacttgataagaggcgcaaaagaaaagaatctcaaagtgaaaggaccagttcgaatgcctaccaagactttgagaatcactacgagaaaaactccttgtggtgaaggttctaagacgtgggatcgtttccagatgagaattcacaagcgactcattgacttgcacagtccttctgagattgttaagcagattacttccatcagtattgagccaggagttgagggtgaagtcaccattgcagatgcttaagtc

SEQ ID NO: 22635 - DNA, 475 bp, Homo sapiens
  misc_feature (1)...(475): n = A,T,C or G
agaggggnttttnaactggtctctcttggcattcggcacgagctgaaagggaaggacatggtggtggacatccagcggcggcacctccgggtggggctcaaggggcagccagcgatcattgatggggagctctacaatgaagtgaaggtggaggagagctcgtggctcattgaggacggcaaggtggtgactgtgcatctggagaagatcaataagatggagtggtggagccgcttggtgtccagtgaccctgagatcaacaccaagaagattaaccctgagaattccaagctgtcagacctggacagtgagactcgcagcatggtggaaaagatgatgtatgaccagcgacagaagtccatggggctgccaacttcagacgaacagaagaaacaggagattctgaagaagttcatggatcaacatccggagatggatttttccaacgctaaattcaactatccccttgtttttt

SEQ ID NO: 22636 - DNA, 448 bp, Homo sapiens
  misc_feature (1)...(448): n = A,T,C or G
aaggggnnnnattgacgttcgtcggctgcggaattcggcacgagaggatgtccagcaccaaagggttatcaggatcggccaccatcccaacacctcgaaagaggatgggatttagagatgatttcccaacgatggttggggccttcagcaggttctcagtgtcagccacgatgagcgtatgctggccaaggtctgagatgtcatagttgtgatggtcaatgacagccgttttctcctcgtcaaactcaatcccgcactcactgcccagctctcgaagagggtcaccaatgtcggagctggcagctaccagcacactgcctccaccgtcaataaaggcactgatggtcntcacgttgatgttgcctccaaaatcttctaccgaaggggagaaaatgatgagattgtcatagaggaattccccatactttatgagagacaggctagggtc

SEQ ID NO: 22637 - DNA, 504 bp, Homo sapiens
  misc_feature (1)...(504): n = A,T,C or G
ccttgcccggctgctgaattcggcacgaggttagaatccgccctcagacctggcactcaagtatcgccctccggctggagctcttcggctgccgggtcacagatgctccctgctccaacatgctggggatgctctcaggcctcattgcagactcccagatctccgcctcttccacccaggaatacctctggagccccagtgcagcccgcctggtcagcagccgctcgggctggttccctcgaatccctcaggcccagcccggtgaggagtggcttcaggtagatctgggaacacccaagacagtgaaaggtgtcatcatccagggagcccgcggaggagacagtatcactgctgtggaagccagagcatttgtgcgcaagttcaaagtctcctacagcctaaacggcaaggactgggaatacattcaggaccccaggacccagcagccanaggtaggctgttcttggaggcctctgtaacgttaccctcaacagggaggctaag

SEQ ID NO: 22638 - DNA, 512 bp, Homo sapiens
  misc_feature (1)...(512): n = A,T,C or G
gagccgggnnnnnnagcccntttgatcgccttaggaatttgcacgacgtctaaatctcggcgcacgggccagcttccttcaaaatgtctactgttcacgaaatcctgtgcaagctcagcttggagggtgatcactctacacccccaagtgcatatgggtctgtcaaagcctatactaactttgatgctgagcgggatgctttgaacattgaaacagccatcaagaccacaggtgtggatgaggtcaccattgtcaacattttgaccaaccgcagcaatgcacagagacaggatattgccttcgcctaccagagaaggaccaaaaaggaacttgcatcagcactgaagtcagccttatctggccacctggagacggtgattttgggcctattgaagacacctgctcagtatgacgcttctgagctaaaagcttccatgaaggggctgggaaccgacgaggactctctcattgagatcatctgctccagaaccaaccaggagctgcaggaaatt

SEQ ID NO: 22639 - DNA, 511 bp, Homo sapiens
  misc_feature (1)...(511): n = A,T,C or G
gcgccccccaattgacgatcgatcgacnntcggcaagacggcacgagcggaaccggcggcaccagctcggagagaaaggaggttccataggcagttcttaccaagaagatgtcgattccattctccaacacccactaccgaattccacaaggatttgggaatcttcttgaagggctgacacgcgagattctgagagagcaaccggacaatataccagcttttgcagcagcctattttgagagccttctagagaaaagagagaaaaccaactttgatccagcagaatgggggagtaaggtagaagaccgcttctataacaatcatgcattcgaggagcaagaaccacctgagaaaagtgatcctaaacaagaagagtctcagatatctgggaaggaggaagagacatcagtcaccatcttagactcttctgaggaagataaggaaaaagaagaggttgctgctgtcaaaatccaagctgcttccggggacacatagccagagaggaggcaaa

SEQ ID NO: 22640 - DNA, 454 bp, Homo sapiens
  misc_feature (1)...(454): n = A,T,C or G
aattgaccngctttgaggacttcggcacgaggaactttggccgctcacttctggcgggctactgccccacatacatgcctgatcttgtgcttcatgggaccggcagtgatgagaagctgaagcagtgcctggtggccgaccttgtccacacagtccatcatccagtcctggatgagccaatagctgaagctgtctgtattatcgcagacacggataaatggagtgtgcaggtagctacaagtcagaggaaagtgacggacaacatgaaactaggccaggatgtcctggtctctagtcaggtgtccagtttgcttcagtccattttacagctctataagcttcacctccctgctgatttttgcatcatgcatcttgaagatagactacaggagatgtaccttaaaagtaaaatgctatctgaatatctccggggacacacacgagtccatgtgan

SEQ ID NO: 22641 - DNA, 545 bp, Homo sapiens
  misc_feature (1)...(545): n = A,T,C or G
tggtnnnnnnnnnnaaggagnncncnnnnnnnccncccccaattgcncggctgatgaattggcacgagcagacctggactccagggaggaggaggccgatggctctcagagcagctccagttcctcggtgccaggagagagcctccccagtgccagcgaccaggtgctgtatctcagcaggggtggtgtgggtaccacaccagcctcagaacccgctccactggccccccatgaagaccaccagcaaagggagaccaaagagaatgaccccatggacagccatcagtcccaggaatccccaaacctggaaaacatagcaaaccccctagaagaaaatgtaacgaaagaatcaatcagtagtaaaaaaaaggaaaaaaggaaacatgtggaccacgtagaaagttcactatttgtagcaccaggaagtgttcaatcctcagatgacctagaagaagacagtagcgactacagcattccttccaggactagtcacagtgactccagcatttaccttcgacgacatactcataggtcttcggaatcgg

SEQ ID NO: 22642 - DNA, 445 bp, Homo sapiens
  misc_feature (1)...(445): n = A,T,C or G
gagcgggcccccaatgaccgccatgatatcgttccgagggacgntagatttttttcctctacccagagtccctttttagtttaccccacggcttagtttgctgtcatataccagttctctagcagattccccaacagtgtttttccccagtggggagggtggaagggagggactgatataagtaaggagatgagtagttgtgttacagttcattttctttaaaaaaaagtactttgagaaaaggtgcaaaatattcttgaaagtctctaggccagccaaagtccacatatggatatttggggatgttatttaaatactcagcaggctgagtgcaggtatacgtgtgtatagagtgtgtatactttgcttttgttttataacattgtcagctaattttggctttgttctttggcatccattcttattataagtgatggaatgccat

SEQ ID NO: 22643 - DNA, 469 bp, Homo sapiens
  misc_feature (1)...(469): n = A,T,C or G
ngggtttcatagccctcctgcagaattcggcacgaggacaaacatggagaaaccccatctctactaaaaatacaaaattagctgggcgtggtggcacatgcctgtaatcccagctactcaggaggctggggcaggagaattggttgaacccaggaggcggaggttgcagtgagccgagattgtgccactgcactccagcctgggcaacaagagtgaaactctgtctcanaaaaaaaaaggaggaaaaaaccttaggggatggcaaaatttggttcttctcataatttcgggtttaaaaaataatggagccttacatcctgatcatgctgggccttaaaattctgacacagggagtcatcacatttcctcccactgcctgtggccttgttccaccatgactttcacagtacagggtaggcttagggtagtattattcccttggaaggggtctggcctaccatcacatgcc

SEQ ID NO: 22644 - DNA, 483 bp, Homo sapiens
cccccccattgccccctccatagaccgcctgcagaattcgcacgaggctttcagcctcttgtcctttaagtcctgatcagctgtcagattgttctgagagtctcatcgctgtcctcgaatgtccagtctcaggtgatcttgacctgatcggagtcgccaggcagtatatccagttagaacttccggcttttgcattagcttgtctgatgctcatgccccactcagagaaaagacaccagcaaattaagaattttctgggttcctgtgaccctcaggttattttaaagcaattggaagagcatatgaacacgggccagctagcaggattttcacatcaaattagaagtctgattttgaataatatcatcaataagaaggagtttgggattttggcaaagaccaaatactttcaaatgttgaagatgcatgcgatgaataccaacaatatcactgagctagtgaactatttggcaaatgacttaa

SEQ ID NO: 22645 - DNA, 515 bp, Homo sapiens
  misc_feature (1)...(515): n = A,T,C or G
gagtccggncnnncagcccatttgtcggctgtcagattcgaccgccttccgattaagctcgagctcatagacataagccatctggggctgctgcttctctttctcaggctctggggaaaggaatctccctctcctctcacttgattccaagtgtggttgaattgtctggagcactgggactttttttctcttttccttgatggaccaacagtgcaaatgcaatctcgccatttaactttcaggtcgatttcctttcctgatcagacatctttgtgccccctttaggaaggaaaagaatacacctacgatgtgccaggcactgtgttaggcgcttttatatagatcctcgttaggatgagactaagggatgaggacatctctttataaaaggcccctaagtaatggataaacagaaacacttagaggtgagaaggtctgtcttcaagatccaaggtaagattgccttcagtctgatgtttgttctcaaggacttatcccctacaatattctcccac

SEQ ID NO: 22646 - DNA, 515 bp, Homo sapiens
  misc_feature (1)...(515): n = A,T,C or G
tgggcnggggnnnnnncgnccnatttgancggctgcangatttcgacacgcgccacgatgaagatcagagcttatacttaattaaggttttatacacaccagttccccagtaaatgcaaatttaacaagaaaatcagacatgtcatatgttcaaaatgctcatggcaaacaatcattttgcattcctgcaaataaaattgttttatactgtaagctggaggcgagtgtaacttatttttgtaataaagtttttattttttttatgtgtcattaatataaatgtgtgttagtgtagaaatcttctggtttaaaaacttagaattgcacacatttcagtatgtttatttgtacttacataattttagaatagtggttgccaatagcctgtatgtttcacattaattggttttttgttatctaaataaatcattttagtatgttgtatgtcagttactgggatagctgggacatagagtgtaatttaaaatttgtcaatacgtattcattgggatata

SEQ ID NO: 22647 - DNA, 491 bp, Homo sapiens
  misc_feature (1)...(491): n = A,T,C or G
agggggnnnaagggggngnnnnnnaattganncctactgatccccctgcaagaattcggcacgagggcaacagtctgaaagtacgtggaggacgggaccggaagacgagagagggctggacatcctgcccaccgtgtcccagccagggcagggagggaccatggcccgcagggtcaaggggccccgatgtgcacagctgccacagggagggaggtcttggggagatgggcagtcaggtggcccgtccttggtgagtgcacacactgcgcgcacacatcgcggccttcctggcttctctggcccccacgtgtctgtgctgtagatactgtatcaaagtcccagcgtttagatggttaacatagagctgcttctgtgtaaatgctgcttattttaaacactaaaaagcgtttaattttatgggaaaaaaaaaaaaaaaaaaaaaaaaaaaaaaaaaaaaaaaaaaaccccttgggggggggcccggcccccct

SEQ ID NO: 22648 - DNA, 447 bp, Homo sapiens
  misc_feature (1)...(447): n = A,T,C or G
ntttgcccctgcgctgcacgaattcggcacgaggggagttggagaccagcctgcgcaacgtagcaagaccctatctctaaaacagattcattaatacttagccaggcgcggtggctgaggtcccagctactcggcaggcccaggctggcctgagccagaccgctctggactgttttaattttttcagccttaatacctgccagaattttttttttactatgtatctttgtccttacgtatataaattttatatacaattgagattatcctgtatttgcttttcccccctcacttttatatggtgacttttctcatgttaggctgaatactaacattttggaaactgtcggcctgaaaacgagcggagacacagtttctctaagtggagagtttatttgggccacacttgagcacaaattcaaggcgccctgaatgtgtactccgatt

SEQ ID NO: 22649 - DNA, 454 bp, Homo sapiens
  misc_feature (1)...(454): n = A,T,C or G
cggggtctcggnttttgannncaaactgatttgcgctgcaggaattcggcacgagccaacgctcacccctcaaccccaagtcctctgcttggggagttctccaggagctccggaccctgagtcaatgttgggaggaagggtacctggtgtccccagtcaagcccatgaagcccatgcggcctgctacatggggtggggtcgtagggaggctgtttgcctccacgtctaggaaggcctgtgagaggagcagtcaggacttccggacaacttagctgggccctacttgggcccaagtttcagaatagtgttcccctatcaaggctgtgactagatcaggcagggatccattccctgtcccctgcccactaccttcaggccatttagagttgtaaatttacaaagatccacggtgggctccagctgccaagccacccaagggagtctgggccctagg

SEQ ID NO: 22650 - DNA, 360 bp, Homo sapiens
ctggtagaggagtacaagtttcccgtggacctgctgaccaacaatagccagacacccctgcacctcgtcatccacagggacaacaccaccgtggccctcccctgcatctactacctgctggagaaaggcgcagacctcaatgcgtgagtccagcctgcttcaggagggaggcttcgggcacaggcacgggcacagccctacttccaggcaggcaaatccatgcaggacaagcagaggggttgcttgaggtgacaaggattgggtcccacataaaagcagcaggaatccacatggtgtaataaagagactggctttagccgggcatggtggctcatgcctattatcccaacactttggaag

SEQ ID NO: 22651 - DNA, 545 bp, Homo sapiens
  misc_feature (1)...(545): n = A,T,C or G
gaggggnnnnnnaaggtnnnncnnnnngnnngcccnnattgaccggcctnattgcancggctgtaagaattcggcacgaggggcctcggagcaaggcgttggcagatctgaagacagcatgtacacagccattccccagagtggctctccattcccaggctcagtgcaggatccaggcctgcatgtgtggcgggtggagaagctgaagccggtgcctgtggcgcaagagaaccagggcgtcttcttctcgggggactcctacctagtgctgcacaatggcccagaagaggtttcccatctgcacctgtggataggccagcagtcatcccgggatgagcagggggcctgtgccgtgctggctgtgcacctcaacacgctgctgggagagcggcctgtgcagcaccgcgaggtgcagggcaatgagtctgacctcttcatgagctacttcccacggggcctcaagtaccaggaaggtggtgtggagtcagcatttcacaagacctccacaggagccccagctgccatcaagaaactcttacaggtga

SEQ ID NO: 22652 - DNA, 465 bp, Homo sapiens
aatagcccgccttctgtgaacaatgaaacgaacaagttcatcttgagaatttatacacactggtcgagaagaagcatcctcaggaaaggttcaaaaggcatgcagaatctctagtcaggccgatcagtgaggatctttctctgtacagagccagaccacaaagactgggaggggtgatattttttcaaatgcttggatcccaacatgatgttaaaagacacacaaagaaatagggaaacatggcacaatcaaagagtcaaaatatccaggaacctactttaaggaaacacagatatcttcattatctcagaaggaattcagactaaccaccataaacatgttcagtgacccaaggaaaatgctgcatgaacaaaatggtatcaacatagagattgaaaacgtaaaaaggaaccaaacaaacattgtaacagatgcaatatgcttctttgaccaaattgaaagatt

SEQ ID NO: 22653 - DNA, 470 bp, Homo sapiens
  misc_feature (1)...(470): n = A,T,C or G
catggcncnnnnnaattgaaactcatccgcgctgcacgaattcggcacgagtaagagagtcaccatcatgcccaaagacatccagttggctcgccggatacggggagagagagcttaagtgaaggcagtttttatggcgttttgtagtaaattctgtaaaatactttggtttaatttgtgactttttttgtaagaaattgtttataatatgttgcatttgtacttaagtcattccatctttcactcaggatgaatgcgaaaagtgactgttcacagacctcagtgatgtgagcactgttgctcaggagtgacaagttgctaatatgcagaagggatgggtgatacttcttgcttctcatgatgcatgtttctgtatgttaatgacttgttgggtagctattaaggtactagagttgataaatgtgtacagggtccttttgcaataaaactggttatgacttgaaaaaaan

SEQ ID NO: 22654 - DNA, 475 bp, Homo sapiens
  misc_feature (1)...(475): n = A,T,C or G
natttgacccgctctgcaggaattccgcatgagcctcggtagaactgcacttcagcaataatgggaacgggggcagcgttccagcctcggtttctatttataatggagacatggaaaaaatactgctggacgcacagcatgagtctggacggagtagctccaagagctctcactgtgacagcccacctcgctcgcagacaccacaagataccaacagagcttctgaaacagatacccatagcattggagagaaaaacagctcacagtctgaggaagatgatattgaaagaaggaaagaagttgaaagcatcttgaagaaaaactcagattggatatgggattggtcaagtcggccggaaaatattccccccaaggagttcctctttaaacacccgaagcgcacggccaccctcagcatgaggaacacgagcgtcatgaagaaagggggcatattctctgcagaatttctgaaagg

SEQ ID NO: 22655 - DNA, 485 bp, Homo sapiens
  misc_feature (1)...(485): n = A,T,C or G
cttgcccgcctgcagattctggcgagcctgatgaatacggtacacagctgtgtgaagagtgatgagcatgtcctggaggagctggaaacagaaggggagaggcagctgaaaagcctccttcagcatcaacttgatacttctgtctccattgaggaatgtatgtctaagaaagagagctttgctcctggtactatgtacaagccctttgggaaggaagcagctgggactatgactttgtcccaattccagacactgcatgagaaggaccaggaaactgcttctctcagggaattagggcttaatgaaacagaaatcttgatctggaagagccatgtttctggtgaaaagaagacaaaactgagggcaactcctgaagcaatacagaaccgtcttcaagatattgaagaaaggatctcggagcgtcagcgcattctttgcctgccacagagatttgcaaagagcanacagctgacccggcgagaaan

SEQ ID NO: 22656 - DNA, 544 bp, Homo sapiens
  misc_feature (1)...(544): n = A,T,C or G
agggggnnnnnnnnaaggggnnnncnnnnggggngcccccttttgancggctgcatgaattcggcacgagaanagttctcgccaccaaagtccttggcactgtcaaatggttcaacgtcagaaatggatatggatttataaatcgaaatgacaccaaagaagatgtatttgtacatcagactgccatcaagaagaataacccacggaaatatctgcgcagtgtaggagatggagaaactgtagagtttgatgtggttgaaggagagaagggtgcagaagctgccaatgtgactggcccggatggagttcctgtggaagggagtcgttacgctgcagatcggcgccgttacagacgtggctactatggaaggcgccgtggccctccccggaatatctctgatgtatggtttaatagaagatagctggattctcacatctgtttctgcattcagtctgctgagagaccacatgtcattgtagcctttgggagaccccaccatatacttctgagagaatgcctgggaaaggcaaatagcatcttagn

SEQ ID NO: 22657 - DNA, 455 bp, Homo sapiens
  misc_feature (1)...(455): n = A,T,C or G
nttgaccgcctggagcgcactggagttcgctgcgcgctgttgggggccacctgtcttttcgcttgtgtccctctttctagtgtcgcgctcgagtcccgacgggccgctccaagcctcgacatgtcgtacaactacgtggtaacggcccagaagcccaccgccgtgaacggctgcgtgaccggacactttacttcggccgaagacttaaacctgttgattgccaaaaacacgagattagagatctatgtggtcaccgccgaggggcttcggcctgtcaaagaggtgggcatgtatgggaagattgcggtcatggagcttttcaggcccaagggggagagcaaggacctgctgtttatcttgacagcgaagtacaatgcctgcatcctggagtataaacagagtggcgagagcattgacatcattacgcgagcccatggcaatgtccaggaccgcat

SEQ ID NO: 22658 - DNA, 508 bp, Homo sapiens
  misc_feature (1)...(508): n = A,T,C or G
ggannnnnaattgatcgcctgtggtagacggacgtggcagtatgagagttgtaatggcccgactgttgagtgagggggagcaggggatcccaacggcttgcgctgcctttgcgcagcagccggcgggcggccacgtcgcggcctggctggggtaggagagggcggtccccagtgcagttgggtgaactaccgttgcacactggagtttctggtgtctttgcttggaactgacctagctcgtggcagggggaactcggctagcggccccacagcccctgctgactcaaaacaactgagttgtaagacgttcatcgccgtgttatccttgagtaaagaatgaactctggaagcccagccagggacaatgcaccttcacagagattctgcactaatctgagtgaaggtctaaggtttggaatctcccnctcatggagagaagctctgtatggctgtcatgcttagacagtgattcctgcatcttgaccttcangctgggagaggtgagagc

SEQ ID NO: 22659 - DNA, 506 bp, Homo sapiens
  misc_feature (1)...(506): n = A,T,C or G
cgtagngaaanaggnngnnnnnnaattgannngcccattgacccgcgctgcaggaattcggcacgagaatcaatccctgagggactcagaatcttctccgtgcaacctggaaagttcatctcttgtttccttcagtcaaagaaagtccattgtacataacaaaacagcccccaaacagcccagtgccgacaccattgttcctttcacactttcctttgttgcatgcagttgggttcaaatgccaaatagtgattagaagacgaccattctgatctgtgtgtgatctggtcactatgtgactgcctttacggnttctctccatgtgctatatgaatgaagaatgcataccagtgttttaaaaagtatttttatgtgtttttaaacacttttttaaatgagcctgacaccctgtgttcaagatttggagacatcccccatgtaatcttttaagtggataaataaccgtacctttttggttggttggtaaccaaggtgggttaaactaa

SEQ ID NO: 22660 - DNA, 480 bp, Homo sapiens
catcgacggctgtggtatgacgccgagcctcccgggtgcctctgaccccttgcctgaccccctggggctgatggatctcagcaccactcccttgcaaagtgctcccccccttgaatcaccgcaaaggctcctcagttcagaacccttagacctcatctccgtcccctttggcaactcttctccctcagatatagacgtccccaagccaggctccccggagccacaggtttctggccttgcagccaatcgttctctgacagaaggcctggtcctggacacaatgaatgacagcctcagcaagatcctgctggacatcagctttcctggcctggacgaggacccactgggccctgacaacatcaactggtcccagattattcctgagctacagtagagccctgcccttgcccctgtgctcaagctgtccaccatcccgggcactccaaggctcagtgcaccccaagcctctgagtgaggacg

SEQ ID NO: 22661 - DNA, 450 bp, Homo sapiens
  misc_feature (1)...(450): n = A,T,C or G
gggttctnaatcgatcgtccgcgattccccgacggccagaggacgagcgagcaggagacatggcttatcattcctgcccgcgggggccatcaccggcgacagcggtggagagctgagctcaggggacgactccggggaggtggagttcccccatagccctgagatcgaggagaccagttgcctggccgagctgtttgagaaggctgccgcgcacctgcaaggcctgattcaggtggccagcagggagcagctcttgtacctgtatgccaggtacaaacaggtcaaagttggaaattgtaatactcctaaaccaagcttctttgattttgaaggaaagcaaaaatgggaagcttggaaagcacttggtgattcaagccccagccaagcaatgcaggaatatatcgcagtagttaaaaaactagatccaggttggaatcctcagataccaga

SEQ ID NO: 22662 - DNA, 545 bp, Homo sapiens
  misc_feature (1)...(545): n = A,T,C or G
tagctntccnnccaaggagncnccccnaggcccccccccatcgcccggcctatggaccggctgtcagacaanataanatccatcgtacctgttaccaaactgaaaagtaaggcacctcactggacaaatcgcatacttcatgaatacaagaatctcagtacaagtgaaggtgtcagtaaagaaatgcatcaccttcagcgcatgttcttacagaattgctgggaaattcctacttatggagcagcatttttcacaggacagatatttacaaaggcaagccccagcaatcataaagtcatccctgtgtatgtaggagtgaatataaaaggacttcatctcctcaacatggaaactaaggctttactcatcagtcttaagtatggctgttttatgtggcaattgggagatactgatacttgttttcagatccatagcatggaaaataaaatgagctttatagtacatacaaaacaggctggtctcgtggtaaaactgttaatgaagctaaatggacagttaatgcccactgaaagaaattcatgaaa

SEQ ID NO: 22663 - DNA, 454 bp, Homo sapiens
  misc_feature (1)...(454): n = A,T,C or G
gcgcggggcacccncaattgacccgcctttgagcaccctattaatccatctcattacctacatgaccatcatcatctggtcatgtttctccattttatcattatgtataccttaaagacttgctcacattacttaaaattgagataggttaggcatctatccaatctcccatgccagtaattctacagaaacagattaggttagctagataagcatgtttacaattaaatttatgctgtatccttctaatcaccactttctcatcaaaatgctcacaaatcatctgcatcattgtccattctttaaaaatgtataaacccatctctactaaaaatacaaaattagctgggcatgatggcgcacgcctgtaatcccagctgttcaggaggctgaagcagaagaattgcttgaaccccggagacggaggttgcagtcagccgagattgcaccattg

SEQ ID NO: 22664 - DNA, 287 bp, Homo sapiens
agaattctgacatggatagtattttagcgagtctgaagctgcctcctaagtctgaagtctcatcagacgaagacatccagttccgcctggtgacaagatttgtgaatgaggcagtcatgtgcctgcaagaggggatcttggccacacctgcagagggagacatcggagccgtctttgggcttggcttcccgccttgtctgggagggcctttccgctttgtggatctgtatggcgcccagaagatagtggaccggctcaagaaatatgaagctgcctatggaaaacag

SEQ ID NO: 22665 - DNA, 502 bp, Homo sapiens
  misc_feature (1)...(502): n = A,T,C or G
gccccctttgcaccgcgctgcaggaatnatgtgacgagcgctgcaggaatacggcacgagccttaatgaatttagaaaattctaaacagccttctgtttctgagcaattgtctggtccttcagactcctctagttggccgaaatctggatggccttctgcatttcagaagccaaaaggacgattgccatatgaacttcaggactatgttgaagatacatcggaatacctagctcctcaggaaggaaattttgtttataagttatttagcctgcaagacctgttgttactcgtacgctgcagtgtccagaggatagagacaagaccacgttctaaaaaacggaagaaaatcagaagacaatttccagtttatgtactaccaaaagtagagtatcaagcttgttacggagttgaagctctgactgaaagtgaactttgtcgcttatggactgaaagtttattgcattccaacagctcattttatgttgggcatatcgatgcatt

SEQ ID NO: 22666 - DNA, 466 bp, Homo sapiens
aatagaccgccttaggaattcggcacgaggattcatgagtctcggaacctcaagccacagcccaggccccagaccctgaggaaatccaattcctttttcccctctgagacaaggaaggacaaggttcaaggctgacatcactcgagcagaaaagcagatgagatcaccagagagactacagagaaaacaaaagatagccccacgaagcatgtgcagcattcaggtgatcagcaggactgtctccagcacggagctgacactgttcagctgcctcaactggtagacgctcccaagaagtcagaggcagctgtcggggcggaggtagccatgacctccccaggacagagcaaaaacttctccctcaagaacacaaacgttttaccccctattgtatgacctttgctgagggtatgtcctgctcctttccaccagtgatttgtattaagacagcacttatatttgacga

SEQ ID NO: 22667 - DNA, 472 bp, Homo sapiens
  misc_feature (1)...(472): n = A,T,C or G
attttgaaaaaccctttgatacgccctgcggaattcggcacgagctggagacccccatgggcaacttggcaggagagatggtgccgtaggaggtcgtggatggttgatgccaagagaggccctccacccgtggtgggcaaatgtccaggcctgggctggcagcccagggctgtttctgggtgctccctggccccagggtggcgtctggttaccatggctgtgtgtgtccatgtctgcaagcagttcttcaataaatggcctgcctccccaaaaaaaaaaaaaaaaaaaaaaaaaaaaaaaaaaaaaaaaaaaaaaaaaattctgggggggggggccgggcccccaatcccctttttggggggggttaaaaaaattcggggggcggtttttaaaaaggggggggggggaaaacaangnnntnnnnnnnnnnnntnncnnttnnnctctctttttctttttcttatatgtacac

SEQ ID NO: 22668 - DNA, 493 bp, Homo sapiens
cgccccattcgccccgcgctgcaggaattctgcacgagcctgctcgtagcaggggagcgcccgcggcgtcgggtttgggctggaggtcgccatggggcgaggcagcggcaccttcgagcgtctcctagacaaggcgaccagccagctcctgttggagacagattgggagtccattttgcagatctgcgacctgatccgccaaggggacacacaagcaaaatatgctgtgaattccatcaagaagaaagtcaacgacaagaacccacacgtcgccttgtatgccctggaggtcatggaatctgtggtaaagaactgtggccagacagttcatgatgaggtggccaacaagcagaccatggaggagctgaaggacctgctgaagagacaagtggaggtaaacgtccgtaacaagatcctgtacctgatccaggcctgggcgcatgccttccggaacgagcccaagtacaaggtggtccaggacacctaccagaat

SEQ ID NO: 22669 - DNA, 468 bp, Homo sapiens
ctagctctgcctcgcctgcaggaattcggcacgagatagtattggagcacatgttactgcttcattttggagcttgtggagttgatgactttctgttttctgtttgtaaattatttgctaagcatattttctctaggcttttttccttttggggttctacagtcgtaaaagagataataagattagttggacagtttaaagcttttattcgtcctttgacaaaagtaaatgggagggcattccatcccttcctgaagggggacactccatgagtgtctgtgagaggcagctatctgcactctaaactgcaaacagaaatcaggtgttttaagactgaatgttttatttatcaaaatgtagcttttggggagggaggggaaatgtaatactggaataatttgtaaatgattttaattttatattcagtgaaaagattttatttatggaattaaccatttaataaagaag

SEQ ID NO: 22670 - DNA, 456 bp, Homo sapiens
  misc_feature (1)...(456): n = A,T,C or G
cgggtgcccnnnnatttganncccaatagaccngcgctgcaggaattcggcacgaggacaagagcctgatgcccaactttgtgtgtgtggggacgggggagtcagggccccccaagtcccacaatagccccaatgtttgcctatccacctcccccaagcccctttacctatgctgctgctaacgctgctgctgctgctgctgctgcttaaaggctcatgcttggagtggggactggtcggtgcccagaaagtctcttctgccactgacgcccccatcagggattgggccttctttcccccttcctttctgtgtctcctgcctcatcggcctgccatgacctgcagccaagcccagccccgtggggaaggggagaaagtgggggatggctaaaaaagctgggagatagggaacagaagagggtagtgggtgggctaggggggctgccttatttaaag

SEQ ID NO: 22671 - DNA, 467 bp, Homo sapiens
ctagactcgcctgcacgaattcggcacgagtggatgttcagtttagaaccattttgtctgctccctctggaagccttgcgcacagcttactttgtaattgttggagaataactgctgaatttttagctgttttgagttgattcgcaccactgcaccacaactcaatatgaaaactatttaacttatttattatcttgtgaaaagtatacaatgaaaattttgttcatactgtatttatcaagtatgatgaaaagcaatagatatatattcttttattatgttaaattatgattgccattattaatcggcaaaatgtggagcgtatgttcttttcacagtaatatatgccttttgtaacttcacttggttattttattgtaaatgagtacaaaattcttaatttaagagattgtatgtaatatttatttcattaatttctttccttgcttacgtaaattttgaaagac

SEQ ID NO: 22672 - DNA, 501 bp, Homo sapiens
  misc_feature (1)...(501): n = A,T,C or G
cgcccccatagctccgcgctgcaggctggattgcacagcctctgctgaanncttgtcgaggctgtccggacggagcagcggcgaggccggccgcgaagatgccagtggcggtgatggctgaaagcgcctttagtttcataaagttgctggatgagtgcgagaaccaggagctcgaggcccctggaggaattgctacacccccagtgtatggtcagcttctagctttatatttgctccataatgacatgaataatgcaagatatctttggaaaagaataccacctgctataaaatctgcaaattctgaacttgggggaatttggtcagtaggacaaagaatctggcagagagatttccctgggatctatacaaccatcaacgctcaccagtggtctgagacggtccagccaattatggaagcacttatagatgcaacaaggagacgcgcctttgccctggtctctcaagcgtatacttcaatcatcgccgatgattctgcag

SEQ ID NO: 22673 - DNA, 482 bp, Homo sapiens
  misc_feature (1)...(482): n = A,T,C or G
aattgacncgcctgcgtgaattcggcacgaggagcagtctgaatgccagaatggataaccgttttgctacagcatttgtaattgcttgtgtgcttagcctcatttccaccatctacatggcagcctccattggcacagacttctggtatgaatatcgaagtccagttcaagaaaattccagtgatttgaataaaagcatctgggatgaattcattagtgatgaggcagatgaaaagacttataatgatgcactttttcgatacaatggcacagtgggattgtggagacggtgtatcaccatacccaaaaacatgcattggtatagcccaccagaaaggacagagtcatttgatgtggtcacaaaatgtgtgagtttcacactaactgagcagttcatggagaaatttgttgatcccggaaaccacaatagcgggattgatctccttaggacctatctttggcgttgccagttccttttacct

SEQ ID NO: 22674 - DNA, 478 bp, Homo sapiens
attaaaacccccttttgccccgctgcaggaattcggcacgagggagaatgcacctgccatcatcttcatagacgagattgatgccatcgccaccaagagattcgatgctcagacaggggccgacagggaggttcagaggatcctgctggagctgctgaatcagatggatggatttgatcagaatgtcaatgtcaaggtaatcatggccacaaacagagcagacaccctggatccggccctgctacggccaggacggctggaccgtaaaattgaatttccacttcctgaccgccgccagaagagattgattttctccactatcactagcaagatgaacctctctgaggaggttgacttggaagactatgtggcccggccagataagatttcaggagctgatattaactccatctgtcaggagagtggaatgttggctgtccgtgaaaaccgctacattgtcctggccaaggacttctag

SEQ ID NO: 22675 - DNA, 488 bp, Homo sapiens
gccccatagcccgcctgcggctggtagagacgaagactgcggtctttctgtctctgcccctcaaaggcgtgagcgtcagagacacggacgtgttctgcacggaaaactatctgaaggtcaactttcctccatttttatttgaggcatttctttatgctcccatagacgatgagagcagcaaagcaaagattgggaatgacaccattgtcttcaccttgtataaaaaagaagcggccatgtgggagaccctttctgtgacgggtgttgacaaagagatgatgcaaagaattagagaaaaatctattttacaagcacaagagagagcaaaagaagctacagaagcaaaagctgcagcaaagcgggaagatcaaaaatacgcactaagtgtcatgatgaagctcttaatggtggcgcgtccggagttgtttgttcctctcggtaggttcgtggtcttgctgagttcaggaattaagctgcagaccctcacg

SEQ ID NO: 22676 - DNA, 457 bp, Homo sapiens
  misc_feature (1)...(457): n = A,T,C or G
nattgacccctctgcaggaattcggcacgagagatacctggatatttgctagaggagaaatgaaagcaaaacttcgtacacagtgccttgcccataataagtactcaataagcaattgttcctcatagagtcttttgccatgatttatggtggtttttgaaatttgtcttaattgaaaaaagaccaaatatttcaaatgagcttataggcagctgtggccagtgaaaatatggggttgtacagttaggtcctagaatgttattttgcactagttgtcacttagaaagatggggatcctgtagattttttggtgctaagggatactttgtcattatgatgaagtaagtgttacgtgtcagataaatagcacacagaatagctctttctgctggactgctctttctcttcggtggtgctgcgattaattgtaaattgctatcaatcacactattagagc

SEQ ID NO: 22677 - DNA, 482 bp, Homo sapiens
  misc_feature (1)...(482): n = A,T,C or G
cggcggctcnnnnannaaaattgagnattcgtgccgcgctgcaggaattcggcacgagggaactagaaggcctaaaacaaagattagaaaagaaacagaaaagagaaccaggtacaaagacaaagaaacaaactacattggcatttaagccaatcaaaaaaggaaagaagagaaatccctggtctgattcagaatcagataggagcagtgacgaaagtaattttgatgtccctccacgagaaacagagccacggagagcagcaacaaaaacaaaattcacaatggatttggattcagatgaagatttctcagattttgatgaaaaaactgatgatgaagattttgtcccatcagatgctagtccacctaagaccaaaacttccccaaaacttagtaacaaagaactgaaaccacagaaaagtgtcgtgtcagaccttgaagctgatgatgttaagggcagtgtaccactgtcttcaagccct

SEQ ID NO: 22678 - DNA, 509 bp, Homo sapiens
  misc_feature (1)...(509): n = A,T,C or G
ggnnncttttnaatagaccgctngtangaaccctggataccccgatgaacaggaaatcaatgcctgaggctgacttcagctcctggacacccttagaattcctagttgaaactttccatgactggatcacagggaaaaaccgaccgagctcaggaagcctaatccaggtggtaaccacagaaggaaggacggaactcaccccagcatatttttaggcctcatctcagtgcctatgaggggcctgccagaaaagtcactaacctgtctcagagtggccttgtccagccttgtgttttctgtaacccctgtttgtggtacgagataatgagtcctatttttctctcacataatatgcatttgctctcctaggacagtgtaatacatttatgtgaagtaaagacatgcgagactggtggcctgcanaannnannnnnnnnnnnnnaaaaaaaccctttggggggggccccggcccccaattccccttaaagggggcgggttaaaaacatcgg

SEQ ID NO: 22679 - DNA, 508 bp, Homo sapiens
  misc_feature (1)...(508): n = A,T,C or G
gagcngnnnaattgacttttcgtcggctgtangaattcggcacgaggagaaacctacaatgcgcttactaattggttaacagatgcccgaatgctagcgagccagaacattgtgatcatcctttgtggaaacaagaaggacctggatgcagatcgtgaagttaccttcttagaagcctccagatttgctcaagaaaatgagctgatgtttttggaaacaagtgcgctcacaggggagaatgtagaagaggcttttgtacagtgtgcaagaaaaatacttaacaaaatcgaatcaggtgagctggacccagaaagaatgggctcaggtattcagtacggagatgctgccttgagacagctgaagtcaccgcggcgcgcacaggccccgaacgctcagaagtgtggttgttaggagagcacacagtgttcatacagtggcatttgggacacaatcgttggaacctgaagaatctgaagtttttttaccaccatctttttctactctgtna

SEQ ID NO: 22680 - DNA, 411 bp, Homo sapiens
  misc_feature (1)...(411): n = A,T,C or G
cgcgggccccnattgacatcgatcgccatgaggantcgccgcgaggttttgccaaaacctcggatgcgtggccttctggccaggcgtctgcgaaatcatatgtctgtagcattcgtgctatccctgggggttgcagcgttgtataagtttcgtgtggctgatcaaagaaagaaggcatacgcagatttctacagaaactatgatgtcatgaaagattttgaggagatgaggaaggctggtatctttcagagtgtaaagtaatcttggaatataaagaatttcttcaggttgaattacctagaagtttgtcactgacttgtgttcctgaactatgacacatgaatatgtgggctaagaaatagttcctcttgataaataaacaattaacacatatgacataaaaaaaaaaat

SEQ ID NO: 22681 - DNA, 478 bp, Homo sapiens
  misc_feature (1)...(478): n = A,T,C or G
agcgggttttnaattgacggctgtagaatccggcacgagcggccctcctgcgtttgcccagggtcggcccgcagtgatggaggaggaggcggagaccgaggagcagcagcgattctcttaccaacagaggctaaaggcagcagttcactatactgtgggttgtctttgcgaggaagttgcattggacaaagagatgcagttcagcaaacagaccattgcggccatttcggagctgactttccgacagtgtgaaaattttgccaaagaccttgaaatgtttgcaagacatgcgaaaagaaccacaattaacactgaagatgtgaagctcttagccaggaggagtaattcactgctaaaatacatcacagacaaaagtgaagagattgctcagattaacctagaacgaaaagcacagaagaaaaagaagtcagaggatgngaagcaaaattcaaggcagccagcaaaggctggagtggtg

SEQ ID NO: 22682 - DNA, 479 bp, Homo sapiens
  misc_feature (1)...(479): n = A,T,C or G
attgaccgcctgtggaattcatcgcgaggctttcctttaagaacacgctttgtcctttattaatacttctcacctataattacgaattttctctaaacttgtagattttattatccatgccatctatttataatcctatgacactcctatattgtttatgggttttttgtttttttttgtttttttttttaaacaaagttttgctctgtcacccaggctggagtgcagtgagccgaaatcacgccactacactccagcctgggcaacagagggagactccatctcaaaaaaaaaaaaggcccttttgggtaaacctcccgcttttttaaaagggttaaaaaaaaaaaggcttttaaggtgggcttggggggcccccatttgaaaacccacccttttggaagcttaagccagaagaattttttgggccccggatttaaattcccaaacttttaacccccttgccccctggaacccggaan

SEQ ID NO: 22683 - DNA, 473 bp, Homo sapiens
  misc_feature (1)...(473): n = A,T,C or G
gtgcgtannnnnnaattgataatcctgcagctttcacatcatattcctttattacatatatgaaatataaaaacaaattaacaaagcaatatatatatatatttgcaagtccacaggacttcagagaaaaaaaggttctgtatgtgaaattattcatatggcactgtgttcatgttttgtatattcaagtacaaaagaaactatgtatagtggttatgcgtgggtacagaagatgaataataatgaaaaactgtgattttttgactatcacatacattgtgttaaaaaacaggtaaatataatgactattactgttaagaaagacaaggaggagaactgtttcaatgttcaggtttaaatactaagcacaaaaatataacaaattctgtgtctacaataatttttgaagtgtatacaagtgcattgcaaatgagctctttaaaatttaaagtccatttcccctttagccaagg

SEQ ID NO: 22684 - DNA, 477 bp, Homo sapiens
  misc_feature (1)...(477): n = A,T,C or G
nattgaccgcctgtggtataccgacgagcagcantcgagaagcagcgagtcagggaagaaatattggcaaaaggtggctttcttcctccagaagaaataaaagaaagatttgacagcaactgtattacaccaggaactgaattcatggacaatcttgctaaatgccttcgctattacatagctgatcgtttaaataatgaccctgggtggaaaaatttgacagttattttatctgatgctagtgctcctggtgaaggagaacataaaatcatggattacattagaaggcaaagagcccagcctaaccatgacccaaatactcatcattgtttatgtggagcagatgctgatctcattatgcttggccttgccacacatgaaccgaactttaccattattagagaagaattcaaaccaaacaagcccaaaccatgtggtctttgtaatcagtttggacatgaggtcaaagattgtgan

SEQ ID NO: 22685 - DNA, 468 bp, Homo sapiens
  misc_feature (1)...(468): n = A,T,C or G
tggtnccnnnnnaggagggaattgaccccctgaactgactccctcggaagaatcggcacgagcaccaggagctaaaaaagaaaacaaagagaaagaagaaacagaaggagagaccgaatacaaatttgaatggcagaaaggagccccacgagaaaaatatgccaaagatgacatgaacatcagagatcagccctttggtattcaggttcgaaatgtgaggtgcattaaatgtcacaaatggggtcatgtcaacacagatcgagaatgtcctttgtttggtctttctggaatcaatgcaagttcggttcccactgatggctcagggccatcgatgcacccctcggagctaatagcggagatgagaaacagtgggtttgcactgaaacgaaatgtactggggagaaacttgaccgcaaatgatccatcacaggagtatgttgcaagtgagggtgaagaagatccagaagt

SEQ ID NO: 22686 - DNA, 487 bp, Homo sapiens
  misc_feature (1)...(487): n = A,T,C or G
nttttgaccgcccttcgttttgaccggcctgtccgaantccgcacgaggtgcttcctcaccctcagggacacggtgctgctgcgtaaggaatctcggaagctcattgttcagcccaacactcgccttgaaggctcagacgtgcagcttctggaatacgaggcgtcagctgctggcctcatccgatccttctctgagcgtttcccagaggatggacccgagttggaggagatcctcacacagctggccacagccgatgcccgattctggaagggccccagtgaggccccatctggccaagcttgaggaagatgtgtggccttgcccccaattccatcagaccaaggctgcaagtggccctccattcgtgtgtgtatttaggggctggggagggggaggggcangancttgnacccttgtactacctcanctgagggcggggacacaaccccttccatttgtcagcactttccagcctgccaattgctg

SEQ ID NO: 22687 - DNA, 456 bp, Homo sapiens
  misc_feature (1)...(456): n = A,T,C or G
nttgcccgcctgcangaactctgcacgagcccaacccggcagcatgggcctggataagaacacagtgcacgaccaagagcatatcatggagcatctagaaggtgtcatcaacaaaccagaggcggagatgtcgccacaagaattgcagctccattacttcaaaatgcatgattatgatggcaataatttgcttgatggcttagaactctccacagccatcactcatgtccataaggaggaagggagtgaacaggcaccactaatgagtgaagatgaactgattaacataatagatggtgttttgagagatgatgacaagaacaatgatggatacattgactatgctgaatttgcaaaatcactgcagtagatgttatttggccatctcctggttatatacaaatgtgacccgtgataatgtgattgaacactntagtaatgcaaaataactcattn

SEQ ID NO: 22688 - DNA, 473 bp, Homo sapiens
  misc_feature (1)...(473): n = A,T,C or G
gtgcgctcnnnnnnaattgacctctctgcagcaattcggcacgaggaaagttggtccttgactgtggcattgcactctgcactgtttctctctgcagacctaggggaaaactgcaggtggaagtgcttttctactaaggcctcttactttgggggggatgtgccctacagaagacatagaagatggggaaatgccaatgggcaaagagctactttgaatacataattctcttcaaagacttcagcagcaaaccaaaacagcaggttaaaaaaaaagatgcttttttgggtgcaagtctaacctgtctagcatgagatcttcttgattttctgattattttatgtagcttgagacaaagtgaatcaacttccacttagttgtaccgagcataaaacagaacttgggcttcctggcagtgaggccactgtcccatcacagatttttaaaataaatatgatttgaagtaaaaaaan

SEQ ID NO: 22689 - DNA, 459 bp, Homo sapiens
  misc_feature (1)...(459): n = A,T,C or G
ggtnccnnnnagaagncactgccngcctgctatgttcctctagccncacgggccgcgttcgcaccaaaaccgtgaagaaggcggcccgggtcatcatagaaaagtactacacgcgcctgggcaacgacttccacacgaacaagcgcgtgtgcgaggagatcgccattatccccagcaaaaagctccgcaacaagatagcaggttatgtcacgcatctgatgaagcgaattcagagaggcccagtaagaggtatctccatcaagctgcaggaggaggagagagaaaggagagacaattatgttcctgaggtctcagccttggatcaggagattattgaagtagatcctgacactaaggaaatgctgaagcttttggacttcggcagtctgtccaaccttcaggtcactcagcctacagttgggatgaatttcaaaacgcctcggggacctgtttgaattt

SEQ ID NO: 22690 - DNA, 460 bp, Homo sapiens
atttgcaccgcgctgcatgaattcggcacgagtgtggcccatgccttgacagaaaaatccaaggccatgactggtgtggaacaatggccatacagggctgttgcccaggccctagaggtcattcctcgtaccctgatccagaactgtggggccagcaccatccgtctacttacctcccttcgggccaagcacacccaggagaactgtgagacctggggtgtaaatggtgagacgggtactttggtggacatgaaggaactgggcatatgggagccattggctgtgaagctgcagacttataagacagcagtggagacggcagttctgctactgcgaattgatgacatcgtttcaggccacaaaaagaaaggcgatgaccagagccggcaaggcggggctcctgatgctggccaggagtgagtgctaggcaaggctacttcaatgcacagaaccagcagag

SEQ ID NO: 22691 - DNA, 549 bp, Homo sapiens
  misc_feature (1)...(549): n = A,T,C or G
agagnnnnnnnnnaggntgnnccccnnngnnnnncccnnttactgannggcctttttgcanncggctgcaagaattcggcacgaggtcccctctccatcagtttaccactcatgtaaacaactgccgaggccagcttatctatgggtggaagaaaatgtttttcaccaacttttctctccaagaacacagggacaagactcagtttacagaaagtagcataagtgccaccaaagagtgtgaagcgtccgagacttcagccagtcagagatctgaattcggaggcatttaaaaatgcctctagatgtgggagcaatccacatggtttctgccaacttactgaaaacattccggcgcctcccgccacaccatgctcataaggcagatggaaagagtcgtttctcagggatgcctttgagcttgagcgtcttttttccaaacacatcagagggcgtgaccacattcttgtactatcttctgtagacttctctagaggagccaaccttattcgttgtttaatctcacgaattacatataactttatgtgaaaa

SEQ ID NO: 22692 - DNA, 544 bp, Homo sapiens
  misc_feature (1)...(544): n = A,T,C or G
nggagaggatcgccgtctgcangaattcggcacgagatttctagcctaaaagctgaattagaaagaataaaagtggaaaaaggacagttggagtccacattaagagagaagtctcaacagcttgagagtcttcaggaaataaagatcagtttggaagagcagttaaagaaagagactgctgctaaggctaccgttgaacaactaatgtttgaagagaagaataaagctcagagattacagacagaattagatgtcagtgagcaagtccagagggattttgtaaagctttcacagacccttcaggtgcagttagagcggatccggcaagctgactccttggagagaatccgggcaattctgaatgatactaaactgacagacattaaccagcttcctgagacatgacaccctcatggcaggattctagcctgcactttgggtttttaactcatctttagagcaacagtaattattatttaactcttaactggagaaagagaagtccaaccaaagggagactggagaaatgctactctagagggag

SEQ ID NO: 22693 - DNA, 482 bp, Homo sapiens
  misc_feature (1)...(482): n = A,T,C or G
agcggcgngnnnnnttttgtttgctcggctgcaggaattcggcacgaggttgtttgtcacactgagattgctgaatgtcgtggctgttggctgccgagcctcagctgctggcatttccttctgctgtttgctgcttttgtgcctcccccactttccatcacctctggagtcccgtctggacgtcccttcctgctacaggaataatgaggcgtgggctgcctcccgctagggcctcctgctccctgtaggtagtttctggctgaggcttgctaattggggatgcttcttagagcatcttccacatcaactcccctggctgctggctaccgattaaattcattagtgtgaaagaggtgggagtgaggttttctggcctgaagcagtctgcactgaaaggtacccaagtggcctgaaacagtgtanggaaagacctgggaaacactggaccaaaaaagcctgatctcatggagacctgcatggcc

SEQ ID NO: 22694 - DNA, 458 bp, Homo sapiens
  misc_feature (1)...(458): n = A,T,C or G
nttagacngcactgaccacgctgcgcaacttttctgcttatctgggaggtgttgggcgcggacagtcgagatgtcagagaaaaagcagccggtagacttaagtctgttagaggaagacgacgagtttgaagagttccctgccgaagactgggctggcttagatgaagatgaagatgcacatgtctgggaggataattgggatgatgacaatgtagaggatgacttctctaatcagttacgagctgaactagagaaacatggttataagatggagacttcatagcatccagaagaagtgttgaagtaacctaaacttgacctgcttaatacattctagggcagagaacccaggatgggacactaaaaaaatgtgtttatttcattatctgcttggatttatttgtgtttttgtaacacaaaaaataaatgttttgatataaaaaaaaaaaaacggcacg

SEQ ID NO: 22695 - DNA, 453 bp, Homo sapiens
attgcccgcctgcggtttttttggaaacctctgcgccatgagagccaagtggaggaagaagcgaatgcgcaggctgaagcgcaaaagaagaaagatgaggcagaggtccaagtaaaccgctagcttgttgcaccgtggaggccacaggagcagaaacatggaatgccagacgctggggatgctggtacaagttgtgggactgcatgctactgtctagagcttgtctcaatggatctagaacttcatcgccctctgatcgccgatcacctctgagacccaccttgctcataaacaaaatgcccatgttggtcctctgccctggacctgtgacattctggactatttctgtgtttatttgtggccgagtgtaacaaccatataataaatcacctcttccgctgttttagctgaagaattaaatcaaaaaaaaaaaaaaaaacctcaagggggggc

SEQ ID NO: 22696 - DNA, 464 bp, Homo sapiens
attggccccgcgctgcaatatcctccgcgctgcaggattcggcacgagagcggctgctgttggttgggggccgtcccgctcctaaggcaggaagatggtggccgcaaagaagacgaaaaagtcgctggagtcgatcaactctaggctccaactcgttatgaaaagtgggaagtacgtcctggggtacaagcagactctgaagatgatcagacaaggcaaagcgaaattggtcattctcgctaacaactgcccagctttgaggaaatctgaaatagagtactatgctatgttggctaaaactggtgtccatcactacagtggcaataatattgaactgggcacagcatgcggaaaatactacagagtgtgcacactggctatcattgatccaggtgactctgacatcattagaagcatgccagaacagactggtgaaaagtaaaccttttcacctacaaaatttc

SEQ ID NO: 22697 - DNA, 458 bp, Homo sapiens
atttcccccgcgctgcatgaattcggcacgagggtgttcaggcgcttcgtggaggttggccgggtggcctatgtctcctttggacctcatgccggaaaattggtcgcgattgtagatgttattgatcagaacagggctttggtcgatggaccttgcactcaagtgaggagacaggccatgcctttcaagtgcatgcagctcactgatttcatcctcaagtttccgcacagtgcccaccagaagtatgtccgacaagcctggcagaaggcagacatcaatacaaaatgggcagccacacgatgggccaagaagattgaagccagagaaaggaaagccaagatgacagattttgatcgttttaaagttatgaaggcaaagaaaatgaggaacagaataatcaagaatgaagttaagaagcttcaaaaggcagctctcctgaaagcttctcccaaaaaagc

SEQ ID NO: 22698 - DNA, 452 bp, Homo sapiens
  misc_feature (1)...(452): n = A,T,C or G
natagancgcctggagaactctgccgaggccaggagggagactgtggagatatcctgaggctgattcgggtgaagactgcaggccggagctagccgaattcgaaaaactctcggatcaggtgaagatcagtgaagaagccctgagagcagatggctttggagacaatcctttctatcactgtttggtagcagagattcttccagcgcccgggaagctactggggccctgcgtggtgggctatgggatatactatttcatctacagtacatggaagggacgcaccatttatctggaggatatctatgtgatgccagaatatcggggtcaagggattggttccaaaataatcaaaaaggtggctgaggtggccttggataaaggctgctcccaattccgcctggccgtcctggactggaaccagagggccatggacttgtacaaggccctatga

SEQ ID NO: 22699 - DNA, 464 bp, Homo sapiens
  misc_feature (1)...(464): n = A,T,C or G
catcgaccccccnnnnnaattgaccccgcgctgcaggaattcggcacgaggtgatgcccgaggatgacgtgttctttatcgtggatgtgaagatagaggacattggggtatacagctgcacagctcagaacagtgcaggaagtatttcagcaaatgcaactctgactgtcctagaaacaccatcatttttgcggccactgttggaccgaactgtaaccaagggagaaacagccgtcctacagtgcattgctggaggaagccctccccctaaactgaactggaccaaagatgatagcccattggtggtaaccgagaggcacttttttgcagcaggcaatcagcttctgattattgtggactcagatgtcagtgatgctgggaaatacacatgtgagatgtctaacacccttggcactgagagaggaaacgtgcgcctcagtgtgatccccactccaacctgcgac

SEQ ID NO: 22700 - DNA, 458 bp, Homo sapiens
ctttgacccgcgctgcattaattcggcacgaggtgctacgtcgccctggacttcgagcaggagatggccaccgccgcatcctcctcttctctggagaagagctacgagctgcccgatggccaggtcatcaccattggcaatgagcggttccggtgtccggaggcgctgttccagccttccttcctgggtatggaatcttgcggcatccacgagaccaccttcaactccatcatgaagtgtgacgtggacatccgcaaagacctgtacgccaacacggtgctgtcgggcggcaccaccatgtatccgggcattgccgacaggatgcagaaggagatcaccgccctggcgcccagcaccatgaagatcaagatcatcgcacccccagagcgcaagtactcggtgtggagtcggggctccatcctggcctcactgtccaccttccagcagatgtggattag

SEQ ID NO: 22701 - DNA, 543 bp, Homo sapiens
  misc_feature (1)...(543): n = A,T,C or G
nggagattgatcgctgtctgcangaattcggcacgagaccatattggatcaaacacaaaattcgtaaaaaatattcctcctgttcccccaacctcaaaatatatgttgaaggtcatatggccaggggcaatgcagattcaaagccactattgtgagctgcattgactataccaccatgtaattcataatgtgttgaaaatcaaatgctcatgataaatgatcattgattagggcccctagttgtgagtgtacctatattttttcattctataaaagcaaatattaaatcaacatgaagagtaaataattacccatattatattgagagggtgaaattggtttatattccatatggagttcaattgatcattattttcatccttgacacttgggtttatccattctccaaaccaccactttggaagagcaagttaatatacaattacctgctaaaaaggtacatacctnncatttntgtgtgggtgacaattccactttgttgttctgtccttctgattgggagattaatttcctaagctggtt

SEQ ID NO: 22702 - DNA, 543 bp, Homo sapiens
  misc_feature (1)...(543): n = A,T,C or G
aggtgatgatggctgtcgacgntngcggatgccactgactntnttggccgtgtggtcatctaccacctgcgggtgcttggggagaaggtgtgagacctctaggggctgtctcctccaggaagccctccgggaagcacagcaaagtccctcattctgcacagaaggtttattggttcctcttgggaagggtcccctcccaccacctgtccagaagctgcctttgaagtcagttctgggtttccccagctctggctgaccattttgttccctgagtgtctgagtccccggcaggcggccttcactcagggtcagcgggcaccaggttgctctggaagagcttgaggatgtggttctcgatcacctgttgcactgagatggggcagggaaaaggtgggctgtgagcttgaatcgggagtggggtggaggcacaggccaacctgcgctctccccttatgggacaaacagggacccttgcagagacctgcattacagagcanagctgggagaaccgaggactcaccccaggaacctcaactttccctn

SEQ ID NO: 22703 - DNA, 532 bp, Homo sapiens
aggagattcacggctgtggattcgcacgagccaaggcaagtcctttcggcatgagaaaaccaagaagaagcggggcagctaccggggaggctcaatctctgtccaggtcaattctattaagtttgacagcgagtgacctgaggccatcttcggtgaagcaagggtgatgatcggagactacttactttctccagtggacctgggaaccctcaggtctctaggtgagggtcttgatgaggacagaagtttagagtaggtcctaagactttacagtgtaacatcctctctggtccttttctgtgttcctagttttgtacagacttgtttttgagtgttgagtagcagggacaaaataagggaatggtattttttaagaaaattcattttcattgttggctccttccttttctgtgaaagtcctcatactgagaaatttgtatattttatattaaatcacttactattgaaaaaaaaaaaaaaaaaaaaaactcaagggggggcccggacccaattcccctatagggagtcgatt

SEQ ID NO: 22704 - DNA, 437 bp, Homo sapiens
  misc_feature (1)...(437): n = A,T,C or G
nttgcctgctgcgattcgccgagccaaatccaaacttctcttgaaaagttcagggaccgtccaggggagatggggaggagatatggagtgagtcacctgctccagaagatgccagcttctctctccagggtgcttagttggctttgcccacccctcactccccagggagctctggggacagcttcctcacacccctgtcccacccacacagctgccctagctgaccccgagaagtgctcttggctgacccctctggtgtgtggtgaggggctttctcttccccttcctgtttcagacccccccatttcccgcacatggtgtggggggctgggggaggtccaagcagagtgttttattattatcgctttatgtttttggttattggtttttttgtatagaccaaagcaaagaaaataaaaataacacagaaaaaaaat

SEQ ID NO: 22705 - DNA, 483 bp, Homo sapiens
  misc_feature (1)...(483): n = A,T,C or G
agcgcncgtgnnaattgannaactgaccggcctgtaggaattcggcacgagggaaccctggtccatacgaactgagtgaaagcaaggccaagtatgtacacccatggggacaaacgtcccaacacaaaggggtctcatgcctgcaagggccaagaggacgctcggacaagggcaggaaggaatttgctgagtctccttctccatgtgacgtgactctcaacccacaccagctaggggagcctcccgcagcttcagttaccctttgacgcccacacagtgttatgcaagcaccgagcccaaagtaccgctgggccgtggtgtcctaattgtcttggtgacaaagagcaattttattttaaagcaactgaatcctttccccctgttttgtgtgccagtattttactggcttcttaattagcttaagcaacgtgtactttggatttgtggatgttatataaaagccacgaacaccctgggcatgct

SEQ ID NO: 22706 - DNA, 448 bp, Homo sapiens
atagacagcttgccccgcgctgcaggaattcggcacgagcggaactcaagaccaagcagcagatcctgaagcagcggcgccgggcccagaagctgcacttcctgcagcgtggtggcctcaagcagctctctgcccgcaaccgccgccgcgtccaggagctgcagcagggcgccttcggccggggtgcccgctccaagaagggcaagatgcggaagaggatgtgaggaccaggacccagccccgtggctccttgattggccttagggtgggcatcagcagacgttcccgtgcaccactgtgtgcctggccctgtgctgggcactgggggcactccctgcaggagccatcatctgtgaaaaggagcactgtatggccacagaagggcagcagctgcgtcagcctaagacagagacatttgaacagggccttgaagggtgtgcaggagttc

SEQ ID NO: 22707 - DNA, 447 bp, Homo sapiens
aatagacagctgtgcaggacttcggcacgagcgagaatgaagactattctcagcaatcagactgtcgacattccagaaaatgtcgacattactctgaagggacgcacagttatcgcgaagggccccagaggaaccctgcggagggacttcaatcacatcaatgtagaactcagccttcttggaaagaaaaaaaagaggctccgggttgacaaatggtggggtaacagaaaggaactggctaccgttcggactatttgtagtcatgtacagaacatgatcaagggtgttacactgggcttccgttacaagatgaggtctgtgtatgctcacttccccatcaacgttgttatccaggagaatgggtctcttgttgaaatccgaaatttcttgggtgaaaaatacatccgcagggttcggatgagaccaggtgttgcttgctcagtatct

SEQ ID NO: 22708 - DNA, 541 bp, Homo sapiens
  misc_feature (1)...(541): n = A,T,C or G
aggagattgatcgctgtctgcangaattcggcacgagatgatttggagacagaacacacatatgtttatctctacatagttatggaggctgagaagttcaaggtcaagttaccacgtctggcgagagacattcttgatgtgataaatccatgtgatgaaaattttacaaaaaatggatcactggatagagggtaagctaacaaaaataaaaatgcaacaaagaaacaaaaagtgataatgccggcagtaaactggatgtgattagattgaagatgtgaaattggcaagagcagagcaaagactggatgcaccatggcctgcatggagctatggaacaaactgcactggaaaaatccaatgtgtattaaaagcaaggtaacgttgcttcatctcttagtttaaattgcaataggaccagaaagctgcttatgcttggagagtnttctactttggatttgagactgtaatatttcaaaatcgaaagcagttggcttgcatcttgccaaagcatgatctatgtgcacaatgaaagaaattgtan

SEQ ID NO: 22709 - DNA, 499 bp, Homo sapiens
  misc_feature (1)...(499): n = A,T,C or G
atttgatncgcgntgnaagaattttgcacccgctgcaggttctccactggccagcttgngcctcatcctcatgtcatccttctaggaaggcgcctgccccatcttgtctgccggcagcatgcatccaaggccagagctcatgcctgcagactgggctggtgcctcctccgcttcagggtatgggagttggtgaaggggctttcaaaaaataataagaaaaaaaaggtaaagtctttggtagcttctatccactcagatcctggaaggcagcaaggttttgtggatctagattcattaggaatgtcttcttgtcagccaggccaggacccgggcttgccaagagcagaggccctcccagcaaccaggataccaccactttgggggctttgtgtacagaggtccgggtctgagacctcataggctgcagaaatctggggcagccaccatcaagaagcccctctcatgggccagaactcctttgccagcgtggatttctcan

SEQ ID NO: 22710 - DNA, 485 bp, Homo sapiens
cgcacccgcccaatcgaccggctgcaattattccgcacgaggacaagtacaaaatgagaagaaaaagtccctttcccttcatgcctctacttcctgctgtattctcaaaggtaagcactgattacagtttacttatggatctttccaggaaaatattttatgcatttatcagaaaatgtaagtatatgcatcctttaaaattctgcataaatcaaactctgcagggtactatcttcccatcctcatttgatattttgtagatcttttcctattggctgtacagatcacctcattctgtctcctgggtcatacaatatagctcacataattctaagtctgaaggttggtccaaatggttccaagaatgcaggtaccaaaaagtagtctcttgaagaggccatcagagacctggctgtttgtatcttcctcctctgccatccacagtgtcatcttcacccaaggtggctggagaagctgttaggaat

SEQ ID NO: 22711 - DNA, 482 bp, Homo sapiens
  misc_feature (1)...(482): n = A,T,C or G
cccccatcgaccgccttanatcgcaccgcctgcaggaattcggcacgagtggtcctggaactcaggggcctgcgcaccattgtgaccacgctgcaggacagcatccgcaaagtgactgaagagaacaaagagttggccaatgagctgaggcggcctcccctatgctatcacaacggagttcagtacagaaataacgaggaatggactgttgatagctgcactgagtgtcactgtcagaactcagttaccatctgcaaaaaggtgtcctgccccatcatgccctgctccaatgccacagttcctgatggagaatgctgtcctcgctgttggcctagatgtgattgtagccgtggtgcctgggcagatggtaaacaaacatgctgtcctcttatgacaatatgtgcagagaaggccccaaacgctggggtgagaggaacaacaaactgactaactcacggncgagttggagccagaaccaacaa

SEQ ID NO: 22712 - DNA, 360 bp, Homo sapiens
  misc_feature (1)...(360): n = A,T,C or G
ngattgacncgccctgnggannnnccattgacccgcgctgcaggaattcggcacgaggacgggggtaccaggggtgcctctgagacccattctcgtgtttccctgttgtaccttttgcctgcagggcagagagatctggtttctagcaaattcccagtaggatgtcatgtaagttccttccccctcttagagattgaaggctgtaagagtccagatggtggagccaggctgtctgggttcaaatgccatctttgacacttgcaagctaaatgacattactcaaattaatcgttctgcacttcagcttccttgtctatcaaataaaaagaatagtacctgcccaaaaaaaaaaaaaaaaaa

SEQ ID NO: 22713 - DNA, 474 bp, Homo sapiens
agagggccctgacttgcctgacgatttcggacgagccaggtgctcggtccttccgaggaagctaaggctgcgttggggtgaggccctcacttcatccggcgactagcaccgcgtccggcagcgccagccctacactcgcccgcgccatggcctctgtctccgagctcgcctgcatctactcggccctcattctgcacgacgatgaggtgacagtcacggaggataagatcaatgccctcattaaagcagccggtgtaaatgttgagcctttttggcctggcttgtttgcaaaggccctggccaacgtcaacattgggagcctcatctgcaatgtaggggccggtggacctgctccagcagctggtgctgcaccagcaggaggtcctgccccctccactgctgctgctccagctgaggagaagaaagtggaagcaaagaaagaagaatccgaggagtctgatgatgacatgggcc

SEQ ID NO: 22714 - DNA, 479 bp, Homo sapiens
  misc_feature (1)...(479): n = A,T,C or G
cgccgcccattgaccttgantcgcgctgcaggaattcggcacgagattgcaggtctctgtacgggccagtttctctgccttcttccaggatcaggggttagggtgcaagaagccatttagggcagcaaaacaagtgacatgaagggagggtccctgtgtgtgtgtgtgctgatgtttcctgggtgccctggctccttgcagcagggctgggcctgcgagacccaaggctcactgcagcgcgctcctgacccctccctgcaggggctacgttagcagcccagcacatagcttgcctaatggctttcactttctcttttgttttaaatgactcataggtccctgacatttagttgattattttctgctacagacctggtacactctgattttagataaagtaagcctaggtgttgtcagcaggcaggctggggaggccagtgttgtgggcttcctgctgggactgagaaggctcacgaagg

SEQ ID NO: 22715 - DNA, 461 bp, Homo sapiens
  misc_feature (1)...(461): n = A,T,C or G
acgcgcccccattganactcactcgcgctgcacgaatncggcacgagcaagaactcacctcaaagagaagccctttgactgcagtcagtgtggaaatgcattccggaccctctcggccctgaaaatccacatgcgagttcacactggcgagaggccttacaagtgtgatcagtgcgggaaggcttacggccggagctgccacctcatcgcacacaagagaacgcacaccggagagaggccctacgagtgtcacgactgtgggaaagctttccagcacccctcccacctcaaagagcacgtgaggaatcacacgggggagaagccctacgcgtgcacgcagtgcggcaaagccttccgctggaagtccaactttaatttgcacaagaagaaccacatggtggagaagacctacgaatgtaaagaatgcgggaaatcctttggcgatctcgtgtcccggagga

SEQ ID NO: 22716 - DNA, 456 bp, Homo sapiens
agatgggacactgacttgctctgacgaattcggcacgaggccactcagccatttccccctcctcagatggggcaccaataacaaggagctcaccctgcccgctcccaacccccctcctgctcctccctgccccccaaggttctggttccatttttcctctgttcacaaactacctctggacagttgtgttgtttttttgttcaatgttccattcttcgacatccgtcattgctgctgctaccagcgccaaatgttcatcctcattgcctcctgttctgcccacgatcccctcccccaagatactctttgtggggaagaggggctggggcatggcaggctgggtgaccgactaccccagtcccagggaaggtggggccctgcccctaggatgctgcagcagagtgagcaagggggcccgaatcgaccataaagggtgtaggggccacctcctccccc

SEQ ID NO: 22717 - DNA, 497 bp, Homo sapiens
  misc_feature (1)...(497): n = A,T,C or G
aggaagttccnnaggaagaaacatgatcgctctctactgatactcctagcacaaaccattttattttttgggccattaccccataccccttactgctgccaaaaccacatgggctgggggccagggctggatggacagacacctccccctacccatatccctcccgtgtgtggttggaaaacttttgttttttggggttttttttttctgaataaaaaagattctactaaaaaaaaaaaaataaaaaaaaaaccctgcccccaattccggggggggcccataaatcctggggaccttctttttggggggggaaccccccaccaattgggaagcccctcccccttcccaaaaaatccccttgttgccccaaaaggggttttattttttgccccccgaattgaacttttcggggaaaccaaaattggccgggaaaaaaaaaactagggctggggccctaaataaattttggttttttcccaaaaaaaaaaaaaaaaccc

SEQ ID NO: 22718 - DNA, 474 bp, Homo sapiens
  misc_feature (1)...(474): n = A,T,C or G
cggccttttaactgacgctgtagaacntgcacgagggaacattgagactatggcaaactgtggtaggaaaaacgtatggcctttggaaatgtgtgcttcctgaagaagatagtggtgagctggcaaagccaaagattggttttccagagacaacagaagaggagctagaagaaattgcttcagagaattcagattgcatctttccttcagctcctgatgttaaggcctgagcgtcaatcatatgttgcagttagtatacaactgactaaaacaagcaagcagagaaaagcatcagccttccagagttactgtctgcttaaggcagaaacagcagtaaataatgaggaaaatgaattagctccagtgctggaacaactaactaacttggtgttacctgtaagtgaaaactcaagtgtcagatgaagggaggtggagttatcctcttatagtacagtggcctgttatctttttaat

SEQ ID NO: 22719 - DNA, 488 bp, Homo sapiens
  misc_feature (1)...(488): n = A,T,C or G
agcncggccntttgaccgccntcatcgatcgcatgcacgaattcggcacgaggttatgatgtctgtgtggaaagcggctgtgcagacattcaattgttattattatgtcctacaagcattaattaattaacacactttagtaagtatgttcgcctgtaatattgaacgtaggtgcgataaataataggatgaggcaggaatcaaagacagatactgcgacatagggtgctccggctccagcgtctcgcaatgctatctaaaaaaaaaaaaaaaaaaaaaaaaaaaaaaaaaaaaattttggggggggggccgggcccccaattccccttttgggggggggtttaaaaattctggggccgggttttaaaaacgggggggggggaaaaaaaannnnnnntnnnnntncttcttcttttctcttctttccttcttcttttttctttcctctcctttctctcctctcccctttttcttctccttctctcttt

SEQ ID NO: 22720 - DNA, 520 bp, Homo sapiens
  misc_feature (1)...(520): n = A,T,C or G
tgggncnnnnnnagccccccatcgcccgcctgcaggaattcggcacgagctgtcgccatgaaggtcgagctgtgcagttttagcgggtacaagatctaccccggacacgggaggcgctacgccaggaccgacgggaaggttttccagtttcttaatgcgaaatgcgagtcggctttcctttccaagaggaatcctcggcagataaactggactgtcctctacagaaggaagcacaaaaagggacagtcggaagaaattcaaaagaaaagaacccgccgagcagtcaaattccagagggccattactggtgcatctcttgctgatataatggccaagaggaatcagaaacctgaagttagaaaggctcaacgagaacaagctatcagggctgctaaggaagcaaaaaaggctaagcaagcatctaaaaagactgcaatggctgctgctaaggcacctacaaaggcagcacctaagcaaaagattgtgaagcctgtgaaagtttcagctccccgagttgtgg

SEQ ID NO: 22721 - DNA, 481 bp, Homo sapiens
  misc_feature (1)...(481): n = A,T,C or G
ganaagcttgaccgccnntnannaaactcgacccgcgctgcaggaattcggcacgagaaagtttcatttcggtgactctttatgcacacacaaaggagaaataccagctctgcctccctgcaaattcacaggaagtgagattcgtgtgagggatgacaagatgcctttggcgcaccttgcaatagctgttgaagctgttggttgggcacatccagatacaatctgtctcatggttgcaaacacgctgattggcaactgggatcgctcttttgggggaggaatgaatttatctagcaagctggcccagctcacttgtcatggcaatctttgccatagctttcagtctttcaacacttcctacacagatacaggattatggggactgtatatggtttgtgaatcatccactgttgcagacatgctacatgttgttcaaaaagaatggatgcgactctgtacaagtgtcacagaaagtgaggtt

SEQ ID NO: 22722 - DNA, 477 bp, Homo sapiens
  misc_feature (1)...(477): n = A,T,C or G
ngattgatncccctnngnannnncactgatccgcgctgcaggcttgccagagactgtgtgttttgtttcccccaccaccatcactgccacctggcttctgccatgtggcaggagggtgactggataattaagactgcattatgaaagtcaacagctctttcccctcagctcttctcctggaatgactggcttcccctcaaattggcactgagatttgctacacttctccccacctggtacatgatacatgaccccaggttccagtgtagaacctgagtcccccattccccaaagccatccctgcattgatatgtcttgactctcctgtctacttttgcacacacccttaatttttaattggttttcttgtaaatacagttttgtacaatgttatctctgtgggaggaaggaggcaggctgtggtgggactgggtagggtatagtatcactcctgagttccactgctctagaatctaa

SEQ ID NO: 22723 - DNA, 484 bp, Homo sapiens
  misc_feature (1)...(484): n = A,T,C or G
atttgaacagccctttgtganccgcgctgcaggaattcggcacgagctccactcaatgtcttaggtcaggagttgtgtctaggctggaagagccaaagaatattccattttcctttccttgtggttgaaaaccacagtcagtggagagatgtttggaaaccacagtcagtggagcctgggtggtacccaggctttagcattattggatgtcaatagcattgtttttgtcatgtagctgttttaagaaatctggcccagggtgtttgcagctgtgagaagtcactcacactggccacaaggacgctggctactgtctattaaaattctgatgtttctgtgaaattctcagagtgtttaattgtactcaatggtatcattacaattttctgtaagagaaaatattacttatttatcctagtattcctaacctgtcagaataataaatattggaaccaagacatggtaaaaaaaaaaaaaaaaaaan

SEQ ID NO: 22724 - DNA, 484 bp, Homo sapiens
  misc_feature (1)...(484): n = A,T,C or G
gaaagaaaatttgatcgccgtggtacacccataagagctccctcaacgtgcacatgcgcctccaccggggagagaagtcctacgagtgctacatctgcaaaaagaagttctctcacaagaccctcctggagcgacacgtggccctgcacagtgccagcaatgggaccccccctgcaggcacacccccaggtgcccgcgctggccccccaggcgtggtggcctgcacggaggggaccacttacgtctgctccgtctgcccagcaaagtttgaccaaatcgagcagttcaacgaccacatgaggatgcatgtgtctgacggataagtagtatctttctctctttcttatgaacaaaacaaaacagcaacaaaaaacanacacacaaaaaagctatggcactagaatgtaagaaatagtttgggttcatttttactttctggttttggttttgtttcgcctcattttggactacatgaagaactgtn

SEQ ID NO: 22725 - DNA, 481 bp, Homo sapiens
  misc_feature (1)...(481): n = A,T,C or G
nnnnnnaagcggnnnnattttggcattgatcggcgtgccgaattcggcacgagcggcgacgcggttgctgcggggctcgggttcttggggctgttcgcggctgaggtttggacctcctgcgtacagacggtttagtagtggtggtgcctatcccaacatccccctctcttctcccttacctggagtacccaagcctgtttttgctacagttgatggacaggaaaagtttgaaaccaaagtaaccacattggataatgggcttcgcgtggcatctcagaataagtttggacagttttgtacagtaggaattcttatcaattcaggatcgagatatgaagcgaaataccttagtggaattgctcactttttggaaaaattggcattttcggtcagtacccagttttgtaattttttagactatacttttgaaggatgtttgagatttttcttgtctataatggttattttaataaattatcaa

SEQ ID NO: 22726 - DNA, 441 bp, Homo sapiens
gcgtgggtttaaattgacggctgattgaatcgcctcgagccggcccggacacggacaggattgacagattgatagctctttctcgattccgtgggtggtggtgcatggccgttcttagttggtggagcgatttgtctggttaattccgataacgaacgagactctggcatgctaactagttacgcgacccccgagcatgcagggagtaaaaacaggctggtgcagacagcagagctcacaaaggtgttcgaaatccgcaccactgatgacctcactgaggcctggctccaagaaaagttgtctttctttcgttgatctctgggctggggactgaattcctgatgtctgagtcctcaaggtgactggggacttggaacccctaggacctgaacaaccaagactttaaataaattttaaaatgcaaaaaaaaaaaaaaaaaaa

SEQ ID NO: 22727 - DNA, 479 bp, Homo sapiens
atttgcaccgcctgcttgaattcggcacgagcccctcccaaaaaacacccctcatccagtctgttccagcctagagatcctggcctacccctccgccaaagcgcgcactgagtgcaaaccccagagtcaatccctgtcccggctccgccccccgcgtccgaatcccgcccagccgggccctcaagcccagtcgggactcgagcctagggaggcgaggttcccgcaccggatagaaaatgtcactgaaattcacaaatgcaaaacggattgaaggacttgatagtaatgtgtggattgaatttaccaaattggctgcagacccttctgttgtgaatcttggccaaggctttccagatatatcccctcctacatatgtaaaagaagaattatcaaagattgcagcgatcgatagcctgaatcagtatacacgaggctttggccatccatcacttgtgaaagctctgtcctatctgtatgaa

SEQ ID NO: 22728 - DNA, 466 bp, Homo sapiens
  misc_feature (1)...(466): n = A,T,C or G
attgaccgcctgaggaanttgaacgaccttccgcccggcttattatcctccttattgacaacagagcggtcgcggcggcgactctctgcgtgcggtgatagccaagccatgggagacaagaagagccccaccaggccgaagcggcagccgaagccgtcctcggatgagggttactgggactgtagcgtctgcaccttccggaacagcgccgaggccttcaagtgcatgatgtgcgatgtgcggaagggcacctccacccggaaacctcgacctgtctcccagttggttgcacagcaggttactcagcagtttgtgcctcctacacagtcaaagaaagagaaaaaagataaagttgaaaaagaaaaaaaaaaaaaactcgaactggaaaacaaggcagaagtgatagttcaagtaaaaaggatgtgattgagctgacagacaacagctttgataaaaatgttctgga

SEQ ID NO: 22729 - DNA, 481 bp, Homo sapiens
aggggggttttgaattcgatcgctctgcaggaattcggcacgaggaaacctctctaaaaagctgccggttatttaaccccaatgatgatggaaaggaggaaccaccaaccacattactttgggtccagtactacttggcacaacattatgacaaaattggtcagccatctattgctttggagtacataaatactgctattgaaagtacacctacattaatagaactctttctcgtgaaagctaaaatctataagcatgctggaaatattaaagaagctgcaaggtggatggatgaggcccaggccttggacacagcagacagatttatcaactccaaatgtgcaaaatacatgctaaaagccaacctgattaaagaagctgaagaaatgtgctcaaagtttacaagggaaggaacatcagcggtagagaatttgaatgaaatgcagtgcatgtggttccaaacagaatgtgcccaggctta

SEQ ID NO: 22730 - DNA, 475 bp, Homo sapiens
ggaggacatgcactgctgacgatgcaatgaaggaaacaaccactggcccagggtagagatgcctacagggtggttgcttgttggatacaatacaaggaacactgctcagaacccacgtcttcagcagcatttgaaacactggcagcaatgcacaagagcaagatggtgtcaggaaccatgtcaaaccctcaccttcttccattttttttttttttttaaaacagtctcactctgttgcccaggctggagtaaagggcaggggcatgatctcggttcactgcaacctccgcctcctgggctaaagccattttccttagcctcccaagtagctaaaactacaggggtgtaccaacacgtagggctaattggtttggttttttttggggggggggagacagggttttgccatgttgcccaggtgtggctcgaacgcctaggctcaagtgatctgcccacctcagtctccctaagtgcc

SEQ ID NO: 22731 - DNA, 452 bp, Homo sapiens
  misc_feature (1)...(452): n = A,T,C or G
agagggacactgattcatgacgattnccgacgaganaaaagggcctagaaactcacccgtgcatatgttgacctttgcaaaatgacctggtgacatggcaagtcagtggggacaggaaggaccactccctaagtaatcccagaacaatggctattcatgtgggaaaaaaagaaattttactttctctcaccttacctggtgataagttccaaatatgttaagggctttaatacaaaaagcaaaaattgtcagtgtttggatgaaaaaagccttagggcaggaaagaatctcttgagacataaagtagtaatcataaaggacaagatggttaagtcaattctgttaaaactcaaggcttatattaagcaaacacttgaagtgagaagatgatccacaacttgagaagacatttataatacaaataactgatgaaggattcataatcacaaatn

SEQ ID NO: 22732 - DNA, 525 bp, Homo sapiens
  misc_feature (1)...(525): n = A,T,C or G
gcccccccccccccccccatcgcaccgccttnangatttgacccgcgctgcaggaattcggcacgagaacatccgaggaggcggagcgctccgatggggaccccgtgcagcccgccgtgctccaggtgcaccagacctcctgagcttagagccaccgtgccatcctgtgctgtgctcaagcgggcagccagggctgaagaacaaactcttgcacatctccagcacgactcacccactcctgcgttcctgtccaggcagtaatcattgaccatatagtcatagtaagacacacgagaccaggctttaccatgaaagcgacctgtcacggactccacttttaatttgctcttaggatctatctctgtagaatgactccaagattgaagaagaagctgagcagttgaaaaatgctaatctctttgacttagtcagagaaaaacagaggataattaagatactagtcatgagaagcgagtcattcttttttgtcattccatacgctggctgaatagtggaccggcaatn

SEQ ID NO: 22733 - DNA, 447 bp, Homo sapiens
atttggcccgctctgcaggaattcggcacgagaaactttctcccagaagccaaacttcattaatcatcagtgaactcacacaggagagagaccctttgaatgcaatgaatgtcaaaaatccttctctgtgaagtcaaaacttagagaacatcagagaattcacacaggggagaaaccctatgaatgtaatgaatgtgagaaaatgttctaccacaagtcatccctcacagtacatcagagaacccacacaggagagaaaccctatgcatgtagtgaatgtgggaaaaccttctaccagaagtcatccctcacaacacatcagagaacacacacaagggagcaaccctatgaatataatgaaagcttttaccagaatcccaacttcactaaatgtcagagagacaacatagaggaaacccttgtcaacatcctgaaggctcagaaacc

SEQ ID NO: 22734 - DNA, 493 bp, Homo sapiens
  misc_feature (1)...(493): n = A,T,C or G
ggcggccgnnaaatttanaccttgatggatcgtagaacnctgccgagctgaccgacctggggaacatagcaagaccccatctctacaaaaatgtaaaaaataaaaattagccgggtgtagtggtacatgcctgtaatcctagatactcgggagctaaggcagaaggatcacttgagcccaggagttcgaggctacaatgagctgtgatcgtgccactgcactccatcctgggtggcagagtgaggccctgtctcaaaataaataatccagtcccccccaagaaaggaatgaagtgctataatgagaaaaatcctagtacctaacatatagtagacagtggagagtggttctctttcgtttctcaggggcagacagatggggtgctggagtcctctatcaaagagtcagagctctatcccagatgtgtaatgaacgtggtcacagacatattgtcccattaccatttaccttccctataaccactgtgcctccn

SEQ ID NO: 22735 - DNA, 276 bp, Homo sapiens
  misc_feature (1)...(276): n = A,T,C or G
aggcgcncggggccngtgnaaccttganaaattgacggctgtcgcaaacctctactgtcccggaggaggttgggaggtggaggcccagcatcccgcgcagatgacaccatcaaccgccagagtcccagacaccggttttcctagaagcccctcacccccactggcccactggtggctaggtctccccttatccttctggtccagcgcaaggaggggctgcttctgaggtcggtggctgtctttccattaaagaaacaccgtgcaacgtgaaaaaaa

SEQ ID NO: 22736 - DNA, 480 bp, Homo sapiens
atcgcccgcctgttgaattccgcacgagctgcaaagcgtttttctgcaggctgttttcccaggttccctcggcctgtacctcgcgcactcctcttgctccaggtccttcagtctccgctcgtctcaccgtaggctgtgacgacatgagcaacaaagaaggatcaggagggttcaggaaaaggaagcatgacaatttcccacataaccaaagaagagaagggaaggatgttaattcatcttcacccgtgatgttggcctttaaatcatttcagcaggaacttgatgcaaggcatgacaaatatgagagacttgtgaaacttagtcgggatataactgttgaaagtaaaaggacaatttttctcctccataggattacaagtgctcctgatatggaagatatattgactgaatcagaaattaaattggatggtgtcagacaaaagatattccaggtagcccaagagctatcaggggaagatg

SEQ ID NO: 22737 - DNA, 488 bp, Homo sapiens
  misc_feature (1)...(488): n = A,T,C or G
ggcgtccgccccattgaccgccttcattgatcgcttgcggaattcgcacgagccttcatcttctccgcctcttcctacgacgtgctacacctggttgagttctacctggaggaagggatcactgatgaagaagccatctccctcatcgacctggaggtgctgagacccaagcgggatgacagacagctagagattgcaaacaacagctcccagattctgcggctagtggagaccaaggactccatcggagatgaggacccgttcacagctaagctgagctttgagcaaggtggctcagagttcgtgccagtggtggtgagccggctggtgctgcgctccatgagccgccgggatgtgctcatcaagcgatggcccccacccctgaggtggcaatacttccgctcactgctgcctgacgcctccattaccatgtgcccctcctgcttccagatgttccattctgaggactatgagttgctggtgcttan

SEQ ID NO: 22738 - DNA, 474 bp, Homo sapiens
  misc_feature (1)...(474): n = A,T,C or G
atttgatccccctnnnaaanctgatccgcgctgcggaattccgcacgaggggtgctgggtgcagatgccgagtgggtctggacagcaccctatggacagttgtgtccccatggaatgatgacaatagctactgaagtcctaaggagcaagcctaactcaagccattggcacacaggcattatacagaaagctggaagttgaaatggtggagtccaacttgtctggaccagcttaatggctctgctcctggtaacgattttatccatggatgacttgcttgggtatggagaggccgcttgactacactgtgtggagcaagttttagagatgcaacggactcagaattcatgattgaacaaatgcacgcagacctgttatcctaaactaggggtgttaatgaccaccacaagcaggcatgcatcttactgcttgaaagggtcttgcctcacccaagctagagtgcagtggcctttg

SEQ ID NO: 22739 - DNA, 501 bp, Homo sapiens
  misc_feature (1)...(501): n = A,T,C or G
cganaagggaaaggnaaaaanaatttgaccgcctgttgaattcgcctcgaggaggagcagggtacagcccattcccccagccctggctgacctggcctagcagtttggccctgctggccttagcagggagacaggggagcaaagaacgccaagccggaggcccgaggccagccggcctctcgagagccagagcagcagttgaatgtaatgctggggacaggcatgctgccgccagtagggcggggacccggacagccaggtgactaccagtcctggggacacactcaccataaacacatccccaggcaggacagatcggggaaggggtgtgtaccacgctatgatttctcttgcattaaaatgtattattatttcttaaaaaagaaaaaaatgcttaaaagtgaaatttatatacaaattagagaataactgtgtgtgggggggggccgggggccccattccgctgaagggggggggtgataaatataatggggcggggtt

SEQ ID NO: 22740 - DNA, 461 bp, Homo sapiens
agcgggaacattggcttcactcgcgctgcaggaattcggcacgagctttcccttccagcctggaagtgttgcagaggtgtgcatcaccttcgaccaggccaacctgaccgtcaagctgccagatggatacgaattcaagttccccaaccgcctcaacctggaggccatcaactacatggcagctgacggtgacttcaagatcaaatgtgtggcctttgactgaaatcagccagcccatggcccccaataaaggcagctgcctctgctccctctgaaaaaaaaaaaaaaaaaaaaaaaaaaaaaaaaaaaaaaaaaaaaaaaaaaaaaaaaaatttaagctctttgggggggggcccccccccccaattccctcttgtgggggcattacaaaaactgcgggggggaactttaaaaaaagggggaggggaaaaaaaaggcctaaaatcttaattccccattct

SEQ ID NO: 22741 - DNA, 469 bp, Homo sapiens
  misc_feature (1)...(469): n = A,T,C or G
ggattgatcgctctgcaggaattccatggatagctatcccgaccgccggactacctggggggtctgttacccaaagggctctatagacatgccgtttacaattcagtggaccgcagtgtaccatggcgacaatgtgattaatcagggctcaggtgttgaggatgtagacttgggagagccccttgttggtgtgcttaaggcatcctggtttcagtcaggtcaggtcccctcacctaatactggcctgaggcccaagaccaagatacaaggactgaggctgaatgcagagccgaggtacactgtgacatccaagactgctgccggttctagaaaagccgaatataaggaacaggagtccgttaggggcttcttttatagatgagtcatataaaaccatatggaaagacccgaggaagatttacccattgttaaatttaaattcctttgagttatgggaatttaattntag

SEQ ID NO: 22742 - DNA, 500 bp, Homo sapiens
  misc_feature (1)...(500): n = A,T,C or G
agcccnnnnncncaattgaattgcaccgcctgcangaattcggcacgagcacgtgtatgaaggtggtctacatagcctgctccttcaccacggtctggttgatttatagcaagttcaaagctacttacgatgggaaccatgacacgttcagagtggagttcctggtcgttcccacagccattctggcgttcctggtcaatcatgacttcacccctctggagatcctctggaccttctccatctacctggagtcagtggccatcttgccgcagctgttcatggtgagcaagaccggcgaggcggagaccatcaccagccactacttgtttgcgctaggcgtttaccgcacgctctatctcttcaactggatctggcgctaccatttcgagggcttcttcgacctcatcgccattgtggcaggcctggtccagacagtcctctactgcgatttcttctacctctatatcaccaaagtcctaaagggnggagaagtgagtttg

SEQ ID NO: 22743 - DNA, 470 bp, Homo sapiens
  misc_feature (1)...(470): n = A,T,C or G
ntttgactgcgctgcacgaattcggcacgaggtcctttgtagctcctcttgaacatgtttgccatacttttaaaagggtagttgaataaatagcatcaccattctttgctgtggcacaggttataaacttaagtggagtttaccggcagcatcaaatgtttcagctttaaaaaataaaagtagggtacaagtttaatgtttagttctagaaattttgtgcaatatgttcataacgatggctgtggttgccacaaagtgcctcgtttacctttaaatactgttaatgtgtcatgcatgcagatggaaggggtggaactgtgcactaaagtgggggctttaactgtagtatttggcagagttgccttctacctgccagttcaaaagttcaacctgttttcatatagaatatatatactaaaaaatttcagtctgttaaacagccttactctgattcagcctcttcagatact

SEQ ID NO: 22744 - DNA, 477 bp, Homo sapiens
  misc_feature (1)...(477): n = A,T,C or G
cttgcccgcctgatgctgagcnctagagatatgtgcctgagctccacagttcttcaaagggaaggtgaaggtggtgagcctgaagcctgaggtggcccaggtcgacctgtacatcctcggccaagccgaccactttattggcaactgtgtctcctccttcactgcctttgtgaagcgggagcgggacctccaggggaggccgtcttctttcttcggcatggacaggccccctaagctgcgggacgagttctgattctggccggagcaccagaccctctgatcctggagggaccagagtctgagctggtccttccagccaggcctggcagccagaggtgctccgggattgcaaactcctcttctcacctgccaaagatggagaagagtgccagggacccctcaaggagggagacgctccatatcccagggcataggacttgcaggttcctaggagcaggagcatctcccatcgcacgn

SEQ ID NO: 22745 - DNA, 470 bp, Homo sapiens
  misc_feature (1)...(470): n = A,T,C or G
nattgcactgcatgacgaattcggcacgagcttcatcctgggttgaggcggaggagaacttccagaattatggcgaagtccaggctgaggcaggacccgcatagcacagctgcagccactgtgctaaagcgggcagtacaactagattcggagtcgcggtatccgcaggctctggtgtgttaccaagaggggattgatctgctcctgcaggttctgaaaggtaccacagataatactaagagatgtaatctcagagaaaaaatttgctaatacatggacagagcggaaaacatatagaagtacttggaccaagacaaagaagatggaaaatatcacaagcaaattagaatagaagagaatgcaacaggcttcagttatgagtcactttttcgcgaataccttaatgagacagttacagaagtttggatagaagatccttatattagacatactcatcagctggataactt

SEQ ID NO: 22746 - DNA, 478 bp, Homo sapiens
agcggggctttgccttgactgcacgatttcggcacgagcgcacgcgtgagacttcgccgccgcctccgccgcagacgccgccgcgatgcgctacgtcgcctcctacctgctggctgccctagggggcaactcctcccccagcgccaaggacatcaagaagatcttggacagcgtgggtatcgaggcggacgacgaccggctcaacaaggttatcagtgagctgaatggaaaaaacattgaagacgtcattgcccagggtattggcaagcttgccagtgtacctgctggtggggctgtagccgtctctgctgccccaggctctgcagcccctgctgctggttctgcccctgctgcagcagaggagaagaaagatgagaagaaggaggagtctgaagagtcagatgatgacatgggatttggcctttttgattaaattcctgctcccctgcaaataaagcctttttacacatctcaaaaa

SEQ ID NO: 22747 - DNA, 486 bp, Homo sapiens
  misc_feature (1)...(486): n = A,T,C or G
aggagggcccnnnagnagnnnnnttctgacccgcgctgtctgaattcggcacgaggtctctgcctggaaaactggtcttcccaagctccactggcagccacttctccatgttgggcatcggagacatcgttatgcctggtctcctactatgctttgtccttcgctatgacaactacaaaaagcaagccagtggggactcctgtggggcccctggacctgccaacatctccgggcgcatgcagaaggtctcctactttcactgcaccctcatcggatactttgtaggcctgctcactgctactgtggcgtctcgcattcaccgggccgcccagcccgcccttctctatttggtgccatttactttattgccactcctcacgatggcctatttaaagggcgacctccggcggatgtggtctgagcctttccactccaagtccagcagctcccgattcctggaagtatgatggatcacgtggaaagtga

SEQ ID NO: 22748 - DNA, 479 bp, Homo sapiens
  misc_feature (1)...(479): n = A,T,C or G
agcggggttttgccttgantcgcgctgcaggaattcggcacgagccagaatgggaatttcttttatgtttttatttttttcctggctcccttttatttttgtgcgcgatatttaaggtcgtctggatggggaagcaacctgcagctgaggtcgccggcgcctttttctttttagatgggaaggaggccaggaaagggtcagcttaaccatttcctatgtgccaagctgtgccagcagtccagggtaccctgactgtccctctgtagactgttgagactgagttcctgttgggacagtcagttggtatgtatccaagtccctgctgaccactaatgttctagctgatggtgagcggcacagtcccacttccccatctccccaagtaggtggtgttagaaaaccttaattttttttcccttttgtatggactacaaataaaacttggggcaatttgcagtttggaaaaaaaaaaaaaaaaa

SEQ ID NO: 22749 - DNA, 468 bp, Homo sapiens
  misc_feature (1)...(468): n = A,T,C or G
nattgaccccntgcggaattccttggagcccagcttcgccgctcttccagcggctccgctgccagagctagcccgagcccggttctggggcgaaaatgcctgcccttcacatcgaagatttgccagagaaggaaaaactgaaaatggaagttgagcagcttcgcaaagaagtgaagttgcagagacaacaagtgtctaaatgttctgaagaaataaagaactatattgaagaacgttctggagaggatcctctagtaaagggaattccagaagacaagaacccctttaaagaaaaaggcagctgtgttatttcataaataacttgggagaaactgcatcctaagtggaagaactagtttgttttagttttcccagataaaaccaacatgctttttatggaaggaagaatgaaattaaaaggagactttcttaagcaccatatagatagggttatgtataaaagcatan

SEQ ID NO: 22750 - DNA, 454 bp, Homo sapiens
  misc_feature (1)...(454): n = A,T,C or G
atagaaccctcgcccccgcgctgcaggaattcggcacgagctccttttgccatctgctgaggtggcaaaactataatttattcctggttggctagaactgggtgaccgacagctatgaaacaaatttcagctgtttgaagttgaactttgaggtttttctttaagaatgagcttcgtccttgcctctactcggtcattctccccatttccatccattaccccttagccattgagactaaaggaaatagggaataaatcaaattacttcatctctaggtcacgggtcaggaaacatttgggcagctgctcccttggcagctgtggtctcctctgcaaagcattttaattaaaaacctcantnnngatgaanaaaaaaaaaaaaaaaaaaaaaaaaaaaaaaaaaaaaaaaaaaaaaaaaaaaaaaannnnnnttccgggggggggggccccgccc

SEQ ID NO: 22751 - DNA, 489 bp, Homo sapiens
  misc_feature (1)...(489): n = A,T,C or G
gggggtcnnnnnaattgacgctcgtagatctgcacgagcagcgacgagatcgcacagcacgcgctgcagctgatgcaggaagctttggagatgagccgtaaccgtattgccgaaaacctgggggatgtccagataagtgacaagttcaccatctcaaagaacttcaaggagaatgtgattcgccctatcctgaaagctcacttccggagggatgagtttctgggacggatcaatgagatcgtctacttcctccccttctgccactcggagctcatccaactcgtcaacaaggaactaaacttctgggccaagagagccaagcaaaggcacaacatcacgctgctctgggaccgcgaggtggcagatgtgctggtcgacggctacaatgtgcactatggcgcccgctccatcaaacatgaggtagaacgccgtgtggtgaaccagctggcagcagcctatgagcaggacctgctgccaggnggctgtacc

SEQ ID NO: 22752 - DNA, 451 bp, Homo sapiens
  misc_feature (1)...(451): n = A,T,C or G
ggtgggtcnnnnnnaataganngtatcgctcgagctgcangaattcggcacgaggccccagcgacacaggcctcgaggctgtctctgacaagtgttcacaggaggtggggacgcctctgcgcgaggaacgaggagctacgggcctgggcccggttattgccatgggcagcggctgccgcatcgaatgcatattcttcagcgagttccaccccacgctgggacccaagatcacctatcaggtccctgaagacttcatctcccgagagctgtttgacacagtccaagtgtacatcatcaccaagccagagctgcagaacaagcttatcactgtcacagctatggaaaagaagctgatcggctgtcctgtgtgcatcgaacacaagaagtacagccgcaatgctctcctcttcaacctgggcttcgtgtgtgatgcccaggccaagacctgcgc

SEQ ID NO: 22753 - DNA, 450 bp, Homo sapiens
  misc_feature (1)...(450): n = A,T,C or G
ntttgcccctggctgcacgaattcggcacgagcccactggcctttcccacctctgctcaccttactgttcacctcatcaaatcagttctgccctgtgaaaagatccagccttccctgccgtcaaggtggcgtcttactcgggattcctgctgttgttgtggccttgggtaaaggcctcccctgagaacacaggacaggcctgctgacaaggctgagtctaccttggcaaagaccaagatattttttcctgggccactggggaatctgaggggtgatgggagagaaggaacctggagtggaaggagcagagttgcgaattaacaacttgcaaatgaggtgcagataagatgcagatgattgcgcggctttgaaaaaaaaaaaaaaaaaattgaggggggggccggagacccaatgacccttatatggaggcggttacaacttattggccgg

SEQ ID NO: 22754 - DNA, 490 bp, Homo sapiens
  misc_feature (1)...(490): n = A,T,C or G
ggcggccnnccnnaatggacgcctgtggaatnattgcgagccntgcggaattccgcacgagaggagagggaccccttctccccaggagagagggtacctcctggtgcataggtagatgaggagggcagatggaagacttgaagggggctcttagaactggttcagggaagcagaaaatatgagataaagggaccagacttgggatttgaggcaagataagatgatttggcaggcactgggaagcatttcaggggattaccactagatgatgaaaaggtgctaagcaaggagggtagaggcagaggcagtctaggtgagtgtgtagcgggcttggtgttgataagagttaaaaagagcatggccaggcgcagtggctcatgcctgtaatcccaggactttgggaggccaaggcaggcagagcacttgaggtcaggagttcgagactagcctggcaacatggtgaaaccctgtctctactaaaaatacaaaa

SEQ ID NO: 22755 - DNA, 478 bp, Homo sapiens
  misc_feature (1)...(478): n = A,T,C or G
cgtggcnnaatganaatcgatggccatcggacgagccacagcagcctgttccatctgtgggtaaccatgttccgaggcagcaaagagaaaccgctattgctccgtggaaataaactatctgaataaaacttcttaacgggggttgaggctgaagctgaagcgggagtcggacacgatcttggctcctgaagtctttaaaggtcagtacgatgcacacttctataccaccacctgttaccagctgtagacagaagacctatctccatgcttgcccctaggcttctgtagaaatgccacacgtgaaagctgaagatgaagcggattttatagcacgttcaattactgaagaagcgtgctgaaggagcatagctgctacactgaagatgaagcaaggcccaatgacccacgcgataaaccgagaaaactggtgtacaatacagccatgccctgatgcagcatctcttctggcttccaagca

SEQ ID NO: 22756 - DNA, 476 bp, Homo sapiens
  misc_feature (1)...(476): n = A,T,C or G
tggggcccccnnccaattgacaactgcnccgcgctgcaggaattcggcacgagatccagccaccctcctgtgttttgcattattataatgttccattgtgtgtcacagaagagaccttcacaaagttgtgtaatgaccatgaagttcttacattcatcaaatataaagtgtttgatgcaaaaccttcagccaaaacactttctgggctattagaatgggagtgcaaaactgatgcagtagaagcccttacggcactgaatcactatcagataagagtgccgaatggttccaatccctatacattgaagctttgcttttctacatcatcccatttataagaagagaagagcatgttagaatttatgttcacctttattacaatttcaaagctacacttcattaaaaaaaaatctaaaatggttgatctcatgttgccttgcttactttaagagcctgttctgtaataaacatatttt

SEQ ID NO: 22757 - DNA, 487 bp, Homo sapiens
  misc_feature (1)...(487): n = A,T,C or G
gggcgggaannnnnnaattgcncgcctgcggaattcttcacgagacttcatgtaaaatctaagacaaaatacattaaatgcttattgacatatgtatttattcttcaccaggctgataatatctgcctaattttaaactttcttccattttgtaggtttcaacttattctattgtaagatactgttaaatctaatagaggcattgtcacttttacgtataattttattttatttcatatattgcctattggctttttacatttaaattatggagcacttcatcatataaaaaacttcgattatatttaaacagtaagtctttggatttttttgccttttaatttccatattacataataatgagataaacattaatgttttcagggtactttaaattttagataattactcattgtattcatgtgaaagttggttttactgcatgtgtgggttggaggacggntttcacttctgattcatctttact

SEQ ID NO: 22758 - DNA, 467 bp, Homo sapiens
atttcgcccgcctgcaggaattcggtcgagccgcctgaggaagtcagccgacatttactggtgacccctggagcctacgaaaacacccaagccctggagcctgagctgcctgcgggccgcgcctaccctacggccctcagctgctctctgctacaaggaggatcttagtaagagccctaagaccatgaaaaagctgctgcccaagcgcaaacctgaacggaagccttcagatgaggagttcgcgtcccggaaaagcacagctgctttggaagaagatgctcagattctgaaagtcattgaagcttactgcaccagcgccaaaacaaggcaaacactcaattcaagttcacgcaaagaatctgctccacaagttttgcttccagaagaagagaaaattatagtggaagaaactaaaagtaatggtcagacagtgatagaagaaaagagtcttgtggataccgtatatg

SEQ ID NO: 22759 - DNA, 449 bp, Homo sapiens
  misc_feature (1)...(449): n = A,T,C or G
aattgatttgcancngcgctgcaggaattcggcacgagccaagttcaagtttcctggccgccagaagatccacatctcaaagaagtggggcttcaccaagttcaatgctgatgaatttgaagacatggtggctgaaaagcggctcatcccagatggctgtggggtcaagtacatccccagtcgtggccctctggacaagtggcgggccctgcactcatgagggcttccaatgtgctgcccccctcttaatactcaccaataaattctacttcctgtccaaaaaaaaaaaaaaaaaaacctcggggggggcccgggacccaaattccccttatgggggggggtataacattcaacgggccgcggtttaacaacgtcgggacggggggacagngncnntgcccgggaatgaatagttggctgttaccacacatgccctatactacactaga

SEQ ID NO: 22760 - DNA, 498 bp, Homo sapiens
  misc_feature (1)...(498): n = A,T,C or G
aggcncnccnnnnnnnaatagatngccttgcagcgagcttcgcgaattacgcacgaggcacccaccgacacatgcgtgctgtattataccctgatagagatgggggagagaaaggaatgtttttgatggtggtttcaaagctcggacagtaactatcttgagcccattagagagtctgtgtccatatttgcatctggctggtcatagcctttgttactaatgatgacattcagctctcttttgtttttattttttaaaaactcaggtgtaattattatctgttcttaagataattgcaaatattaaatattatgatatatcaattcatgtgtttggcataccagtgaatgatgaagaacatgagattaatttaatttatcttcggtaacttgacattctggagagagactatcttctggagttgagtacaagcacagaaacatctttacggtggcatcatctcattttttatgaagacatgataatactgcccatcat

SEQ ID NO: 22761 - DNA, 478 bp, Homo sapiens
  misc_feature (1)...(478): n = A,T,C or G
natagatcggctgtangaattcggcacgagcggaccacaccgcccacaacggccacccccataaggcataggccaagaccatacccgccgaatgtaggacaagaagctctctctcagacaaccatctcatgggccccattccaggacacttctgagtacatcatttcatgtcatcctgttggcactgatgaagaacccttacagttcagggttcctggaacttctaccagtgccactctgacaggcctcaccagaggtgccacctacaacatcatagtggaggcactgaaagaccagcagaggcataaggttcgggaagaggttgttaccgtgggcaactctgtcaacgaaggcttgaaccaacctacggatgactcgtgctttgacccctacacagtttcccattatgccgttggagatgagtgggaacgaatgtctgaatcaggctttaaactgttgtgccagtgcttatgctttg

SEQ ID NO: 22762 - DNA, 478 bp, Homo sapiens
  misc_feature (1)...(478): n = A,T,C or G
cgcgcccattganatcgatcgcctgcgngaattcggcacgaggaactgccagcctcagaggaggcagcaccgagggtgcctgtttgaagcaagcagcatttgggatatgtgcccttcctcagggtctgcttggagcagctcctctgcaggcacagcctggactattcccaggcacagctgtgggcccaggagccagctcaggtgctcccctccaccatgggcaggctgtgcaaaaagccaccggcttttctcagcatttgctgctgggcctctcctgggactaccagtgtggctcttacgtgttttctttgctaaaataaaccctagttcttaaaanaaaaaaaaaaaaaaaaaaccctcaggggggggccgcggccccaattcgccttatagggagtcgaataacaattcattggccgcggttttacaagggggggatggaaaaaaacnnnnnnnnnnnntttttnggcttcccccc

SEQ ID NO: 22763 - DNA, 474 bp, Homo sapiens
  misc_feature (1)...(474): n = A,T,C or G
gggggccnnnnnnnaattgacctcgcctccggctgcaggaattcggcacgagaagaaggcggctctggtggcggcggtggaggctgaggcggcggccgaggcggcgacggaggaaacagaagatggcagattttttgaaaggactgcctgtctacaacaaaagcaattttagtcgatttcacgcggactccgtgtgcaaagcctcgaaccgacggccctcagtctacctgcctacccgcgagtacccgtctgaacagatcatcgtgacagaaaagacaaacatcctcctgcgctacctgcatcagcaatgggacaaaaagaacgctgccaagaagagagaccaggagcaagtggagctggaaggcgagagctccgcacctccccgcaaggtggcgcggaccgacagcccagacatgcacgaggacacttaagactctcaactccacaggcgcctcctgccaggtctgctcctcg

SEQ ID NO: 22764 - DNA, 480 bp, Homo sapiens
  misc_feature (1)...(480): n = A,T,C or G
cgcgcccattgacgtcctgangacttcggcacgagccaaccttgatctccactgtgtcccaggcaccctaagatgcacaagctatgtgggccctgccctcacagaacttgtagtcttctgccccaaacaagccagttcaccgtcttcatgatcaggccaaaggttgaggtacccagcaggcttcatatgcacatgcacactgtgccctataggaccatgccttgcccagctggctgcactctagagggtgctttgtatgaaggacagagtggagaggacagtggggaggtacttgggtgttcaacagccagaagggagggaaactgaaaaagaatcaggagtccagccatcccctccccacctcctgcccccacttccaccctggctgctggccctttgcccttgaatatgggtgatataggtgtggctattcagttccagtcacagtgctgcctctatgtcttttgcaagctggggtcn

SEQ ID NO: 22765 - DNA, 465 bp, Homo sapiens
atcgcccccccatcaatagtccccgcgctgcaggaattcggcacgagcatacttctaaggaattttcttgctataagctggagtttaggtgatgtataggttcagttgagacatttttggaacaggcaaatccttagttaacataagatatttaacagttgaagatagtgtcatggatttttatcttttttagcaagtaatgctaagaaccactggcctgagctactactcttcagtatacattattaggattgcatagacttactagaggaacagtttcaggttttgatgctaatcagtgttgtgtcctaaagttgtcctttgtgcctttaaaaagttttggatatatcttctagtttaaaattgcttattaaggaattcattttataattgcagtgggaaagtaatggtcaagtaacactaggtagactatcatgcctgtttagcccagagaatttgggggga

SEQ ID NO: 22766 - DNA, 473 bp, Homo sapiens
  misc_feature (1)...(473): n = A,T,C or G
gggatggcggngngnnngnaaactgatcggcttgatgaacctccacgagctgagncggagctcggcaggaagtgggaccggtgtctggcggatgcggtcgtgaagataggaagaatgtggccattagccttcggttctggcatgggattaggaatggcttattccaactgtcagcatgatttccaggctccatatcttctacatggaaaatatgtcaaagagcaggagcagtgacttcacctgagaacatcccagcgggaggacaagagaaatcatgtttattcctcaggaatactgaagtgccctggagtaagctgccattcttctgtaacaatgttatcagtaatgctttaaactccagcacctggttatgcatttgaaaccaagtctgtttcttgttttgtattttctctctggaagttgtaaggaggtggtcttaaataaattaaacaaaaataggaaaaaaaaaaaan

SEQ ID NO: 22767 - DNA, 481 bp, Homo sapiens
  misc_feature (1)...(481): n = A,T,C or G
gcgtgccnaattcgacgtctgtangcattcggcacgaggtgaggcaagacatggtaaccaaggcaggggaccccttcagccatgccatttctgcaaccttcattcagtatcacaactctgctgagagcactgcagcctgtggtgttgaggctcacagcgatgccatccagccctgccacatcagagaggccattcgacgctacagccacaggattggcccactttccccattcacaaatgcctaccgcaggaatgggatggcttttctagcctgctgatgtgacaactgtgatgtgcctgcaacaacaggaaaggcaatgttatattaaggagtaaaccaagccaattcagcacttcctgtttacttccttgtcatatgtaccatagatggtgacagacctgctctcaaaacaagcttccttcgtttaattctgcattttctgcttaggcaaccaccctatcaatatactttgacagtgaa

SEQ ID NO: 22768 - DNA, 281 bp, Homo sapiens
aactgactgaaagaacaatcagtaccagcatcaaggcagaaccaccccagtgcacctccctggcctggtctgctgatggccagactctgtttgctggctacacggacaacctggtgcgagtgtggcaggtgaccattggcacacgctataagtttatggcagagctttacaaataaaaaaaaaactggcttttctgattaataaactgagaggaccaaaacaaaagactaaaagttcttgggggggggccggggccccctttgcccttttagtggaggttg

SEQ ID NO: 22769 - DNA, 441 bp, Homo sapiens
  misc_feature (1)...(441): n = A,T,C or G
agccnnnnnnttttgacaatcgaccggctgtagattcggcacgagctgtcccaccccaccacgatggcctggtccctccaacatgcatggacaggggacagtgggactaacttcagtacccttggcctgcacagtagcaatgctgggagctagaggcaggcagggcagttgggtcccttgccagctgctatggggcttaagccatgctcagtgctggggacaggagttttgcccaacgcagtgtcataaactgggttcatgggcttacccattgggtgtgcgctcactgcttgggaagtgcagggggtcctgggcacattgccagctgggtgctgagcattgagtcactgatctcttgtgatggggccaatgagtcaattgaattcatgggccaaacaggtcccatcctcttcatgaaaaaaaaaaaaaaaaaaaaactgg

SEQ ID NO: 22770 - DNA, 508 bp, Homo sapiens
  misc_feature (1)...(508): n = A,T,C or G
atgcgggccncnaattgancaaatagacgcgccctgcaggaattcggcacgagatcctgcagggcttctcctcctctgtcttttggagaaccagggctcttctcaggggctctagggactgccaggctgtttcagccaggaaggccaaaatcaagagtgagatgtataaagttgtaaaatagaaaaagtggagttggtgaatcggttgttctttcctcacatttggatgattgtcataaggtttttagcatgttcctccttttcttcaccctccccttttttcttctattaatcaagagaaacttcaaagttaatgggatggtcggatctcacaggctgagaactcgttcacctccaagcatttcatgaaaaagctgcttcttattaatcatacaaactctcaccatgatgtgaagagtttcacaaatccttcaaaataaaaagtgatgacttagaataagnnntgaccaagacaaactgccctcgggggggggccggatcctaattt

SEQ ID NO: 22771 - DNA, 463 bp, Homo sapiens
  misc_feature (1)...(463): n = A,T,C or G
ctttgcnccgcgctgcagtaattcggcacgagtttactaaggcagaggcaggtgatagatttgagatttgcaaagtcagaacttggagcccagttgaggaatagcattacaatgttagcagcgttgttaggcgagcacaagacttcacaggtgatgctagttcaccaaaatgtgaacccacattaactggttttccttttgaatgtgatggttccaagaggtttgcagtcagtggagatgtgtgaaagggcttggaggtggaaatctgggtaagaatgccaagggcattcctggtagattaaaatggtaaagcaagcaacagatctggaaaagaactaggagaaactgttagtattttctgggtgtcaacgtagggaaaggcgttctaagcgttttccttataaataatgaaaaaatgttaaaaagccaaaaaaaaagtggggggagactgaaaattgagatt

SEQ ID NO: 22772 - DNA, 529 bp, Homo sapiens
  misc_feature (1)...(529): n = A,T,C or G
tgagtgcgcnggnnnttnngnnnnaaccttgatngccngtagnatttcgcacgcgctcgctgttcgttcgagctccttcatcagcccgaggacggtgccctcaacactaggccacgccttgtctccgcccctctcgtccgacccctggagagaggctggcgcctgcgcgatggggggttccagcgtcgactcacggagtccttcggatgagagcgtctgggtgccagacgaggccggggccttgccctcccaagacactgttcttcaagagaaagaccagaagagaaggcaaaaatgaatgttgaagtagtaaaagtcatgccccaggacttagtgacattcaaggatgtggcaatagatttttcccaggaagaatggcaatggatgaaccctgctcagaagcgtttatacaggagtatgatgttggagaactatcagagcctggtatcacttggtctttgcatttctaagccatatgtgatctccttattggagcaagggagagagcctttggagatgacnagtgaga

SEQ ID NO: 22773 - DNA, 515 bp, Homo sapiens
  misc_feature (1)...(515): n = A,T,C or G
tgcgaggagcnccaattgcccccctgngatagacccgcgctgcaggaattcggcacgagccgggcacggccagagggcaagtgagcatgcacggacctcttccccctgtcctgtttctcacccagcacctggggagatcggtgctaccaaggaagagagcacacagataagacagaggggaggaggtgggcatttcctacattcctccttgtttgccgctgctgagattgcagtatttattgcaatgtaaatgtatcctgaaggtggggaggaatgtttaatctaccatgtccgtgtgtcatcttggtttgtgtttttccctgtttgtagcaagactctgatgataattctgtttctcatctgcccattcagtattttggtttccttccgtcaagttggcttattttttcaatgactacctctccatcattgaggttctggtgaagctctctgcagctgtctcattccttcccaacgatagtaacaggaaatgactctntagcatcgatacctca

SEQ ID NO: 22774 - DNA, 468 bp, Homo sapiens
  misc_feature (1)...(468): n = A,T,C or G
catcgaccngctctgcaatagaccngcgctgcaggaattcagcacgagaacagccaaagaaggaactgatcattaacgagattctggtgatgaaagaattgaaaaatcccaacatcgttaactttttggacagttacctggtaggagatgaattgtttgtggtcatggaataccttgctggggggtcactcactgatgtggtaacagaaacgtgcatggatgaagcacagattgctgctgtatgcagagagtgtttacaggcattggagtttttacatgctaatcaagtgatccacagagacgtctacagtgacaatgtacttttgggaatggaaggatctgttaagctcactgactttggtttctgtgcccagatcacccctgagcagagcaaacgctgtactatggtcagaacgccataatggatggcaccagaggtggttacacggaaagcttatggccctaaan

SEQ ID NO: 22775 - DNA, 444 bp, Homo sapiens
actgacttcgctccgctgaggcacaaccggctccttggtccagttctgcaccggggtggggctgggacccggggaaggtttgagggcccttgcaaccccctcccagcagtggctgggcactctttgctgccccagaagctggtcccctatggattcatcttggcctgacgcagccaggtggccttatttcttccctgtcacctcccctccttgaaatctgggccctggtgcctgctgaagattccctctatccctgagtacttagtcttctcccccttccctggggcttctagagctctctctgcccctcaggtcctggcccttgggtccttgtcaaccagaggtctagggaaccacaacccttattgtcctgggtggaccaatccaaaggctaagtgatagtgactcatcaatgttgggtcctgtggggtaccagtttaggtt

SEQ ID NO: 22776 - DNA, 473 bp, Homo sapiens
  misc_feature (1)...(473): n = A,T,C or G
ggagcgggngagannaaaactgatcgccattgatgaactctgcacgagctgaggcggatggatcacctgaggtcaggagttagagaccaacctgaccaacatggagaaaccccgtttctactaaaaatgcaaaattagccgggcatggtggcaggcgcctgtaatcccaaatactcgggaggctgaggcaggagaatcacttaaacccgggaggcagaggttgcagtgagccaagatcgcgccattgcactccagcctgggcaagaagagcaaaactccatctcaaaaaaaaaaaaagagtcctatggttccaaaggggaccaaacggccctcattggaaaaaataggggactttattatgcaagggggttccagtcccttggtttggttttgggaaaagaaaaaaaggcctacaatccaaaaaaatagggcccatcacaggcttccccaagggacaaaattaatccattttt

SEQ ID NO: 22777 - DNA, 518 bp, Homo sapiens
  misc_feature (1)...(518): n = A,T,C or G
gagggtaggggnaatcgccggcngtngttctccaccggctgcaggaattcggcacgaggacgtagagctgagcgacccagcccgcgagcgaggtgagatgccggtggccgtgggtccctacggacagtcccagccaagctgcttcgaccgtgtcaaaatgggcttcgtgatgggttgcgccgtgggcatggcggccggggcgctcttcggcaccttttcctgtctcaagtgaggggcgcgggcggtgatctctgggcaggacaaccagaccttccggccctgccccattcggcctggagcctgaacacagcctccttctttcgacttccctctctgtcccctcgcgagccagactcattccaaaccaccttcaatctgtaaagtcaggttggaagcgtcagtgcttaagaatttgagctttagagtcnnnnnnnnnnnnnnnnnnnnnnnnaanaaaaaaaaaaaaatttggggggggggccgggcccccaattcccctttagggggggagaaaaaaa

SEQ ID NO: 22778 - DNA, 500 bp, Homo sapiens
  misc_feature (1)...(500): n = A,T,C or G
acgcgcccccattgatcgctagaggactntggcacgagggacttttctggtgggcgaacgagtgacattggctgacatcacagttgtctgcaccctgttgtggctctataagcaggttctagagccttctttccgccaggcctttcccaataccaaccgctggttcctcacctgcattaaccagccccagttccgggctgtcttgggggaagtgaaactgtgtgagaagatggcccagtttgatgctaaaaagtttgcagagacccaacctaaaaaggacacaccacggaaagagaagggttcacgggaagagaagcagaagccccaggctgagcggaaggaggagaaaaaggcggctgcccctgctcctgaggaggagatggatgaatgtgagcaggcgctggctgctgagcccaaggccaaggaccccttcgctcacctgcccaagagtacctttgtgttggatgaatttaagcgcaagtactccaaggggggcccng

SEQ ID NO: 22779 - DNA, 467 bp, Homo sapiens
agactcgcccgcctgcggaattcggtcgaggtgcgagccgagtgcttatgctcctgtactcttcatagaagaaaatcttcattggcctcatcccccatgaccagggcaactttgtcaacggcatccggcgtgtcattgccaaccagcagcaggtcctgcagcggaacctggagcaggagcaacagcaacgagggatgggggggtagtggttaccccgggctgggcccctccaggagtcacagatgaggcccccgcagagactgtgcttgggagcctgtggccagcagcccccactgcacccctgcccccaggtgacacgcttctgagcaggggcccctggggacttcaactgcccagcaacatggaggatggtgtcctgaggcctccaaggacggtccccacccctctacgtttccccaataaagccttttaaaaaccaaaaaaaaaataaagaatctcgggggggt

SEQ ID NO: 22780 - DNA, 495 bp, Homo sapiens
  misc_feature (1)...(495): n = A,T,C or G
cgcggcgccccattcgaacgccctgcngttagatccgccgtgcaggaattccgcacgagctagctgctcggggagccgggccagcaccggcttgggggccggaggcattcactccagactgggaaagccgagaagtttccactgggaccactatcatggccgtgcagtttgacgggggcgtggttctgggggcggactccagaacaaccactgggtcctacatcgccaatcgagtgactgacaagctgacacctattcacgaccgcattttctgctgtcgctcacgctcagctgctgatacccaggcagtagctgatgctgtcacctaccagctcggtttccacagcattgaactgaatgagcctccactggtccacacagcagccagcctctttaaggagatgtgttaccgataccgggaagacctgatggcgggaatcatcatcgcaggctgggaccctcaagaaagagggcaggtgtactcagtgcctatgg

SEQ ID NO: 22781 - DNA, 475 bp, Homo sapiens
cttagcttctgccccgcgctgcaggaattcggcacgagctaaaacgaagagaattttgactctccagaaagctaatagctggttcaactgcaggaaaaattgaacattactaatttgaatggaaaacacatggtgtgagtccaaagaaggtgttttcctgaagaactgtctattttctcagtcatttttaacctctagagtcactgatacacagaatataatcttatttatacctcagtttgcatatttttttactatttagaatgtagccctttttgtactgatataatttagttccacaaatggtgggtacaaaaagtcaagtttgtggcttatggattcatataggccagagttgcaaagatcttttccagagtatgcaactctgacgttgatcccagagagcagcttcagtgacaaacatatcctttcaagacagaaagagacaggagacatgagtctttgccggaggaaa

SEQ ID NO: 22782 - DNA, 521 bp, Homo sapiens
  misc_feature (1)...(521): n = A,T,C or G
agcggatcgcggctgagatagcggcaccagcacatcggcttcgactggcccggagtctgggtccacctggacattgctgcaccggtgcatgctggtgagcgagccacaggcttcggtgtggccctcctgctggcgctcttcggccgtgcctctgaggaccctctgctgaacctggtgtccccactgggctgtgaggtggatgtcgaggagggggacctggggagggactccaagagacgcaggcttgtgtgagcctcctgcctcggccctgacaaacggggatcttttacctcactttgcactgattaattttaagcaattgaaagattgcccttcncncnnncaaccctctcccaaaaaaaaanacataccncncctactcttgggggaccgggcccccccgggaaaaaggtggggtacttggaccttgggaccctgggcgactaaaaaaacaaactccccctctaatttggggggttaaaccttttttttttttgtggaaagggggttcccccgggtgg

SEQ ID NO: 22783 - DNA, 462 bp, Homo sapiens
atttgacccgcgctgcagtaattcggcacgagctgaccattgctgggacatttcccttctcctgctcctaactttgtcatagacgtctcctaaactgcagttactgtgtttggaggtaacatcatccccttctttggtttgtggatagggaataccagatacgagggagagcatccctaaggccttcacctgacaccagtcctgcctgtatgtcctgcagttctcatgctgcaagtgtccactgcttgggaaagtgtgggaagctgacttggaagcttgtcgattgcttatccagtgcctacagctccaggaagccaggggaagcctgtctgtagaagatgagaggcagatggatgacttagagggagctgctcctcctattccccccaggctccactccgaggataaaaggaagacccctttgaaggtattggaagaatggaagactcacctcatcccctc

SEQ ID NO: 22784 - DNA, 540 bp, Homo sapiens
  misc_feature (1)...(540): n = A,T,C or G
gagcgtcgcgccctnatccgacggctgcacgaattcggcacgagctaaaaatacgaaaaattagccgggcatggtggcacgcgcctgtaatcccagctactcaggaggctgaggcaggagaattatttgaacccaggaggcagaggttgcagtgagccgagatcgcgccactgcactctagcctgggcaacagagcgagactccatctcaaaagaaaaataaataaataaaaatttaaaaagagtagaacatttttgctgaagtgttcattgtttaagcagcttattactggagtttactcatagtaatacagagtataagcatggtttttctcatgcaaacacattaatctgtttgccgaaacaggaggactgactgcttttgttttattttaagttgattcangaagaaaaagaaatacagagcagcgggcagaggagattganagtcgagttggcagtgaagtctagacaatcttggtcgtttagatcaatgagctnctttcccccctaccctgcttctcgcttctaggctctcccn

SEQ ID NO: 22785 - DNA, 521 bp, Homo sapiens
  misc_feature (1)...(521): n = A,T,C or G
nggggggnnccttgaancggcctgtanttctgcaccgncctgcaggcacctacaaatccatctaattacctacatgaccatcatcatctggtcatgtttctccattttatcattatgtataccttaaagacttgctcacattacttaaaattgagataggttaggcatctatccaatctcccatgccagtaattctacagaaacagattaggttagctagataagcatgtttacaattaaatttatgctgtatccttctaatcaccactttctcatcaaaatgctcacaaatcatctgcatcattgtccattctttaaaaatgtataaacccatctctactaaaaatacaaaattagctgggcatgatggcgcacgcctgtaatcccagctgttcaggaggctgaagcagaagaattgcttgaaccccggagacggaggttgcagtcagccgagattgcaccattgctctctagcctgggcaacaagagcaaaactccatctcanaaaaaaaaaaaaaaaa

SEQ ID NO: 22786 - DNA, 484 bp, Homo sapiens
  misc_feature (1)...(484): n = A,T,C or G
attgcccgcctgcangaattcgtcacgagacaaaaaaaatgcatttatattacagttttcctctatgaaagtccttacttatatgatacaagcactgtgttttgtgcttaaactcttcagcggggtagcatcaaagttcttggggaaggatcgtatatgtgggtcccttccctaaaaaaatggttgctgatatggctactgcttctacatcttgagttttttaatttactttttttacactgtagcattgagactgcttgattcaagtctggtgctttgccagatgtattaatttccataaatgctttgtgagtttggttaaaatgaagattcacttgggaaaannnngagcgttagtctgtgttactatcttgttatgagtatgtaaaagtaaaatgcatgtgaatttatcatatttgcactatgaaggtatttggttaaaatacaaagacttttaagattntaaggccctttcttccaacag

SEQ ID NO: 22787 - DNA, 541 bp, Homo sapiens
agaggtttcgcggctgcagattcgcacgagggcctttcctctgaccatccgctgcttcctgggctgtgagctgcctcccgagggctctagagcccatgtcttcttcgaagtggctgtgaatgggagctcctttgtgagtttccggccggagagagccttgtggcaggcagacacccaggtcacctccggagtggtcaccttcaccctgcagcagctcaatgcctacaaccgcactcggtatgaactgcgggaattcctggaggacacctgtgtgcagtatgtgcagaaacatatttccgcggaaaacacgaaagatctctactaagaatgtcactctggccgggcgcagtggctcactcctgtaatcccagcactttgggaggccgaggcaggaggatcacttgaggttgggagttcgagaccagcatgaccaacatggaaaaaccccgtctctactaaaaatacaaaattagccaggcgtggtggtgcatggtctgtatcccagctacttcggaggctgaggaggagaatcatttgaccc

SEQ ID NO: 22788 - DNA, 465 bp, Homo sapiens
  misc_feature (1)...(465): n = A,T,C or G
atcgaccgcctgcttagaccngcgctgcaggaattcggcacgagggataatagtcaaattcttacctcgctctttcactgctagtaagatcagattgcgtttctttcagttactcttcaatcgccagtttcttgatctgcttctaaaagaagaagtagagaagataaatcctgtcttcaatacctggaaggaaaaacaaaataacctcaactccgttttgaaaaaaacattccaagaactttcatcagagattttacttgacaggaaaggccatgtgaggacatagggagaaagcagccaccattggcaagccaagagagagccctcaccaggaacgattggaccagcaccttgatcttggattttctagcctccagaactagatgatttacacaatgaagaaagtacatgcactttgggcttctggatgcctgctgattaatcttgcccctgcccctcttagtg

SEQ ID NO: 22789 - DNA, 503 bp, Homo sapiens
  misc_feature (1)...(503): n = A,T,C or G
ggaggggcnggnnnaattgannaatcgagcgccttcggaattcgcacgagggaactgactataaaccatgcctgtttgctgcccctgccttctggtgcctccatttgtctaggtgtagtgcgaacccctgaggaagagcaactcatccaccaggctctgggacccacagttggggctgtcctcgtgcctctcccagggagtatacttgcctcaggggtactgcagggccagagaggctcccgaggcacaccaaacccagcagtaggcactgtgctacaggcaggaccagcatcagctcactccatcaccacggtgaccccttggcataagcactgtgagctccccattttacacatgaggaaactgaggctcacaaacacagaggagatttcccaaggccacacagctggaagtcagcagagcagggatttaagcctaggcctgtacttcagagtcagcattcttaacctttatactccactacgttcattcattccccaaaa

SEQ ID NO: 22790 - DNA, 545 bp, Homo sapiens
  misc_feature (1)...(545): n = A,T,C or G
aaagagtcgangccttcgncggctgcaggaattcggcacgagatgaaattgccttcccgggaagcatttccaggagatctcatggttcttgtgccctttccacctctcagtggcccgtcatgctaccaaaaatagagtgggcttcctcaaggagatgggcacacctggctatcggggtgaacgcatcaatcagctcatccgtcagctgaactagacccaggtgaggcagggctgaaaactgcccttgggctgacttttgataggccatgccttgccactttacaagttctttttgcatttactagtatttaagagtaaccttgagattgggaggaatagaggaggctggtacaaatagatggagacctgctgggatcagtgaatgcctgattaggacatggggctatgcatagcctaagagttataggcttaaagatgtcgagtaactaaaaactgtattgctggccgggcgcggtggctcacgcctgtaatcccagcactttgggaggccaaggcgggcagaccatgaggtcangagattgaan

SEQ ID NO: 22791 - DNA, 544 bp, Homo sapiens
  misc_feature (1)...(544): n = A,T,C or G
agagagttcgcggctgcagattcggcacgagcatgtttctaccaaagctattagaaccaacacgtacctctgaatgcccgattataagaagacatgagaagactttaaaagttctggaaatttacagagccatgatttttgaacctaattgaaagaaaaccatctgaattgttgcaggtccacatttttgccaaagatacactctatagatgcttagtagtggcctgatttttttccatgtattgccacgacaaactaaaaatgaactgtgtttaagaatgtagtatttctgtttttcatccaagttgattgggggaagaatatggcaggatccatcttttacagtattttgtattcagtaaagtggacattcctgctcctcccttcccccattgcatgccctcttcctcccttgatttcactttctctcatgcccggatccttttattctccccagttataacccagttataaaagaaagatctgagcataaagatacgtgtttaanaataactaaaagtaaaggaaagtgccttaatttttt

SEQ ID NO: 22792 - DNA, 497 bp, Homo sapiens
  misc_feature (1)...(497): n = A,T,C or G
attcgacccgccctgagngaannnattgacccngcgctgcaggaattcggcacgaggaggaaccccggttccacttaacaactaaatacaacatcttttgcacccctagaatgtcattttgccctcaaccttggtatttctcctggggcccttttagtcttgtgctgactttctcctgtcctcttccagtttagaataagacaggggagaaaaaggcttttcgagtgtgggacaaggtctgatgtcagtgaacggaactgaagagcaagacatggagcctggctggggctaagcagccccctcctccggatggcacaggctctgctaggttccggacacaggcttctgggggaagggnnnnccttggccatcacgggaatggagtccatgctagaaagagctcagtgttgggctgggtttgccagtagaacactgcgttccagtcaccccagtcttgccagaagaaaccagcacctcttccccgtggctcctgtgtc

SEQ ID NO: 22793 - DNA, 503 bp, Homo sapiens
  misc_feature (1)...(503): n = A,T,C or G
agagtctgcgggtgcctnncaaatgaatagcccatgatagcnctccgcgagagcanngcttgaacctgcgaggtggaagttgtggtgagccgagattgagccactgcactccagcctgagcgacagagtaagactccgtctcaaaaaaaaaaaggtattttacccatccacaggcagcaaacaaggaagtaccttttgtgactgtttgccaaggtcaaaggcatcagggaaggtaaaatactgaaactatatttttaaaaataaaagtattcccttttgagtgtgaattaggaatcaatgccccttctcactacttttgtgaaaaaaatcacagctcctgcagcaagtctatgcctgggtaacacccaacccacaaaatccaagaggaggtccccctctcccgcctctgtgaggcttgaggagcagtatgtatctgggccagcctggtcctcaaagtgtggaattaacacctttcctctagcaactgtttgtgctgctgagaa

SEQ ID NO: 22794 - DNA, 541 bp, Homo sapiens
  misc_feature (1)...(541): n = A,T,C or G
aggagttgcgcctcccggctgcagaattcgcacgagctgttttccagcgggtggccatcagcactttccagaaagcaattcaggaaacagtggagaaattccaggaagaaatgaactcctacatgctcatctcggctccagccatcctgggcaccagtaacatgcctgctgctgtgccagccacccagccggggacgctgcagccacccatggtgctcctagatttcccacccctcgcctgctttctcaacaatattctggttgccttcaatgatctgcgcctctgctgccctgtggccctggcgcaggatgtgactggggccttggaagatgcccttgccaaggtaactaaaataatcctggccttccatcgcgctgaagaggctgccttcagcagcggggagcaagagctctttgtccagttctgcactgtcttcctggaagaccttgttccgtatttaaatcgctgtctccaagtcctttttccaccagctcagatagcacagactntaggtaagagaatgannattctgtanactgg

SEQ ID NO: 22795 - DNA, 501 bp, Homo sapiens
  misc_feature (1)...(501): n = A,T,C or G
aggcnnnnncncaattgtttcgctcggctgcaggaattcggcacgagaaaaaggacacaccacggaaagagaagggttcacgggaagagaagcagaagccccaggctgagcggaaggaggagaaaaaggcggctgcccctgctcctgaggaggagatggatgaatgtgagcaggcgctggctgctgagcccaaggccaaggaccccttcgctcacctgcccaagagtacctttgtgttggatgaatttaagcgcaagtactccaatgaggacacactctctgtggcactgccatatttctgggagcactttgataaggacggctggtccctgtggtactcagagtatcgcttccctgaagaactcactcagaccttcatgagctgcaatctcatcactggaatgttccagcgactggacaagctgaggaagaatgccttcgccagtgtcatcctttttggaaccaacaatagcagctccatttctggagtctgggtcttcc

SEQ ID NO: 22796 - DNA, 500 bp, Homo sapiens
  misc_feature (1)...(500): n = A,T,C or G
agggggnnnncctttccctcggctgcaggaattcggcacgagagctactgctaggcaaaagccggagtggacgtgtcttttgaaactgctgctctttcacttctcaggcgtcaccgagagctcaacacccacgctgaactctgtaccatttggaagaatggaagctgatgcatctgttgacatgttttccaaagtgctggagcatcagctgcttcagactaccacactggtggaagaacatttggattctgaaattcaaaaactggatcagatggatgaggatgaattggaacgccttagagaaaagagactccgggcactaacgaaagctcatcagcataaacaagaatggctttctaaaggacatggggaatacagagaaatccctagcgaaagagacttttttcaagaagtcaaggagagcgaaaatgtggtttgccatttctacagagactccacattcaggtgtgaaatactagacagacatctggcgatattgc

SEQ ID NO: 22797 - DNA, 468 bp, Homo sapiens
cggccggaccattgcccgcctgattgttcgcacgagggataatagtcaaaatcttacctcgctctttcactgctagtaagatcagattgcggttctttcagttactcttcaatcgccagtttcttgatctgcttctacaagaagaagtagagaagataaatcctgtcttcaatacctggaaggaaaaacaaaataacctcaactccgttttgaaaaaaacattccaagaactttcatcagagattttacttgacaggaaaggccatgtgaggacatatggagaaagcagccaccattggcaagccaagagagagccctcaccaggaacgattggaccagcaccttgatcttggattttctagcctccagaactagatgatttacacaatgacgaaagtacatgcactttgggcttctgtatgcctgctgcttaatcttgcccctgcccctcttagtgctgattctgag

SEQ ID NO: 22798 - DNA, 494 bp, Homo sapiens
  misc_feature (1)...(494): n = A,T,C or G
cgagttccggttgctgnccccaggttacagcggcttctgcgccgacgaaagnncagcccagatggaaggtgttcagggaaaggtgggctgccttttccccttgtccttatttagcgatgccgccgggcatttaacacccacctggacttcagcagagtggtccggggcgaaccagccatgggacggtcacccagcagtgccgggctgggctctgcggtgcggtccacgggagagcaggcctccagctggaaaggccaggcctggagcttgcctcttcagtatttgtggcagttttagttttttgtttttttttttttaatcaaaaaacaatttttttaaaaaaaaagctttgaaaatggatggttggggtattaaaaaaaaaaaaaaaaaaaaaaaaaaaaattttctggggggggggccgggcccccattcccccttatgggggggggtttaaaaattctgggccggcgttttaaaaacggggggggggagga

SEQ ID NO: 22799 - DNA, 503 bp, Homo sapiens
  misc_feature (1)...(503): n = A,T,C or G
atgggncnnaattgacaatagtaccgcctgcaggaattcggcacgagtgcccgccggaccgtctgtctacccccagcaagagcggcctgcgcgtatacagcacgtcggtcaccggctcccgcgaaatcaagtcccagcagagcgaggtgacccgaatcctggatgggaagcgcatccaataccagctagtggacatctcccaggacaacgccctgagggatgagatgcgagccttggcaggcaaccccaaggccaccccaccccagattgtcaacggggaccagtactgtggggactatgagctcttcgtggaggctgtggaacaaaacacagctgcaggagttcctgaagctggcttgagtcaagcctgtccagagttcccctgctggactgcatcaccacactccccccagccttaacctggccatgaaggaccttttgaccaactccctgtcattcctaacctaaccttagagtcccttctgcatctacaggcacattcn

SEQ ID NO: 22800 - DNA, 300 bp, Homo sapiens
  misc_feature (1)...(300): n = A,T,C or G
aggcnngnnccaattgtttcgctcgcctgcaggaattcggcacgagaggacttggtcttcccaagcgaaattgtgggcaagagaatccgcgtcaaactatatggcagccggctcataaaggttcatttggacaaagcacagcagaacaatgtggaacacaaggttgaaactttttctggtgtctataagaagctcacgggcaaggatgttaattttgaattcccagagtttcaattgtaaacaaaaatgactaaataaaaagtatatattcacagtaaaaaaaaaaaaaaaaaactttgg

SEQ ID NO: 22801 - DNA, 450 bp, Homo sapiens
  misc_feature (1)...(450): n = A,T,C or G
nttgtacccctggctgcacgaattcggcacgaggcagagtgtcgtgtgaggcctcacagctggccttgagtttttactgacacgtccctgtgtgcgggggtgtccatgtggcgtgtgtgtgagtgagacttttttactgcgtcccgtcccgccagccctatcggcctcgtcactggccttggtcactttgtatttctgtcttggttggaaataccatcagccttccttgctcggcccaggtctgtttcaggcatctgagtcggcgtttacccaggggccgggccagagacgggggtcggccgctcgctcccacgctcctcctgccccagccctctggtgtccacacctgcccacagagaatgtaaacccagtgggctctgcccacgccgggccccaaagtgaccagactccagcacacctgtctcctcctgcctggggtggccatgggga

SEQ ID NO: 22802 - DNA, 480 bp, Homo sapiens
gagagttcgcgccttcgccggctgcaggaattcggcacgagagagcaccccctgccatcaggggggttgaaatccctctcccccaggagccctgctgctttgcttggtggtagggcaggagagcaaacaaacagtcatggtctaaaacccacatagcactttgctcttagttacatgtaaaattttagatttctaaaacaggtgggcaatcattttgaatactgttctgtgaccctgactgctagttctgaagacactggtggctgtgctatgtgtggccatcctccatgtcccgtccctgtagctgctctgtttagacagcggacagacgctcacgcccaggggatgtcctcacgctgtcgccgcgcggtttcccttcgcagatgtgtatactcatgataagtcagaaagtgtatccgctacaataaagttctggttctaactaactccaaaaaaaaaaaaaaaaaaaaaaaaaactgg

SEQ ID NO: 22803 - DNA, 530 bp, Homo sapiens
  misc_feature (1)...(530): n = A,T,C or G
ggactccgctgcgatcgccgagattggtataattttcttcatccagcctcacaaagaggagagatttcttttccctgtgtatccacttatatgtctctgtggcgctgtggctctctctgcacttcagcacagttttctgtacttccagaaatgttaccactttgtgtttcaacgatatcgcctggagcactatactgtgacatcgaattggctggcattaggaactgtcttcctgtttgggctcttgtcattttctcgctctgtggcactgttcagaggatatcacgggccccttgatttgtatccagaattttaccgaattgctacagacccaaccatccacactgtcccagaaggcagacctgtgaatgtctgtgtgggaaaagagtggtatcgatttcccagcagcttccttcttcctgacaattggcagcttcagttcattccatcagagttcagaggtcagttaccanaaccttttgcagaaggacctctggccacccgggaggttcctactgacatgaatgacn

SEQ ID NO: 22804 - DNA, 483 bp, Homo sapiens
  misc_feature (1)...(483): n = A,T,C or G
attgcccgcctgcaagaattcgtcgcgagacaaattgttggcaaattgtgaaatttattgttgtataatgctaatagatcagttgtcctgatgtctttgctgtaatgatttctttataaaaatgatcttaaatctgagctccctaactttagtttttgcctggaattacccattacatttgatgatatctctaaatgtcagttgtagctgttactctgatgatataagtggaatatacagaagcgtacttagacaaaagttaggttaatatctgaactacttcctccttgtgtatttaagagaatattgacttaagtttctagaatcctcaactaatcctaagnnnnnttctttgtctagaatactatgctgtttttggttttggaaggaagagatataggcatagttttctgctctcaaggagcttcaaaggctggaccagtggggatgccattggtatttttagctggatagctggtattc

SEQ ID NO: 22805 - DNA, 485 bp, Homo sapiens
  misc_feature (1)...(485): n = A,T,C or G
tggagtccccnnnaggaggnnnnccttgacccgcctgtggatgccgtctgcccgccacatacccagctgacatgggcaccgcaagagccatgcagctgtgctgggtgatcctgggcttcctcctgttccgaggccacaactcccagcccacaatgacccagacctctagctctcagggaggccttggcggtctaagtctgaccacagagccagtttcttccaacccaggatacatcccttcctcagaggctaacaggccaagccatctgtccagcactggtaccccaggcgcaggtgtccccagcagtggaagagacggaggcacaagcagagacacatttcaaactgttccccccaattcaaccaccatgagcctgagcatgagggaagatgcgaccatcctgcccagccccacgtcagagactgtgctcactgtggctgcatttggtgttatcagcttcattgtcatcctggtggttgtggtg

SEQ ID NO: 22806 - DNA, 501 bp, Homo sapiens
  misc_feature (1)...(501): n = A,T,C or G
ggggnngnnncccaattgccttccctgcacgaattcggcacgagctgtctcctcacatctgttagtattgacacagcacagacaccacaagccatcaggttcttcatggggcaggtgaaatacttctaccccatgggtaaatgtatttacatattaccaagagaagaagcacattatctatgatcttttggcccagttcttatttagcatttttattccagcctacttggaaacatgtttttatttgcaatatatgcctgactgaattaagcttgcttgttttaaacaaccaaatcattggaacagaaaaggatttaaaaaacaagaatgcatgatctcagcgtgattaaaaaaaaaatcagtggaaataaatgatcatagaaggtgcttttcaaaacaactgctattataattctcaaagtcctactctgccaaaagaagattaaaagtcatacattacattacaagggaatgttatgtgggaagagggttgctgaaaat

SEQ ID NO: 22807 - DNA, 452 bp, Homo sapiens
atagaacttctcccccgcgctgcaggattcggcacgaggaggctctccgcccagacacagtgctccatgtcagcccctgcacctggggtgtgtgattcacgtgcacagatgccacaatcctgcaccaatatcccacagatgggggaaggtgagaggaaggggcaagtgatgtgtaactgctcaagagatgcttaaacctccatagagaggagccgggcgcaggggcatctgtgtgtcccgtcacacactgcagcagggaagggtggctggctggctccctggcatcagtggtttggtttaagctccagagggtcttattgccattgtcttttcctctgccccttgagccagcctaaggccctggagtctgtttctttaggcggatgaactgacatgctcctaccatgaccaggctctgggcaaggctcctcacagtatccttgagaggtggg

SEQ ID NO: 22808 - DNA, 482 bp, Homo sapiens
  misc_feature (1)...(482): n = A,T,C or G
agcgggngnnttnnnaattcgctggctgcangaattcggcacgagataccacctatgacctcattgccaacatcgtgcatgacggcaagccctccgagggctcctaccggatccacgtgcttcatcatgggacaggcaaatggtatgaattacaagacctccaggtgactgacatccttccccagatgatcacactgtcagaggcttacattcagatttggaagaggcgagataatgatgaaaccaaccagcagggggcttgaaggaggcgtctagggctttgctcccaagggctgtggctgatgatgattgatgctcctttctcccatgcattgagctcccatctagcttcagcagggcagaacccttctccagatgtgtgtaacttatgtcttgagtatctgggagtagttgaagaacagataattccttccaaacatcaagccttaggattcttggagcangcagaaagccagtaactt

SEQ ID NO: 22809 - DNA, 501 bp, Homo sapiens
  misc_feature (1)...(501): n = A,T,C or G
agcggggnnnnncnaatcgcctcgcctgcacgaattcggcacgaggatcttagttcaagagaagaattcataccaagagctgaccaagaaggcagtaaattctgtgtacttgtagcagaagaaattggactaggaacttgcccaaagctttatcaaagaaaagcattgtgttcaatcttggtagaaacatgccagcaataagtgcttatgttccatagccatatcatgggcttctcacttttaaacctcctccaggggatgttctcagacatttcacaatccctctggggacattacagtagaagagaaacacatggaactgtaccagtgctttttgcccgtgttcatcctaagctccggctttaggcagtgctttctgacctgggcggagtgaagacgctgctggtggctgaggccagtaacatggggcccctgcccagccaccctgaaggctgggaggtccctcttttcaccaccagttttccacatctgtgtactctt

SEQ ID NO: 22810 - DNA, 505 bp, Homo sapiens
  misc_feature (1)...(505): n = A,T,C or G
agcatgtgcccgggntttnnnnnttaccgtaatctcaactgannnctctncgagaanccgcacgagggaagacggccgcttatgctattccgatgctgcagctgttgctccataggaaggcgacaggtccggtggtagaacaggcagtgagaggccttgttcttgttcctaccaaggagctggcacggcaagcacagtccatgattcagcagctggctacctactgtgctcgggatgtccgagtggccaatgtctcagctgctgaagactcagtctctcagagagctgtgctgatggagaagccagatgtggtagtagggaccccatctcgcatattaagccacttgcagcaagacagcctgaaacttcgtgactccctggagcttttggtggtggacgaagctgaccttcttttttcctttggctttgaagaagagctcaagagtctcctctgtcacttgccccggatttaccaggcttttctcatgtcagctacttttaacga

SEQ ID NO: 22811 - DNA, 492 bp, Homo sapiens
  misc_feature (1)...(492): n = A,T,C or G
aggagggtccnnnaggaaggggnnccttganngcgtnattgactcgcgctgcaggaattcggcacgagctatctgacaagagcatcaaccctctgggtggctttgtccactatggtgaagtgaccaatgactttgtcatgctgaaaggctgtgtggtgggaaccaagaagcgggtgctcaccctccgcaagtccttgctggtgcagacgaagcggcgggctctggagaagattgaccttaagttcattgacaccacctccaagtttggccatggccgcttccagaccatggaggagaagaaagcattcatgggaccactgaagaaagaccgaattgcaaaggaagaaggagcttaatgccaggaacagattttgcagttggtggggtctcaataaaagttattttccactgacaaactnnaaaaaaaaataaagataactctgggggggggggccgggccccaattcccccttatagggggcgttttaaaat

SEQ ID NO: 22812 - DNA, 489 bp, Homo sapiens
  misc_feature (1)...(489): n = A,T,C or G
natttgacccgcgctgcaggaatncggttttgaccccgcgctgcaggaattcggcacgaggtgctttacatgactgagcctccgcgcccagccagacttgtttctcaagtgacttcttctggccattttcacaactcattccaaagatgtgcagcatattctcaaagcatttccaaataagctccaagaaatgtttttggtaatggaagcagaaaacaagcctgtagctcatgactactttggaggaagaacatttggatttgtaaatttagtgtgttaaaaaaatcacttatcacagatgtttggaatcttcccactgatttctgcatggctgcttatttttcttcccttaagtctcagttcatgtcacagagggcttccctgacctctcacacctcaccaccatcaacctgttttctccatagcacctatcacagtctgaattgtcttattatggccttacctatccctaacacccatttaaaaatg

SEQ ID NO: 22813 - DNA, 541 bp, Homo sapiens
  misc_feature (1)...(541): n = A,T,C or G
aggatgtttcgacggctgcggaattcggcacgagcggaggtgcaccgcgtgctgtgcctcgagcggngccacatgtttgtctgcggcgatgttaccatggcaaccaacgtcctgcagaccgtgcagcgcatcctggcgacggagggcgacatggagctggacgaggccggcgacgtcatcggcgtgctgcgggatcagcaacgctaccacgaagacattttcgggctcacgctgcgcacccaggaggtgacaagccgcatacgcacccagagcttttccttgcaggagcgtcagttgcggggcgcagtgccctgggcgttcgaccctcccggctcagacaccaacagcccctgagagccgcctggctttcccttccagttccgggagagcggctgcccgactcaggtccgcccgaccaggatcagccccgctcctcccctcttgaggtggtgccttctcacatctgtccagaggctgcaaggattcagcattattcctccaggaaggagcaaaacgcctcttttccctctctaggcctggn

SEQ ID NO: 22814 - DNA, 340 bp, Homo sapiens
  misc_feature (1)...(340): n = A,T,C or G
aggagacttgacgncttcgccggctgcangaattcggcacgagctgacccggtgggggcagctggaaagcaacactggcccccagctgaagggcccagctgcagccagacagatggtgcttgagaaccgaggcccggtgatcctccagccacagtccagcccaaccactgccactttccatgggacttagaacttcggagttgctgccttgcaattggaggaaggacctggggcccctataggcagcagccaattacagccccttttgtagccaggcgttcctatggtcaaagagtggaaatgcaggaaccaacctccctttaaaaaaaaaaaaaaaaaa

SEQ ID NO: 22815 - DNA, 536 bp, Homo sapiens
aggagatttcccggctgggtgcgagtgggtccttgttgctcctgctggaaggcttgtcaccatcaacttctacttcatcagcattgacgatccaggagactgtgtccagaactatctcacactctatgatgggcccaacgccagctctccatcctctggaccatactgcggaggcgacaccagcatagctcccttcgtggcttcctcaaatcagcacgctggacagcactctgccatcctgatacatgacccctgctgatgccacagagaataagctgaacttgtatggtttttcaccaaaccatggatagaatcaatatttgtaggccaggcgtggtggctcacccccctgtattctcagcactttgggaggccgaggcaggttgatcacctgaggtcaggagtttgagactagcctggccagcatggtgaaacctcatctctctaacaatataataattagccaggcgtggtgggggtgcctgaattccagccactcgagaggctgaggcaggagaattgcttgaacccaggag

SEQ ID NO: 22816 - DNA, 400 bp, Homo sapiens
  misc_feature (1)...(400): n = A,T,C or G
aaagtccggattccnatatgatgccctcgacgctctgcgaaagccgccgaggggagacagccgcgagcgtgggggcatccgcgtcggccaccgcattattgagatcaatgggcagagtgtggtggccacgccacacgcccgcatcatcgagctgctcaccgaggcctatggcgaggtgcatatcaagacgatgccagctgccacatatcgcctccttacaggccaggagcagcccgtgtacctgtgaccacctcatcccttgcctgccactgtgccttcgcctccatggccccggagccccatcctgggcctgccctggctggccaggaccccagcggntcttggtcctgtatgatttcctaatataaaaacagtaaaagcttaaaaaaaaaaaaaaaaa

SEQ ID NO: 22817 - DNA, 503 bp, Homo sapiens
  misc_feature (1)...(503): n = A,T,C or G
aggcgcggnncccaattgcaatcgcatcgccgtgtcagcgaattcggcacgagaatttgttttagtgttgatttgtggttatagtattttgtttataatggtaagtttgcatattcagttgagttttttttacttgaatttttatcagtgccattaaatgtctgtgtttagtatcaatgaaaatgaacctaaatataacaaagaaagcatatgtggctaggatgtccccctaacatgtcttcctttgttaatgcaggaattccttagtttccttgtaacgctgtcctctgagtttgtgtgtgcatgtgcgtgtttgaagtaccaccttgggttttcacctgaaattagaaaaatcgtagttaatttgagaaaatgttacaaattcatcatggctgtaggcacttatttctgttattgagtagtggtgagaattcctattggtacagctgtanggccagaagaaggagtattgatgctttttaacttaaccagatgcagctatt

SEQ ID NO: 22818 - DNA, 460 bp, Homo sapiens
  misc_feature (1)...(460): n = A,T,C or G
nacttgatccgctctgcaggacttccgcacgagctggcgctgcagcgccgctactactccccgtcctgccgggaattctgcctcagctgccctcggctctcgctgcgttcgctcaccgctgtcacctgcacggtgtggctggcggcctacggactcttcaccctctgcgagaacagcatgatcctctctgctgccatcttcatcaccctcttaagtctgcttggttatctccattttgtgaagattgatcaggagactctgttaatcattgattcccttggcattcagatgacttcatcttatgcttcaggcaaagaaagcactaccttcatagaaatgggcaaggtcaaggatattgtcatcaatgaggccatttacatgcagaaggtgatttactacctctgcatcttattgaaagatccagtggaaccacatgggatatcccaagtagtacccgtct

SEQ ID NO: 22819 - DNA, 409 bp, Homo sapiens
  misc_feature (1)...(409): n = A,T,C or G
gaattccgcacgaggaaataaatttgcaacatttttacgaaggaaaaatgaagaaagtggtgcagctgtggttccagggaccagaagcaggtttttttgcagttcagattctactgactgtgtatcaaacaaagtgagcatccagcctctggatgaaactgctgtcacagataaagagaacaatctgcatgaatcagagtatggagaccaagaaggcaagagactggttgacacagatgtagcacgtaattcaagtgatgacattccgaataatcatattccaggtgatcatattccagacaaggcaacagtgtttacagatgaagagtcctactcttttgagagcagcacatttacaaggaccatttcaccacccactttgggaacactaagacngtgttttagttgg

SEQ ID NO: 22820 - DNA, 482 bp, Homo sapiens
  misc_feature (1)...(482): n = A,T,C or G
ggagggcccnnnagaagnnnnttatgcccgccttctgaattccgcacgagctcacttctgcaaggtcaatgagagaggagagtacttctgggagaagagggtcacaggctgcccaccctttgatgaacacaagtgtctggctgagagaggtaaaattatgaaaattccaggcacctgctgtgacacatgtgaggagcctgagtgcaacgacatcactgccaggctgcagtatgtcaaggtgggaagctgtaagtctgaagtagaggtggatatccactactgccagggcaaatgtgccagcaaagccatgtactccattgacatcaacgatgtgcaggaccagtgctcctgctgctctccgacacggacggagcccatgcaggtggccctgcactgcaccaatggctctgttgtgtaccaataggttctcaatgccatggagtgcaaatgctcccccaggaagtgcagcaagtgaggctgct

SEQ ID NO: 22821 - DNA, 501 bp, Homo sapiens
  misc_feature (1)...(501): n = A,T,C or G
ggagttccnggctttgccaataccgagagctntaagtancngcatgcaggaattccgcacgaggagccacccggcccagcccctcccttgtgtttcaaccaatcggaagtgaatttaactagatgtagtaaccttttttttctttacttctaaaacagttacagtttactaataaagttaagtctggttctgtcctagaggaaataaattcactattaattcatgtcttaagttacttgggttaaaacactttcagccacccagattaattaaagtggagcagtggagcccctggctgggagatggcctccagaggagcagctgcagggcatgttctgggcttagcgacagaggcaagcaagggactggtgtctctggtgagaggagggtttgatgtatctctgtcctatgctggtctctcttctcctttataaaatcctctgtggtcaactgactactgcgtatcgcagtggaataagactgcacagttgctggtaggtg

SEQ ID NO: 22822 - DNA, 469 bp, Homo sapiens
  misc_feature (1)...(469): n = A,T,C or G
ntgggaannnnaactgccttgatcgcgctgcaggaattccgcacgagccgcactgtccccacagccttccacaccctgtgcataggcagccctctcacgtcttgaggtccgaagctggggtgggggtgtccgtcagttattagtggatggagattcccacagcaaggctgcatttgaatgatttccttaggatgaatggtccctacacaaagaggccttgtgggcaaacctggagaaccctcctaaatccatagagttttcaaaatgtgaatctttggaagccttgagttcagaatctgctgctctggaatatttcccttcgatcttatctcagtcacttcgtttttgagaagagtgatgccttgggcatgcttttttttttttcttttttaaaaaacagggagttgaagtccaacctatttaaaaaccccaccatttggagaattacaagggttttgtcctgaattgt

SEQ ID NO: 22823 - DNA, 485 bp, Homo sapiens
atttgggccgcccttctgcaccgcgctgcaggatttttagtagagacggggtttcaccatgttggccaggctggtctcgaactcctgaccttaggtgatccactcgccttcatctcccaaagtgctgggattacaggcgtgagccaccgtgcctggccacgcccaactaatttttgtatttttagtagagacagggtttcaccatgttggccaggctgctcttgaactcctgacctcaggtaatcgacctgcctcggcctcccaaagtgctgggattacaggtgtgagccaccacgcccggtacatattttttaaattgaattctactatttatgtgatccttttggagtcagacagatgtggttgcatcctaactccatgtctctgagcattagatttctcatttgccaataataatacctcccttagaagtttgttgtgaggattaaataatgtagataaagaactagcataacaaaaaaaaa

SEQ ID NO: 22824 - DNA, 458 bp, Homo sapiens
  misc_feature (1)...(458): n = A,T,C or G
natttgccccgcgctgcaggaattcggcacgagcggaggggctggggggatcccagcagggggagggcaatcccttcaccccagttgccaaacagaccccccaccccctggattttccttctccctccatcccttgacggttctggccttcccaaactgcttttgatcttttgattcctcttgggctgaagcagaccaagttccccccaggcaccccagttgtgggggagcctgtattttttttaacaacatccccattccccacctggtcctcccccttcccatgctgccaacttctaaccgcaatagtgactctgtgcttgtctgtttagttctgtgtataaatggaatgttgtggagatgacccctccctgtgccggctggttcctctcccttttcccctggtcacggctactcatggaagcaggaccagtaagggaccttcgattaaaaaaaaa

SEQ ID NO: 22825 - DNA, 502 bp, Homo sapiens
  misc_feature (1)...(502): n = A,T,C or G
tggtnccannagtatgaaatacagactccctcntatcagatacgctttccgcgaannccgcacgaggataaagagaaaaagagggaagaattgaaaaaaattgttgaagaagagagactaaagaaaaaagaagaaaaagagaggcttaaagtagaaagagaaaaggaaagagagaagttacgtgaagaaaagcgaaagtatgtggaatacttaaaacagtggagtaaacctagagaagatatggaatgtgatgaccttaaggaacttccagaaccaacaccagtgaaaactagactacctcctgaaatctttggtgatgctctgatggttttggagttccttaatgcatttggggaactttttgatcttcaagatgagtttcctgatggagtaaccctagaagtattagaggaagctcttgtaggaaatgacagtgaaggcccactgtgtgaattgctttttttcttcctgactgcaatcttccaggcaatagctgaagaan

SEQ ID NO: 22826 - DNA, 357 bp, Homo sapiens
  misc_feature (1)...(357): n = A,T,C or G
agggccgnnnnnnnaattgaatcgcaccggctgcaggaattcggcacgagcaggctccagccctgagtgcttccgagctggcggactgcccaggggccatcagaggatggtggtgctgctgctgatccggggaccgctgtcttccctcccatacgcctttcatccctccttctagggcctatggcagttctcccaggatgtgtggcgagagcctgggccagcccacagcgttcctagtcaggcagccacaccttggtcctcatcttggtcccttccaatctgaaacctcgtgcctggctcgtctgccacctacatttctctttccagctgctgttttgtaaaaaaaaaaaaaaaaaa

SEQ ID NO: 22827 - DNA, 479 bp, Homo sapiens
  misc_feature (1)...(479): n = A,T,C or G
nattgaccgcctgcggaattcggttcgagccacggtccaaatcgtattgttttctttctagaaaggaagagagaaggaaattcgggaggggtgtgcgggctggtaggcagaacttgttgagcttttcgcctgggttccctgctgatgacccaagcttgtccccctggcggactttggaagacaggagttggtggctaaaccgctgacttttctattgcagacaacatatgcggcccggaaggcaaaagggcccggacggcctacacgcgctaccagaccctggagctggagaaggagttccacttcaaccgttacctgacccgcagaaggaggattgaaatagcacatgctctttgcctctccgagagacaaattaaaatctggttccaaaaccggagaatgaagtggaaaaaagataataagctgaaaagcatgagcatggccgcggcaggaggggccttccgtccctgagtatctag

SEQ ID NO: 22828 - DNA, 484 bp, Homo sapiens
  misc_feature (1)...(484): n = A,T,C or G
cgcggggggnttttnttactggcttgctgcancgattcggcacgagaagaactgcacagccatctgggaagcctttaaagtggcgctggacaaggatccctgctccgtgctgccctcagactatgacctttttattaacttgtccaggcactctattcccagagataagtccctgttctgggaaaatagccacctccttgttaacagctttgcagacaacacccgtcgttttatgcccctgagcgatgttctgtatggcagggttgcagatttcttgagctggtgtcgacagaaaaatgactctggactcgattaccaatcctgccctacatcagaagactgtgaaaataatcctgtggattccttttggaaaagggcatccatccagtattccaaggatagttctggggtgatccacgtcatgctgaatgggtcagagccaacaggaagctatcccatcanaggtttttttgcagattatgaa

SEQ ID NO: 22829 - DNA, 469 bp, Homo sapiens
  misc_feature (1)...(469): n = A,T,C or G
nttagacccgctctgcangcgccgctgcccccggaggacctggacgcggttgtcccagtcagtggagccgtcgccggtggcatgttggatcggatccttctggagtccgtgtgccagcaacagagctgggtccgggtgtacgatgtgaaaggaccacccacccaccgtctgtcttgtggtcagtcaccctacaccgagacaacaacgtgggagcggaagtattgcatcctcacagacagccagttggtattgctcaacaaggagaaggagatacctgtggaagggggacaggagcagcagacagattccaccaaagggcgatgcctgaggagaactgtcagtgtcccttccgagggtcagtttcccgagtacccaccagagggcgccactaaactggaggtaccagcagaaaggtcccctcgtagacggagtatctcanggaccagtacatcagagaaacccaactccn

SEQ ID NO: 22830 - DNA, 468 bp, Homo sapiens
  misc_feature (1)...(468): n = A,T,C or G
nattgaacccttgacccgcgctgcaggaattcggcacgaggaattgcagccactgggcagttggggtggcttcctgggagatgagccgcgaccaggtcctgggaaggactatggactcttgttgtgtggaatggaaggggactagccagctctctgcatggcacatggtcaaggaaactgtccttggctcatacagacctggggtggtgggcatctggctgaaccttgaggagggaaagcttgccttctattcagtggacaatcaggagaagcttctgtatgagtgtaccatctctgcctcctctcctttgtaccctgccttctggctgtatggcttacatcctggaaattacctgataataaagcaagtaaaggtgtaaggtttcctaagggattacaaaaaaaaaaaaaaaaactcgggggggggcccgggccccaatgccccctatagggaggaaattccattcc

SEQ ID NO: 22831 - DNA, 475 bp, Homo sapiens
  misc_feature (1)...(475): n = A,T,C or G
ggaggggnnnngaattgaatcctaactgangggcacgaaacgcacgagttttgaataggtgggatttgctttcatgtcctgtttcaaaaaccaagtgtctcttgacagcccactggttcttcctgtcctcttgctctagtctgtatcagaaagcagaatgactgtacttttgttttacaaacaaccacctgataggacggacactccacgagataaggaaaggcacgtgcccttgagcttgaatggaagcagcctctggagggggcagccactgcccttcgagggagagcagctcttcagcagtggccagagtgccacgtgactctgcagatgacccctgggagccgggtgatgggcacctgctggggcttttgttttttctttttcactggctggcttgatcctcagtggcaaaaggacccctgagccccttctccgagccctggagcactcctcgggacaccgagtggcctca

SEQ ID NO: 22832 - DNA, 448 bp, Homo sapiens
  misc_feature (1)...(448): n = A,T,C or G
ntttgaccctcgctgcacgaattcggcacgagagacagttccctctggggccaatgggaaacaatgacagatcatcaggcattagattctcatgaggagcccgcagcctacatccctcacatgcacagtccacaataggattcatgcgcctatgagaatctagtgtcatggctggcagatataacagaagatggagttcaggcgataatgtgagtaagagggagcggccagaaatacagatgaaacttcactcactcacttgccactcacctcctggtctgcgtcctggttcctaacgggccatggatagttacaagtctgtggcccagggggttgaagacccctgccctagagtacatatgcagtggatgttgagaaacagattaattcattaatgcagagtcttcatattccaaacaaaagatttgagggttttatctgttataac

SEQ ID NO: 22833 - DNA, 484 bp, Homo sapiens
  misc_feature (1)...(484): n = A,T,C or G
ggcngggaagggggnnnnccttgagtgccttcggcattcggcacgagcagactgagcgtgcctaccaaaagcagccgaccatctttcaaaacaagaagagggtcctgctgggagaaactggcaaggagaagctcccgcggtactacaagaacatcggtctgggcttcaagacacccaaggaggctattgagggcacctacattgacaagaaatgccccttcactggtaatgtgtccattcgagggcggatcctctctggcgtggtgaccaagatgaagatgcagaggaccattgtcatccgccgagactatctgcactacatccgcaagtacaaccgcttcgagaagcgccacaagaacatgtctgtacacctgtccccctgcttcagggacgtccagatcggtgacatcgtcacagtgggcgagtgccggcctctgagcaagacagtgcgcttcaacgtgctcaaggtcaccaaggctgccgn

SEQ ID NO: 22834 - DNA, 468 bp, Homo sapiens
  misc_feature (1)...(468): n = A,T,C or G
nttgaccgtctgcggcgataagcctggagtttgccaaatcaaagctagaggaactatccagagtaatgcacgatgaagtcagcgacactgaaaacataaggaaaaaccttgccatcgaaagaatgatcgtggagggctgtgacatcttgctggacaccagccaaacgttcatccgccaaggttctcttattcaagtaccttccgttgagagggggaaacttagtaaagttcgcctgggttcgttgtctttgaaaaaggaaggagagagacaatgcttcttatttacaaaacactttttaatatgtacaagaagttcaggagggaagcttcatctgctcaagacaggtggggttctgtctctaatagactgcacattgattgaggagccagatgcaagcgatgatgactctaaaggttctgggcaagtgtttgggcacctggattttaaaatagtggtggagcctcctg

SEQ ID NO: 22835 - DNA, 520 bp, Homo sapiens
  misc_feature (1)...(520): n = A,T,C or G
aggggnnnnnnnnaagggagggcccnnnagggagnnnnntttctgaanngcccttctgcatcgcctgcaggaattcggcacgagggcaaactgcgggtgcatctcgacatccaggttggggagcatgccaacaactaccctgagattgctgcaaaagataagctgacggagctacagctccgcgcccgccagttgcttgatcaggtggaacagattcagaaggagcaggattaccaaaggtatcgtgaagagcgcttccgactgacgagcgagagcaccaaccagagggtcctatggtggtccattgctcagactgtcatcctcatcctcactggcatctggcagatgcgtcacctcaagagcttctttgaggccaagaagctggtgtagtgccctctttgtatgacccttcctttttacctcatttatttggtactttccccacacagtcctttatccacctggatttttagggaaaaaaatgaaaaagaataagtcacattggttccatggccacaaa

SEQ ID NO: 22836 - DNA, 506 bp, Homo sapiens
  misc_feature (1)...(506): n = A,T,C or G
aggnnnnnnnnaaggaggggccnnaggggnnnnctactgaccgccttactgattgcctcgagagagcacgtgaagagccagaagtgaagagtgactagtacaaattataaaaagccactagactcttcactgttagctttttaaaacattaagctcccatccctatggaggaacaactctccagtgcctggatcccctctgtctacaaatataagattttctgggcctaaaggatagatcaaagtcaaaaatagcaatgcctccctatccctcacacatccagacatcatgaattttacatggtactcttgttgagttctatagagccttctgatgtctctaaagcactaccgattctttggagttgtcacatcagataagacatatctctaattccatccataaatccagttctactatggctgagttctggtcaaagaaagaaagtttagaagctgagacacaaagggttgggagctgatgaaactcacaaatgatggtaggaa

SEQ ID NO: 22837 - DNA, 482 bp, Homo sapiens
  misc_feature (1)...(482): n = A,T,C or G
aggacgggcgggccgaattgacgtctgtactgaggggcgtccgaanccnctcattgatggcagaaaggccaacgtgaacctggcatacttaggagcaaaaccaaggatcatgcaaccaggttttgcctttggtgttcaacaacttcatccagcccttatacaaagacctttcgggatacctgcccactatgtctatccgcaggcttttgtgcagccgggagtggtcattccacacgtccagccgacagcagctgccgcctccaccaccccttacattgattacactggagctgcatacgcacaatactcagcagctgctgctgctgccgccgccgctgctgcctatgaccagtacccctatgcagcctctccagctgctgcaggatatgttactgctgggggctatggctacgcagtccagcagccaatcaccgcagcggcacctgggacagctgccgccgccgctgcagcagctgctgccg

SEQ ID NO: 22838 - DNA, 471 bp, Homo sapiens
  misc_feature (1)...(471): n = A,T,C or G
ctgccgcctcggttttgacgcttcggaaanccgccgaggcataatgaaagcattgcggcgaatttaggctatatggcatttatctggtaatgtgtttcacaaaagctagaatgaaaatgtgatgtaacggatagcactgtgtaggccgattcataattcttggtataaaaccaagttttccttattcttgaggaatttgaagaaaggtaaaatgttggattttaagctcagtacgattgaccagagactgttctgactttgacattcagacctttcagatgatcttccttcacaccagtccaagacactcagcatttccagccaagctgtcttttttttctgccaataaagtattcattagttgacgtttgtttgtactttaagtaaagccaatcttttttaacgcattaatttaattcacgggtatgcctttcatttctctggccttcagttggtttaaaaaaaaaaaaa

SEQ ID NO: 22839 - DNA, 524 bp, Homo sapiens
  misc_feature (1)...(524): n = A,T,C or G
aggggnnnnnnnnnaagggagggcccnnnaggnnngnnncnnaattgannngccctgtactgatcgccctgcaggaattcggcacgagctaagacagagtgtcctgcccaagtgatggcactggggagcagtcactcaggtttatttccaccagggcccaagaaaaaaagaaatgaggcaacctaaaattccatcaagatagataccaatatccaaggtgcttggtcttagcggtgtgggacccacgttaaggctcttggtgggaaggtgggaggtgttttcagcatgagatagggttcaggctgtgaatcagagtctagagcctaagataaaagaagataccagggctgggccacggtggctttcgcctgtaatcctagcactttgggaggccaaggcaggcagactgcctgagctcaggagttcgagactagcctgagcaacacggtgaaaccctgtctctactaaaatacaaaaaagtagccaggtgtggcggcatgcacctgtagtcccagctactcgag

SEQ ID NO: 22840 - DNA, 484 bp, Homo sapiens
  misc_feature (1)...(484): n = A,T,C or G
ctcgaccgcctgcggcgttgctcgcgcgtgcagcaangctcttgaaaccaaactctagcctctccaacctagaaactgcatactttccacaaaatttgagatttttgagaccctggtacttttcacgaagtcaccttaattatcaccaaaaagctcctgcaagatgggagtggttatactccatttacaggaaaggaaccaaggctcagagaagaaatgtgctccgttcaccgtgtgctcctcctcagccatcctggccgtgctcagtcatctgaccagctgacctccgtgttcccccactccctggggagctcctccgccttttggcttccaatgctattgctgcatgctgaagactcccgcattggtaactccagtctgactgtgggacataaatgttattgaactttaaaaaaaaaaaaaaaaacacaagaaaaaaaaaaaaaaaaaaanccccttggggggggggcgggcccccatttcg

SEQ ID NO: 22841 - DNA, 415 bp, Homo sapiens
  misc_feature (1)...(415): n = A,T,C or G
nattgactcggntgcangaattcggcacgagcgatttgacaagatcaaagctgcaggaaaatggacagtgaggttcagagagatggaaggatcttggatttgattgatgatgcttggcgagaagacaagctgccttatgaggatgtcgcaataccactgaatgagcttcctgaacctgaacaagacaatggtggcaccacagaatctgtcaaagaacaagaaatgaagtggacagacttagccttacagtacctccatgagaatgttccccccattggaaactgacgcttggctcctttcttgtggatggattttctcaaagtacacagataaagcatggtttgtttcagtctccaaattcaaacctttgagtaataaatcagcactcaaaaatgtaaaaaaaaaaaaaaaaaaa

SEQ ID NO: 22842 - DNA, 487 bp, Homo sapiens
  misc_feature (1)...(487): n = A,T,C or G
tggggnnaaggggggnnnnttttggatttcatcggctgcacgaattcggcacgagggtcccaagaagcatctgaagcgggtggcagctccaaagcattggatgctggataaattgaccggtgtgtttgctcctcgtccatccaccggtccccacaagttgagagagtgtctccccctcatcattttcctgaggaacagacttaagtatgccctgacaggagatgaagtaaagaagatttgcatgcagcggttcattaaaatcgatggcaaggtccgaactgatataacctaccctgctggattcatggatgtcatcagcattgacaagacgggagagaatttccgtctgatctatgacaccaagggtcgctttgctgtacatcgtattacacctgaggaggccaagtacaagttgtgcaaagtgagaaagatctttgtgggcacaaaaggaatccctcatctggtgactcatgatgcccgcaccatc

SEQ ID NO: 22843 - DNA, 468 bp, Homo sapiens
  misc_feature (1)...(468): n = A,T,C or G
ntttgacccgctgtgcaagacttccgcacgagcccatggctttgtgctgctgagtcgctctcatgaagcccttatggagagcacctgttgtgtgcctgacaccacgctggagctgtgtaccaatcgtctcagccttcattatgaggccgaggtaggagtcttatatcccaggtgaggaatttgaagctcagaaaggttgaggggctccccagaggtcacacagcctgtgtgcagtggagctggcaccattcagactttcagccgactcagcaactttcccttgccctgggctgcctcctcctgagagctgttccccaccgccctgcctcttccggttggaggctctcatgtctctttggggagagctggcagtgtgcggagctgataacattttcccaatattgagcagttcccaaggacgagcagcatttctagacttccacaaaattatgctggatttggcgtgag

SEQ ID NO: 22844 - DNA, 501 bp, Homo sapiens
  misc_feature (1)...(501): n = A,T,C or G
agggaccggccngnggagaattgganttaatgaccggccgtacgaattcggcacgagcagcagcagcagctgccgcagctggagccacagcccgagtgccagggtcccgtggaggctgaggccaggcagctgaagagctgcatgaagccggtgaggcgcaggcctgccgaggaggaactgaagacgaagaacatggatgataacacctttgccatggcagagcatcctgatgtccaggagtcagtgggtccactggtagcccccacccctctccgtccatggccccagatgacacttcaggtctgctggagtttgttggagttccactccagaccctgtttgcctgggtatcaccagcagaggctgcagaacagcaaagattgctgccttttccttcctctgggaagcttcgtcccagaggggcacctgccagatgccagccggagctcttgtatatgaggtgaaaagcaatcacggagttaaaagaagacaagctgaaat

SEQ ID NO: 22845 - DNA, 483 bp, Homo sapiens
  misc_feature (1)...(483): n = A,T,C or G
catcgcccgcctgnattgcccgcgtgcaggaattcggcacgaggaccagggggccaaggcttcctccggggacattggctccctggattatcaagagtttgtagttgacattgaatccaggctgaggatggaaggtgtggaacttaaagaagaatggcaagatgaagattttccgatacctttaccagaagatgatagtattgaagcagatatactagctataactggaccagaggaccagcctggctcactagaagttaatggaaataaagtgagaaagaaactaatggctccagacattagcctgacactggatcctagtgatggctctgtattgtcagatgatttggatgaaagtggggagattgacttagatggcttagacacaccgtcagagaatagtaatgagtttgagtgggaagatgatcttccaaaacccaagactactgaagtaattaggaaaggctcaattactgaatacan

SEQ ID NO: 22846 - DNA, 359 bp, Homo sapiens
tatagagagactggggggagtgtatccattcattcttaacaaatacttaatgaggacctactgtgtgccacacagtttggggctcagggtacatccttgagcaagaggaaaaaatcatctcagtgggaggcctacagtaaacaaaatataagtgccacggagaaagctaaagcagagaaaggaatggagaatgttcaggatggaggtcagagtgttacatcaggtggtcaggaattaccttaggtaattcctccactcaaaacccttcagtgacttccatgacatgaaataggaagtcattggagggtttgagcagaggaatgacctgttttaaaaggctcactcaggctgctgtatgg

SEQ ID NO: 22847 - DNA, 406 bp, Homo sapiens
actacaatggaggctggtttcttgccttaaggagcccattgcctttcccgctgaagtctaaatgttgacatgtaataaagcgggcagcaggatggtggcggatgcggccaactccaatgggcctttccagcccgtggtccttctccatattcgagatgttcctcctgctgatcaagagaagctttttatccagaagttacgtcagtgttgcgtcctctttgactttgtttctgatccactaagtgacctaaagtggaaggaagtaaaacgagctgctttaagtgaaatggtggaatatatcacccataatcggaatgtgatcacagagcctatttacccagaagtagtccatatgtttgcagttaacatgtttcgaacattaccaccttcctccaatcctacggga

SEQ ID NO: 22848 - DNA, 409 bp, Homo sapiens
aattccgcacgagtaacaatgacaggcagcagaataagtttccctgtgccttttaaagacagaacaaatgttcttcattgtgtttgtctgatgtttcctcacgatgaggcgagaaaatgaaatactgcgtaagtgatcctgcatccgtctcaaaaaggtctcatttctggagacactgatgtccttctcacctcattggcggtgttgattttgatcattcctcccctccagggcgttgactgatttccccatggtgtaaattactagttttcctttgcatctaataagcagcctgtggggagcctgaaatatgtttcttgccaggtggaggcacggtcataaggagcagtgtgtgtgtgtgaggatggagagaagcccttcccttctaggggaacgtgaggagagtgga

SEQ ID NO: 22849 - DNA, 408 bp, Homo sapiens
  misc_feature (1)...(408): n = A,T,C or G
gaattcggcacgagctttgagctgagattggaaggcagtgaggctgagggtgccaagatttccccagggttcacccagaggggaaggggctacatgcccccagctgtgtgcagggaggacacatcancccactaccgctgccaacaccaatgcctaaaacttgtttcatacattggggttttctatatatttcagttgggaaaagcttacatttaaccttttgaaaaaataaatacgtgattagcctcaactaaacattgctgactataaagacagtatattcaccatgtcgctggcaatatgtcattgcgtaacaccaaataaccccccagaagtagccagaggccagtttgaacatcacaattctaagtgttttagtaactatttctggcgtgagtcaacagatcn

SEQ ID NO: 22850 - DNA, 472 bp, Homo sapiens
tgtggccctttcgccctcctgcaggaattcggcacgaggccaaagccaagaaatagcccccgcacaccaccctgtgccccagatgatggattgattgtacagaaatcatgctgccatgctgggggggggtcaccccgacccctcaggcccacctgtcacggggaacatggagccttggcgtatttttcttttctttttttaatgaatcaatagcagcgtccagtcccccagggctgcttcctgtctgcacctgcggtgactgtgagcaggatcctggggccgaggctgcagctcaaggcaacggcaggccaggtcgtgggtctccagccgtgcttggcctcagggctggcagccggatcctggggcaacccatctggtctcttgaataaaggtcaaagctggattctcaaaaaaaaaaaaaaaaaaaaaaaaaacttggggggggggccgggcccccattcccccttatagg

SEQ ID NO: 22851 - DNA, 480 bp, Homo sapiens
  misc_feature (1)...(480): n = A,T,C or G
gcgcggngctttgaaactgatggcttgagaaccgtcgcgaggnncccagaacgctgggccgtttgttagatgctcttttcctgcagataaagaaatggaggccctgggagctgaagttctttcccagcatttgctgccaggagtctctccaccatgaggaatgaggccaaggttaagtccatctaactctagaaactggccttctggcaccccgggctgagttttctcaccctacccttgcacctcactcaggcagtcagtccttgggagagtgaatgaacacgcaggagacctcacctaccaccagggtcctggtccagtgccctgggcacctaacagcaccagcctcctccaggcttttctggcccctgcgactcctcctagtacccgcaacacagtgaccagaccacttccctgctcaaagttcttccacacatcaccaatgctgacagatcagtgctacattcctcttctaggcag

SEQ ID NO: 22852 - DNA, 471 bp, Homo sapiens
atagaccgccttaggaattcgcgcccatggcgcttctagggctggttcccgtcatcttcgggagccgtggaggtacgaacttaagacatgcctattttattaatttacttccaaacgcaacgaaaggtccatggacaatttgtgggccatttaattcagggcccccaattcgtacgtggagaagtgggaatgcaaaagtactttgacctttaaccttcggtccggcgcggtggagggaaacgcctccgtctctatataaggaattttccggtctcttcgggtcctttttcctctcttcagcgtggggcgcccacaatttgcgcgctctctttctgctgctccccagctctcggatacagccgacaccatgggtttcggagacctgaaaagccctgccggcctccaggtgctcaacgattacctggcggacaagagctacatcgaggggtatgtgccatcacaagcagatgt

SEQ ID NO: 22853 - DNA, 486 bp, Homo sapiens
  misc_feature (1)...(486): n = A,T,C or G
agcgtgtgnnnccttgatttcgatagcaattcggcacgagctgataaacacaatctgctaggaacttgggaaaggaatcagagagctgcccttcagcgattatttaaattattgttaaagaatacacaatttgggggattgggatttttctccttttctctgagacattccaccattttaatttttgtaactgcttatttatgtgaaaagggttatttttacttagcttagctatgtcagccaatccgattgccttaggtgaaagaaaccaccgaaatccctcaggtcccttggtcaggagcctctcaagattttttttgtcagaggctccacatagaaaataagaaaaggttttcttcattcatggctagagctagatttaactcagtttctaggcacctcagaccaatcatcaactaccattctattccatgtttgcacctgtgcattntctgtttgcccccattcactttgtcaggaaacctt

SEQ ID NO: 22854 - DNA, 473 bp, Homo sapiens
  misc_feature (1)...(473): n = A,T,C or G
attgaccgcctgttgaattcgccacgaggttcttctggggcctgcgctcttactatgagaccagcaagatgaaagtcctcaagtttgcctgcaaggtacaaaagaaggatcccaaggaatgggcagctcagtaccgagaggcgatggaagcggatttgaaggctgcagctgaggctgcagctgaagccaaggctagggccgagattagagctcgaatgggcattgggctcggctcggagaatgctgccgggccctgcaactgggacgaagctgatatcggaccctgggccaaagcccggatccaggcgggagcagaagctaaagccaaagcccaagagagtggcagtgccagcactggtgccagtaccagtaccaataacagtgccagtgccagtgccagcaccagtggtggcttcagtgctggtgccagcctgaccgccactctcacatttgggctcttcgctggccttggn

SEQ ID NO: 22855 - DNA, 485 bp, Homo sapiens
  misc_feature (1)...(485): n = A,T,C or G
ggagggaaggccgaattgaatccnaacttggagggctgcctgaanncggcacgaggcaagctctacgtctcctccgagagccgcttcaacaccctggccgagttggttcatcatcattcaacggtggccgacgggctcatcaccacgctccattatccagccccaaagcgcaacaagcccactgtctatggtgtgtcccccaactacgacaagtgggagatggaacgcacggacatcaccatgaagcacaagctgggcgggggccagtacggggaggtgtacgagggcgtgtggaagaaatacagcctgacggtggccgtgaagaccttgaaggaggacaccatggaggtggaagagttcttgaaagaagctgcagtcatgaaagagatcaaacaccctaacctggtgcagctccttggggtctgcacccgggagcccccgntctatatcatcactgagttcatgacctacgggaacctcctgga

SEQ ID NO: 22856 - DNA, 405 bp, Homo sapiens
aggattgatgtcatccagaaacaccttggaaagccccatcccctgtgccctgcacactgtggccactcgtcctgctggagcctcatgaatggccagtgagtgctgattgccaggataagggtgctgattcctgccagcaaaagacctccatactctcccccgatggccaaggtgaagcacaggtccgtgtggtgctgaggtccagtctcaggtgatcaccaatttacagagtcagtcgtgttgttactgacccatcctaaaggggtagctgggccctgagcctttagagctcgcagccccctgaggtgactgtattctttgtccacagtctaggatttagttatgtcccggttgggggtagggggttaaacacacaacacacgagttggggtcgggggaagaggt

SEQ ID NO: 22857 - DNA, 482 bp, Homo sapiens
  misc_feature (1)...(482): n = A,T,C or G
attgcccccgccccannnaattgatgcgccatgtcggaatncgccacgagggaacctgttggagaggcaggacctgctgctttagagtgcggctgaacccgggccttgcgtttctgtttggccagagcaaggatctggcctggagaggcccatcctataccccttattagagccatgacagcctacagagtgaggtgaggtgctcccaccttcccagatggttcctttctgccccttcctggaaggaaaggtgaggctgccaatagcctcctggcaccagccagacctcacccttgaccaacctctcggggctgggggttcattcctggggcactgtggcctggttttgctttgaaaccaagaaagagcaaagggaacccagcagttctgagtgagttctgagccagccctacctcaggctggctgttgagacatgctacaattttcatttttgtaaaaataaagcttgattgttcacagaa

SEQ ID NO: 22858 - DNA, 482 bp, Homo sapiens
  misc_feature (1)...(482): n = A,T,C or G
gggctttaaatgatgccgattgagggcntcggananagcacgagctctagtggaattggtgaggagctggcttaccagttgtctaaactaggagtttttcttgtgctgtcagccagaagagtgcatgagctggaaagggtgaaaagaagatgcctagagaatggcaatttaaaagaaaaagatatacttgttttgccccttgacctgaccgacactggttcccatgaagcggctaccaaagctgttctccaggagtttggtagaggtttttttaatggccttcgaacagaacttgccacatacccaggtataatagtttctaacatttgcccaggacctgtgcaatcaaatattgtggagaattccctagctggagaagtcacaaagactataggcaataatggagaccagtcccacaagatgacaaccagtcgttgtgtgcggctgatgttaatcagcatggccaatgatttgaaagaagt

SEQ ID NO: 22859 - DNA, 469 bp, Homo sapiens
  misc_feature (1)...(469): n = A,T,C or G
gtggcannnnnaattgacatcgatccgcgctgcaggaattcggcacgagctcccttaagcccagacatctgttgagacctgacccctagtcattggttaccagtgtgtcaggcaatctggactttccagtgatgccactgagatggcacctgtcaaaagagcagtggttccatttctagattgtggatcttcagataaattctgccattttcatttcacttcctgaaagtcagggtcggcttgtgaaaagttgttaaacaacatgctaaatgtgaaatgtcaaccctcactctaaactttccctgttcagagcatcagatgaagacttcattgggttttatagtggctttctgatttttggtagtccattgaagaagggagtttgaaagttgttgtatactgttaacgattgtctgcccatgtcctgcctgaaataccatgattggttatggaaagtatctttaataaa

SEQ ID NO: 22860 - DNA, 473 bp, Homo sapiens
  misc_feature (1)...(473): n = A,T,C or G
acggcccccattgcccgtcctgcangaattcggcacgagatctgctggccttgttcattttagtaacggttcctgaattctcttaaattctttgagatccaaagatggcctcttcagtgacaacaatctccctgctacttcttgcatccttcacatccctgtcttgtgtgtggtacttcatgttttcttgccaagactgtgttgatcttcagatactctctttgccagatgaagttatttgctaactccagaaattcctgcagacatcctactcggccagcggtttacctgatagattcggtaatactatcaagagaagagcctaggagcacagcgagggaatgaaccttacttgcactttatgtatacttcctgatttgaaaggaggaggtttgaaaagaaaaaaatggaggtggtagatgccacagagaggcatcacggaagccttaacagcaggaaacagagaaatttgt

SEQ ID NO: 22861 - DNA, 472 bp, Homo sapiens
  misc_feature (1)...(472): n = A,T,C or G
gcgcctcnnnnnaattgacatcgctgcagcactaaatacaaaaaaattagctgatcatggtgctgcatgcctgtagttccagctactcgggaggctgagaatggctgaacccaggaggtggaggttgcagtgagcccagattgcgccaccgcactccagcctgggagacagtgcgagactctgtttccacaaaaaacagagtaaaactgagatagtgaaatactaagagaaggtatttagagggttttgttcagcttttaatgtttgctttcctcccagtaagggcataagccccacctgcaagccttctccagtgttatagaaactggctttgtctctatagacatttctgtatgtacagatccatgctgatttgaaggtagtccttacactggatattcctctgccacgttttttgaacacaatttagttacatattgcagattacctaaaaccttcaaagaaaccaagg

SEQ ID NO: 22862 - DNA, 492 bp, Homo sapiens
  misc_feature (1)...(492): n = A,T,C or G
gggnnccatgcgcttgggcaccgccnananaaattgattgcctntgcggaatacgccacgaggaatcccgttctgaagggaagagcatgtttgcgggcgtccccaccatgcgtgagagctccctcttacagtacatgcagctcggaggcagggtcttgctggttctgatgttcatgaccctccttcactttgacgccagcttcttttctattgtccagaacatcgtgggcacagctctgatgattttagtggccattggttttaaaaccaagctggctgctttgactcttgttgtgtggctctttgccatcaacgtatatttcaacgccttctggaccattccagtctacaagcccatgcatgacttcctgaaatacgacttcttccagaccatgtcggtgattgggggcttgctcctggtggtggccctgggccctgggggtgtctccatggatgagaagaagaaggagtggtaacagtcacagatcccta

SEQ ID NO: 22863 - DNA, 492 bp, Homo sapiens
  misc_feature (1)...(492): n = A,T,C or G
tgtctcggaaacgccgngagaagnaannaattgacccgcatgcaggaattccgcacgaggacttgagaacataattttatataatcaattactaaatgttaaactattaccacacagcccataagacagcatttgcgtttattgagagagaggatgtgccatcatgattaatgaaaactatcttttgagtttgaaaagaaattaatttgcagtgtttggattgtatatatggtgctaaaaataaactaatttactttataaaccttatctgtacattatacgatgtgatgaaatttgctttttatccaaatattttgtatcttgtaaatattgctaattataggaatgcctataatacatcttagattccttatatctaataagaggtcaaagagttatgagttgaagtcttgaatgcaggaaactatctgatagagttctaccatatggttacttgcgtttggatacccttagtgggatgatgtaaatagn

SEQ ID NO: 22864 - DNA, 474 bp, Homo sapiens
cggcccccatcgccatcgtcccgcgctgcaggaattcggcacgagcccagtgaggcccaaagaacagtttattcctcctttcctcttgctgatttggtttcagacctgcctgcatcaccatgactaggtgagaacgtgtgggctcgctgcagttccagggatataatttaacagaaagggagggtatgacctgctcctggtgaatccagccactcatttaatatgcatggtgccctgtggggcccctccacagtacagcataaccagaggtgctgaaccatggccttgcccataaacagacagaggagaatttgcacagtaaatagagccagctgggaaaattgatgctgacgtagataatacatggcaaatctagtcctttatgcagaaattcattgctggtggctccaagatgcaatataattacacctctcttcctgccagctgtaccacagctagtgccctagtgtatga

SEQ ID NO: 22865 - DNA, 468 bp, Homo sapiens
  misc_feature (1)...(468): n = A,T,C or G
gggcggnnnnattgacattgccccgctgcggggaagagtcaaggctctattgtatttacccattgcccctgaggtagaagacccagaagaaaatccttacggccccccaccggatgcagtccaaacctccttgatggatgaaggggctagttcagagaagaagaggcagtcctcagcagatgggtcccagccacctaagaagaaacccaaaacaaccaatatagaacttcaaggagtaccaaatgatgaagtccatccactactgggtgtgaagggggatggcaaatccaagaagaagcaagcaggccggcctaaaggatcaaaaggtaaagagaaagattctccatttaaaccgaaactctacaaaggggacagaggtttacctctggaaggatcagcgaagggtaaagtgcaggcggaactcagccagcccttgacagcaggaggagcaatctcagaactgttatg

SEQ ID NO: 22866 - DNA, 415 bp, Homo sapiens
  misc_feature (1)...(415): n = A,T,C or G
gggaaagaaaaagttganncccttttgcccgcctgcggaattcggcacgaggcgagatgacgaagggaacgtcatcgtttggaaagcgtcgcaataagacgcacacgttgtgccgccgctgtggctctaaggcctaccaccttcagaagtcgacctgtggcaaatgtggctaccctgccaagcgcaagagaaagtataactggagtgccaaggctaaaagacgaaataccaccggaactggtcgaatgaggcacctaaaaattgtataccgcagattcaggcatggattccgtgaaggaacaacacctaaacccaagagggcagctgttgcagcatccagttcatcttaagaatgtcaacgattagtcatgcaataaatgttctggttttaaaaaataaaaaaaaaaaaaaaaaa

SEQ ID NO: 22867 - DNA, 410 bp, Homo sapiens
  misc_feature (1)...(410): n = A,T,C or G
attcggcacgagcttcccccttcactcactcgcctgcttcccatgctcccttgtaccccctcgccacatccctgtcttggggcccagctgcagcctgctgcctgcccttcatggctctgcacatggccctttgcttgagggctccccactccctgcccaccaatacccaggtgaggaacagaccctctggcctctcaccccacttcagtgctctcttccccaacttctctcgggctctttgctcatgaggtgagagctggtgtgagggttgtgtcagcagctgtagccagagagaggtgttgactctgagagaccttgcactccatactgaaaggaggtggggtcacagtgaatttcacatcccctctcaaccaggagtggagggctaggtcccttccccatggggagtn

SEQ ID NO: 22868 - DNA, 479 bp, Homo sapiens
  misc_feature (1)...(479): n = A,T,C or G
cttcgggcgccctcnccnattgacccgcctgcaggattcggcacgagcggcggnggtggggggaacgtgggggaacctgtgtttcacgtgactcatcagtgcccgccgccgtcaccagctatgcattcactccgtttccagtgagcagatgtcttgcttggaaagtggacctgtgtctgtgtctgtcctgagaacttaccagcagaaatcctcatttctgtgctacggatttaccaaaaattgtcaagtctttttcagtttaacagttcctttacatgtgtagtatttgaggaaaaaaatcaataaacagttgatctcgtgcaaaanaaaaaaaaaaaaaaaaaaaaaaaaaaaattttgggggggggggcgggcccccaattcccctttagggggggggaaaaaaaattccggggccgggtttttaaaacgggggggggggggggaagcccccccccccncccccccncctcccttct

SEQ ID NO: 22869 - DNA, 413 bp, Homo sapiens
ggaattcggcacgagcacaggtgaaaagagaaaaggaaaatattcagactctcttgaaatccaaagagcaagaagtaaatgaacttctgcaaaaattccagcaagctcaggaagaacttgcagaaatgaaaagatactctgagagctcttcaaaactggaggaagataaagataaaaagataaatgagatgtcgaaggaagtcaccaaattgaaggaggccttgaacagcctctcccagctctcctactcaacaagctcatccaaaaggcagagtcagcagctggaggcgctgcagcagcaagtcaaacagctccagaaccagctggcggaatgcaagaaacaacaccaggaggtcatatcagtttacagaatgcatcttctgtatgctgtgcagggccagatggatgaagat

SEQ ID NO: 22870 - DNA, 486 bp, Homo sapiens
  misc_feature (1)...(486): n = A,T,C or G
ccaccctttgacgnccntacgnanntttcgaccgcctgtagaattcggcacgaggtgacccggttcctgggcccacgctaccgggagctggtcaagaactgggtcccgacggcctacacatggggcgctgtgggcgccgtggggctggtgtgggccaccgattggcggctgatcctggactgggtaccttacatcaatggcaagtttaagaaggataattaattacacaaacccttcacagactgctctggtgcctggtggtgctagctcctcccacctcagcacctgctgcatctggagcagcccaagcctcaggatggacaagaggaaacccacagctcagcttcaggcttcttatgtttctgaaaacagcttggatattttaatgcacgttgcattaaacctcactgaaacctgannaaaaaaataaaaaaataaaaaaaaaaaaaaaaaaaaaaaaaaaaaaataaaaacgggggggggggc

SEQ ID NO: 22871 - DNA, 461 bp, Homo sapiens
cttttgccccgcgctgtatgaattcggcacgagccagccagcagcagaagccggaagacaccaccattccctccacagaactggccaaacaggtcatcgagtatgcccggcagctggagatgatcgtctgagccccccgggcactgggtggggcagggcacgagttatttaaaacagttacactgcagggtttcgcccaataaaggtggactgacattccctcttccaggcccttgtctccccagttgggacggcagagagacaagttcttatatctgaagaacttggaggttttggggcattcaggagttggagatagcctccaactgggtcagcctctgtctggtgggcattgctcaaggtctcaaacatggacgcccactgtggggccccagcagcactgtggcctgcaggagggcatggccccaggtagggggactgttctagccagctgtggacac

SEQ ID NO: 22872 - DNA, 472 bp, Homo sapiens
  misc_feature (1)...(472): n = A,T,C or G
tgcccccccnnnnaattgccttggctgcaggaattcggcacgaggccaggctctaggcgagaggctgccccgggagacgctggccttcagggaggagctggatgtcctcaagttcttgtgcaaagacctgtgggtggcggtgttccagaagcagatggacagcctgcgcaccaatcaccaggggacctacgtcctgcaagacaacagcttccccctcctcctcccgatggcctctggcctgcagtatctggaggaagcacccaagttcctggccttcacctgcggcctcctgcgcggcgccctctataccctgggcattgagagcgtggtcaccgcctccgtggcagccctgcccgtctgtaagttccaggtggtgattccgaaatcctaagcctgcctcgcacctgctgagccgcactgctgcccctggcctcaccggcctcaggagacggtggggccgctgcatttcggg

SEQ ID NO: 22873 - DNA, 446 bp, Homo sapiens
  misc_feature (1)...(446): n = A,T,C or G
nttgtgccccgcgctgcaggattcggcacgagtgtgggactcctgagccaggaagcctccggctaaggaagccccgccttagcctggagacgaccctcacgtccgtccctcacgtctgtccctcggcaagtgctcctcactgtggagagggcagctgctgacctgcagcaagccaggcggcggatcaagatttgtgccaagtgaggggccaaacttagcgtgggcatgcgtgcttttctctttacatgtgtccaaggccataagcgatgggctgtgacaaagcacatctgggctgagctcagggagaaatgtcccctgcagtagatatgcaagtgtgtgcaggtgtcagaaacaccaagccacacactgataactcatgccgggtgcggcggctcacacctgtaactcagcactttgggaggcagaggcgggaggatcgcttgagc

SEQ ID NO: 22874 - DNA, 408 bp, Homo sapiens
tcgagcctgccctagacctccgtgcagccattaggaccaccaaggagtgttcttcaaaccaccttctaccaccccgcgggacacgccagggctgattctggtgctcgcaccccgcttcctcctctgcgataccctgtggcaaagataaagagtcaggccagggcgggatgacactcattgattctaaagcatctttaatctgccaggcggagggggctttgctggtctttcttggactattccagagagccaaagagaagacttctctgtaggactagcacacccagaggaagagagtgacccaaattggtgctacgagcgaatgaatggggaagtgaactatacctcagccattcccaggagagagatgctgctgcctgggaaaagaacgaatggctttgctttgag

SEQ ID NO: 22875 - DNA, 507 bp, Homo sapiens
  misc_feature (1)...(507): n = A,T,C or G
aaggggntnnnnnnnncagangcncnngnnnaattgannaaatgatgcngtntgcgggaattccgcacgagcatggggcttcctccattttaatcttctcctttttaaaagatggctgtgtttcctagtctggcaactcctcaggaaagaagaatttcttcttccttgcagagttcagctgagtaggactaatgtagaagagtggaaaccccttcggccaccagggctattcataattcataagtgcttcaaaccagccagctgaatacatttggacaggctcttgctccttcgtgcaattcctgatttcattactctcttctgccaggaaataagcagggagcataggcttcttgcaagaatggagtgcgaagatgggctttgtttggcttaggaaatgccatacattttggaggtttttgtcttttctaagatgtgattattttatcactgaatctgcagggctttcctgatcctttcgggattgctctctcagaactgtgaatt

SEQ ID NO: 22876 - DNA, 487 bp, Homo sapiens
  misc_feature (1)...(487): n = A,T,C or G
agtgggnnnnnattgaaactcgatcgtcatgcggaancgcgacgagcctgaactctgggagcccacaccatttattggagattaaacaaagaagcaggtggtgaggacttgctggtcaaaaggaagcagtcacatcaagtgtgtagtttatagctgtgtcggactagcattttctttgaagcatatggaacatgttctgctactcgagataatgaacatttccttctgcctcaaggtacaatcagtttatgatcctgggagagcaagaagcaaggagccagcaagtctggacacattccagaggccacgaggggttttatgtcctgagttctggattccatccaagccatgaggggttttatgccctaggcttacgttgtagtgcggcggggcagccttccacccttaagcacagaacctggtgttccatatgccacaagaagttttaaactcttgacccacgacatgttctcaggctcttttcata

SEQ ID NO: 22877 - DNA, 469 bp, Homo sapiens
  misc_feature (1)...(469): n = A,T,C or G
cgcccccatcgccattgcccgcctgcangaattcggcacgagccagaacacctgcctgcgctgccgccacttctctttaagggagaggaaaagagagcctaggagaaccatggggggctgcgaagtccgggaatttcttttgcaatttggtttcttcttgcctctgctgacagcgtggccaggcgactgcagtcacgtctccaacaaccaagttgtgttgcttgatacaacaactgtactgggagagctaggatggaaaacatatccattaaatgggatcctgcagtctcagatttccactctgttctgagaccaacactgttatgtgaaatgggtcaagtgtcatccgtctttggctgcaaacctgtgtagcatgttcctgtatggaatattataggcagttgtaacacaatgacctattttcaacactgctaaaaggggggaaaattcaagaaggcactgaagagac

SEQ ID NO: 22878 - DNA, 472 bp, Homo sapiens
  misc_feature (1)...(472): n = A,T,C or G
aggctcccgctgttgcctcggcggagtaaggtgtgagaaaaagcaaccttggaggccagtaacaatgacagatttcaatcgtggttttaggaattataatacgcggcatacatctcataaaggcttttgctgggatattgaattccctgaatttttctgttttcgacctgttaaaaaaatcttaacatccatcaaactagtggtcaaacaaatgagaatgcagctgttctcagagtaatttttaagttgtcatttccctgtgttgcctcccaattggaagaagttaaggtttaccaaatgcatttctatttcaagggtatctgaaacgtaaacattcaaaactgaaggctgactgacttnagatgttttgcaggtggctggagagaacagggaaggtaatagagacacacttagtcccatgggaagcgcagcaccgttgtaggttctttctcctgtcccattagcgacctca

SEQ ID NO: 22879 - DNA, 501 bp, Homo sapiens
  misc_feature (1)...(501): n = A,T,C or G
ccccccccccgcccccccccccatcgaccgccatgcnganattgcaccgccttcaggaatgccgcacgagaaacaactcccgttacacggacaagtgaacaactggggctgacctctccttttcttcctcctcttccaactccttctcctcctcccacttcccagccgcagcagaaagcccccaacccaactgacactggcacaactgcaaacggtgtcatccgcacaactttatctcgctcctcgggctcccctaaggcattggacccatcgccgcgtcttttattttttgcaaagttgcatcgctgtacatatttttgtccccgccacctccctctgtctctggagtgccctacagccccgcaaactcctcctggagctgcgccctagtgcccctgctgggcagtggcgatcccccccatcctaccgcgcccagcccctgctgctctgggcagacgatgctgaagatgctctcctttaagctgctgctgctggccgngg

SEQ ID NO: 22880 - DNA, 482 bp, Homo sapiens
  misc_feature (1)...(482): n = A,T,C or G
catcgcancgccannnangattcgcaccggcctgcaggaattcggcacgagcactgtcggctgtggggacgtctcacccacttgggttacagtaggccttccccacccagagagaagtgtttccaccccagagacattgcctgtcagcccctgaagtgctcgcctcccccagtgcccgtcaccagcccttcctatctgtggggtccaagtcaggcttcccctgcggccaccagccatagggagcagccatcagcccccgagtcagaactgcttctgtctgtccatacctccaggctctcccggagagggggacggatatttatttcctaaagtttgcacttaattgtgaggattctcacgattgttgggggctactgaaaagaggaatgtgttgaatgtcgcgtttgctgtccactcgtcctagaagtttagtgtttttgtcactgtcatgtgtatctgagggcagagctggttctggaggg

SEQ ID NO: 22881 - DNA, 480 bp, Homo sapiens
  misc_feature (1)...(480): n = A,T,C or G
ggcgggttttaaatgacggctgatagagcgcactagcttttgactactttatttcagttggtccctgagctcggtgagtggggcgggtagagccaccaggggaatcaacagtggtttctcgtgcccctcagggtcaggagcagtctgatcaaaaggagggcatccactgtccggggccattcccacagctcccggatgctgggtctggaggctgcgcccttcccctgcaggagctcagcccagtgggcagtctgaagatggccaattacacgctggcaccagaggatgaatatgatgtcctcatagaaggtgaactggagagcgatgaggcagagcaatgtgacaagtatgacgcccaggcactctcagcccagctggtgccatcactctgctctgctgtgtttgtgatcggtgtcctggacaatctcctggttgtgcttatcctgggaaaatataaaggactcanacgcgtggaanata

SEQ ID NO: 22882 - DNA, 470 bp, Homo sapiens
attgaccgcctgcggattgcggcacgagataaaaccagccccacctgggactgctgtcctcgtggaagtcctcatgaccgcataagctgtccaagccagaaacctggaaattgctctagagctgcactaacgtgatagccactagccacttgtggctatttcgatttaaatgaggtttaaaattcagtcccacagtctcactggtcaccttctaaatgctcgacagccacacagtctcatggctcccacgctagacagtgcagccacagaagccctccttcgctgcagcaaattctagtggatggtgctgcttctaggcctggacttcttgttcctcctcagtcaccttttctttcctgagcatcctctgtcactgaattattttactgagatctcctagattcctcacatagacttccatacccacctaactgagctactggatctaatccatctgccggggtggtctt

SEQ ID NO: 22883 - DNA, 474 bp, Homo sapiens
  misc_feature (1)...(474): n = A,T,C or G
nttctgacncgtctgcangacttcggcacgagcatggttcccccaccctgggcagccaggaaggaatctgaatggagaatcaccaaccaccagagaaaaaagactgtggggccctcccctgccaactccccttccctggccgcccactcaacccacacctctttcacgcaggacaggctgcccaccctgtccacgtgaagtgccaacgccctccccaccctgggccgagcccccacccctccctgggcccccaagtgagattgcacatttaactactgtaaggagaggagcggcgttggcaaatgtgaaccatgagaatatcagtgatactgatgagaataaactaaacgcctttgtaacagcaaaaaaaaaaaaaaaaaaaacctggggggggggccgggccccaaatcccccttaaggggggcggaataaaaatccagggcccgcggtttaaaaacgccgaaacnnnnnaaa

SEQ ID NO: 22884 - DNA, 486 bp, Homo sapiens
  misc_feature (1)...(486): n = A,T,C or G
cgcgtgtnnnaaactgagattcatcagcaattcgccacgaggccaaaagaatgtctgtttctaacaaatccacaaatagccccgagattcaccgtcctagagcttatgcctgtcttccacccctcctgacccgtatagtgtgccacaggacctgggtcggtctagaactctctcaggatgccttttctaccccatccctcacagcctcttgctgctaaaatagatgtttcatttttctgactcatgcaatcattcccctttgcctgtggctaagacttggcttcatttcgtcatgtaattgtatatttttatttggaggcatattttcttttcttacagtcattgccagacagaggcatacaagtctgtttgctgcatacacatttctggtgagggcgactgggtgggtgaagcaccgtgtcctcgctgaggagagaaagggaggcgtgcctgagagggtagcctgtgcatctggtgagtgtgtca

SEQ ID NO: 22885 - DNA, 468 bp, Homo sapiens
  misc_feature (1)...(468): n = A,T,C or G
gtggggtcnncattgaccgcgctgcaggaattcggcacgagcctgctgctccttccgtaagaaaatgaaatattctatgcctaatactcacacgcaacatttcttgtactttgtaagtcgtttgcgagaatgcagaccacctcactaaactgtaaacggtaaagagatttttacttttggtctccgtgagtcgcatctctactaaggtttacacaggaattccacctgaagacttgtgttaaagttctacagcgcgcactgttaactgaacgtctttttcttcagcctatacgcggatccttgttttgagctctcagaatcactcagacaacattttgtaactgctgctgttgctttctacatacaccttataaagtgacatttcaaaagaaataaggtgccacagttttaaaccagaaggtggcactctgtggctccttggtagattatagctatactgggaaagct

SEQ ID NO: 22886 - DNA, 410 bp, Homo sapiens
tgaattcggcacgagcggtggcaggggccatgggagctgctaagccagacagagcacacaggagcaaaggctgcttcacccccaaaggtggaggtgcccagtgccaaccctcccaggctgccagaaaccccagtggagccaacgtaccacttgccatcctcccagggacacaaggtcaaggtcctgctcaaccggatctgccggagaagccaccaccaccctgagccccctgcccctcctgatggctctgaccccaggatcgagtccagggacctccctgaaaggcctcagtgccgcccccaccggaagacctttatgccatcattagtggttaagaagcaacgagcaaaaaacctttctgtaggctgagacctctcggtgcacctggtgaccctgggtggaggggactt

SEQ ID NO: 22887 - DNA, 461 bp, Homo sapiens
ggagcacaatttgatcgcctgcggtaattccgcacgaggaaacaacgctgactgcatgaaaattatcagtgccttctcagttcggtgtttaacgtacacccatctggaaatcaataaccataattttgtgtatgttggaacagcttaatcagagggcttgttttggaccatggagcatagcatcttgataggaagaaaagggtggaggatgcatatatcctcatttgtaacgtgtcattagaatatgaaaaaacttaagtttatagccccttaacttaaatggaggagcttcgtgttttaggtgagttacttttttgtgaaacttcgtttcccactgtaaggacaataatcctcaaattggtttgggagagttataggaaacaccctctgaagatgtgcaaggggcaggattggagctcagtgagcttgttgttaaatcttaggactaatccagtttcaga

SEQ ID NO: 22888 - DNA, 468 bp, Homo sapiens
  misc_feature (1)...(468): n = A,T,C or G
agaggcccactgaattcatgacgattgncggacgaganaaagacgaactattggaggtggtggccaatgatgcatttactgtttgcaggatagttataggtgtttaaagggtaaggcttttggtgtaaatgctggatggggtgtgtgtgtgtgtggatatagggacctccctctgtactgtgtactgtgtaatcggcattaatacctagactcatatgtatggaattataaattctcttatcctactgattggcttggatgagcacaccagctgcaggtgtgtgctgaattgcaagatggtatttttttttttaaccaagggatgtctcttgtaatactaaccgcgtgataatgggttttcagacatgatgaaaaaaaaaaacttttccaaaggaatacttaccttagaaaaattcaccttaggaaaaaaaactttgctctgcccttttatattcctttatgctgcag

SEQ ID NO: 22889 - DNA, 345 bp, Homo sapiens
  misc_feature (1)...(345): n = A,T,C or G
ggaggagtgnnnnnnnccttgaccggccgctggaattccgcacgagatcacgtccagctaatttttgtatttttagtagagaaggttttaccatgttggacagggtggtctcgaactcctggcctaaagtggtccacctagctcagcctaccaaagtgctgtgattacaggcgtgagccaccatgcccagcctctaaattctgttttctattcaaagtaaaaatgacatgtgtttgagtcatccacttgctcatttgcatatggaatattgtatgtgaatattttattacacccttaaaattaattttcaagggctataaaaaaaaaaaaaaaaaaaaaactggg

SEQ ID NO: 22890 - DNA, 409 bp, Homo sapiens
  misc_feature (1)...(409): n = A,T,C or G
nagattcccgctgttgaatgcggtacgggacgggccgccctattacaccgacccaggaggaccggggatgaaccctgtcgggaattccatggcaatggctttccaggtcccacccaactcaccccaggggagtgtggcctgcccgccccctccagcctactgcaacacgcctccgcccccgtacgaacaggtagtgaaggccaagtagtggggtgcccacgtgcaagaggagagacaggagagggcctttccctggcctttctgtcttcgttgatgttcacttccaggaacggtctcgtgggctgctaagggcagttcctctgatatcctcacagcaagcacagctctctttcaggctttccatggagtacaatatatgaactcacaaaaaaaaaaaaaaaaaacttgg

SEQ ID NO: 22891 - DNA, 474 bp, Homo sapiens
  misc_feature (1)...(474): n = A,T,C or G
ggcggggncattgaccttgattcgcgctgcaggaattcggcacgagcttcctcctactacctcttatactcatctccccaaattatttgcctcccttaaataagttttcctagaaggtaagctggtcaggcaatttgaaaaatattagatcccaagaaatctattccgtttgcattggacttctcggattccatgtgtttgcagcaggactacatcgaactctgatgtgccggattgtggcatgtctgcatgtctcatccatctattgtttttggtaactcagtttggaatttcagtgtctgtcttccctgggttgacattggaatcagcctctcctttgagcttattttaactcttgagcaacataacatagatttaatgtgaacagtttataccaaagggcagcctgtgcctgtttatggatcctctctgcctttgtacttgaagagcgcattttacatttccagtcctttc

SEQ ID NO: 22892 - DNA, 464 bp, Homo sapiens
  misc_feature (1)...(464): n = A,T,C or G
cctatgccccgcgctgtaggaattcggcacgagctgcagcgacgccccctggtcccacagataccactgctgctcccgccctttcgctcctcggccgcgcaatgggcacccgcgacgacgagtacgactacctctttaaagttgtccttattggagattctggtgttggaaagagtaatctcctgtctcgatttactcgaaatgagtttaatctggaaagcaagagcaccattggagtagagtttgcaacaagaagcatccaggttgatggaaaaacaataaaggcacagatatgggacacagcagggcaagagcgatatcgagctataacatcagcatattatcgtggagctgtaggtgccttattggtttatgacattgctaaacatctcacatatgaaaatgtagagcgatggctgaaagaactgagagatcatgctgatagtaacattgttatcatgctn

SEQ ID NO: 22893 - DNA, 474 bp, Homo sapiens
aattgaccgcctgtggaattcttgcgaggccatttataatacaaataactgatgaaggattcataatcacaaatatagagaattcctatttaaaaaaatagaaaaatagtgaagactacacaagaggaaatagggcttttaaataaatagatgttctgtagcattggtcagggaaatatgaattaggaccacaatgagattccattttatatccataagatttgcaaaggttgggtctgacagtaccagttgttagatctgtagggacttgtacaacattgtggatgtgtaaacaggcaccactgctttaaaaaacaattatcccttacagacttgaacatttgcagaccttatgatcttgcttccaactcccacctgtatgtccagcaaactcttgcatgtggccactaggaggaatgtgtaagaatgttcatagttacatatttataatagttaataactggaaaaagtgaa

SEQ ID NO: 22894 - DNA, 464 bp, Homo sapiens
atttgacccgcctgcaggaattcttttgccccgcgctgcaggaattcggcacgagcgaaggagtcgttgctcttgcactcaattgccagctgctaaagatcatcgatttaggtggctgcttaagtattactgatgtgtccttacatgcattaggaaaaaactgcccatttttgcagtgtgtcgacttttcagctactcaggtatctgacagtggtgtgattgcacttgttagtggaccttgtgcgaagaaattagaggagattcatatgggacattgtgtaaatctgactgatggggctgtcgaagctgtacttacttactgtcctcaaatacgcatattactcttccatggatgccccttgataacagatcattcccgagaagtgttggagcaattagtaagcccaaacaaactaaagcaagtgacatggactggttattgatgcttttttgaagatgatcaa

SEQ ID NO: 22895 - DNA, 516 bp, Homo sapiens
  misc_feature (1)...(516): n = A,T,C or G
cgggccggannnnaggggnnattgagcggctgtggtnttaacactctttaatgattcggagagaaaactatttaccaaaattccacatatgagggatacaatcccttgctgtcaccaattttttataatagcagagtggcctgttctaagaaagccatattttttaagatatctttcagggtaacatggaaatactataaagttggatgtcaaactttaatatgttttcagtgttctctaattttttggaatttttgtagactttacacctggaaaaaaagatttgtaaaatcaccggaacaattgtgtgctttattttataggtagtggttattagtattacatccccattttaaaaacaaaaacataataatggttacaacacgtggagttttactaacatacatattaaatcaaagtatattcttaaaagtacttgtgaagtaaaatctttcttgtgcattttcaatacttgtaaactggaaatcagaccatatttactatgaacaggaaaat

SEQ ID NO: 22896 - DNA, 486 bp, Homo sapiens
  misc_feature (1)...(486): n = A,T,C or G
aggcncaccagggnanaacccatttgacccgcgcttagacccccgctgcaggaattcggcacgagctccctcagactaatgtagaaactctaccccatgtttaataccttgcatgacatgaaccccactttctaccttcatggattggagaaaaatgagaacagatgtccccatccatgcgattgccccaccatctactaatgaaaaattgttctttttttcatctttcccctgcacttatgttactattctctgctcccagccttcatccttttctaaaaaggagcaaattctcactctaggctttatcgtgtttactttttcattacacttgacttgattttctagttttctatacaaacaccaatgggttccatctttctgggctcctgattgctcaagcacagtttggcctgatgaagaggatttcaactacacaatactatcattgtcaggactatgacctcaggcactctaaacatatgg

SEQ ID NO: 22897 - DNA, 464 bp, Homo sapiens
cctatgccccgcgctgtagtgaattcggcacgaggaaaaggggcattgagactataaagcagtagacaatccccacataccatctgtagagttggaactgcattcttttaaagttttatatgcatatattttaaggctgtagacttactttcctattttcttttccattgcttattcttgagcacaaaatgataatcaattattacatttatacatcacctttttgacttttccaagcccttttacagctcttggcattttcctcgcctaggcctgtgaggtaactgggatcgcaccttttataccagagacctgaggcagatgaaatttatttccatctaggactagaaaaacttgggtctcttaccgcgagactgagaggcagaagtcagcccgaatgcctgtcagtttcatggaggggaaacgcaaaacctgcagttcctgagtaccttctacaggcccgg

SEQ ID NO: 22898 - DNA, 477 bp, Homo sapiens
  misc_feature (1)...(477): n = A,T,C or G
naggttcgcgctgtggaattggcttcgagaatggtgcacgagcaccatctggccatggacttggccgtggccaggacttcccaaggactcctgtccccaccaagccctgctccggcacctcgaatccctggcgaccatgagtgaccagctccaagccttactgtgcccccagaccaagagctccatcccccgccctctgcagcgtttgtctagcgcccttgcagctccagagccccctgggccagcccgtgactcctctttggggcctacagatgaagctggctctgagtgtcccttccctagaaaggcctgaccctccttacccaccagaacaggggttttgatgccctcactagtgttgaagcctgttccagagagaggtgggactgcaaggagaggatggtcagccctacccacctgccctgtttgagcttcctgtttgacaatgtttgctgttgattttttgatcaataaaga

SEQ ID NO: 22899 - DNA, 470 bp, Homo sapiens
cctatgcccacccctgtatgccccgcgctgcaggattcggcacgaggaaacttggggtagatttagatgcccagacctggaggatccccagggtcttctcatggttgcagcaggaaggacacctctctgaggaagagatggccagaacatttaactgtggggttggcgctgtccttgtgggatcaaaggagcacacagagcagattctgagggatatccagcagcacaaggaagaagcctgggtgattggcagtgtggttgcacgagctgaaggttccccacgtgtgaaagtcaagaatctgattgaaagcatgcaaataaatgggtcagtgttgaagaatggcttcctgacaaatcatgtctcttttgaaaaaaaaaacgccaaagtggctgtcttaatatctggaacaggatcgaacctgcaagcacttatagacagtactcgggaaccaaatagctctgcacaaatt

SEQ ID NO: 22900 - DNA, 474 bp, Homo sapiens
  misc_feature (1)...(474): n = A,T,C or G
nagagttcgccgctgaatgaattcgctgcgagcaccagctgctcatggctctggccgggccgcacttgccagggactcctgtccccaccaagccctgctccggcacctggaatccctggcgaccatgagtcaccagctccaagccttactgtgcccccagaccaagagctccatcccccgccctctgcagcgtttgtctagcgcccttgcagctccagagccccctggcccagcccgtgactcctctttggggcctacagatgaagctggctctgagtgtcccttccctagaaaggcctgaccctccttacccaccataacaggggttttgatgccctcactagcgttgaagcctgttccagagagaggtgggactgcaaggagaggatggtcagccctacccacctgccctgtttgagcttcctgtttgacaatgtttgctggtgattttttgttcaataaagaatttggaaa

SEQ ID NO: 22901 - DNA, 461 bp, Homo sapiens
cttgcccgcctgtagggcggtcttccgagcggtcgcgtgaactgcttcctgcaggctggccatggcgcttcacgttcccaaggctccgggctttgcccagatgctcaaggagggagcgaaacacttttcaggattagaagaggctgtgtatagaaacatacaagcttgcaaggagcttgcccaaaccactcgtacagcatatggaccaaatggaatgaacaaaatggttatcaaccacttggagaagttgtttgtgacaaacgatgcagcaactattttaagagaactagaagtacagcatcctgctgcaaaaatgattgaaattggcttaatttttactgtaggtgaaggctgtatttgtagtagtactcaagaatcacctgatgttttcttattctccttaaattaagagttattttgtgtttgtattcttggctggtgttataataaacatattgtta

SEQ ID NO: 22902 - DNA, 495 bp, Homo sapiens
  misc_feature (1)...(495): n = A,T,C or G
ctttgccccgcgctgcaggaatttagcacgacattntcaagctgtgtgacctgaggcagtctgatgctcctctctgaacctgcatttcctaagctctaatgtggatgttgtaatcagtacttcttatgggctgaattgtatctcctcaaaattcatgtgttgaagtcctaacccccagtatcacagaatatggtagggtctttaaagaggtaatccaagtaaaatgaggtccttagagcaggccctgatccaataggactgtccttattagaagaggaaacttggacacagatacacacagagggagcaccgtgtgaagacacagagaggagatggccagctaccagccaagcagagagcccttactgtaaaccaaccctgccgcatcctgatctcagaattttggcttccagaactgtaaggaaacacatttctactgtttaagccacttggctgggagtacttggttatggcagcctgagcagactaaaccag

SEQ ID NO: 22903 - DNA, 481 bp, Homo sapiens
  misc_feature (1)...(481): n = A,T,C or G
tgtgcattttttatgacggtatgnagaactctgcacgagcatgaggctctganaacggtgattgactcccagacgcattaccggctgcgggaggcccaggaccgggcccgagcggaagaccttaatagccgagtctcttactggtctgttggcgagacgattgccctgttcgtggtcagcttcagtcaggtgctactgttgaaaagcttcttcacagaaaaacgacccatcagcagggcagtccactcctagccccggcatcctgctctagggcccctcatgccccaggctggagcagctctcctaggtcacagcctgctgggctgggtcgcgtagcccacggtggaggcagaacgatgctgctgtggtagccctttgcctttcatgcccatgcttgattcttgcacctcagcagcttgaggtctcagagaccagtaatcagaaggcatccgactgcatttagtgtgcagcgctganaaga

SEQ ID NO: 22904 - DNA, 485 bp, Homo sapiens
  misc_feature (1)...(485): n = A,T,C or G
gcgggtnnnaattgacattcatcagcaattcgccacgagcggtaggtaacggcgccgcgggcgcggngaagacccgggagggcagtgggtgaggaggacggttgagtggccccctcccctgcctttctctccgtagccgccgggatcctcctgaggtacctgcaggagcagaaccggccctacagctcccaggatgtgttcgggaacctacagcgggaacacggactgggcaaggcggtggtggtgaagacgctggagcagctggcgcaacaaggcaagatcaaagagaagatgtacggcacgcagaagatctattttgcggatcaggaccagcttgacatggcgagtgatgctgaccttcaagtcctatatggcaaaatcgtggccctcactgctaaggtgcagagcttgcagcagagctgccgctacatggaggctgagctcaaggaattatctagtgccctgaccacaccagagatgcagaa

SEQ ID NO: 22905 - DNA, 486 bp, Homo sapiens
  misc_feature (1)...(486): n = A,T,C or G
cattcgaccggccntcattagatcggccgtcggaagacggcacgagatttcgcagggacccatttacatggcattctcagcttagactgcgtaagatgaaatatatgtggtgaaatgttggaaccatttctctcttggtctctgtttaatgttgaaagggtgagctaataggaggcactttcaacttcactccctcacgctaccccgtccccctccagactggcagtttcaaggatgcaaattgcattgcaaaatcaaactgactcatgaagcatttgggccagagcactgtttacttccatctgtttgcagacacatttgtgcccggcgtttgggagccctttgtatcaatgttctgacaagggtccctataaccttaaactactcgaaaccggnttgggatggatatgatggggcttctgtgctattgctgggattgggagaaataaaacatgcaatttaagtggaagcgaagaaatttaaagg

SEQ ID NO: 22906 - DNA, 469 bp, Homo sapiens
agaggggatatgactgcctgacgattcggcacgagccacctcattgggtgaaagttccagggctcaatccaggaccacactcttattggccaggcaggggctcccacagagctttgagtaacttcttggttgtgcagtctgcaggcaatgttggcattgtaaattcctcccttgcagcctccttcatgtggtgaggggatcacttcagctgcctgctgtggacaaagaacatcaaattacagcatcacgagtgctattgttgcctgtggtggtctccctgtccaagcgggaccgctttgcagagaccagaggcatatcgcggcttgagctgaaaatgcatttgttgcagcttaggttgaattatttttcgtttgctctttcttctacacgcgcctgatggatagtgaacctattcatcaaaaaagtgcactgctcttctgtctattgtaccgacttaacctcttccacc

SEQ ID NO: 22907 - DNA, 473 bp, Homo sapiens
cgcggaaaaatgaaattgattcgcgctgcaggaattcggcacgagaatgcatgaggctgcctgggactgtgggaccttggcctaaagacttgaattattcttacaactctttccattagtagattttggagtgaaaagtgatctttaaacaaacgtgattgttttaagcctaaaagaagaatcttctgtgccatttaatgatttgattcccattgcaagtttattattagatataataaagcaagtcacatcagttgcttccataacctttccacatgaactaatgatcatgtaggcatgaataaattctcccatactaattctaaagtttaaaatcagcaacttgtcttaaataatgccttttaggccgggcacagtggcttacgcctgtaatcccagcactttgggaggctgaggcaggtggatcacctgaggtcaggagtttgcgaccagcctggccaacatggtgaaac

SEQ ID NO: 22908 - DNA, 470 bp, Homo sapiens
cgagggaacctgaattcgctgacgatttcggcacgagagcgcatcagtatgctctggctggaggcatctccttccccttcttctggctggctggtgcgggctcggccgtcttctgggtgctgggagccaccctggtggtcatcggctcccacgctgccttccaccagattgaggctgtggacggggaggagctgcagatggaacccgtgtgaggtgtcttctgggacctgccggcctcccgggccagctgccccacccctgcccatgcctgtcctgcacggctctgctgctcgggcccacagcgccgtcccatcacaagcccggggagggatcccgcctttgaaaataaagctgttatgggtgtcattcaggaaaaaaaaaaagatatatcttccttgacagcaaagatccagaatataagaagtttttagaaacctactgtgtggaggaagagaagaccagtgccaacc

SEQ ID NO: 22909 - DNA, 509 bp, Homo sapiens
  misc_feature (1)...(509): n = A,T,C or G
aagggtggggncctgtggctgcggaancggccgagctcctggtgtccactcagctggggacagcagcctcaccaacacagcaccaacagcttccaagatagtaacaggtaagtaggacatcaatgcccgtatttcctcgtctgctctacattgcttttgtactactacattttatttaagctttgatttatgccaggtgtcagcaaactacacccgcaagccaaaccaaacctgtcctgcagccagtttttgtcattaaagttttattggaacacagctacacccatttgttaacatattggctgtggctgcattggtgctgaaacagcacagctgggtagtcgtgaccaaagatcctgtggcccacaaagttggaaacatttactgcctggtcctttaagtttgccgacccctgacttatagttgcttgtgtgttaagacctatgtacgtttacatttttctcaacataatggcttttattccanggtgaaggtattttacaacacga

SEQ ID NO: 22910 - DNA, 477 bp, Homo sapiens
  misc_feature (1)...(477): n = A,T,C or G
aggggggnttttaattgatatgtgtaggcatgcctgagcatccacacaattccagtgggccctcggtgcctgctgtgaactgctttccctcggaatgtttccgtaacaggacattaaacctttgtttttacttccgtgagcagcatttccagttcctcctgcacctgccgtgagccgtggccctggtgggcaccgacggcccctccgcccggctgtctgtgttcacagatggtctcgtttcccatggtggtgtcggggaaatgacgaaaaatcaggtttcccggcagcacagagaacccttccacaaaagtagaagggaaagcaaatagttttactaaagaagcagcttcaaaccagaccgtgagccaccgcacccggcctcctgagttaacattttctaaagatgcctccggcgtgctatcctgaaagctgccagaggtgtcttggctgcattggtgggaataaaattcatactca

SEQ ID NO: 22911 - DNA, 468 bp, Homo sapiens
  misc_feature (1)...(468): n = A,T,C or G
attttgcctcgctgcacgaattcggcacgagctgcactcgggcaggtgcagacttgggccgcaggagggtcggtggggacccaagacccaggttcagtgccggacccacctctttcatagccattgctttgattcttgctttcagtcattcacttactcactcattcattgaccaaataacgactgaatgcagccacgtgttggtaccagggatccactgggggataagatagatgggtccctgctctcagggcgatcagtctagagtggcagcaggatttaaaaaaaaacctcaggaaactgcaggcaaggaggagagagnagttgtgagcaggagaggacctgcctggtaggcgcagagctggggatgagaggagctggggatgagaggagctggggaagggcgttaagggctccagcccaggggcccgcgtgtgcgaggcccantggagggaggctgaaagggan

SEQ ID NO: 22912 - DNA, 486 bp, Homo sapiens
  misc_feature (1)...(486): n = A,T,C or G
aggtggggnaattcgacgtctgtangacttcggcacgagctgagcacctgagcctggggctggctccccggggtccccgactcagctggtggctgtggagctgagtcccctccccgtaacctctgcaaggccagcacccaccatcactacctgcacctgctgtggtcccaccctctggaggcctgggaacctggctgcagcctgggaaggctggagaggcagacggtgggacccaccagctctctccccatcccgcttcttccctgggggccaggccctacctgtgtggtggtgggtgggctgtcaagacgtgtcatgtacatttgtatcaaaaataaagaagtgaccatgannaaaaaaaaaaaaaaaaaaaaaaaaaaaaaaaaaatcctggggggggggcccggcccccaatcccccctttggggggggggattaaaaaccccgggccggggttttaaaaggggggggaggggggagagnnng

SEQ ID NO: 22913 - DNA, 481 bp, Homo sapiens
  misc_feature (1)...(481): n = A,T,C or G
nattgaacgcttgcggaattccgccgatggcacgcgctactggtgagtgatgatatagctgtaagaagtggctatgagcaataggttcactgactttaccttagggcagtgccacagtaatctgggaacttgttagaaatacacattctcaggccccatcccagacttattgaatcacagactctgggggcagggtttaaaagcactccaagtgattctaatgcacactaaaggttgagaaccatttcttagggataagctgggaaatttttacaggtgtggaggatatttcaaatacatcttttgcctttgcactaacatgctttcatttctttcagactcttcctccattccctttaaagtcttccccatcatatcactgatctcaaaagctagatttgtcttcattatagtcgtatccctaacaccatgcattggtctggacaggagttgtcccatattcccttgcagactggtcacn

SEQ ID NO: 22914 - DNA, 533 bp, Homo sapiens
  misc_feature (1)...(533): n = A,T,C or G
cgccacaatcgtactaacaccaactggaacatataataataggggggnaagaacannaaatgacgcctcggaatcccacgagagaagagaatgtgcccgtaatctggcacaccgaaaaatgttgctattgcaacaaagtggcaaaagctaaaagtaaggatttatcttcaaacataagctgagataacgaatagaagcaaaacgattggctactagctctctctctctctctctattaggtaaatttgaaaaataaaaatgacttggcacttttaaaggtaacttcaccaaagaccgaagagccagtaaccagtagctccaacttgtctcagcatcacatcttctgtgctctttatttttgccggaccagtttgcggttaggagaatgtgccttttttgtacctttgcatataggttttataattttaattgatgggtggacacacacaaacaaaaaagcatgaaggaagaattggatcccaacagtgccacactttacatcatcactaccagggttcagtgtaaaaaaaacg

SEQ ID NO: 22915 - DNA, 446 bp, Homo sapiens
attgaattgcctccgctgcaggaattcggcacgagcctacgaccacctcttcaagttgctgctgatcggcgactcgggggtgggcaagacttgtctgatcattcgctttgcagaggacaacttcaacaacacttacatctccaccatcggaattgatttcaagatccgcactgtggatatagaggggaagaagatcaaactacaagtctgggacacggctggccacgagcggctcaggacaataactactgcctactaccgtggagccatgggcattatcctagtatacgacatcacggatgagaaatctttcgagaatattcagaactggatgaaaagcatcaaggagaatgcctcggctggggtggagcgcctcttgctggggaacaaatgtgacatggaggccaagaggaaggtgcataatgagcaggccgataagttggctc

SEQ ID NO: 22916 - DNA, 478 bp, Homo sapiens
  misc_feature (1)...(478): n = A,T,C or G
agggggnttttnaatagaactgactggcatcatgaattcggcacgagcgggctccctctacatccttaggggctcagcccgttatgacttctcccatgagatccttcgggatgaagagtccttctttggggaacgccggattccccggggccggcgcatctccgtgatctgccgctccctccctgagggcatggggccaggggagtctggacagccgcccccagcctgctgacccccagctttctacagacaccagatttgtgaataaagttggggaatggacagcctatnaaaaaaaaaaaaaaaaaaaaaaaaaaaaatcctcgggggggggccgggcccccaattccccttttgggggggggtattaaaattcccgggccggggttttaaaacggggggagggagaaaacaacnnncnccccngnaaacnnccaaccnaannaccccccataacccaaaaaaaaattgtacagct

SEQ ID NO: 22917 - DNA, 483 bp, Homo sapiens
  misc_feature (1)...(483): n = A,T,C or G
ccgcccccccccccccgccccccccccatttgacccngcccctgaattgacccccgctgcaggaattcggcacgagtggaggtgtaatagtgcgggtagtgggtttggagaagttccgaggcggcggtggcgccggtcaggacaaggatagcggaaccgggccctgggcttgtcgctcaccatgccgacagtagaggagctttaccgcaattatggcatcctggccgatgccacggagcaagtgggccagcataaagatgcctatcaagtgatattggatggtgtgaaaggtggtactaaggaaaagcgattagcagctcaatttattccgaaattctttaagcattttccagaattggctgattctgctatcaatgcacagttagacctctgtgaggatgaagatgtatctattcgacgtcaagcaattaaagaactgcctcaatttgccactggagaaaatcttcctcgagggggggcccg

SEQ ID NO: 22918 - DNA, 449 bp, Homo sapiens
ataggccttcgcctccgcgctgcaggaattcggcacgagggattctgtgtgctgtcggacccagagggtgacggcgccgctaggatgaagctcgtgagatttatttctgtatctcagttggcagcattgtcatccttattctcactgtcaccctaaccaaaaacctgggagatttttgatgaaattgagtcatgaaactgtaaccattgaattgaagaacggaacacaggtccatggaacaatcacaggtgtggatgtcagcatgaatacacatcttaaagctgtgaaaatgaccctgaagaacagagaacctgtacagctggaaacgctgagtattcgaggaaataacattcagcattttattctaccagacagtttacctctggatacactacttgtggatgttgaacctacagtgaaatctatgaaaagggaagctgttgcaggaa

SEQ ID NO: 22919 - DNA, 481 bp, Homo sapiens
  misc_feature (1)...(481): n = A,T,C or G
nttgccccccgctgcaggaattcgtcacgaggggaaagtgaaccgacttccccttcccatacccctcagggtggttccctaccagccaggcttactacttctagaagaaagcagagtgccagggagtgagattgcatccctgggcttagaagtgacggagagaagacttgtttagtattttgccatcagcacaaggaaaaccaggagagagtctgcctccaggactctgagccttctgcctcgtatgttcagaaggtggataggtcttcccactccagcatggcttgaactcttaggggtctgcagtgctccatctccattggtggccccagctcagtannnnnnnttggtacatttcctgtgtgcaatcagtaccttgaaggcagaacattctgaataaagttggaaaaagaacaaaaaaaaaaaaaaaaaaaacctggggggggggccgggccccatttccccttatggggagtcgatt

SEQ ID NO: 22920 - DNA, 476 bp, Homo sapiens
  misc_feature (1)...(476): n = A,T,C or G
cgcggnngttttaaactgattgcgtggcattcgcacgagaagatctatgaaggccaagtggaggtgactggtgatgaatacaatgtggaaagcattgatggtcagccaggtgccttcacctgctatttggatgcaggccttgccagaactaccactggcaataaagtttttggtgccctgaagggagctgtggatggaggcttgtctatccctcacagtaccaaacgattccctggttatgattctgaaagctcatgctgctatacgagagaatccagtctatgaaaagaagcccaagaaagaagttaaaaagaagaggtggaaccgtcccaaaatgtcccttgctcagaagaaggatcgggtagctcaaaagaaggcaagcttcctcagagctcangagcgggctgctgagagctaaacccagcaattttctatgattttttcagatatagataataaacttatgaacagcaaaa

SEQ ID NO: 22921 - DNA, 458 bp, Homo sapiens
attggaccctctcccccgcgctgcaggaattcggcacgagcagtaccagcaaagaccgcccagtgtcccagcctagccttgtggggagcaaagaggagccgccgccggcgagaagtggcagcggcggcggcagcgccaaggagccacaggaggaacggagccagcagcaggatgatatcgaagagctggagaccaaggccgtgggaatgtctaacgatggccgctttctcaagtttgacatcgaaatcggcagaggctcctttaagacggtctacaaaggtctggacactgaaaccaccgtggaagtcgcctggtgtgaactgcaggatcgaaaattaacaaagtctgagaggcagagatttaaagaagaagctgaaatgttaaaaggtcttcagcatcccaatattgttagattttatgattcctgggaatccacagtaaaaggaaagaagtgcatt

SEQ ID NO: 22922 - DNA, 508 bp, Homo sapiens
  misc_feature (1)...(508): n = A,T,C or G
aggcgncnnnttttganccctagcatcgctctgcaggaattcggcacgagctgagcaccagcacttccagcgcttcacttaacggcataaagcaaaacaggaccttggcacaccgtcagctcgaactcaacactggcagccaccgtctcacccctgcggaggagcgctcccgtctcccacaggtgccttaccgcgttccctcccgctgctttcatttttctgacctaataattacgggaaatggaaagtctgggccagcatcaataaaatgacaccaaaaataagtagatgaaatcaaatgaatatgagaacatcttgttcttcaatatcacgggtttttgttaatgtttcataagtaattctccccacttgatttttcttctataaaatcccatagaacaatgtttatgctatagccatttaatatatgtacaaattgtaaagaatatgtataaatgttttacacgaatggtagagcatgtagaagccaacatatanatanatggtt

SEQ ID NO: 22923 - DNA, 467 bp, Homo sapiens
aatagatcgcgctgtagatttcgctgcgagattcggcacgagatcacttactagttatgctcccgaatatctgtgcacacatttctcagttttatcactacaatgatgccgaaaagtttacatgagtctttggctgatgagccagccagaggcagaattgagatttgaacccacggcatcacccacaagatcgagtttgaaaaaatgttatgctgtttgtgctgcatctcaccatggcgctctacatatcatgacccctccctggcatcttaagtaactttttcataagcattaaaaagtcttaatcctcacaagcagttttgataaaacacgttccatagctggagtatttgaacgtgacctgtgatctgtgacctgtgcgcttgcaggtgattcttaaactgtgcattccagctctgtcttttgacggtcaggacagtgtctctcagaactaaagcattttgtcc

SEQ ID NO: 22924 - DNA, 486 bp, Homo sapiens
  misc_feature (1)...(486): n = A,T,C or G
attgacccgcgctgcangaannctttgcccccgctgcaagaattcggcacgagtggagccagagctgcggcctgactgacgccttttgatgctcacgggaaatttctgcccaggatctcagccccaggctggttgtttctacaaatctctctcaaatgtattattttggtgacaaaaatgaaggagctttgtaaatttttttaaaattatgaatcatatcaagtagttgtttacatttcttgaaaaaataggaactcgggcagcagaatcagattggcagaatctttagactacacaggcaataatcaagtctgctgttttggcctttcgtagtaaaagtggttgtannnnnaaatatctgtttggtcttgcttcttgtattgcatttttttcaataaacaacaaccccnnnaaaaanacaaaaaaaaaaaaaaaaatccggggggggggccgggcccccaattcccccttaagggggggataaaa

SEQ ID NO: 22925 - DNA, 481 bp, Homo sapiens
  misc_feature (1)...(481): n = A,T,C or G
tggggcgnnttttnaattggattgcgtggctgtggaattcggcacgagctggtttcctctcccatggacacagtcacagaggctgggatggccatagcaatggcgcttacaggcggtattggcttcatccaccacaactgtacacctgaattccaggccaatgaagttcggaaagtgaagaaatatgaacagggattcatcacagaccctgtggtcctcagccccaaggatcgcgtgcgggatgtttttgaggccaaggcccggcatggtttctgcggtatcccaatcacagacacaggccggatggggagccgcttggtgggcatcatctcctccagagaacgtcctcagcccaggtggaaggtggcgtccatagcctccattcgtatgagaagcggcttttctgaaaagggatccagcacacctcctcggtttttttttcaataaaagtttagaaagaaaaaaaaaaaaaaaaaacctc

SEQ ID NO: 22926 - DNA, 464 bp, Homo sapiens
  misc_feature (1)...(464): n = A,T,C or G
ncctgaccgcctgcggatcgcctgagcaccctcataagtggaggttttccacgtccaaatgaggtcaagatgccgaaatcccagatctgacttcacacttcccttttctagaaccttttgtaaaagttggtggcagcagaggcagccccaggccgggctgcatctctctgtgtctgttgtgccttgcccggcgcctcacggatggcaaagctctcctcacccatgggactgtagtgcaattaaacccgcgtctaggtgatgcttttaaagttgtagcttcgtgctttgtacagttttctttctggttttaatttttagttgtgctttgagtcagtgcaataaactagactttttccaaacctgaaaaaaaaaaaaaaaaaaaaaaaaaaaaccctggggggggggccgggcccccaatcccccctatagggagccgtttaaaaattcacgggccgcggtttaac

SEQ ID NO: 22927 - DNA, 475 bp, Homo sapiens
  misc_feature (1)...(475): n = A,T,C or G
gaactgatnccnctngnnnnnncactgatctgccctgcggnttaccacttcccgtcctgcgggaagtggcgggcacgatcgcaaggtagcgcagaagcttctcaatggccagcgccagctgcagccccggcggcgcactcgcctcacctgagcctgggaggaaaattcttccaaggatgatctcccactcagagctgaggaagcttttctactcagcagatgctgtgtgttttgatgttgacagcacggtcatcagtgaagaaggaatcggatgctttcattggatttggaggaaatgtgatcaggcaacaagtcaaggataacgccaaatggtatatcactgattttgtagagctgctgggagaaccggaagaataacatccattgtcatacagctccaaacaacttcagatgaatttttacaagttacacagattgatactgtttgcttacaattgcctattacaacttgcta

SEQ ID NO: 22928 - DNA, 520 bp, Homo sapiens
  misc_feature (1)...(520): n = A,T,C or G
aggggnnaagggggnaattgancggctgnattgcaccggctgtangaattcggcacgagagcgggagcggccacaatgaagtttaatccctttgtgacttccgaccgaagcaagaatcgcaaaaggcatttcaatgcaccttcccacattcgaaggaagattatgtcttcccctctttccaaagagctgagacagaagtacaacgtgcgatccatgcccatccgaaaggatgatgaagttcaggttgtacgtggacactataaaggtcagcaaattggcaaagtagtccacgtttacaggaagaaatatgttatctacattgaacggatgcagcgggaaaaggctaatggcacaactgtgcacgtaggcattcaccccagcaaggtggttatcactaggctaaaactggactaagaccgcacaaagatcctcgaacggaaagccaaatctcgccaagtaggaaaggaaaagggcaaatacgaggaagagaccattgtgaagatgcacgactacagtgatc

SEQ ID NO: 22929 - DNA, 549 bp, Homo sapiens
  misc_feature (1)...(549): n = A,T,C or G
aagagattacancggctgtcgaattcggcacgaggacttgttcttcctgccaaatgatcagagaggaacattccatttatttgtattggatttcctctggagggcatgtacccacactaaataccaactgctcttcctcagctgtagtccccaacatcagacttggcacgtggtggacactaacacacaggcactcaatgaatgagtgaaggaaataaaagtcaccccgttggtgagaggtgctatccctgagtctcagtgcaggaccagtggatgaaaggcaaggtaaagaggcccaagataggctggcttcccccgttcaaggtatagtctgcctttaagggagttttagaaccaacatgcaagacattgaaagaaatcttgcaagagccattattgacttagatccaaaacagcctctctcatgtctaanaaggcacagaattttgcagatctgaggaagagggatgcattacctttttgcttcttttcaattgcttagtggttctaatcatacttaatccacactaatgtgcgcaattataatan

SEQ ID NO: 22930 - DNA, 497 bp, Homo sapiens
  misc_feature (1)...(497): n = A,T,C or G
cgcgggccnnnnnaattgacgactgaggaccatcgccgagaacatcttcgagcatcggcagctccggaggccggggtaactggcagcaggtaggaaactatgtgaaagaatctcctgatgtcataatttccgggtgtcaccggaacatttgatcatcattcctttggcaattccagccttctgtggaaaggccagtagaaagcattgatttattcacctctacaggaatcagactcagcctcttttggttttcagtgaagtatgccttttcaatttggaacccagccaaggaggtttccagtggaaggaggagattcttcaattgagctggaacctgggctgagctccagtgctgcctgtaatgggaaggagatgtcaccaaccaggcaactccggaggtgccctggaagtcattgcctgacaataactgatgttcccgtcactgtttatgcaacaacgagaaagccacctgcacaaagcagcaaggaaatgcatct

SEQ ID NO: 22931 - DNA, 452 bp, Homo sapiens
  misc_feature (1)...(452): n = A,T,C or G
ntgtgccttggctgcacgaattcggcacgagccctggtcactgcatgatccgctctggtcaaacccttccaggccagccagagtggggatggtctgtgacctgctgggaaggcaggctgatggggcacacccttggcctctcgtccacgaggggagaaacctaaaccctgtttcacaatctgtgcggaagtagcttgcctcacttctgcttaggaaagcggctgttgctccataactctaaccagcacagggctgaggcctgcagtgcacacctgcagggaggcccttcccaaggtgtggtgactgtgccttactgtacatgctcggaggcctggccatataggaggggtgggatgctgaaatcaccccccatcttaagtaattactttctggagtaatcaggtggaaatccatagacaaatgaaaaaaaaaaaaaaaaaactcgagggggg

SEQ ID NO: 22932 - DNA, 466 bp, Homo sapiens
  misc_feature (1)...(466): n = A,T,C or G
gaatgaccccttcggannccgttgatcactcttacaagacatcgccgccttcaaaatccaagctgtctacaaagggtacaaggtcagaaaagccttccgagacaggaaaaatctcctcatgaagcatgaacagttgagaaaagatgctgctgccaaaaagcgagaggaagaaaacaaacgaaaagaggcagaacagcaaaaaggaaggcggagcccagattcctgcagaccccaggcccttccctgtctgcctagcacccaggatgtgcccagcaggcagagccgggcccccagcaagcagcctcctgctggcaacgtggcccaaggccctgagccaagagacagcagaggatctccaggagggtctctaggcggagccctccagaaggagcagcatgtttcctcagatttgcagggaacaaactccagaaggccaaatgaaacagccagagaacattctaaaggc

SEQ ID NO: 22933 - DNA, 478 bp, Homo sapiens
  misc_feature (1)...(478): n = A,T,C or G
aggggccaattgacaatagagccgcgctgcaggaanttcgctcgagccaaaatctcacaagcctatcaagtttgagctttctggctgcaccagcatgaagacataccgagctaaattctgtggagtatgtaccgacggccgatgctgcaccccccacaaaaccagcaccctgccggcggagttcaagtgccctgacggcgatgttatgaagaagaacatgatgtttatcaagacctgcgcctgccattacaactgtcccggagacaaagacatctttgaatcgctggactacctgaagatgtacggagacatggcatgaacccagagagtgacagacattaactcattatactggaacttgaactgattcacatctcatttttccgtggaaatgatttcagtagcacaagttatttaaatctgcttttctaactgggggaaaagattcccacccaattcaaaacattgtgccatgtcn
